(19) United States
(12) Patent Application Publication
(10) Pub. No.: US 2022/0040281 A1
(43) Pub. Date: Feb. 10, 2022

(54) RNA FOR MALARIA VACCINES

(71) Applicant: CureVac AG, Tübingen (DE)

(72) Inventors: Kim Ellen SCHWENDT, Tübingen (DE); Benjamin PETSCH, Tübingen (DE); Nicole ROTH, Tübingen (DE)

(73) Assignee: CureVac AG, Tübingen (DE)

(21) Appl. No.: 17/416,731

(22) PCT Filed: Dec. 20, 2019
(86) PCT No.: PCT/EP2019/086777

§ 371 Date: Jun. 21, 2021

(30) Foreign Application Priority Data
Dec. 21, 2018 (EP) PCT/EP2018/086797

(51) Int. Cl. A61K 39/015; A61P 33/06

(52) U.S. Cl. CPC A61K 39/015; A61K 2039/53; A61P 33/06

(57) ABSTRACT

The present invention is directed to a coding RNA for a Malaria vaccine. The coding RNA comprises at least one heterologous untranslated region (UTR), preferably a 3′-UTR and/or a 5′-UTR, and a coding region encoding at least one antigenic peptide or protein derived from a Malaria parasite, in particular at least one antigenic protein derived from circumsporozoite protein (CSP) of a Malaria parasite (e.g. Plasmodium falciparum). The present invention is also directed to compositions and vaccines comprising said coding RNA in association with a polymeric carrier, a polycationic protein or peptide, or a lipid nanoparticle (LNP). Further, the invention concerns a kit, particularly a kit of parts comprising the coding RNA, or the composition, or the vaccine. The invention is also directed to a method of treating or preventing Malaria, and the first and second medical uses of the coding RNA, the composition, the vaccine, and the kit.

### INTRODUCTION

[0001] The present invention is directed to a coding RNA for a Malaria vaccine. The coding RNA comprises at least one heterologous untranslated region (UTR), preferably a 3′-UTR and/or a 5′-UTR, and a coding region encoding at least one antigenic peptide or protein derived from a Malaria parasite, in particular at least one antigenic protein derived from circumsporozoite protein (CSP) of a Malaria parasite (e.g. Plasmodium falciparum). The present invention is also directed to compositions and vaccines comprising said coding RNA in association with a polymeric carrier, a polycationic protein or peptide, or a lipid nanoparticle (LNP). Further, the invention concerns a kit, particularly a kit of parts comprising the coding RNA, or the composition, or the vaccine. The invention is also directed to a method of treating or preventing Malaria, and the first and second medical uses of the coding RNA, the composition, the vaccine, and the kit.

[0002] Malaria infections cause about 200 million clinical cases, and about 500,000 to 600,000 deaths annually.

[0003] Malaria is a mosquito-borne infectious disease caused by protozoan parasites from the genus Plasmodium. Anopheles mosquitoes transmit malaria, and they must have been infected through a previous blood meal taken from an infected person. When a mosquito bites an infected person, a small amount of blood is taken in and contains malaria parasites. There are four main types of malaria parasites which infect humans: Plasmodium falciparum, Plasmodium vivax, Plasmodium malariae, and Plasmodium ovale. Of those, Falciparum Malaria is the deadliest type.

[0004] Many malaria parasites are now immune to the most common drugs used to treat the disease. According to the Malaria Eradication Research Agenda initiative, malaria eradication will be only achievable through effective vaccination. However, the most advanced malaria vaccine candidate, RTS,S, has presented modest results in extend and duration of protection during phase 3 clinical trials (RTS,S Clinical Trials Partnership, 2015). RTS,S contains a formulated virus-like particle that encompasses the central and carboxyl-terminal domains of the circumsporozoite protein (CSP) fused to a hepatitis B virus surface antigen. RTS,S protects approximately 30% to 50% of children from clinical disease for a limited duration. Multiple studies have shown that RTS,S induces protective antibody and CD4+ T-cell responses, but only negligible CD8+ T cell responses. However, as CD8+ T cells are a major protective immune mechanism against intracellular infections caused by Malaria parasites, an effective Malaria vaccine should induce strong CD8+ T cells responses. RTS,S was further developed with the aim to enhance vaccine efficacy by generating a more immunogenic CSP-based particle vaccine (this next-generation RTS,S like vaccine is called R21) (Collins, Katharine A., et al. “Enhancing protective immunity to malaria with a highly immunogenic virus-like particle vaccine.” Scientific reports 7 (2017): 46621). The major improvement is that in contrast to RTS,S, R21 particles are formed from a single CSP-hepatitis B surface antigen (HBsAg) fusion protein, and this leads to a vaccine composed of a much higher proportion of CSP than in RTS,S. Preclinical studies required adjuvants (Abisco-100 and Matrix-M) or TRAP-based viral vectors to induce effective and protective immune responses, especially for the induction of CSP-specific CD8+ T-cells. Adjuvants often induce tissue reactions or other unwanted side effects. Phase I assessment of first-in-human administration of the novel malaria anti-sporozoite vaccine candidate, R21 in matrix-M adjuvant, in UK and Burkinabe volunteers shows comparable immunogenicity to RTS,S/AS01B, even when administered at a five-fold lower 10 μg dose in UK and African populations.

[0005] Accordingly, using a more full-length CSP as an antigen might induce broader humoral and cellular antibody responses compared to the truncated RTS,S vaccine. Moreover, a more full-length CSP may provide additional T cell epitopes, leading to increased cellular immunity, which could potentially enhance protection against Malaria. Furthermore antibodies against a portion of the N-terminal region including R1 showed reduced risk of disease (Bongfen, Silayuv E., et al. “The N-terminal domain of Plasmodium falciparum circumsporozoite protein represents a target of protective immunity.” Vaccine 27.2 (2009): 328-335). However, the manufacturing of a Malaria vaccine that is based on a more full-length CSP is not feasible with the current state-of-the-art vaccine technologies (e.g., protein-based vaccines).

[0006] Reported problems in manufacturing of full-length protein CSP may due to unique properties of the P. falciparum parasite, which include an extremely A/T-rich genome with many lysine and arginine repeats, and proteins that contain multiple disulfide bonds. Expression of malaria proteins in bacterial systems, such as E. coli, often results in insoluble expression that requires purification from inclusion bodies and steps to refold the protein. Noe et al developed a full-length, recombinant CSP (rCSP)-based vaccine candidate against P. falciparum malaria suitable for current Good Manufacturing Practice (cGMP) production, utilizing a novel high-throughput Pseudomonas expression platform (Noe, Amy R., et al. “A full-length Plasmodium falciparum recombinant circumsporozoite protein expressed by Pseudomonas fluorescens platform as a malaria vaccine candidate.” PloS one 9.9 (2014): e107764). The rCSP, when formulated with various adjuvants, induced antigen-specific antibody responses), as well as CD4+ T-cell responses and conferred protection in mice Furthermore, heterologous prime/boost regimens with adjuvanted rCSP and an adenovirus type 35-vectored CSP (Ad35CS) showed modest improvements in eliciting CSP-specific T-cell responses and anti-malarial protection. Adjuvants often induce tissue reactions or other unwanted side effects.

[0007] Summarizing the above, the provision of an effective Malaria vaccine remains an unmet medical need of major importance for global health.

[0008] An effective Malaria vaccine should not only induces strong humoral immune responses, but also induce CD8+ T-cell responses. Therefore, an effective Malaria vaccine should ideally provide a more full-length CSP to cover also the T-cell epitopes in the N-terminal region for a strong induction of a CD8+ T-cell response. Such a Malaria vaccine should ideally be manufactured in an efficient, reliable, and scalable manner to ensure global supply. Moreover, the new vaccine should allow cost-effective production. Furthermore, the malaria vaccine should be well tolerated without possible side-effects and preferably without the use of adjuvants.

[0009] The objects outlined above are solved by the claimed subject matter, that is, inter alia, by the provision of coding RNA for a Malaria vaccine.

[0010] Notably, an RNA-based Malaria vaccine has some superior advantages over e.g. DNA-based vaccines. As generally known in the art, transfection of DNA may lead to serious problems. E.g. application of DNA bears the risk of integration into the host genome which can influence expression of the host genes, or can trigger expression of an oncogene via e.g. destruction of a tumor suppressor gene. In addition, a DNA vaccine would have to cross several membrane barriers to reach the nucleus, whereas an RNA-based vaccine does not have to cross the barrier to the nucleus and is directly translated in the cytoplasm.

[0011] Advantageously, RNA can be manufactured in a large-scale fashion, and enables the production a Malaria vaccine based on RNA encoding, for example, a more full-length CSP.

[0012] Further, it would be desirable that such an RNA-based composition or vaccine has at least some of the following advantageous features:
[0013] Improved translation of coding RNA constructs at the site of injection (e.g. muscle);
[0014] Very efficient induction of antigen-specific immune responses against the encoded CSP protein at a very low dosages and dosing regimen;
[0015] Suitability for maternal immunization;
[0016] Suitability for vaccination of infants and/or newborns;
[0017] Suitability for intramuscular administration;
[0018] Induction of specific and functional humoral immune response against Malaria (e.g. CSP of a malaria parasite);
[0019] Induction of broad, functional cellular T-cell responses against Malaria (e.g. CSP of a malaria parasite);
[0020] Induction specific B-cell memory against Malaria (e.g. CSP of a malaria parasite);
[0021] Fast onset of immune protection against Malaria (e.g. CSP of a malaria parasite);
[0022] Longevity of the induced immune responses against Malaria (e.g. CSP of a malaria parasite);
[0023] No excessive induction of systemic cytokine or chemokine response after application of the Malaria vaccine; which could lead to an undesired high reactogenicity upon vaccination
[0024] Well tolerability, no side-effects, non toxicity of the Malaria vaccine;
[0025] No enhancement of a Malaria infection due to vaccination;
[0026] Advantageous stability characteristics of the RNA-based Malaria vaccine;
[0027] Speed, adaptability, simplicity and scalability of Malaria vaccine production.
[0028] Advantageous vaccination regimen that only requires one or two vaccination for sufficient protection.

### Definitions

[0029] For the sake of clarity and readability the following definitions are provided. Any technical feature mentioned for these definitions may be read on each and every embodiment of the invention. Additional definitions and explanations may be specifically provided in the context of these embodiments.

[0030] Percentages in the context of numbers should be understood as relative to the total number of the respective items. In other cases, and unless the context dictates otherwise, percentages should be understood as percentages by weight (wt.-%).

[0031] Adaptive immune response: The term “adaptive immune response” as used herein will be recognized and understood by the person of ordinary skill in the art, and is e.g. intended to refer to an antigen-specific response of the immune system (the adaptive immune system). Antigen specificity allows for the generation of responses that are tailored to specific pathogens or pathogen-infected cells. The ability to mount these tailored responses is usually maintained in the body by “memory cells” (B-cells). In the context of the invention, the antigen is provided by the RNA coding sequence encoding at least one antigenic peptide or protein (e.g. CSP).

[0032] Antigen: The term “antigen” as used herein will be recognized and understood by the person of ordinary skill in the art, and is e.g. intended to refer to a substance which may be recognized by the immune system, preferably by the adaptive immune system, and is capable of triggering an antigen-specific immune response, e.g. by formation of antibodies and/or antigen-specific T cells as part of an adaptive immune response. Typically, an antigen may be or may comprise a peptide or protein which may be presented by the MHC to T-cells. Also fragments, variants and derivatives of peptides or proteins derived from e.g. CSP comprising at least one epitope are understood as antigens in the context of the invention. In the context of the present invention, an antigen may be the product of translation of a provided coding RNA as specified herein.

[0033] Antigenic peptide or protein: The term “antigenic peptide or protein” or “immunogenic peptide or protein” will be recognized and understood by the person of ordinary skill in the art, and is e.g. intended to refer to a peptide, protein (or polyprotein) derived from a (antigenic or immunogenic) protein/polyprotein which stimulates the body's adaptive immune system to provide an adaptive immune response. Therefore an antigenic/immunogenic peptide or protein comprises at least one epitope (as defined herein) or antigen (as defined herein) of the protein it is derived from (e.g., CSP protein of a malaria parasite).

[0034] Cationic: Unless a different meaning is clear from the specific context, the term “cationic” means that the respective structure bears a positive charge, either permanently or not permanently but in response to certain conditions such as pH. Thus, the term “cationic” covers both “permanently cationic” and “cationisable”.

[0035] Cationisable: The term “cationisable” as used herein means that a compound, or group or atom, is positively charged at a lower pH and uncharged at a higher pH of its environment. Also in non-aqueous environments where no pH value can be determined, a cationisable compound, group or atom is positively charged at a high hydrogen ion concentration and uncharged at a low concentration or activity of hydrogen ions. It depends on the individual properties of the cationisable or polycationisable compound, in particular the pKa of the respective cationisable group or atom, at which pH or hydrogen ion concentration it is charged or uncharged. In diluted aqueous environments, the fraction of cationisable compounds, groups or atoms bearing a positive charge may be estimated using the so-called Henderson-Hasselbalch equation which is well-known to a person skilled in the art. E.g., in some embodiments, if a compound or moiety is cationisable, it is preferred that it is positively charged at a pH value of about 1 to 9, preferably 4 to 9, 5 to 8 or even 6 to 8, more preferably of a pH value of or below 9, of or below 8, of or below 7, most preferably at physiological pH values, e.g. about 7.3 to 7.4, i.e. under physiological conditions, particularly under physiological salt conditions of the cell in vivo. In other embodiments, it is preferred that the cationisable compound or moiety is predominantly neutral at physiological pH values, e.g. about 7.0-7.4, but becomes positively charged at lower pH values. In some embodiments, the preferred range of pKa for the cationisable compound or moiety is about 5 to about 7.

[0036] Coding sequence/coding region: The terms “coding sequence” or “coding region” and the corresponding abbreviation “cds” as used herein will be recognized and understood by the person of ordinary skill in the art, and are e.g. intended to refer to a sequence of several nucleotide triplets, which may be translated into a peptide or protein. A coding sequence in the context of the present invention is preferably an RNA sequence, consisting of a number of nucleotides that may be divided by three, which starts with a start codon and which preferably terminates with a stop codon.

[0037] Compound: As used herein, a “compound” means a chemical substance, which is a material consisting of molecules having essentially the same chemical structure and properties. For a small molecular compound, the molecules are typically identical with respect to their atomic composition and structural configuration. For a macromolecular or polymeric compound, the molecules of a compound are highly similar but not all of them are necessarily identical. E.g., a segment of a polymer that is designated to consist of 50 monomeric units may also contain individual molecules with e.g. 48 or 53 monomeric units.

[0038] Derived from: The term “derived from” as used throughout the present specification in the context of a nucleic acid, i.e. for a nucleic acid “derived from” (another) nucleic acid, means that the nucleic acid, which is derived from (another) nucleic acid, shares e.g. at least 60%, 70%, 80%, 81%, 82%, 83%, 84%, 85%, 86%, 87%, 88%, 89%, 90%, 91%, 92%, 93%, 94%, 95%, 96%, 97%, 98%, or 99% sequence identity with the nucleic acid from which it is derived. The skilled person is aware that sequence identity is typically calculated for the same types of nucleic acids, i.e. for DNA sequences or for RNA sequences. Thus, it is understood, if a DNA is “derived from” an RNA or if an RNA is “derived from” a DNA, in a first step the RNA sequence is converted into the corresponding DNA sequence (in particular by replacing the uracils (U) by thymidines (T) throughout the sequence) or, vice versa, the DNA sequence is converted into the corresponding RNA sequence (in particular by replacing the T by U throughout the sequence). Thereafter, the sequence identity of the DNA sequences or the sequence identity of the RNA sequences is determined. Preferably, a nucleic acid “derived from” a nucleic acid also refers to nucleic acid, which is modified in comparison to the nucleic acid from which it is derived, e.g. in order to increase RNA stability even further and/or to prolong and/or increase protein production. In the context of amino acid sequences (e.g. antigenic peptides or proteins) the term “derived from” means that the amino acid sequence, which is derived from (another) amino acid sequence, shares e.g. at least 60%, 70%, 75%, 80%, 81%, 82%, 83%, 84%, 85%, 86%, 87%, 88%, 89%, 90%, 91%, 92%, 93%, 94%, 95%, 96%, 97%, 98%, or 99% sequence identity with the amino acid sequence from which it is derived.

[0039] Thus, it is understood, if a antigenic peptides or protein is “derived from” CSP, the antigenic peptides or protein that is “derived from” said CSP may represent a variant or fragment of said respective CSP protein. Moreover, the antigenic peptides or protein that is “derived from” said CSP may differ in the amino acid sequence, sharing a certain percentage of identity as defined above.

[0040] Epitope: The term “epitope” (also called “antigen determinant” in the art) as used herein will be recognized and understood by the person of ordinary skill in the art, and is e.g. intended to refer to T cell epitopes and B cell epitopes. T cell epitopes or parts of the antigenic peptides or proteins may comprise fragments preferably having a length of about 6 to about 20 or even more amino acids, e.g. fragments as processed and presented by MHC class I molecules, preferably having a length of about 8 to about 10 amino acids, e.g. 8, 9, or 10, (or even 11, or 12 amino acids), or fragments as processed and presented by MHC class II molecules, preferably having a length of about 13 to about 20 or even more amino acids, wherein these fragments may be selected from any part of the amino acid sequence. These fragments are typically recognized by T cells in form of a complex consisting of the peptide fragment and an MHC molecule, i.e. the fragments are typically not recognized in their native form. B cell epitopes are typically fragments located on the outer surface of (native) protein or peptide antigens, preferably having 5 to 15 amino acids, more preferably having 5 to 12 amino acids, even more preferably having 6 to 9 amino acids, which may be recognized by antibodies, i.e. in their native form. Such epitopes of proteins or peptides may furthermore be selected from any of the herein mentioned variants of such proteins or peptides. In this context antigenic determinants can be conformational or discontinuous epitopes which are composed of segments of the proteins or peptides as defined herein that are discontinuous in the amino acid sequence of the proteins or peptides as defined herein but are brought together in the three-dimensional structure or continuous or linear epitopes which are composed of a single polypeptide chain. In the context of the present invention, an epitope may be the product of translation of a provided coding RNA as specified herein.

[0041] Fragment: The term “fragment” as used throughout the present specification in the context of a nucleic acid sequence (e.g. RNA sequence) or an amino acid sequence may typically be a shorter portion of a full-length sequence of e.g. a nucleic acid sequence or an amino acid sequence. Accordingly, a fragment, typically, consists of a sequence that is identical to the corresponding stretch within the full-length sequence. A preferred fragment of a sequence in the context of the present invention, consists of a continuous stretch of entities, such as nucleotides or amino acids corresponding to a continuous stretch of entities in the molecule the fragment is derived from, which represents at least 10%, 20%, 30%, 40%, 50%, 60%, 70%, 80%, 90%, 95% of the total (i.e. full-length) molecule from which the fragment is derived (e.g. CSP of a malaria parasite). The term “fragment” as used throughout the present specification in the context of proteins or peptides may, typically, comprise a sequence of a protein or peptide as defined herein, which is, with regard to its amino acid sequence, N-terminally and/or C-terminally truncated compared to the amino acid sequence of the original protein. Such truncation may thus occur either on the amino acid level or correspondingly on the nucleic acid level. A sequence identity with respect to such a fragment as defined herein may therefore preferably refer to the entire protein or peptide as defined herein or to the entire (coding) nucleic acid molecule of such a protein or peptide. In the context of antigens such fragment may have a length of about 6 to about 20 or even more amino acids, e.g. fragments as processed and presented by MHC class I molecules, preferably having a length of about 6 to about 12 amino acids, e.g. 6, 7, 8, 9, 10, 11, 12 amino acids, or fragments as processed and presented by MHC class II molecules, preferably having a length of about 13 or more amino acids, e.g. 11, 12, 13, 14, 15, 16, 17, 18, 19, 20 or even more amino acids, wherein these fragments may be selected from any part of the amino acid sequence. These fragments are typically recognized by T-cells in form of a complex consisting of the peptide fragment and an MHC molecule. Fragments of proteins or peptides may comprise at least one epitope of those proteins or peptides.

[0042] Heterologous: The terms “heterologous” or “heterologous sequence” as used throughout the present specification in the context of a nucleic acid sequence or an amino acid sequence refers to a sequence (e.g. DNA, RNA, amino acid) will be recognized and understood by the person of ordinary skill in the art, and is intended to refer to a sequence that is derived from another gene, from another allele, from another species. Two sequences are typically understood to be “heterologous” if they are not derivable from the same gene or in the same allele. I.e., although heterologous sequences may be derivable from the same organism, they naturally (in nature) do not occur in the same nucleic acid molecule, such as e.g. in the same RNA or protein.

[0043] Humoral immune response: The terms “humoral immunity” or “humoral immune response” will be recognized and understood by the person of ordinary skill in the art, and are e.g. intended to refer to B-cell mediated antibody production and optionally to accessory processes accompanying antibody production. A humoral immune response may be typically characterized, e.g. by Th2 activation and cytokine production, germinal center formation and isotype switching, affinity maturation and memory cell generation. Humoral immunity may also refer to the effector functions of antibodies, which include pathogen and toxin neutralization, classical complement activation, and opsonin promotion of phagocytosis and pathogen elimination.

[0044] Identity (of a sequence): The term “identity” as used throughout the present specification in the context of a nucleic acid sequence or an amino acid sequence will be recognized and understood by the person of ordinary skill in the art, and is e.g. intended to refer to the percentage to which two sequences are identical. To determine the percentage to which two sequences are identical, e.g. nucleic acid sequences or aa sequences as defined herein, preferably the aa sequences encoded by the nucleic acid sequence as defined herein or the aa sequences themselves, the sequences can be aligned in order to be subsequently compared to one another. Therefore, e.g. a position of a first sequence may be compared with the corresponding position of the second sequence. If a position in the first sequence is occupied by the same residue as is the case at a position in the second sequence, the two sequences are identical at this position. If this is not the case, the sequences differ at this position. If insertions occur in the second sequence in comparison to the first sequence, gaps can be inserted into the first sequence to allow a further alignment. If deletions occur in the second sequence in comparison to the first sequence, gaps can be inserted into the second sequence to allow a further alignment. The percentage to which two sequences are identical is then a function of the number of identical positions divided by the total number of positions including those positions which are only occupied in one sequence. The percentage to which two sequences are identical can be determined using an algorithm, e.g. an algorithm integrated in the BLAST program.

[0045] Immunogen, immunogenic: The terms “immunogen” or “immunogenic” will be recognized and understood by the person of ordinary skill in the art, and are e.g. intended to refer to a compound that is able to stimulate/induce an immune response. Preferably, an immunogen is a peptide, polypeptide, or protein. An immunogen in the sense of the present invention is the product of translation of a provided RNA, comprising at least one coding sequence encoding at least one antigenic peptide, protein derived from CSP as defined herein. Typically, an immunogen elicits an adaptive immune response.

[0046] Immune response: The term “immune response” will be recognized and understood by the person of ordinary skill in the art, and is e.g. intended to refer to a specific reaction of the adaptive immune system to a particular antigen (so called specific or adaptive immune response) or an unspecific reaction of the innate immune system (so called unspecific or innate immune response), or a combination thereof.

[0047] Immune system: The term “immune system” will be recognized and understood by the person of ordinary skill in the art, and is e.g. intended to refer to a system of the organism that may protect the organisms from infection. If a pathogen succeeds in passing a physical barrier of an organism and enters this organism, the innate immune system provides an immediate, but non-specific response. If pathogens evade this innate response, vertebrates possess a second layer of protection, the adaptive immune system. Here, the immune system adapts its response during an infection to improve its recognition of the pathogen. This improved response is then retained after the pathogen has been eliminated, in the form of an immunological memory, and allows the adaptive immune system to mount faster and stronger attacks each time this pathogen is encountered. According to this, the immune system comprises the innate and the adaptive immune system. Each of these two parts typically contains so called humoral and cellular components.

[0048] Innate immune system: The term “innate immune system” (also known as non-specific or unspecific immune system) will be recognized and understood by the person of ordinary skill in the art, and is e.g. intended to refer to a system typically comprising the cells and mechanisms that defend the host from infection by other organisms in a non-specific manner. This means that the cells of the innate system may recognize and respond to pathogens in a generic way, but unlike the adaptive immune system, it does not confer long-lasting or protective immunity to the host. The innate immune system may be, e.g. activated by ligands of Toll-like receptors (TLRs) or other auxiliary substances such as lipopolysaccharides, TNF-alpha, CD40 ligand, or cytokines, monokines, lymphokines, interleukins or chemokines, IL-1 to IL-33, IFN-alpha, IFN-beta, IFN-gamma, GM-CSF, G-CSF, M-CSF, LT-beta, TNF-alpha, growth factors, and hGH, a ligand of human Toll-like receptor (e.g., TLR1 to TLR10), a ligand of murine Toll-like receptor, (e.g., TLR1 to TLR13), a ligand of a NOD-like receptor, a ligand of a RIG-I like receptor, an immunostimulatory nucleic acid, an immunostimulatory RNA (isRNA), a CpG-DNA, an antibacterial agent, or an anti-viral agent.

[0049] Lipidoid compound: A lipidoid compound, also simply referred to as lipidoid, is a lipid-like compound, i.e. an amphiphilic compound with lipid-like physical properties. In the context of the present invention the term lipid is considered to encompass lipidoid compounds.

[0050] Monovalent vaccine, monovalent composition: The terms “monovalent vaccine”, “monovalent composition” “univalent vaccine” or “univalent composition” will be recognized and understood by the person of ordinary skill in the art, and are e.g. intended to refer to a composition or a vaccine comprising only one antigen from a pathogen (e.g., CSP of a Malaria parasite). Accordingly, said vaccine or composition comprises only one RNA species encoding a single antigen of a single organism. The term “monovalent vaccine” includes the immunization against a single valence. In the context of the invention, a monovalent Malaria vaccine or composition would comprise a coding RNA encoding one single antigenic peptide or protein derived from one specific Malaria parasite (e.g. CSP of a Malaria parasite).

[0051] Nucleic acid: The terms “nucleic acid” or “nucleic acid molecule” will be recognized and understood by the person of ordinary skill in the art, and are for example intended to refer to a molecule comprising, preferably consisting of nucleic acid components. The term nucleic acid molecule preferably refers to DNA or RNA molecules. It is preferably used synonymous with the term polynucleotide. Preferably, a nucleic acid or a nucleic acid molecule is a polymer comprising or consisting of nucleotide monomers, which are covalently linked to each other by phosphodiester-bonds of a sugar/phosphate-backbone. The term “nucleic acid molecule” also encompasses modified nucleic acid molecules, such as base-modified, sugar-modified or backbone-modified DNA or RNA molecules as defined herein.

[0052] Nucleic acid sequence/RNA sequence/amino acid sequence: The terms “nucleic acid sequence”, “RNA sequence” or “amino acid sequence” will be recognized and understood by the person of ordinary skill in the art, and e.g. refer to particular and individual order of the succession of its nucleotides or amino acids respectively.

[0053] Permanently cationic: The term “permanently cationic” as used herein will be recognized and understood by the person of ordinary skill in the art, and means, e.g., that the respective compound, or group or atom, is positively charged at any pH value or hydrogen ion activity of its environment. Typically, the positive charge results from the presence of a quaternary nitrogen atom. Where a compound carries a plurality of such positive charges, it may be referred to as permanently polycationic, which is a subcategory of permanently cationic.

[0054] Pharmaceutically effective amount: The terms “pharmaceutically effective amount” or “effective amount” will be recognized and understood by the person of ordinary skill in the art, and are e.g. intended to refer to an amount of a compound (e.g. the RNA of the invention) that is sufficient to induce a pharmaceutical effect, such as, in the context of the invention, an immune response against a Malaria antigen.

[0055] Polyvalent/multivalent vaccine, polyvalent/multivalent composition: The terms “polyvalent vaccine”, “polyvalent composition” “multivalent vaccine” or “multivalent composition” will be recognized and understood by the person of ordinary skill in the art, and are e.g. intended to refer to a composition or a vaccine comprising antigens from more than one strain of a Malaria parasite, or comprising different antigens of the same Malaria parasite, or any combination thereof. The terms describe that said vaccine or composition has more than one valence. In the context of the invention, a polyvalent Malaria vaccine would comprise RNA encoding antigenic peptides or proteins derived from several different Malaria parasite species or comprising RNA encoding different antigens from the same Malaria parasite species, or a combination thereof. In preferred embodiment, a polyvalent Malaria vaccine or composition comprises more than one, preferably 2, 3, 4 or even more different coding RNA species each encoding at least one peptide or protein of Malaria (e.g. CSP of Plasmodium falciparum 3D7, and CSP of Plasmodium falciparum NF54, and CSP of Plasmodium falciparum GB4). Methods to produce polyvalent RNA vaccines are disclosed in published patent application WO2017/1090134A1.

[0056] Stabilized RNA: The term “stabilized RNA” refer to an RNA molecule that is modified such, that it is more stable to disintegration or degradation, e.g., by environmental factors or enzymatic digest, such as by exo- or endonuclease degradation, than the RNA molecule without the modification. Preferably, a stabilized RNA in the context of the present invention is stabilized in a cell, such as a prokaryotic or eukaryotic cell, preferably in a mammalian cell, such as a human cell. The stabilization effect may also be exerted outside of cells, e.g. in a buffer solution etc., for example, in a manufacturing process for a pharmaceutical composition comprising the stabilized nucleic acid molecule.

[0057] T-cell responses: The terms “cellular immunity” or “cellular immune response” or “cellular T-cell responses” as used herein will be recognized and understood by the person of ordinary skill in the art, and are for example intended to refer to the activation of macrophages, natural killer cells (NK), antigen-specific cytotoxic T-lymphocytes, and the release of various cytokines in response to an antigen. In more general terms, cellular immunity is not based on antibodies, but on the activation of cells of the immune system. Typically, a cellular immune response may be characterized e.g. by activating antigen-specific cytotoxic T-lymphocytes that are able to induce apoptosis in cells, e.g. specific immune cells like dendritic cells or other cells, displaying epitopes of foreign antigens on their surface. In the context of the invention, the antigen is provided by the RNA encoding at least one antigenic peptide or protein derived from CSP. Suitably, the coding RNA, the composition, the vaccine, advantageously elicit cellular T-cell responses against the encoded Malaria antigens.

[0058] Variant (of a sequence): The term “variant” as used throughout the present specification in the context of a nucleic acid sequence will be recognized and understood by the person of ordinary skill in the art, and is e.g. intended to refer to a variant of a nucleic acid sequence derived from another nucleic acid sequence. E.g., a variant of a nucleic acid sequence may exhibit one or more nucleotide deletions, insertions, additions and/or substitutions compared to the nucleic acid sequence from which the variant is derived. A variant of a nucleic acid sequence may at least 50%, 60%, 70%, 80%, 90%, or 95% identical to the nucleic acid sequence the variant is derived from. The variant is a functional variant in the sense that the variant has retained at least 50%, 60%, 70%, 80%, 90%, or 95% or more of the function of the sequence where it is derived from. A “variant” of a nucleic acid sequence may have at least 70%, 75%, 80%, 85%, 90%, 95%, 98% or 99% nucleotide identity over a stretch of at least 10, 20, 30, 50, 75 or 100 nucleotide of such nucleic acid sequence.

[0059] The term “variant” as used throughout the present specification in the context of proteins or peptides is e.g. intended to refer to a proteins or peptide variant having an amino acid sequence which differs from the original sequence in one or more mutation(s)/substitution(s), such as one or more substituted, inserted and/or deleted amino acid(s). Preferably, these fragments and/or variants have the same, or a comparable specific antigenic property (immunogenic variants, antigenic variants). “Variants” of proteins or peptides as defined herein may comprise conservative amino acid substitution(s) compared to their native, i.e. non-mutated physiological, sequence. Those amino acid sequences as well as their encoding nucleotide sequences in particular fall under the term variants as defined herein. Substitutions in which amino acids, which originate from the same class, are exchanged for one another are called conservative substitutions. In particular, these are amino acids having aliphatic side chains, positively or negatively charged side chains, aromatic groups in the side chains or amino acids, the side chains of which can enter into hydrogen bridges, e.g. side chains which have a hydroxyl function. This means that e.g. an amino acid having a polar side chain is replaced by another amino acid having a likewise polar side chain, or, e.g., an amino acid characterized by a hydrophobic side chain is substituted by another amino acid having a likewise hydrophobic side chain (e.g. serine (threonine) by threonine (serine) or leucine (isoleucine) by isoleucine (leucine)). Insertions and substitutions are possible, in particular, at those sequence positions which cause no modification to the three-dimensional structure or do not affect the binding region. Modifications to a three-dimensional structure by insertion(s) or deletion(s) can easily be determined e.g. using CD spectra (circular dichroism spectra). A “variant” of a protein or peptide may have at least 70%, 75%, 80%, 85%, 90%, 95%, 98% or 99% amino acid identity over a stretch of at least 10, 20, 30, 50, 75 or 100 amino acids of such protein or peptide. Preferably, a variant of a protein comprises a functional variant of the protein, which means, in the context of the invention, that the variant exerts essentially the same, or at least 40%, 50%, 60%, 70%, 80%, 90% of the immunogenicity as the protein it is derived from.

[0060] 5′-terminal oligopyrimidine tract (TOP), TOP-UTR: The term “5′-terminal oligopyrimidine tract (TOP)” has to be understood as a stretch of pyrimidine nucleotides located in the 5′-terminal region of a nucleic acid molecule, such as the 5′-terminal region of certain RNA molecules or the 5′-terminal region of a functional entity, e.g. the transcribed region, of certain genes. The sequence starts with a cytidine, which usually corresponds to the transcriptional start site, and is followed by a stretch of usually about 3 to 30 pyrimidine nucleotides. For example, the TOP may comprise 3-30 or even more nucleotides. The pyrimidine stretch and thus the 5′-TOP ends one nucleotide 5′ to the first purine nucleotide located downstream of the TOP. Messenger RNA that contains a 5′-terminal oligopyrimidine tract is often referred to as TOP mRNA. Accordingly, genes that provide such messenger RNAs are referred to as TOP genes. The term “TOP motif” or “5′-TOP motif” has to be understood as a nucleic acid sequence which corresponds to a 5′-TOP as defined above. Thus, a TOP motif in the context of the present invention is preferably a stretch of pyrimidine nucleotides having a length of 3-30 nucleotides. Preferably, the TOP-motif consists of at least 3 pyrimidine nucleotides, preferably at least 4 pyrimidine nucleotides, preferably at least 5 pyrimidine nucleotides, more preferably at least 6 nucleotides, more preferably at least 7 nucleotides, most preferably at least 8 pyrimidine nucleotides, wherein the stretch of pyrimidine nucleotides preferably starts at its 5′-end with a cytosine nucleotide. In TOP genes and TOP mRNAs, the TOP-motif preferably starts at its 5′-end with the transcriptional start site and ends one nucleotide 5′ to the first purine residue in said gene or mRNA. A TOP motif in the sense of the present invention is preferably located at the 5′-end of a sequence which represents a 5′-UTR or at the 5′-end of a sequence which codes for a 5′-UTR. Thus, preferably, a stretch of 3 or more pyrimidine nucleotides is called “TOP motif” in the sense of the present invention if this stretch is located at the 5′-end of a respective sequence, such as the RNA, the 5′-UTR element of the RNA, or the RNA sequence which is derived from the 5′-UTR of a TOP gene as described herein. In other words, a stretch of 3 or more pyrimidine nucleotides, which is not located at the 5′-end of a 5′-UTR or a 5′-UTR element but anywhere within a 5′-UTR or a 5′-UTR element, is preferably not referred to as “TOP motif”. In some embodiments, the nucleic acid sequence of the 5′-UTR element, which is derived from a 5′-UTR of a TOP gene, terminates at its 3′-end with a nucleotide located at position 1, 2, 3, 4, 5, 6, 7, 8, 9 or 10 upstream of the start codon (e.g. A(U/T)G) of the gene or RNA it is derived from. Thus, the 5′-UTR element does not comprise any part of the protein coding sequence. Thus, preferably, the only protein coding part of the at least one nucleic acid sequence, particularly of the RNA sequence, is provided by the coding sequence.

### Short Description of the Invention

[0061] The present invention is based on the inventor's surprising finding that at least one peptide or protein derived from CSP of a Malaria parasite encoded by the RNA of the invention can efficiently be expressed in a mammalian cell. Even more unexpected, the inventors showed that the coding RNA of the invention can induce specific functional immune responses in e.g. mice (see e.g. Examples 2 and 3). Through different optimizations in CSP antigen design, the immune responses could be further improved. Heterologous elements like e.g. heterologous transmembrane domains, secretory signal peptides, T helper epitopes or antigen clustering domains resulted in improved immune responses (see e.g. Examples 7, 8, and 9). Furthermore, optimization in mRNA design (improved UTR combinations, use of cap 1 analogous, etc) could effectively improve the immune responses; mainly T-cell based immune responses (see Examples 11, 12 and 13. Advantageously, said coding RNA of the invention induces very efficient antigen-specific immune responses against the encoded CSP (humoral and cellular responses). Further, the coding RNA of the invention comprised in lipid nanoparticles (LNPs) very efficiently induces antigen-specific immune responses against CSP at a very low dosages and dosing regimen (see e.g. Example 2, 3, 6-13). Accordingly, the coding RNA, and the composition/vaccine comprising said coding RNA of the invention are suitable for eliciting an immune response against CSP of a Malaria parasite in a mammalian subject. The coding RNA and the composition/vaccine comprising said coding RNA is therefore suitable for use as a vaccine, e.g. as a human vaccine.

[0062] In a first aspect, the present invention provides a coding RNA, preferably a coding RNA for a vaccine, comprising at least one 5′ untranslated region (UTR) and/or at least one 3′ untranslated region (UTR), and at least one coding sequence operably linked to said 3′-UTR and/or 5′-UTR encoding at least one antigenic protein derived from CSP of a malaria parasite, or an immunogenic fragment or immunogenic variant thereof.

[0063] In a second aspect, the present invention provides a composition, preferably an immunogenic composition, comprising the coding RNA of the first aspect. Suitably, the composition may comprise the coding RNA of first aspect complexed with, encapsulated in, or associated with one or more lipids, thereby forming lipid nanoparticles.

[0064] In a third aspect, the present invention provides a Malaria vaccine wherein the vaccine comprises the coding RNA of the first aspect or the composition of the second aspect.

[0065] In a fourth aspect, the present invention provides a kit or kit of parts, wherein said kit or kit of parts comprises the coding RNA of the first aspect, and/or the composition of the second aspect, and/or the vaccine of the third aspect.

[0066] The invention further concerns a method of treating or preventing Malaria in a subject, first and second medical uses of the coding RNA, compositions, and vaccines. Further, the invention is directed to a kit, particularly to a kit of parts, comprising the coding RNA, compositions, and vaccines. Also provided are methods of manufacturing the coding RNA, the composition or the vaccine.

### DETAILED DESCRIPTION OF THE INVENTION

[0067] The present application is filed together with a sequence listing in electronic format, which is part of the description of the present application (WIPO standard ST.25). The information contained in the sequence listing is incorporated herein by reference in its entirety. Where reference is made herein to a “SEQ ID NO”, the corresponding nucleic acid sequence or amino acid (aa) sequence in the sequence listing having the respective identifier is referred to. For many sequences, the sequence listing also provides additional detailed information, e.g. regarding certain structural features, sequence optimizations, GenBank identifiers, or additional detailed information regarding its coding capacity. In particular, such information is provided under numeric identifier <223> in the WIPO standard ST.25 sequence listing. Accordingly, information provided under said numeric identifier <223> is explicitly included herein in its entirety and has to be understood as integral part of the description of the underlying invention.

### Coding RNA for Vaccination:

[0068] In a first aspect, the invention relates to a coding RNA, preferably a coding RNA for a vaccine, comprising
[0069] a) at least one heterologous 5′ untranslated region (5′-UTR) and/or at least one heterologous 3′ untranslated region (3′-UTR); and
[0070] b) at least one coding sequence operably linked to said 3′-UTR and/or 5′-UTR encoding at least one antigenic protein, preferably derived from circumsporozoite protein (CSP) of a Malaria parasite, or an immunogenic fragment or immunogenic variant thereof.

[0071] The terms “coding RNA” as used herein will be recognized and understood by the person of ordinary skill in the art, and are e.g. intended to refer to an RNA comprising a coding sequence (“cds”) comprising several nucleotide triplets, wherein said cds may be translated into a peptide or protein.

[0072] The term “coding RNA for a vaccine” as used herein has to be understood as a coding RNA having certain advantageous features that makes the RNA suitable for in vivo administration to a subject, e.g. a human. Moreover, a “coding RNA for a vaccine” is preferably expressed, that is translated into protein, when administered to a subject, e.g. a human. In addition, the “coding RNA for a vaccine” preferably induces a specific immune response against the encoded protein after administration to a subject, e.g. a human.

[0073] Preferably, intramuscular or intradermal administration of said “coding RNA for a vaccine” results in expression of the encoded CSP antigen in a subject.

[0074] The term “immunogenic fragment” or “immunogenic variant” has to be understood as a fragment/variant of the corresponding antigen (e.g. CSP) that is capable of raising an immune response in a subject.

[0075] In general, the RNA of the invention may be composed of a protein-coding region (also referred to as coding sequence “cds”, or “ORF”), and 5′- and/or 3′-untranslated regions (UTRs). The 3′-UTR is variable in sequence and size; it spans between the stop codon and the poly(A) tail. Importantly, the 3′-UTR sequence harbors several regulatory motifs that determine RNA turnover, stability and localization, and thus governs many aspects of post-transcriptional regulation. In medical application of RNA (e.g. immunotherapy applications, vaccination) the regulation of RNA translation into protein is of paramount importance to therapeutic safety and efficacy. The present inventors surprisingly discovered that certain RNA constructs enable the rapid and transient expression of high amounts of CSP antigenic peptides or proteins. Further, said RNA molecules induce, when administered to a subject, a balanced immune response, comprising both cellular and humoral immunity. Accordingly, the coding RNA provided herein is particularly useful and suitable for various applications in vivo, including the vaccination against Malaria parasites, and may, accordingly, be a suitable component of a vaccine for treating and/or preventing Malaria.

### Malaria Parasites:

[0076] As used herein, the term “Malaria parasite” refers to any protozoan parasite capable of causing Malaria in a subject.

[0077] Typically, Malaria is caused by parasitic protozoan species of the genus Plasmodium (NCBI Taxonomy ID: 5820), or the subgenus Plasmodium (NCBI Taxonomy ID: 418103)). Accordingly, Plasmodium species have to be understood, and will be recognized as “Malaria parasites” by the person of skill in the art. The term “Plasmodium” refers to any species in the Plasmodium genus or subgenus, and is not limited to a particular species, sub-species, strain, variant, or isolate, etc. Accordingly, the term “Plasmodium” may refer to a Plasmodium species, a Plasmodium sub-species, a Plasmodium strain, a Plasmodium variant, a Plasmodium isolate of any origin. Preferred is a “Plasmodium” that may cause a disease in humans or animals, e.g. at least mild symptoms associated with Malaria.

[0078] In preferred embodiments, the at least one antigenic protein of the invention may be derived from any one of the Malaria parasites selected from Plasmodium falciparum (Pf), Plasmodium knowlesi (Pk), Plasmodium ovale (Po), Plasmodium simiovale (Ps), and Plasmodium vivax (Pv). In preferred embodiments, the Malaria parasite is Plasmodium falciparum (Pf), Plasmodium malariae (Pm). Plasmodium ovale curtisi (Poc), Plasmodium ovale wallikeri (Pow), Plasmodium berghei (Pb).

[0079] According to various embodiments, the coding sequence of the RNA of the first aspect comprises or consists of a nucleic acid sequence encoding an antigenic protein derived from any one of the Malaria parasites provided in List 1 below. Therein, for each of the suitable Malaria parasites, in particular, for each of the suitable Plasmodium species (e.g. Plasmodium falciparum (Pf), Plasmodium knowlesi (Pk), Plasmodium ovale (Po), Plasmodium simiovale (Ps), and Plasmodium vivax (Pv)), the respective NCBI Taxonomy ID (“NCBI-ID”) is indicated.

List 1: Malaria Parasites/Plasmodium Species and Subspecies with Respective NCBI Taxonomy IDs:

[0080] Species: Plasmodium falciparum (Pf) (malaria parasite P. falciparum) (5833); Subspecies: Pf 303.1 (1245013); Pf 309.1 (1245014), Pf 311 (57265), Pf 318.1 (1245015), Pf 326.1 (1245016), Pf 327.1 (1245017), Pf 365.1 (1245018), Pf 366.1 (1245019), Pf 377.1 (1245020), Pf 383.1 (1245021), Pf 397.1 (1245022), Pf 398.1 (1245023), Pf 3D7 (36329), Pf 58.1 (1245012), Pf 7G8 (57266), Pf 803_H2 (1226433), Pf 87_239 (685969), Pf B1E4_6273_2 clone2 (1226423), Pf CAMP/Malaysia (5835), Pf CDC/Honduras (5836), Pf Cp803 (1226435), Pf D10 (478861), Pf D6 (478860), Pf Dd2 (57267), Pf FC27/Papua New Guinea (5837), Pf FcB1/Columbia (186763), Pf FCBR/Columbia (33631), Pf FCC-2/Hainan (478862), Pf FCH-5 (1036724), Pf FCH/4 (132416), Pf FCM17/Senegal (5845), Pf FCR-3/Gambia (5838), Pf Fid3/India (70152), Pf GB4 (5833), Pf HB3 (137071), Pf IGH-CR14 (580059), Pf IMR143 (57268), Pf WELLCOME (5848), Pf K1 (5839), Pf KF1916 (57269), Pf LES (5840), Pf Mad20/Papua New Guinea (5841), Pf Mad71/Papua New Guinea (70154), Pf MaliPS096_E11 (1036727), Pf ML-14 (685970), Pf MLW.2745 (1226410), Pf MLW.2749 (1226408), Pf MLW.2786 (1226411), Pf MLW.2788 (1226413), Pf MLW.2861 (1226420), Pf MLW.2927 (1226417), Pf MLW.2928 (1226415), Pf MLW.2929 (1226421), Pf MLW.2941 (1226418), Pf MLW.2953 (1226419), Pf MLW.2955 (1226412), Pf MLW.2965 (1226414), Pf MLW.2970 (1226409), Pf MLW.2979 (1226422), Pf MLW.2998 (1226416), Pf NF135/5.C10 (1036726), Pf NF54 (5843), Pf NF7/Ghana (5842), Pf Nig32/Nigeria (70150), Pf P27.02 (871297), Pf P51.02 (871296), Pf Palo Alto/Uganda (57270), Pf RAJ116 (580058), Pf RO-33 (5834), Pf Santa Lucia (478859), Pf Senegal_V34.04 (478863), Pf SenP05.02 (871286), Pf SenP08.04 (871278), Pf SenP09.04 (871279), Pf SenP11.02 (871276), Pf SenP19.04 (871277), Pf SenP26.04 (871275), Pf SenP31.01 (871284), Pf SenP60.02 (871285), Pf SenT002.09 (1107494), Pf SenT015.09.c (1226430), Pf SenT016.10.d (1226436), Pf SenT021.09 (1107495), Pf SenT021.10.d (1226437), Pf SenT029.09 (1107496), Pf SenT032.09 (1107493), Pf SenT033.09 (1107497), Pf SenT042.09.c (1226427), Pf SenT046.09.c (1226434), Pf SenT047.09.c (1226425), Pf SenT049.10.d (1226438), Pf SenT061.10.d (1226439), Pf SenT065.10.d (1226440), Pf SenT069.10.d (1226441), Pf SenT076.10.d (1226442), Pf SenT077.09.c (1226426), Pf SenT079.09.c (1226424), Pf SenT079.10.d (1226443), Pf SenT086.09 (1107498), Pf SenT090.09 (1107499), Pf SenT092.09.c (1226431), Pf SenT104.10.d (1226444), Pf SenT106.09.d (1226445), Pf SenT108.10.d (1226446), Pf SenT109.09.c (1226429), Pf SenT111.09 (1107500), Pf SenT111.10.d (1226447), Pf SenT112.09 (1107501), Pf SenT112.10.d (1226448), Pf SenT116.09.d (1226449), Pf SenT117.09.d (1226450), Pf SenT118.10.d (1226451), Pf SenT121.09.d (1226452), Pf SenT123.09 (1107502), Pf SenT125.10.d (1226453), Pf SenT126.10.d (1226454), Pf SenT127.09 (1107503), Pf SenT128.09 (1107504), Pf SenT131.10.d (1226455), Pf SenT131.11.d (1226456), Pf SenT135.09 (1107505), Pf SenT135.10.d (1226457), Pf SenT137.09 (1107506), Pf SenT139.09.d (1226458), Pf SenT142.09 (1107507), Pf SenT145.10.d (1226459), Pf SenT147.09.d (1226460), Pf SenT148.09 (1107508), Pf SenT149.09 (1107509), Pf SenT151.09 (1107510), Pf SenT153.09.c (1226428), Pf SenT155.10.d (1226461), Pf SenT161.09.d (1226462), Pf SenT161.10.d (1226726), Pf SenT162.10.d (1226463), Pf SenT165.09 (1107511), Pf SenT166.09 (1107512), Pf SenT183.10.d (1226464), Pf SenT184.10.d (1226465), Pf SenT250.08.c (1226432), Pf SenT26.04 (871281), Pf SenT28.04 (871280), Pf SenV34.04 (871283), Pf SenV35.04 (871282), Pf T4/Thailand (5846), Pf TAK 9 (57276), Pf Tanzania (2000708) (1036725), Pf Th10.04_D10 (871287), Pf Th105.07 (871292), Pf Th113.09 (871299), Pf Th130.09 (871298), Pf Th15.04 (871294), Pf Th230.08 (871290), Pf Th231.08 (871289), Pf Th232.08 (871288), Pf Th74.08 (871293), Pf THTN/Thailand (70151), Pf UGK 396.1 (1050250), Pf UGK 408.2 (1050252), Pf UGK 432.4 (1050253), Pf UGK 443.2 (1050251), Pf UGK 659.1 (1050254), Pf UGK 661.1 (1050255), Pf UGK 674.4 (1050256), Pf UGK 707.3 (1050257), Pf UGK 730.2 (1050258), Pf UGK 815.1 (1050259), Pf UGT5.1 (1237627), Pf V1 (5847), Pf V42.05 (871295), Pf V92.05 (871291), Pf Vietnam Oak-Knoll (FVO) (1036723), Pf VS/1 (478864), Pf W2mef (5833); Species: Plasmodium knowlesi (Pk) (5850); Subspecies: Pk H (5851), Pk Nuri (5852); Species: Plasmodium malariae (Pm) (5858); Species: P. cf. malariae (196059); Species: Plasmodium cf. malariae type2 (1583084); Species: Plasmodium ovale (Po) (malaria parasite P. ovale) (36330); Subspecies: P. ovale curtisi (Poc) (864141),Po Nigeria 1/CDC (573885),P. ovale wallikeri (Pow) (864142); Species: Plasmodium cf. ovale (943109); Species: Plasmodium simiovale (35085); Species: P. vivax (Pv) (malaria parasite P. vivax) (5855); Subspecies: Pv Brazil 1(1033975), Pv India VII (1077284), Pv IQ07 (882766), Pv Mauritania 1 (1035515), Pv North Korean (1035514), Pv Sal-1 (126793), Pv Belem (31273); Species: P. cf. vivax (943110); Species: P. cf. vivax EKgor1179_SGA2.9 (1318701); Species: P. cf. vivax EKgor514_SGA2.6 (1318700); Species: P. cf. vivax FP-2013 (1329927); Species: P. vivax-like sp. (27990)

[0081] In preferred embodiments, the antigenic protein of the first aspect may be derived from Plasmodium falciparum (NCBI-ID 5833, or respective subspecies according to List 1), in particular, from Plasmodium falciparum 3D7 (NCBI-ID 36329), or Pf NF54 (5843).

### Suitable Malaria Antigens:

[0082] The invention relates to a coding RNA, wherein said coding RNA comprises a coding sequence encoding at least one antigenic protein derived from a Malaria parasite as defined above, or an immunogenic fragment or immunogenic variant of an antigenic protein derived from a Malaria parasite.

[0083] Suitably, the at least one antigenic protein may be derived from circumsporozoite protein (CSP), liver stage antigen 1 (LSA1), merozoite surface protein-1 (MSP1), apical membrane antigen 1 (AMA1), thrombospondin related adhesive protein (TRAP), VAR2CSA, Gamete surface antigen (Pfs230), Ookinete surface protein (Pfs28), Sexual stage antigen (pfs25), transmission-blocking target protein (Pfs45/48), reticulocyte-binding protein homologue 5 (RH5), RH5 interacting protein (Ripr), erythrocyte membrane protein 1 (EMP1), sporozoite surface protein 2 (SSP2), or combinations, or immunogenic fragments, or immunogenic variants of any of these.

[0084] Suitable antigenic proteins, e.g. AMA1, EMP1, MSP1, SSP2, or TRAP, may be derived from proteins according to Table 3 of WO2017/070624, the content of Table 3 of WO2017/070624, in particular, the NCBI accession NOs disclosed in Table 3 of WO2017/070624 herein included by reference.

[0085] In preferred embodiments, the at least one antigenic protein may be derived from circumsporozoite protein (CSP) of a Malaria parasite, or an immunogenic fragment or immunogenic variant thereof.

[0086] CSP is a multifunctional protein, forming a dense coat on the surface of the sporozoite of a Malaria parasite. Its overall structure is highly conserved in all Plasmodium species, consisting of a central repeat region flanked by an NH2-terminal domain containing a conserved proteolytic cleavage site, and a C-terminal cell-adhesion domain, the thrombospondin repeat (TSR) domain. It has been proposed in the art that N- and C-terminal regions of CSP have a functional role during egress from oocysts, invasion of salivary glands, exit from the inoculation site, and localization to and invasion of hepatocytes. After their release from oocysts, the N-terminus of CSP mediates adhesion to salivary glands and, in the mammalian host, the region masks the TSR, maintaining the sporozoite in a migratory state. In the liver, a regulated proteolytic cleavage event leads to the removal of the N-terminal third of the protein exposing the TSR, an event that may be critical for efficient invasion of hepatocytes by sporozoites.

[0087] As CSP is expressed on the surface of the sporozoite of a Malaria parasite, CSP may represent a main target for antibody mediated immunity. Accordingly, CSP (or fragments, variants thereof) is used as antigen in the context of the invention.

[0088] Suitable CSP amino acid sequences may be derived from any CSP provided in List 2 (NCBI Protein Accession numbers).

### List 2: NCBI Protein Accession Numbers of Suitable Malaria Antigens:

[0089] XP_001351122.1, BAM84949.1, BAD73956.1, AAA29551.1, AAA29554.1, BAM84958.1, BAN59428.1, ACO49408.1, ACO49420.1, ACO49498.1, ACO49505.1, AAA29576.1, AAA29545.1, AAN87576.1, AAN87620.1, BAN59401.1, BAM85068.1, BAM84914.1, BAM84865.1, ACO49446.1, ACO49503.1, ACO49504.1, ADF48458.1, AAA29543.1, AAA29571.1, AAN87622.1, BAN59407.1, BAM85010.1, BAN59429.1, BAM85085.1, BAM84895.1, ACO49368.1, ACO49378.1, ACO49457.1, ACO49467.1, ACO49541.1, ACO49544.1, AAN87575.1, BAM84946.1, BAM84947.1, BAN59412.1, BAN59422.1, BAN59424.1, BAM84878.1, ACO49384.1, ACO49490.1, ACO49538.1, ACO49540.1, AAA29562.1, BAM84952.1, BAN59425.1, BAM85007.1, BAM85089.1, BAM85102.1, AAA29555.1, BAM84798.1, ADF48375.1, ACO49542.1, ACO49545.1, AAA29574.1, AAW59565.1, AAA29552.1, BAD73952.1, BAM84944.1, BAM84957.1, BAM85032.1, BAM85062.1, BAM85093.1, BAM84896.1, BAM84907.1, BAM84756.1, BAM84758.1, ACO49480.1, ACO49517.1, AAN87591.1, AAN87590.1, BAM84820.1, AAA29550.1, BAM84917.1, BAM84954.1, BAM85044.1, BAM85045.1, BAM84987.1, BAM84993.1, BAM84805.1, BAM84750.1, BAM85260.1, BAM85298.1, AAN87614.1, ACO49328.1, ACO49339.1, ACO49493.1, AGR53780.1, AAN87605.1, AAN87598.1, AAN87611.1, AAN87589.1, BAM85131.1, BAM85145.1, AAN87606.1, BAM84921.1, BAM84929.1, BAM84935.1, BAM85103.1, BAM84801.1, BAM84804.1, BAM84806.1, BAM84753.1, BAM84757.1, BAM84759.1, BAM84763.1, BAM84764.1, BAM84768.1, BAM84770.1, BAM84775.1, BAM84778.1, BAM84779.1, BAM84781.1, BAM84789.1, BAM84792.1, BAM84797.1, AAN87602.1, AAN87587.1, ACO49330.1, AGR53782.1, AAN87609.1, AAN87613.1, BAM85120.1, BAM84840.1, BAM84799.1, BAM84800.1, BAM84765.1, BAM84771.1, BAM84773.1, BAM84783.1, BAM84785.1, BAM84790.1, ACO49332.1, BAM84829.1, BAM84956.1, BAM84795.1, AAN87588.1, ADF48384.1, BAM84833.1, BAM84831.1, AAN87582.1, BAM84782.1, AAN87583.1, AAN87593.1, AAN87594.1, AAN87592.1, AGR53781.1, BAM84819.1, BAM84821.1, BAM84808.1, BAM84814.1, BAM84838.1, BAM84839.1, BAM84802.1, BAM84803.1, AAN87579.1, AAN87578.1, AAN87607.1, AAN87608.1, AAN87595.1, AAN87618.1, AAN87585.1, AAN87577.1, BAM84815.1, BAM84816.1, BAM84812.1, BAM84834.1, BAM84835.1, BAM84822.1, BAM84823.1, BAM84824.1, BAM84825.1, BAM84826.1, BAM84832.1, BAD73957.1, BAM84752.1, BAM84762.1, BAM84774.1, BAM84777.1, BAM84786.1, BAM84796.1, AAN87599.1, AAN87581.1, BAM84810.1, BAM84811.1, BAM84836.1, BAM84827.1, BAM84748.1, BAM84749.1, BAM84751.1, BAM84761.1, BAM84776.1, BAM84794.1, AAN87580.1, AAN87610.1, AAN87619.1, AAN87617.1, AAN87616.1, AAN87600.1, AAN87597.1, AAN87596.1, AAN87615.1, AHF20622.1, XP_002259002.1, AFD97213.1, AFG25469.1, AFD97209.1, AFD97205.1, AFD97206.1, AFD97212.1, AFD97214.1, AFD97210.1, AFD97211.1, AHF20628.1, ADX31295.1, AHF20648.1, AHF20646.1, AFD97208.1, ADN94497.1, ADN94542.1, AHF20661.1, AHF20662.1, AHF20644.1, AFG25481.1, AHF20657.1, ADN94498.1, AHF20637.1, AFD97227.1, AHF20638.1, AHF20666.1, AHF20664.1, AHF20669.1, ADN94489.1, AHF20658.1, AHF20656.1, AFD97232.1, AFD97225.1, ADN94493.1, AHF20651.1, AHF20655.1, ADN94538.1, ADN94539.1, AFG25472.1, AFG25474.1, AFG25479.1, ADN94494.1, ADN94507.1, ADN94522.1, AHF20649.1, AHF20650.1, AHF20668.1, AHF20617.1, AHF20670.1, AHF20615.1, AFG25470.1, AHF20639.1, ADN94495.1, AFG25463.1, AFG25464.1, ADN94508.1, AFG25471.1, AFG25478.1, AHF20663.1, ADN94519.1, AFD97223.1, ADN94525.1, ADN94503.1, AHF20634.1, AHF20635.1, AHF20630.1, AFG25480.1, AHH02601.1, AHH02602.1, ADN94540.1, AHF20652.1, AHF20665.1, AHF20620.1, AHF20621.1, AHF20623.1, ACD86467.1, ADN94491.1, ADN94521.1, ADN94529.1, ADN94527.1, AFG25482.1, ADN94501.1, AHF20624.1, AHF20625.1, AFG25467.1, ADN94515.1, AFG25476.1, AFD97238.1, AFD97243.1, AHF20645.1, ADN94510.1, AFD97233.1, AFD97240.1, AFG25477.1, ADN94524.1, ADN94485.1, ADN94487.1, ADN94523.1, ADN94520.1, AFG25473.1, AHF20667.1, AHF20618.1, AHF20619.1, ADN94505.1, ADN94486.1, ADN94511.1, AFG25475.1, AHF20642.1, AHF20641.1, AHF20632.1, AHF20626.1, ADN94509.1, AHF20653.1, AFD97207.1, ADN94514.1, AFD97239.1, ADN94490.1, ADN94528.1, AFD97222.1, ADN94512.1, ADN94502.1, AFD97229.1, ADN94513.1, CAA05623.1, AAA29557.1, SCN12386.1, SCN12386.1, SBT79431.1, SBT00176.1, SBT84923.1, SBS83173.1, SBT35133.1, SBT34702.1, SBT72933.1, ADB92551.1, XP_001613068.1, SGX77278.1, AHL69650.1, AGN05257.1, AGN05240.1, ADB92533.1, ADB92538.1, AHL69649.1, AGN05254.1, ADB92534.1, ADB92542.1, ADB92553.1, ADB92546.1, ADB92547.1, ADB92548.1, ADB92531.1, AHL69647.1, AGN05236.2, AGN05238.1, ANS71607.1, ANS71618.1, ANS71628.1, ADB92539.1, ADB92540.1, ADB92543.1, ADB92544.1, ADB92545.1, AHL69652.1, AGN05250.1, AGN05252.1, AHL69651.1, ADB92550.1, AGN05267.1, ADB92541.1, ADB92554.1, ADB92528.1, AGN05255.1, AGN05273.2, ANS71590.1, AGN05249.1, AGN05241.2, AGN05234.2, AGN05258.1, AGN05271.1, AGN05268.1, ANS71594.1, ANS71602.1, ANS71608.1, ANS71611.1, ANS71617.1, ANS71630.1, AGN05247.1, AGN05260.1, AGN05266.1, ANS71599.1, ANS71604.1, ANS71615.1, ANS71589.1, ADB92552.1, ADB92555.1, XP_022712148.1.

[0090] Accordingly, each of the amino acid sequences for CSP encompassed by the accession numbers of List 2, and corresponding variants having greater than 80%, 95%, 90%, 95% identity to each of the amino acid sequences encompassed by the accession numbers of List 2, are herewith included as part of the disclosure. Further, fragments of the amino acid sequences encompassed by the accession numbers of List 2, e.g. corresponding fragments having more than 60%, 70%, 80%, 90% of the length of the amino acid sequences encompassed by the accession numbers of List 2, are herewith included as part of the disclosure.

[0091] In various embodiments, each of the amino acid sequences for CSP being identical or at least 70%, 80%, 85%, 86%, 87%, 88%, 89%, 90%, 91%, 92%, 93%, 94%, 95%, 96%, 97%, 98%, or 99% identical to any one of SEQ ID NOs: 1-36, 2081-2120, 2481-2886, 8742-8753, 10080-10085, or an immunogenic fragment or immunogenic variant of any of these sequences may be the “at least one antigenic protein derived from circumsporozoite protein (CSP) of a Malaria parasite” of the invention. Additional information regarding each of these suitable amino acid sequences encoding proteins derived from Malaria parasites may also be derived from the sequence listing, in particular from the details provided therein under identifier <223> as explained in the following.

[0092] It has to be noted that where reference is made to amino acid (aa) residues and their position in a CSP, any numbering used herein—unless stated otherwise—relates to the position of the respective amino acid residue in a corresponding CSP of Plasmodium falciparum 3D7 (Strain NCBI-ID 36329) according to SEQ ID NO: 1. Respective amino acid positions are, throughout the disclosure, exemplarily indicated for CSP of Plasmodium falciparum 3D7 (XP_001351122.1, XM_001351086.1; abbreviated herein as “Pf(3D7)”). The person skilled in the art will of course be able to adapt the teaching relating to CSP of Pf(3D7) to each and every CSP as provided herein, in particular to each and every CSP as provided in List 2, preferably to each and every CSP fragment as provided in the sequence listing (e.g., SEQ ID NOs: 1-36, 2081-2120, 2481-2886, 8742-8753, 10080-10085).

[0093] Full length CSP of Plasmodium falciparum 3D7 consists of 397 amino acids, comprising the following elements or regions (indicated by amino acid position) (further information can be found in Doud, Michael B., et al. “Unexpected fold in the circumsporozoite protein target of malaria vaccines.” Proceedings of the National Academy of Sciences 109.20 (2012): 7817-7822):

E1) Full length CSP: amino acid 1-397;
E2) Secretory signal sequence/signal peptide (SP): amino acid 1-18;
E3) RI region+NANP repeat region: amino acid 93-272;
E4) Central repeat region: amino acid 105-272;
E5) NANP repeat region: amino acid 98-272
E6) EcCSP fragment: amino acid 27-384;
E7) PpCSP fragment: amino acid 74-383;
E8) RI region: amino acid 93-97;
E9) RTS,S fragment: amino acid 207-395;
E10) RIII region, Th2R epitope region v1: amino acid 310-327;
E11) RIII region+TSR (RII+) region: amino acid 310-374;
E12) TSR region v3: amino acid 319-375;
E13) TSR region v1: amino acid 326-374;
E14) TSR region v2: amino acid 328-374;
E15) RII+region v1: amino acid 330-347;
E16) RII+region v2: amino acid 330-351;
E17) Glycosylphosphatidylinositol (GPI) anchor: amino acid 375-397;
E18) CSP-delSP-delTSR(v2)-delGPI: amino acid 19-325;
E19) CSP-delTSR(v2)-delGPI: amino acid 1-325;
E20) CSP-delSP-delGPI: amino acid 19-374;
E21) CSP-delSP: amino acid 19-397;
E22) CSP_delGPI: amino acid 1-374;
E23) RIII region, Th2R epitope region v2: amino acid 309-327;
E24) Th3R epitope region v2: amino acid 346-366;
E25) Th3R+CS.T3 epitope region v2: amino acid 346-376;
E26) Th3R epitope region v2: amino acid 346-365;
E27) Th3R+CS.T3 epitope region v2: amino acid 346-375.

[0094] Preferably, whenever reference is made to a CSP protein in the context of the invention, it has to be understood that at least one of the above elements E1 to E27, or at least one fragment of the above elements E1 to E27 is present. Accordingly, the coding RNA of the invention encodes at least one of the elements E1 to E27 as described above, or an immunogenic fragment, or immunogenic variant thereof.

[0095] CSP of Plasmodium falciparum 3D7 comprises several described epitopes, for example 3A1 antibody binding site (amino acid 69-74), 2C3 antibody binding site (amino acid 75-94), 3H10/3B4 antibody binding site (amino acid 95-100) etc. In preferred embodiments, the coding RNA of the invention encodes at least one CSP epitope, e.g. one of the above exemplified epitopes.

[0096] Suitable protein fragments derived from CSP of Pf(3D7), and corresponding RNA coding sequences encoding said fragments are provided in Table 3 (column A: description of fragments with indication of the amino acid position in relation to the full length protein; column B: corresponding amino acid sequences). Examples of preferred protein fragments are, but not limited to CSP(1-397), CSP(19-397), CSP(19-384), and CSP(199-377).

[0097] In preferred embodiments, the at least one antigenic protein derived from circumsporozoite protein (CSP) of a Malaria parasite comprises an amino acid sequence stretch derived from CSP with a length of more than 180 amino acids, 200 amino acids, 220 amino acids, 240 amino acids, 260 amino acids, 280 amino acids, 300 amino acids, 320 amino acids, 340 amino acids, 360 amino acids, 380 amino acids, 390 amino acids, wherein the amino acid stretch is preferably derived from CSP of Plasmodium falciparum 3D7.

[0098] More preferably, the at least one antigenic protein derived from circumsporozoite protein (CSP) of a Malaria parasite comprises an amino acid sequence stretch derived from CSP with a length of 300, 301, 302, 303, 304, 305, 306, 307, 308, 309, 310, 311, 312, 313, 314, 315, 316, 317, 318, 319, 320, 321, 322, 323, 324, 325, 326, 327, 328, 329, 330, 331, 332, 333, 334, 335, 336, 337, 338, 339, 340, 341, 342, 343, 344, 345, 346, 347, 348, 349, 350, 351, 352, 353, 354, 355, 356, 357, 358, 359, 360, 361, 362, 363, 364, 365, 366, 367, 368, 369, 370, 371, 372, 373, 374, 375, 376, 377, 378, 379, 380, 381, 382, 383, 384, 385, 386, 387, 388, 389, 390, 391, 392, 393, 394, 395, 396, 397 amino acids, wherein the amino acid stretch is preferably derived from CSP of Plasmodium falciparum 3D7.

[0099] In preferred embodiments, the at least one antigenic protein derived from circumsporozoite protein (CSP) of a Malaria parasite comprise an amino acid sequence stretch derived from CSP, wherein said stretch corresponds to at least 75% full length CSP, 80% full length CSP, 85% full length CSP, 86% full length CSP, 87% full length CSP, 88% full length CSP, 89% full length CSP, 90% full length CSP, 91% full length CSP, 92% full length CSP, 93% full length CSP, 94% full length CSP, 95% full length CSP, 96% full length CSP, 97% full length CSP, 98% full length CSP, 99% full length CSP, wherein the amino acid stretch is preferably derived from CSP of Plasmodium falciparum 3D7, wherein full length CSP (that is 100% full length) has a length of 397 amino acids.

[0100] “Corresponds to” in that context has to be understood as an amino acid sequence being identical, or at least 80%, 85%, 90%, 95%, 96%, 97%, 98%, 99% identical to the an amino acid sequence of CSP, in particular to the an amino acid sequence of CSP derived from Plasmodium falciparum 3D7.

[0101] In this context, preferably, a full-length CSP may be used as suitable antigen and may preferably be derived from any NCBI Protein Accession numbers provided in List 2. In preferred embodiments of the invention, the full-length CSP of Plasmodium falciparum 3D7 (SEQ ID NO: 1) is suitably used.

[0102] In preferred embodiments, a more full-length CSP may be used as suitable antigen and may preferably be derived from any NCBI Protein Accession numbers provided in List 2 or may be chosen from any one of SEQ ID NO: 1-36, 2481-2886. In preferred embodiments of the invention, a more full-length CSP of Plasmodium falciparum 3D7 derived from SEQ ID NO: 1 is suitably used.

[0103] The term “more full-length CSP” has to be understood as a CSP amino acid sequence that is in regard of the length closer to the full length amino acid sequence as compared to an RTS,S fragment (CSP(207-395); SEQ ID NO: 2112). Accordingly, a “more full-length CSP” comprises more than 190 amino acids, 200 amino acids, 220 amino acids, 240 amino acids, 260 amino acids, 280 amino acids, 300 amino acids, 320 amino acids, 340 amino acids, 360 amino acids, 380 amino acids, 390 amino acids derived from CSP, preferably derived from CSP of Plasmodium falciparum 3D7. In other words, a “more full-length CSP” comprise an amino acid sequence stretch derived from CSP, wherein said stretch corresponds to at least 75% full length CSP, 80% full length CSP, 85% full length CSP, 86% full length CSP, 87% full length CSP, 88% full length CSP, 89% full length CSP, 90% full length CSP, 91% full length CSP, 92% full length CSP, 93% full length CSP, 94% full length CSP, 95% full length CSP, 96% full length CSP, 97% full length CSP, 98% full length CSP, 99% full length CSP.

[0104] The more full-length CSP as an antigen induces broader humoral and especially cellular antibody responses compared for example to the truncated CSP (e.g. Pf-CSP(199-377)_Linker(PVTN)_HBsAg). The more full-length CSP may provide additional T cell epitopes, leading to increased cellular immunity, which could potentially enhance protection against Malaria (see e.g. Example 6, 7, 8).

[0105] SEQ ID NOs: 1-36, 2081-2120, 2481-2886, 8742-8753, 10080-10085 provide suitable CSP proteins derived from Malaria parasites; corresponding RNA coding sequences encoding said CSP proteins are provided in Table A. Additional information regarding each of these suitable amino acid sequences encoding proteins derived from Malaria parasites may also be derived from the sequence listing, in particular from the details provided therein under identifier <223> as explained in the following.

[0106] According to another preferred embodiment, the coding RNA of the invention encodes at least one antigenic Malaria peptide or protein derived from CPS as defined above and additionally at least one further heterologous peptide or protein element.

[0107] Suitably, the at least one further peptide or protein element may promote secretion of the encoded antigenic peptide or protein of the invention (e.g. via secretory signal sequences), promote anchoring of the encoded antigenic peptide or protein of the invention in the plasma membrane (e.g. via transmembrane elements), promote formation of antigen complexes (e.g. via multimerization domains), promote virus-like particle formation (VLP forming sequence). In addition, the coding RNA may additionally encode peptide linker elements, self-cleaving peptides, immunologic adjuvant sequences or dendritic cell targeting sequences. Suitable multimerization domains may be selected from the list of amino acid sequences according to SEQ ID NOs: 1116-1167 of the patent application WO2017/081082, or fragments or variants of these sequences. Trimerization and tetramerization elements may be selected from e.g. engineered leucine zippers (engineered α-helical coiled coil peptide that adopt a parallel trimeric state), fibritin foldon domain from enterobacteria phage T4, GCN4pll, GCN4-pLl, and p53. In that context, fibritin foldon domain from enterobacteria phage T4, GCN4pll, GCN4-pLl, and p53 are preferred. Suitable transmembrane elements may be selected from the list of amino acid sequences according to SEQ ID NOs: 1228-1343 of the patent application WO2017/081082, or fragments or variants of these sequences. Suitable VLP forming sequences may be selected from the list of amino acid sequences according to SEQ ID NOs: 1168-1227 of the patent application WO2017/081082, or fragments or variants of these sequences. Suitable peptide linkers may be selected from the list of amino acid sequences according to SEQ ID NOs: 1509-1565 of the patent application WO2017/081082, or fragments or variants of these sequences. Suitable self-cleaving peptides may be selected from the list of amino acid sequences according to SEQ ID NOs: 1434-1508 of the patent application WO2017/081082, or fragments or variants of these sequences. Suitable immunologic adjuvant sequences may be selected from the list of amino acid sequences according to SEQ ID NOs: 1360-1421 of the patent application WO2017/081082, or fragments or variants of these sequences. Suitable dendritic cell (DCs) targeting sequences may be selected from the list of amino acid sequences according to SEQ ID NOs: 1344-1359 of the patent application WO2017/081082, or fragments or variants of these sequences. Suitable secretory signal peptides may be selected from the list of amino acid sequences according to SEQ ID NOs: 1-1115 and SEQ ID NO: 1728 of the patent application WO2017/081082, or fragments or variants of these sequences.

[0108] Suitably, the at least one coding RNA of the invention encodes at least one antigenic Malaria peptide or protein derived from CPS as defined above and additionally at least one or more heterologous peptide or protein element selected from a heterologous secretory signal peptide, a peptide linker element, a helper epitope, an antigen clustering domain, or a transmembrane domain.

[0109] In preferred embodiments, the coding RNA of the invention additionally encodes heterologous secretory signal peptide.

[0110] In embodiments where the coding RNA of the invention additionally encodes heterologous secretory signal peptides, it is particularly preferred and suitable to generate a fusion protein comprising a heterologous N-terminal secretory signal sequence and a C-terminal peptide or protein derived from CPS, wherein said C-terminal peptide or protein derived from CPS is preferably lacking the endogenous N-terminal secretory signal peptide. Accordingly, in the context of CSP proteins, it is suitable to remove at least the first 18 amino acids (representing the Secretory signal sequence of CSP) and to fuse a heterologous N-terminal signal sequence to the CSP antigen. Such constructs may ideally improve the secretion of the CSP protein (that is encoded by the RNA of the first aspect).

[0111] Suitable secretory signal peptides may be selected from the list of amino acid sequences according to SEQ ID NOs: 1-1115 and SEQ ID NO: 1728 of the patent application WO2017/081082, or fragments or variants of these sequences, wherein said secretory signal peptides N-terminally fused to a CSP protein (or fragment) lacking the endogenous secretory signal sequence.

[0112] In some embodiments, the signal peptide is selected from: SEQ ID NOs: 423-427 of patent application WO2017/070624A1 or a fragment or variant of any of these sequences. In this context SEQ ID NOs: 423-427, of patent application WO2017/070624A1, and the disclosure related thereto, are herewith incorporated by reference.

[0113] In particularly preferred embodiments, the signal peptide is derived from human SPARC (HsSPARC) according to SEQ ID NO: 6208. In particularly preferred embodiments, the signal peptide is derived from human Insulin isoform 1 (Hslns-isol) according to SEQ ID NO: 6207. In particularly preferred embodiments, the signal peptide is derived from human albumin (HsALB) according to SEQ ID NO: 6205. In particularly preferred embodiments, the signal peptide is derived from IgE according to SEQ ID NO: 6206.

[0114] In particularly preferred embodiments the secretory signal peptide is or is derived from HsALB, wherein the amino acid sequences of said heterologous signal peptide is identical or at least 70%, 80%, 85%, 86%, 87%, 88%, 89%, 90%, 91%, 92%, 93%, 94%, 95%, 96%, 97%, 98%, or 99% identical to amino acid sequence SEQ ID NO: 6205, or fragment or variant of any of these.

[0115] In embodiments where the coding RNA of the invention additionally encodes heterologous secretory signal peptides, it is particularly preferred and suitable to generate a fusion protein comprising a heterologous N-terminal secretory signal peptide and a C-terminal peptide or protein derived from CSP wherein said C-terminal peptide or protein derived from CSP is preferably lacking an endogenous N-terminal secretory signal peptide (e.g. CSP(1-18) is lacking). Constructs comprising an N-terminal secretory signal peptide may ideally improve the secretion of the Malaria protein, preferably the CSP protein (that is encoded by the coding RNA of the first aspect). Accordingly, improved secretion of the antigen, preferably the CSP protein, upon administration of the coding RNA of the first aspect, may be advantageous for the induction of immune responses against the encoded Plasmodium antigenic protein (see e.g. Example 8, FIG. 13B, group 5 in comparison with group 6).

[0116] Accordingly, in various embodiments any CSP fragment defined by SEQ ID NOs: 2081-2120, 10080-10085 may additionally comprise a heterologous secretory signal sequence, preferably a secretory signal sequence as defined above, to generate a CSP antigen that is secreted in vivo. In particular, any CSP fragment defined by SEQ ID NOs: 2081-2120, 10080-10085 may additionally comprise an N-terminal heterologous secretory signal sequence of SEQ ID NOs: 6205-6208.

[0117] Examples of CSP constructs comprising a heterologous secretory signal sequence include but are not limited to HsALB_Pf-CSP(19-397), Hslns-iso1_Pf-CSP(19-397), HsSPARC_Pf-CSP(19-397), IgE_Pf-CSP(19-397), HsALB_Pf-CSP(19-152), HsALB_Pf-CSP(19-192), HsALB_Pf-CSP(19-272), HsALB_Pf-CSP(19-272)_Linker(AAY)_Pf-CSP(310-327)_Linker(AAY)_Pf-CSP(346-375), HsALB_Pf-CSP(19-272)_Linker(AAY)_Pf-CSP(346-365)_Linker(AAY)_P2, HsALB_Pf-CSP(19-272)_Linker(AAY)_Pf-CSP(346-365)_Linker(AAY)_PADRE, HsALB_Pf-CSP(19-272)_Linker(G4S)_Pf-CSP(310-327)_Linker(G4S)_Pf-CSP(346-375), HsALB_Pf-CSP(19-272)_Linker(G4S)_Pf-CSP(310-327)_Pf-CSP(346-375), HsALB_Pf-CSP(19-325), HsALB_Pf-CSP(19-384), HsALB_Pf-CSP(19-384)_TM domain HA, HsALB_Pf-CSP(82-397), HsALB_Pf-CSP(93-192), HsALB_Pf-CSP(93-272), HsALB_Pf-CSP(93-397), HsALB_Pf-CSP(98-192), HsALB_Pf-CSP(98-272), HsALB_Pf-CSP(98-374), HsALB_Pf-CSP(98-397), HsALB_Pf-CSP(199-377)_Linker(PVTN)_HBsAg, HsALB_Pf-CSP(19-272)_Linker(PVTN)_HBsAg, HsALB_Pf-CSP(19-272)_Linker(AAY)_Pf-CSP(346-365)_Linker(AAY)_PADRE_Linker(PVTN)_HBsAg, HsALB_Pf-CSP(19-384)_Linker(PVTN)_HBsAg, HsALB_Pf-CSP(19-384)_Linker(SGG)_Ferritin, HsALB_Pf-CSP(93-384)_Linker(PVTN)_HBsAg, HsALB_Pf-CSP(19-272)_Linker(AAY)_Pf-CSP(346-375)_Linker(AAY)_Pf-CSP(310-327), HsALB_Pf-CSP(19-272)_Linker(AAY)_Pf-CSP(346-375)_Linker(AAY)_Pf-CSP(310-327)_Linker(AAY)_PADRE, HsALB_Pf-CSP(19-272)_Linker(AAY)_Pf-CSP(310-327)_Linker(AAY)_Pf-CSP(346-375)_Linker(AAY)_PADRE, HsALB_Pf-CSP(19-272)_Linker(AAY)_Pf-CSP(310-327)_Linker(AAY)_Pf-CSP(346-375)_Linker(AAY)_PADRE_Linker(AAY)_P2, HsALB_Pf-CSP(19-272)_Linker(AAY)_Pf-CSP(310-327)_Linker (AAY)_Pf-CSP(346-397), HsALB_Pb-CSP(24-340), Hslns-iso1_Pb-CSP(24-340), HsSPARC_Pb-CSP(24-340), IgE_Pb-CSP(24-340), wherein HsALB_Pf-CSP(19-397), HsALB_Pf-CSP(19-384), HsALB_Pf-CSP(19-384)_TM domain HA, and HsALB_Pf-CSP(199-377)_HBsAg are particularly preferred. The corresponding amino acid sequences for each of the above listed constructs can be found in Table 1.

[0118] In preferred embodiments, the coding RNA of the invention additionally encodes a heterologous peptide linker element.

[0119] Accordingly, the coding RNA of the invention may comprise at least one CSP protein or fragment as defined above, and, at least one peptide linker element, wherein the peptide linker may be selected from the list of amino acid sequences according to SEQ ID NOs: 1509-1565 of the patent application WO2017/081082, or fragments or variants of these sequences.

[0120] In particularly preferred embodiments, the heterologous peptide linker element is selected from SEQ ID NOs: 6241-6244, 10141, 10147.

[0121] In suitable embodiments, the coding RNA of the invention encodes partially truncated C-terminal regions. The deletion of partial regions of the C-terminal region may protect against unwanted influences of regions, disturbing proper immune responses. It is preferred, that in these C-terminal truncated CSP proteins, CSP-derived T-cell epitopes remain present. These T-cell epitopes are suitably combined with heterologous linker sequences as described above. Suitable and preferred T-cell epitope regions are e.g. Th2R: CSP(309-327), Th2R: CSP(310-327), Th3R: CSP(346-366), Th3R: CSP(346-365), Th3R+CS.T3: CSP(346-375), Th3R+CS.T3: CSP(346-376). The aTSR domain of CSP contains several T-cell epitopes, one of which, (CS).T3, is responsible for a CD4+ T-cell response that correlates with protection. The other T-cell epitopes, Th2R and Th3R, are polymorphic regions of the aTSR (Doud, Michael B., et al. “Unexpected fold in the circumsporozoite protein target of malaria vaccines.” Proceedings of the National Academy of Sciences 109.20 (2012): 7817-7822). Preferred T-cell helper epitopes derived from C-term CSP are selected from amino acid sequences according to SEQ ID NOs: 2100, 2101, 2102, 2113, 10083, 10084.

[0122] The deletion of partial regions of the C-terminal region and the combination of T-cell epitopes with heterologous linkers may enhance the immune responses (see Example 9, FIGS. 14 and 15). Differences in the relative location and in the choice of T-cell epitope influence the type and direction of the immune responses. Some combinations results in increased humoral responses (e.g. constructs with C-terminus AAY-CSP(310-327)-AAY-CSP(346-375) and AAY-CSP(346-365)-AAY-CSP(346-375)), others in improved CD4+ and/or CD8+ T-cell responses (e.g. AAY-CSP(310-327)-AAY-CSP(346-375) and G4S-CSP(310-327)-CSP(346-375). Examples of preferred C-terminal ends include but are not limited to _Linker(AAY)_Pf-CSP(310-327)_Linker(AAY)_Pf-CSP(346-375), _Linker(AAY)_Pf-CSP(346-365)_Linker(AAY)_PADRE, _Linker(AAY)_Pf-CSP(310-327)_Linker(AAY)_Pf-CSP(346-375), _Linker(G4S)_Pf-CSP(310-327)_Pf-CSP(346-375), _Linker(G4S)_Pf-CSP(310-327)_Linker(G4S)_Pf-CSP(346-375).

[0123] Examples of CSP constructs comprising a heterologous peptide linker element include but are not limited to Pf-CSP_Linker(G4SG4)_TM domain HA, Pf-CSP(199-377)_Linker(PVTN)_HBsAg, Pf-CSP(199-387)_Linker(PVTN)_HBsAg, HsALB_Pf-CSP(19-272)_Linker(AAY)_Pf-CSP(310-327)_Linker(AAY)_Pf-CSP(346-375), HsALB_Pf-CSP(19-272)_Linker(AAY)_Pf-CSP(346-365)_Linker(AAY)_P2, HsALB_Pf-CSP(19-272)_Linker(AAY)_Pf-CSP(346-365)_Linker(AAY)_PADRE, HsALB_Pf-CSP(19-272)_Linker(G4S)_Pf-CSP(310-327)_Linker(G4S)_Pf-CSP(346-375), HsALB_Pf-CSP(19-272)_Linker(G4S)_Pf-CSP(310-327)_Pf-CSP(346-375), HsALB_Pf-CSP(199-377)_Linker(PVTN)_HBsAg, LumSynt_Linker(GGS4-GGG)_Pf-CSP(19-397), HsALB_Pf-CSP(19-272)_Linker(PVTN)_HBsAg, HsALB_Pf-CSP(19-272)_Linker(AAY)_Pf-CSP(346-365)_Linker(AAY)_PADRE_Linker(PVTN)_HBsAg, HsALB_Pf-CSP(19-384)_Linker(PVTN)_HBsAg, HsALB_Pf-CSP(19-384)_Linker(SGG)_Ferritin, HsALB_Pf-CSP(93-384)_Linker(PVTN)_HBsAg, HsALB_Pf-CSP(19-272)_Linker(AAY)_Pf-CSP(346-375)_Linker(AAY)_Pf-CSP(310-327), HsALB_Pf-CSP(19-272)_Linker(AAY)_Pf-CSP(346-375)_Linker(AAY)_Pf-CSP(310-327)_Linker(AAY)_PADRE, HsALB_Pf-CSP(19-272)_Linker(AAY)_Pf-CSP(310-327)_Linker(AAY)_Pf-CSP(346-375)_Linker(AAY)_PADRE, HsALB_Pf-CSP(19-272)_Linker(AAY)_Pf-CSP(310-327)_Linker(AAY)_Pf-CSP(346-375)_Linker(AAY)_PADRE_Linker(AAY)_P2, HsALB_Pf-CSP(19-272)_Linker(AAY)_Pf-CSP(310-327)_Linker (AAY)_Pf-CSP(346-397), Pb-CSP_Linker(G4SG4)_TM domain HA. The corresponding amino acid sequences for each of the above listed constructs can be found in Table 1.

[0124] Examples of CSP constructs comprising at least a T-cell helper epitope derived from CSP are HsALB_Pf-CSP(19-272)_Linker(AAY)_Pf-CSP(310-327)_Linker(AAY)_Pf-CSP(346-375), HsALB_Pf-CSP(19-272)_Linker(AAY)_Pf-CSP(346-365)_Linker(AAY)_P2, HsALB_Pf-CSP(19-272)_Linker(AAY)_Pf-CSP(346-365)_Linker(AAY)_PADRE, HsALB_Pf-CSP(19-272)_Linker(G4S)_Pf-CSP(310-327)_Linker(G4S)_Pf-CSP(346-375), HsALB_Pf-CSP(19-272)_Linker(G4S)_Pf-CSP(310-327)_Pf-CSP(346-375), HsALB_Pf-CSP(19-272)_Linker(AAY)_Pf-CSP(346-365)_Linker(AAY)_PADRE_Linker(PVTN)_HBsAg, HsALB_Pf-CSP(19-272)_Linker(AAY)_Pf-CSP(346-375)_Linker(AAY)_Pf-CSP(310-327), HsALB_Pf-CSP(19-272)_Linker(AAY)_Pf-CSP(346-375)_Linker(AAY)_Pf-CSP(310-327)_Linker(AAY)_PADRE, HsALB_Pf-CSP(19-272)_Linker(AAY)_Pf-CSP(310-327)_Linker(AAY)_Pf-CSP(346-375)_Linker(AAY)_PADRE, HsALB_Pf-CSP(19-272)_Linker(AAY)_Pf-CSP(310-327)_Linker(AAY)_Pf-CSP(346-375)_Linker(AAY)_PADRE_Linker(AAY)_P2, HsALB_Pf-CSP(19-272)_Linker(AAY)_Pf-CSP(310-327)_Linker (AAY)_Pf-CSP(346-397).

[0125] In preferred embodiments, the coding RNA of the invention additionally encodes at least one heterologous helper epitope. A helper epitope may enhance the immune response of the RNA encoding CSP.

[0126] In particularly preferred embodiments, the heterologous helper epitope is derived from P2 helper peptide according to SEQ ID NO: 6272. In particularly preferred embodiments, the helper epitope is derived from PADRE helper epitope according to SEQ ID NO: 6273. In particularly preferred embodiments, the helper epitope is derived from HBsAg (surface antigen of Hepatitis B virus) according to SEQ ID NO: 6274.

[0127] In embodiments, the helper epitope is or is derived from P2 tetanus toxin, from PADRE, or from HBsAg, wherein the amino acid sequences of said helper epitopes is identical or at least 70%, 80%, 85%, 86%, 87%, 88%, 89%, 90%, 91%, 92%, 93%, 94%, 95%, 96%, 97%, 98%, or 99% identical to any one of amino acid sequences SEQ ID NOs: 6272, 6273, or 6274, or fragment or variant of any of these.

[0128] Preferably, said heterologous helper epitope is located at the C-terminus of a CSP antigen as defined above.

[0129] Preferably, the amino acid sequence of P2 helper epitope of tetanus toxin according to SEQ ID NO: 6272 (GenBank X04436.1 or NC_004565.1 derived from Kovacs-Nolan et al.; PMID 16978788; P2: aa 830-844) may serve as a basis for advantageous designs of the inventive coding RNA. The inclusion of P2 in antigens has been demonstrated to strongly influence the antibody responses to poorly immunogenic B cell epitopes. The addition of a sequence encoding a P2 helper epitope may be particularly effective in enhancing the immune response in an mRNA-based vaccine approach.

[0130] Preferably, the helper epitope is pan HLA DR-binding epitope (PADRE) or a fragment, variant or derivative thereof according to SEQ ID NO: 6273. PADRE is an immunodominant helper CD4 T-cell epitope. CD4+ T-cells play an important role in the generation of CD8+ T effector and memory T-cell immune responses. The

[0131] CD4+ T cell immune response, and thus the corresponding antigen-specific CD8+ T cell response, can be enhanced by encoding at least one antigenic protein of Plasmodium as defined herein and additionally at least the heterologous helper epitope pan HLA DR-binding epitope (PADRE). The addition of a sequence encoding a PADRE helper epitope may be particularly effective in enhancing the immune response in an mRNA-based vaccine approach.

[0132] Preferably, at least one the helper epitope is derived from HBsAg (surface antigen of Hepatitis B virus) according to SEQ ID NO: 6274 or a fragment, variant or derivative thereof according. HBsAg comprises several CD4 T cell helper epitopes (see e.g. Desombere, Isabelle, et al. “Characterization of the T cell recognition of hepatitis B surface antigen (HBsAg) by good and poor responders to hepatitis B vaccines.”

[0133] Clinical & Experimental Immunology 122.3 (2000): 390-399). CD4+ T-cells play an important role in the generation of CD8+ T effector and memory T-cell immune responses. The CD4+ T cell immune response, and thus the corresponding antigen-specific CD8+ T cell response, can be enhanced by encoding at least one antigenic protein of Plasmodium as defined herein and additionally at least one of the helper epitopes derived from HBsAg). The addition of a sequence encoding a helper epitope derived from HBsAg may be particularly effective in enhancing the immune response in an mRNA-based vaccine approach.

[0134] Examples of CSP constructs comprising a heterologous helper epitope include but are not limited to HsALB_Pf-CSP(19-272)_Linker(AAY)_Pf-CSP(346-365)_Linker(AAY)_PADRE, HsALB_Pf-CSP(19-272)_Linker(AAY)_Pf-CSP(346-365)_Linker(AAY)_PADRE_Linker(PVTN)_HBsAg, HsALB_Pf-CSP(19-272)_Linker(AAY)_Pf-CSP(346-375)_Linker(AAY)_Pf-CSP(310-327)_Linker(AAY)_PADRE, HsALB_Pf-CSP(19-272)_Linker(AAY)_Pf-CSP(310-327)_Linker(AAY)_Pf-CSP(346-375)_Linker(AAY)_PADRE, HsALB_Pf-CSP(19-272)_Linker(AAY)_Pf-CSP(310-327)_Linker(AAY)_Pf-CSP(346-375)_Linker(AAY)_PADRE_Linker(AAY)_P2, HsALB_Pf-CSP(19-272)_Linker(AAY)_Pf-CSP(346-365)_Linker(AAY)_P2, Pf-CSP(199-377)_Linker(PVTN)_HBsAg, Pf-CSP(199-387)_Linker(PVTN)_HBsAg, HsALB_Pf-CSP(199-377)_Linker(PVTN)_HBsAg, HsALB_Pf-CSP(19-272)_Linker(PVTN)_HBsAg, HsALB_Pf-CSP(19-384)_Linker(PVTN)_HBsAg, HsALB_Pf-CSP(93-384)_Linker(PVTN)_HBsAgcarrier matrix. The corresponding amino acid sequences for each of the above listed constructs can be found in Table 1.

[0135] A domain or fragment of HBsAg (surface antigen of hepatitis B virus, e.g. according to SEQ ID NO: 6274) may comprise one or more T helper epitope, but moreover the protein or a fragment thereof may function as a antigen clustering domain or as a multimerization domain.

[0136] In further preferred embodiments, the coding RNA of the invention additionally encodes an heterologous antigen clustering domain or multimerization domain.

[0137] Suitably, the antigen clustering domain (multimerization domain or scaffold moiety) is or is derived from ferritin, lumazine-synthase (LS), surface antigen of hepatitis B virus (HBsAg) or encapsulin.

[0138] Antigen clustering domain of scaffold proteins may e.g. improve the immunogenicity of an antigen, e.g., by altering the structure of the antigen, altering the uptake and processing of the antigen, and/or causing the antigen to bind to a binding partner. In some embodiments, the scaffold moiety is protein that can self-assemble into protein nanoparticles that are highly symmetric, stable, and structurally organized, with diameters of 10-150 nm, a highly suitable size range for optimal interactions with various cells of the immune system. In some embodiments, viral proteins or virus-like particles can be used to form stable nanoparticle structures.

[0139] In preferred embodiments, the antigen clustering domain (multimerization domain) is or is derived from surface antigen of hepatitis B virus (HBsAg), ferritin or lumazine-synthase, wherein the amino acid sequences of said antigen clustering domain is identical or at least 70%, 80%, 85%, 86%, 87%, 88%, 89%, 90%, 91%, 92%, 93%, 94%, 95%, 96%, 97%, 98%, or 99% identical to any one of amino acid sequences according to SEQ ID NOs: 6274, 10153, 10162, or a fragment or variant of any of these.

[0140] In embodiments where the coding RNA of the invention additionally encodes heterologous antigen clustering domain, it is particularly preferred and suitable to generate a fusion protein comprising a heterologous antigen clustering domain, optionally a linker element, and a peptide or protein derived from CSP. Constructs comprising an antigen clustering domain may enhance the antigen clustering and may therefore promote immune responses e.g. by multiple binding events that occur simultaneously between the clustered antigens and the host cell receptors (see further details in López-Sagaseta, Jacinto, et al. “Self-assembling protein nanoparticles in the design of vaccines”. Computational and structural biotechnology journal 14 (2016):58-68). Additionally, such constructs may additionally comprise an N-terminal secretory signal sequence (as defined above). For example, in some embodiments, the scaffold moiety is a hepatitis B surface antigen (HBsAg). HBsAg forms spherical particles. The addition of a fragment of the surface antigen of hepatitis B virus (HBsAg) sequence may be particularly effective in enhancing the immune response in an mRNA-based vaccine approach.

[0141] In particularly preferred embodiments, HBsAg is used to promote the antigen clustering and may therefore promote immune responses of the RNA encoding the Plasmodium antigen, preferably CSP or a fragment or derivative thereof.

[0142] In particularly preferred embodiments, the antigen clustering domain (multimerization domain) is or is derived from surface antigen of hepatitis B virus (HBsAg), wherein the amino acid sequences of said antigen clustering domain is preferably identical or at least 70%, 80%, 85%, 86%, 87%, 88%, 89%, 90%, 91%, 92%, 93%, 94%, 95%, 96%, 97%, 98%, or 99% identical to amino acid sequence according to SEQ ID NO: 6274, a fragment or variant of any of these.

[0143] Lumazine synthase (LS, LumSynth) is an enzyme with particle-forming properties, present in a broad variety of organisms and involved in riboflavin biosynthesis. Jardine et al reported their attempts to enhance the immunoreactivity of recombinant gp120 against HIV infection through the inclusion of Lumazine synthase (LS) for the optimization of vaccine candidates (Jardine, Joseph, et al. “Rational HIV immunogen design to target specific germline B cell receptors”. Science 340.6133 (2013):711-716).

[0144] In particularly preferred embodiments, Lumazine-synthase is used to promote the antigen clustering and may therefore promote immune responses of the RNA encoding the Plasmodium antigen, preferably CSP or a fragment or derivative thereof.

[0145] In particularly preferred embodiments, the antigen clustering domain (multimerization domain) is or is derived from Lumazine-synthase (LS), wherein the amino acid sequences of said antigen clustering domain is preferably identical or at least 70%, 80%, 85%, 86%, 87%, 88%, 89%, 90%, 91%, 92%, 93%, 94%, 95%, 96%, 97%, 98%, or 99% identical to amino acid sequence according to SEQ ID NO: 10153, a fragment or variant of any of these.

[0146] Ferritin is a protein whose main function is intracellular iron storage. Almost all living organisms produce ferritin which is made of 24 subunits, each composed of a four-alpha-helix bundle, that self-assemble in a quaternary structure with octahedral symmetry. Its properties to self-assemble into nanoparticles are well-suited to carry and expose antigens.

[0147] In particularly preferred embodiments, ferritin is used to promote the antigen clustering and may therefore promote immune responses of the RNA encoding the Plasmodium antigen, preferably CSP or a fragement or variant thereof.

[0148] In particularly preferred embodiments, the antigen clustering domain (multimerization domain) is or is derived from ferritin wherein the amino acid sequences of said antigen clustering domain is preferably identical or at least 70%, 80%, 85%, 86%, 87%, 88%, 89%, 90%, 91%, 92%, 93%, 94%, 95%, 96%, 97%, 98%, or 99% identical to amino acid sequence according to SEQ ID NO: 10162), a fragment or variant of any of these.

[0149] Encapsulin, a novel protein cage nanoparticle isolated from thermophile Thermotoga maritima, may also be used as a platform to present antigens on the surface of self-assembling nanoparticles. Encapsulin is assembled from 60 copies of identical 31 kDa monomers.

[0150] Suitable examples of CSP constructs comprising a heterologous antigen clustering domain include but are not limited to HsALB_Pf-CSP(19-384)_Linker(SGG)_Ferritin, LumSynt_Linker(GGS4-GGG)_Pf-CSP(19-397), Pf-CSP(199-377)_Linker(PVTN)_HBsAg, Pf-CSP(199-387)_Linker(PVTN)_HBsAg, HsALB_Pf-CSP(199-377)_Linker(PVTN)_HBsAg, HsALB_Pf-CSP(19-272)_Linker(PVTN)_HBsAg, HsALB_Pf-CSP(19-272)_Linker(AAY)_Pf-CSP(346-365)_Linker(AAY)_PADRE_Linker(PVTN)_HBsAg, HsALB_Pf-CSP(19-384)_Linker(PVTN)_HBsAg, HsALB_Pf-CSP(93-384)_Linker(PVTN)_HBsAg. The corresponding amino acid sequences for each of the above listed constructs can be found in Table 1.

[0151] Further suitable multimerization domains/antigen clustering domains may be selected from the list of amino acid sequences according to SEQ ID NOs: 1116-1167 of the patent application WO2017/081082, or fragments or variants of these sequences.

[0152] In preferred embodiments, the coding RNA of the invention additionally encodes at least one heterologous transmembrane domain.

[0153] In particularly preferred embodiments, the heterologous transmembrane domain is derived from a transmembrane domain of HA according to SEQ ID NOs: 6302.

[0154] Preferably, said heterologous transmembrane domain is located at the C-terminus of a CSP antigen as defined above.

[0155] Examples of CSP constructs comprising a heterologous transmembrane domain are Pf-CSP_Linker(G4SG4)_TM domain HA and HsALB_Pf-CSP(19-384)_TM domain HA. Example 7 shows that mRNA encoding CSP comprising a heterologous transmembrane domain induces humoral and cellular immune responses (FIGS. 10 and 11). The corresponding amino acid sequences for each of the above listed constructs can be found in Table 1.

[0156] Suitable heterologous peptide or protein elements that may be fused to a CSP antigen as defined herein and corresponding RNA coding sequences encoding said elements are provided in Table 4.

[0157] Accordingly, as outlined above, at least one antigenic protein derived from CSP of a Malaria parasite may comprise, preferably in N-terminal to C-terminal direction:
[0158] a) optionally, one N-terminal heterologous secretory signal sequence selected from SEQ ID NOs: 6205-6208 or fragments or variants thereof, wherein SEQ ID NO: 6205 is particularly preferred and
[0159] b) at least one antigenic protein derived from CSP, preferably any one of the amino acid sequences selected from SEQ ID NOs: 1-36, 2081-2120, 2481-2886, 8742-8753, 10080-10085, or fragments or variants thereof, and
[0160] c) optionally, at least one heterologous helper epitope selected from SEQ ID NOs: 6272, 6273, or 6274, or fragments or variants thereof, and
[0161] d) optionally, at least one heterologous antigen clustering domain selected from SEQ ID NOs: 6274, 10153, 10162, or fragments or variants thereof, and
[0162] e) optionally, at least one heterologous transmembrane domain selected from SEQ ID NOs: 6302 or fragments or variants thereof.

[0163] Further, a), b), c), d) and/or e) may be connected via at least one peptide linker element selected from SEQ ID NOs: 6241-6244, 10141, 10147.

[0164] A detailed description of particularly preferred and suitable CSP protein constructs is provided in Table 1 (for schematic overview see column E of Table 1 and FIG. 26).

[0165] In Table 1 all references made to amino acid (aa) residues and their position in an CSP protein relates to the position of the respective aa residue in a corresponding CSP protein of Pf(3D7) (SEQ ID NO: 1). Moreover, the abbreviations used to describe suitable CSP antigen designs of Table 1 are also used throughout the description of the invention (as described above) as well as in the ST25 sequence listing. Column A of Table 1 provides a short description of suitable CSP antigen designs. Column B of Table 1 indicates the amino acid stretch or stretches for each of the respective antigen designs corresponding to the full length CSP reference (SEQ ID NO: 1). Column C of Table 1 indicates the percentage of amino acid sequence that corresponds to the full length CSP reference (SEQ ID NO: 1). Column D of Table 1 provides protein SEQ ID NOs of respective CSP antigen designs derived from Pf(3D7). Notably, the description of the invention explicitly includes the information provided under <223> identifier of the ST25 sequence listing of the present application (“L” is read for “Linker”). Column E of Table 1 links the CSP antigen design to its respective schematic view shown in FIG. 26. Preferred RNA sequences encoding of the constructs of Table 1 are provided in Table 5.

TABLE 1
Preferred CSP antigen designs

| A | B | C | D | E |
|---|---|---|---|---|
| Pf-CSP | aa1-397 | 100.00 | 1 | 1 |
| Pf-CSP(1-374) | aa1-374 | 94.21 | 2 | |
| Pf-CSP(1-325) | aa1-325 | 81.86 | 3 | |
| HsALB_Pf-CSP(19-397) | aa19-397 | 95.47 | 4 | 2 |
| HsIns-iso1_Pf-CSP(19-397) | aa19-397 | 95.47 | 5 | 2 |
| HsSPARC_Pf-CSP(19-397) | aa19-397 | 95.47 | 6 | 2 |
| IgE_Pf-CSP(19-397) | aa19-397 | 95.47 | 7 | 2 |
| Pf-CSP_Linker(G4SG4)_TM domain HA | aa1-397 | 100.00 | 8 | |
| Pf-CSP(199-377)_Linker(PVTN)_HBsAg | aa199-377 | 45.09 | 9 | 4 |
| Pf-CSP(199-387)_Linker(PVTN)_HBsAg | aa199-387 | 47.61 | 10 | |
| HsALB_Pf-CSP(19-152) | aa19-152 | 33.75 | 11 | 12 |
| HsALB_Pf-CSP(19-192) | aa19-192 | 43.83 | 12 | 11 |
| HsALB_Pf-CSP(19-272) | aa19-272 | 63.98 | 13 | 10 |
| HsALB_Pf-CSP(19-272)_Linker(AAY)_Pf-CSP(310- | aa19-272, aa310- | 76.07 | 14 | 16 |
| 327)_Linker(AAY)_Pf-CSP(346-375) | 327, aa346-375 | | | |
| HsALB_Pf-CSP(19-272)_Linker(AAY)_Pf-CSP(346- | aa19-272, aa346- | 69.02 | 15 | 24 |
| 365)_Linker(AAY)_P2 | 365 | | | |
| HsALB_Pf-CSP(19-272)_Linker(AAY)_Pf-CSP(346- | aa19-272, aa346- | 69.02 | 16 | 23 |
| 365)_Linker(AAY)_PADRE | 365 | | | |
| HsALB_Pf-CSP(19-272)_Linker(G4S)_Pf-CSP(310- | aa19-272, aa310- | 76.07 | 17 | 17 |
| 327)_Linker(G4S)_Pf-CSP(346-375) | 327, aa346-375 | | | |
| HsALB_Pf-CSP(19-272)_Linker(G4S)_Pf-CSP(310-327)_ | aa19-272, aa310- | 76.07 | 18 | 18 |
| Pf-CSP(346-375) | 327, aa346-375 | | | |
| HsALB_Pf-CSP(19-325) | aa19-325 | 77.33 | 19 | |
| HsALB_Pf-CSP(19-384) | aa19-384 | 92.19 | 20 | 9 |
| HsALB_Pf-CSP(19-384)_TM domain HA | aa19-384 | 92.19 | 21 | 3 |
| HsALB_Pf-CSP(82-397) | aa82-397 | 79.60 | 22 | 15 |
| HsALB_Pf-CSP(93-192) | aa93-192 | 25.19 | 23 | |
| HsALB_Pf-CSP(93-272) | aa93-272 | 45.34 | 24 | |
| HsALB_Pf-CSP(93-397) | aa93-397 | 76.83 | 25 | 14 |
| HsALB_Pf-CSP(98-192) | aa98-192 | 23.93 | 26 | |
| HsALB_Pf-CSP(98-272) | aa98-272 | 44.08 | 27 | |
| HsALB_Pf-CSP(98-374) | aa98-374 | 69.77 | 28 | |
| HsALB_Pf-CSP(98-397) | aa98-397 | 75.57 | 29 | 13 |
| HsALB_Pf-CSP(199-377)_Linker(PVTN)_HBsAg | aa199-377 | 45.09 | 30 | 5 |
| LumSynt_Linker(GGS4-GGG)_Pf-CSP(19-397) | aa19-397 | 95.47 | 8742 | 28 |
| HsALB_Pf-CSP(19-272)_Linker(PVTN)_HBsAg | aa19-272 | 63.98 | 8743 | 7 |
| HsALB_Pf-CSP(19-272)_Linker(AAY)_Pf-CSP(346- | aa19-272, aa346- | 69.02 | 8744 | 26 |
| 365)_Linker(AAY)_PADRE_Linker(PVTN)_HBsAg | 365 | | | |
| HsALB_Pf-CSP(19-384)_Linker(PVTN)_HBsAg | aa19-384 | 92.19 | 8745 | 6 |
| HsALB_Pf-CSP(19-384)_Linker(SGG)_Ferritin | aa19-384 | 92.19 | 8746 | 27 |
| HsALB_Pf-CSP(93-384)_Linker(PVTN)_HBsAg | aa93-384 | 73.55 | 8747 | 8 |
| HsALB_Pf-CSP(19-272)_Linker(AAY)_Pf-CSP(346- | aa19-272, aa346- | 73.55 | 8749 | 22 |
| 375)_Linker(AAY)_Pf-CSP(310-327) | 375, aa310-327 | | | |
| HsALB_Pf-CSP(19-272)_Linker(AAY)_Pf-CSP(346- | aa19-272, aa346- | 73.55 | 8750 | 25 |
| 375)_Linker(AAY)_Pf-CSP(310-327)_Linker(AAY)_PADRE | 375, aa310-327 | | | |
| HsALB_Pf-CSP(19-272)_Linker(AAY)_Pf-CSP(310- | aa19-272, aa310- | 73.55 | 8751 | 19 |
| 327)_Linker(AAY)_Pf-CSP(346-375)_Linker(AAY)_PADRE | 327, aa346-375 | | | |
| HsALB_Pf-CSP(19-272)_Linker(AAY)Pf-CSP(310- | aa19-272, aa310- | 73.55 | 8752 | 20 |
| 327)_Linker(AAY)_Pf-CSP(346- | 327, aa346-375 | | | |
| 375)_Linker(AAY)_PADRE_Linker(AAY)_P2 | | | | |
| HsALB_Pf-CSP(19-272)_Linker(AAY)_Pf-CSP(310-327)_Linker | aa19-272, aa310- | 73.55 | 8753 | 21 |
| (AAY)_Pf-CSP(346-397) | 327, aa346-397 | | | |
| Pb-CSP | aa1-340 | 85.64 | 31 | |
| Pb-CSP_Linker(G4SG4)_TM domain HA | aa1-340 | 85.64 | 32 | |
| HsALB_Pb-CSP(24-340) | aa24-340 | 79.85 | 33 | |
| HsIns-iso1_Pb-CSP(24-340) | aa24-340 | 79.85 | 34 | |
| HsSPARC_Pb-CSP(24-340) | aa24-340 | 79.85 | 35 | |
| IgE_Pb-CSP(24-340) | aa24-340 | 79.85 | 36 | |

[0166] In various embodiments, the RNA of the first aspect comprises at least one coding sequence encoding at least one antigenic peptide or protein comprising or consisting of at least one amino acid sequences being identical or at least 70%, 80%, 85%, 86%, 87%, 88%, 89%, 90%, 91%, 92%, 93%, 94%, 95%, 96%, 97%, 98%, or 99% identical to any one of SEQ ID NOs: 1-36, 2081-2120, 2481-2886, 8742-8753, 10080-10085, or an immunogenic fragment or immunogenic variant of any of these sequences. Additional information regarding each of these suitable amino acid sequences encoding CSP antigens may also be derived from the sequence listing, in particular from the details provided therein under identifier <223> as explained in the following.

[0167] In preferred embodiments, the RNA of the first aspect comprises at least one coding sequence encoding at least one antigenic peptide or protein comprising or consisting of at least one amino acid sequences being identical or at least 70%, 80%, 85%, 86%, 87%, 88%, 89%, 90%, 91%, 92%, 93%, 94%, 95%, 96%, 97%, 98%, or 99% identical to any one of SEQ ID NOs: 1, 31, 2081, 2481-2886, or an immunogenic fragment or immunogenic variant of any of these sequences. Additional information regarding each of these suitable amino acid sequences encoding CSP antigens may also be derived from the sequence listing, in particular from the details provided therein under identifier <223> as explained in the following.

[0168] In particularly preferred embodiments, the RNA of the first aspect comprises at least one coding sequence encoding at least one antigenic peptide or protein comprising or consisting of at least one amino acid sequences being identical or at least 70%, 80%, 85%, 86%, 87%, 88%, 89%, 90%, 91%, 92%, 93%, 94%, 95%, 96%, 97%, 98%, or 99% identical to any one of SEQ ID NO: 1-36, 8742-8753 (see e.g. Table 1), or an immunogenic fragment or immunogenic variant of any of these sequences. Additional information regarding each of these suitable amino acid sequences encoding CSP antigens may also be derived from the sequence listing, in particular from the details provided therein under identifier <223> as explained in the following.

[0169] In other embodiments, the RNA of the first aspect comprises at least one coding sequence encoding at least one antigenic peptide or protein comprising or consisting of at least one amino acid sequences being identical or at least 70%, 80%, 85%, 86%, 87%, 88%, 89%, 90%, 91%, 92%, 93%, 94%, 95%, 96%, 97%, 98%, or 99% identical to any one of SEQ ID NOs: 13-17 of patent application WO2017/070624A1 or a fragment or variant of any of these sequences. In this context SEQ ID NOs: 13-17, of patent application WO2017/070624A1, and the disclosure related thereto, are herewith incorporated by reference.

[0170] In various embodiments, the RNA of the first aspect comprises at least one coding sequence encoding at least one antigenic peptide or protein derived from circumsporozoite protein (CSP) of a Malaria parasite, or an immunogenic fragment or immunogenic variant thereof, wherein the amino acid sequence is mutated/substituted to delete at least one predicted or potential glycosylation site.

[0171] It may suitable in the context of the invention that glycosylation sites in the encoded amino acid sequence are mutated/substituted which means that encoded amino acids which may be glycosylated, e.g. after translation of the coding RNA upon in vivo administration, are exchanged to a different amino acid. Accordingly, on nucleic acid level, codons encoding asparagine which are predicted to be glycosylated (N glycosylation sites) are substituted with codons encoding glutamine.

[0172] By mutation/substitution of the relevant amino acids, glycosylation may be prevented. In this context at least one codon coding for an asparagine, arginine, serine, threonine, tyrosine, lysine, proline or tryptophan is modified in such a way that a different amino acid is encoded thereby deleting at least one predicted or potential glycosylation site. The predicted glycosylation sites may be predicted by using artificial neural networks that examine the sequence for common glycosylation sites, e.g. N-glycosylation sites may be predicted by using the NetNGlyc 1.0 Server.

[0173] In preferred embodiments, the at least one antigenic protein derived from circumsporozoite protein (CSP) of a Malaria parasite, or an immunogenic fragment or immunogenic variant thereof, is mutated to delete at least one predicted or potential glycosylation site, e.g. asparagine (N) is substituted by a glutamine (Q). Accordingly, on nucleic acid level, the nucleic acid sequence is modified to encode for Q instead of N at predicted N-glycosylation sites, for example at predicted N-glycosylation sites of the encoded CSP protein, or a fragment, variant or derivative thereof. In this context the term “mutated CSP” means that at least one (predicted) glycosylation site is mutated.

[0174] In various embodiments, the amino acid sequences of the at least one antigenic protein derived from circumsporozoite protein (CSP) of a Malaria parasite, or an immunogenic fragment or immunogenic variant thereof is mutated to delete all predicted or potential glycosylation sites.

### Suitable Coding Sequences:

[0175] According to preferred embodiments, the coding RNA comprises at least one coding sequence encoding at least one antigenic peptide or protein derived from CSP as defined herein, or fragments and variants thereof. In that context, any coding sequence encoding at least one antigenic peptide or protein derived from CSP, preferably derived from CSP from Pf(3D7), or fragments and variants thereof may be understood as suitable coding sequence and may therefore be comprised in the coding RNA of the first aspect.

[0176] In preferred embodiments, the coding RNA of the first aspect may comprise or consist of at least one coding sequence encoding at least one antigenic peptide or protein derived from CSP as defined herein, preferably encoding any one of SEQ ID NOs: 1-36, 2081-2120, 2481-2886, 8742-8753, 10080-10085 or fragments of variants thereof.

[0177] It has to be understood that, on nucleic acid level, any nucleic acid sequence, in particular, any RNA sequence which encodes an amino acid sequences being identical to SEQ ID NOs: 1-36, 2081-2120, 2481-2886, 8742-8753, 10080-10085 or fragments or variants thereof, or any nucleic acid sequence (e.g. DNA sequence, RNA sequence) which encodes amino acid sequences being at least 70%, 80%, 85%, 86%, 87%, 88%, 89%, 90%, 91%, 92%, 93%, 94%, 95%, 96%, 97%, 98%, or 99% identical to any one of SEQ ID NOs: 1-36, 2081-2120, 2481-2886, 8742-8753, 10080-10085 or fragments or variants thereof, may be selected and may accordingly be understood as suitable coding sequence and may therefore be comprised in the coding RNA of the first aspect.

[0178] In preferred embodiments, the coding RNA of the first aspect may comprise or consist of at least one coding sequence encoding any one of SEQ ID NO: 1-36, 8742-8753 or fragments of variants thereof. It has to be understood that, on nucleic acid level, any nucleic acid sequence, in particular, any RNA sequence which encodes an amino acid sequences being identical to SEQ ID NO: 1-36, 8742-8753 or fragments or variants thereof, or any nucleic acid sequence (e.g. DNA sequence, RNA sequence) which encodes amino acid sequences being at least 70%, 80%, 85%, 86%, 87%, 88%, 89%, 90%, 91%, 92%, 93%, 94%, 95%, 96%, 97%, 98%, or 99% identical to any one of SEQ ID NO: 1-36, 8742-8753 or fragments or variants thereof, may be selected and may accordingly be understood as suitable coding sequence and may therefore be comprised in the coding RNA of the first aspect.

[0179] In other embodiments, the coding RNA of the first aspect may comprise or consist of at least one coding sequence encoding any one of SEQ ID NOs: 13-17 of patent application WO2017/070624A1 or fragments of variants thereof. It has to be understood that, on nucleic acid level, any nucleic acid sequence, in particular, any RNA sequence which encodes an amino acid sequences being identical to SEQ ID NOs: 13-17 of patent application WO2017/070624A1 or fragments or variants thereof, or any nucleic acid sequence (e.g. DNA sequence, RNA sequence) which encodes amino acid sequences being at least 70%, 80%, 85%, 86%, 87%, 88%, 89%, 90%, 91%, 92%, 93%, 94%, 95%, 96%, 97%, 98%, or 99% identical to any one of SEQ ID NOs: 13-17 of patent application WO2017/070624A1 or fragments or variants thereof, may be selected and may accordingly be understood as suitable coding sequence and may therefore be comprised in the coding RNA of the first aspect.

[0180] In preferred embodiments, the coding RNA of the first aspect comprises a coding sequence that comprises at least one of the nucleic acid sequences being identical or at least 70%, 80%, 85%, 86%, 87%, 88%, 89%, 90%, 91%, 92%, 93%, 94%, 95%, 96%, 97%, 98%, or 99% identical to SEQ ID NOs: 37-328, 2121-2480, 2887-6134, 8754-8855, 10086-10139 or a fragment or a fragment or variant of any of these sequences.

[0181] Additional information regarding each of these suitable nucleic acid sequences encoding may also be derived from the sequence listing, in particular from the details provided therein under identifier <223>.

[0182] In particularly preferred embodiments, the coding RNA of the first aspect comprises a coding sequence that comprises at least one of the nucleic acid sequences being identical or at least 70%, 80%, 85%, 86%, 87%, 88%, 89%, 90%, 91%, 92%, 93%, 94%, 95%, 96%, 97%, 98%, or 99% identical to SEQ ID NOs: 37-328, 8754-8855, or a fragment or a fragment or variant of any of these sequences. Additional information regarding each of these suitable nucleic acid sequences encoding may also be derived from the sequence listing, in particular from the details provided therein under identifier <223>.

[0183] In further preferred embodiments, the coding RNA of the first aspect comprises a coding sequence that comprises at least one of the nucleic acid sequences being identical or at least 70%, 80%, 85%, 86%, 87%, 88%, 89%, 90%, 91%, 92%, 93%, 94%, 95%, 96%, 97%, 98%, or 99% identical to SEQ ID NOs: 37, 40, 41, 71, 77, 107, 113, 143, 149, 179, 185, 215, 221, 251, 257, 287, 293, 323, 2121, 2161, 2201, 2241, 2281, 2321, 2361, 2401, 2441, 2887-6134, or a fragment or a fragment or variant of any of these sequences. Additional information regarding each of these suitable nucleic acid sequences encoding may also be derived from the sequence listing, in particular from the details provided therein under identifier <223>.

[0184] In further preferred embodiments, the coding RNA of the first aspect comprises a coding sequence that comprises at least one of the nucleic acid sequences being identical or at least 70%, 80%, 85%, 86%, 87%, 88%, 89%, 90%, 91%, 92%, 93%, 94%, 95%, 96%, 97%, 98%, or 99% identical to SEQ ID NOs: 44, 80, 116, 152, 188, 224, 260, 296, 8755, or a fragment or a fragment or variant of any of these sequences (encoding HsALB_Pf-CSP(19-397)). Additional information regarding each of these suitable nucleic acid sequences encoding may also be derived from the sequence listing, in particular from the details provided therein under identifier <223>.

[0185] In preferred embodiments, the coding RNA of the first aspect is an artificial RNA.

[0186] The term “artificial RNA” as used herein is intended to refer to an RNA that does not occur naturally. In other words, an artificial RNA may be understood as a non-natural nucleic acid molecule. Such RNA molecules may be non-natural due to its individual sequence (e.g. G/C content modified coding sequence, UTRs) and/or due to other modifications, e.g. structural modifications of nucleotides. Typically, artificial RNA may be designed and/or generated by genetic engineering to correspond to a desired artificial sequence of nucleotides (i.e., heterologous sequence). In this context an artificial RNA is a sequence that may not occur naturally, i.e. it differs from the wild type sequence by at least one nucleotide. The term “artificial RNA” is not restricted to mean “one single molecule” but is understood to comprise an ensemble of essentially identical molecules. Accordingly, it may relate to a plurality of essentially identical RNA molecules. The RNA of the invention is preferably an artificial RNA.

[0187] In preferred embodiments, the coding RNA of the first aspect is a modified and/or stabilized artificial RNA.

[0188] According to preferred embodiments, the RNA of the present invention may thus be provided as a “stabilized artificial RNA” or “stabilized coding RNA” that is to say an RNA showing improved resistance to in vivo degradation and/or an RNA showing improved stability in vivo, and/or an RNA showing improved translatability in vivo. In the following, specific suitable modifications in this context are described which are suitably to “stabilize” the RNA.

[0189] Such stabilization may be effected by providing a “dried RNA” and/or a “purified RNA” as specified herein. Alternatively or in addition to that, such stabilization can be effected, for example, by a modified phosphate backbone of the coding RNA of the present invention. A backbone modification in connection with the present invention is a modification in which phosphates of the backbone of the nucleotides contained in the RNA are chemically modified. Nucleotides that may be preferably used in this connection contain e.g. a phosphorothioate-modified phosphate backbone, preferably at least one of the phosphate oxygens contained in the phosphate backbone being replaced by a sulfur atom. Stabilized RNAs may further include, for example: non-ionic phosphate analogues, such as, for example, alkyl and aryl phosphonates, in which the charged phosphonate oxygen is replaced by an alkyl or aryl group, or phosphodiesters and alkylphosphotriesters, in which the charged oxygen residue is present in alkylated form. Such backbone modifications typically include, without implying any limitation, modifications from the group consisting of methylphosphonates, phosphoramidates and phosphorothioates (e.g. cytidine-5″-O-(1-thiophosphate)).

[0190] In the following, suitable modifications are described that are capable of “stabilizing” the RNA of the invention.

[0191] According to embodiments, the RNA is a modified RNA, wherein the modification refers to chemical modifications comprising backbone modifications as well as sugar modifications or base modifications.

[0192] A modified RNA may comprise nucleotide analogues/modifications, e.g. backbone modifications, sugar modifications or base modifications. A backbone modification in the context of the invention is a modification, in which phosphates of the backbone of the nucleotides of the RNA are chemically modified. A sugar modification in the context of the invention is a chemical modification of the sugar of the nucleotides of the RNA. Furthermore, a base modification in the context of the invention is a chemical modification of the base moiety of the nucleotides of the RNA. In this context, nucleotide analogues or modifications are preferably selected from nucleotide analogues which are applicable for transcription and/or translation.

[0193] In particularly preferred embodiments, the nucleotide analogues/modifications which may be incorporated into a modified RNA as described herein are preferably selected from 2-amino-6-chloropurineriboside-5′-triphosphate, 2-Aminopurine-riboside-5′-triphosphate; 2-aminoadenosine-5′-triphosphate, 2′-Amino-2′-deoxycytidine-triphosphate, 2-thiocytidine-5′-triphosphate, 2-thiouridine-5′-triphosphate, 2′-Fluorothymidine-5′-triphosphate, 2′-O-Methyl-inosine-5′-triphosphate 4-thiouridine-5′-triphosphate, 5-aminoallylcytidine-5′-triphosphate, 5-aminoallyluridine-5′-triphosphate, 5-bromocytidine-5′-triphosphate, 5-bromouridine-5′-triphosphate, 5-Bromo-2′-deoxycytidine-5′-triphosphate, 5-Bromo-2′-deoxyuridine-5′-triphosphate, 5-iodocytidine-5′-triphosphate, 5-lodo-2′-deoxycytidine-5′-triphosphate, 5-iodouridine-5′-triphosphate, 5-lodo-2′-deoxyuridine-5′-triphosphate, 5-methylcytidine-5′-triphosphate, 5-methyluridine-5′-triphosphate, 5-Propynyl-2′-deoxycytidine-5′-triphosphate, 5-Propynyl-2′-deoxyuridine-5′-triphosphate, 6-azacytidine-5′-triphosphate, 6-azauridine-5′-triphosphate, 6-chloropurineriboside-5′-triphosphate, 7-deazaadenosine-5′-triphosphate, 7-deazaguanosine-5′-triphosphate, 8-azaadenosine-5′-triphosphate, 8-azidoadenosine-5′-triphosphate, benzimidazole-riboside-5′-triphosphate, N1-methyladenosine-5′-triphosphate, N1-methylguanosine-5′-triphosphate, N6-methyladenosine-5′-triphosphate, O6-methylguanosine-5′-triphosphate, pseudouridine-5′-triphosphate, or puromycin-5′-triphosphate, xanthosine-5′-triphosphate. Particular preference is given to nucleotides for base modifications selected from the group of base-modified nucleotides consisting of 5-methylcytidine-5′-triphosphate, 7-deazaguanosine-5′-triphosphate, 5-bromocytidine-5′-triphosphate, and pseudouridine-5′-triphosphate, pyridin-4-one ribonucleoside, 5-aza-uridine, 2-thio-5-aza-uridine, 2-thiouridine, 4-thio-pseudouridine, 2-thio-pseudouridine, 5-hydroxyuridine, 3-methyluridine, 5-carboxymethyl-uridine, 1-carboxymethyl-pseudouridine, 5-propynyl-uridine, 1-propynyl-pseudouridine, 5-taurinomethyluridine, 1-taurinomethyl-pseudouridine, 5-taurinomethyl-2-thio-uridine, 1-taurinomethyl-4-thio-uridine, 5-methyl-uridine, 1-methyl-pseudouridine, 4-thio-1-methyl-pseudouridine, 2-thio-1-methyl-pseudouridine, 1-methyl-1-deaza-pseudouridine, 2-thio-1-methyl-1-deaza-pseudouridine, dihydrouridine, dihydropseudouridine, 2-thio-dihydrouridine, 2-thio-dihydropseudouridine, 2-methoxyuridine, 2-methoxy-4-thio-uridine, 4-methoxy-pseudouridine, and 4-methoxy-2-thio-pseudouridine, 5-aza-cytidine, pseudoisocytidine, 3-methyl-cytidine, N4-acetylcytidine, 5-formylcytidine, N4-methylcytidine, 5-hydroxymethylcytidine, 1-methyl-pseudoisocytidine, pyrrolo-cytidine, pyrrolo-pseudoisocytidine, 2-thio-cytidine, 2-thio-5-methyl-cytidine, 4-thio-pseudoisocytidine, 4-thio-1-methyl-pseudoisocytidine, 4-thio-1-methyl-1-deaza-pseudoisocytidine, 1-methyl-1-deaza-pseudoisocytidine, zebularine, 5-aza-zebularine, 5-methyl-zebularine, 5-aza-2-thio-zebularine, 2-thio-zebularine, 2-methoxy-cytidine, 2-methoxy-5-methyl-cytidine, 4-methoxy-pseudoisocytidine, and 4-methoxy-1-methyl-pseudoisocytidine, 2-aminopurine, 2,6-diaminopurine, 7-deaza-adenine, 7-deaza-8-aza-adenine, 7-deaza-2-aminopurine, 7-deaza-8-aza-2-aminopurine, 7-deaza-2,6-diaminopurine, 7-deaza-8-aza-2,6-diaminopurine, 1-methyladenosine, N6-methyladenosine, N6-isopentenyladenosine, N6-(cis-hydroxyisopentenyl)adenosine, 2-methylthio-N6-(cis-hydroxyisopentenyl) adenosine, N6-glycinylcarbamoyladenosine, N6-threonylcarbamoyladenosine, 2-methylthio-N6-threonyl carbamoyladenosine, N6,N6-dimethyladenosine, 7-methyladenine, 2-methylthio-adenine, and 2-methoxy-adenine, inosine, 1-methyl-inosine, wyosine, wybutosine, 7-deaza-guanosine, 7-deaza-8-aza-guanosine, 6-thio-guanosine, 6-thio-7-deaza-guanosine, 6-thio-7-deaza-8-aza-guanosine, 7-methyl-guanosine, 6-thio-7-methyl-guanosine, 7-methylinosine, 6-methoxy-guanosine, 1-methylguanosine, N2-methylguanosine, N2,N2-dimethylguanosine, 8-oxo-guanosine, 7-methyl-8-oxo-guanosine, 1-methyl-6-thio-guanosine, N2-methyl-6-thio-guanosine, and N2,N2-dimethyl-6-thio-guanosine, 5′-O-(1-thiophosphate)-adenosine, 5′-O-(1-thiophosphate)-cytidine, 5′-O-(1-thiophosphate)-guanosine, 5′-O-(1-thiophosphate)-undine, 5′-O-(1-thiophosphate)-pseudouridine, 6-aza-cytidine, 2-thio-cytidine, alpha-thio-cytidine, Pseudo-iso-cytidine, 5-aminoallyl-uridine, 5-iodo-uridine, N1-methyl-pseudouridine, 5,6-dihydrouridine, alpha-thio-uridine, 4-thio-uridine, 6-aza-uridine, 5-hydroxy-uridine, deoxy-thymidine, 5-methyl-uridine, Pyrrolo-cytidine, inosine, alpha-thio-guanosine, 6-methyl-guanosine, 5-methyl-cytdine, 8-oxo-guanosine, 7-deaza-guanosine, N1-methyl-adenosine, 2-amino-6-Chloro-purine, N6-methyl-2-amino-purine, Pseudo-iso-cytidine, 6-Chloro-purine, N6-methyl-adenosine, alpha-thio-adenosine, 8-azido-adenosine, 7-deaza-adenosine.

[0194] In some embodiments, at least one chemical modification is selected from pseudouridine, N1-methylpseudouridine, N1-ethylpseudouridine, 2-thiouridine, 4′-thiouridine, 5-methylcytosine, 5-methyluridine, 2-thio-1-methyl-1-deaza-pseudouridine, 2-thio-1-methyl-pseudouridine, 2-thio-5-aza-uridine, 2-thio-dihydropseudouridine, 2-thio-dihydrouridine, 2-thio-pseudouridine, 4-methoxy-2-thio-pseudouridine, 4-methoxy-pseudouridine, 4-thio-1-methyl-pseudouridine, 4-thio-pseudouridine, 5-aza-uridine, dihydropseudouridine, 5-methoxyuridine and 2′-O-methyl uridine.

[0195] In some embodiments, 100% of the uracil in the coding sequence have a chemical modification, preferably a chemical modification is in the 5-position of the uracil.

[0196] Particularly preferred in the context of the invention are pseudouridine (ψ), N1-methylpseudouridine (m1ψ), 5-methylcytosine, and 5-methoxyuridine. Accordingly, the RNA of the first aspect may comprise at least one modified nucleotide selected from pseudouridine (ψ), N1-methylpseudouridine (m1ψ), 5-methylcytosine, and 5-methoxyuridine.

[0197] In preferred embodiments, the RNA comprises at least one codon modified coding sequence.

[0198] In preferred embodiments, the amino acid sequence encoded by the at least one codon modified coding sequence is preferably not being modified compared to the amino acid sequence encoded by the corresponding wild type coding sequence.

[0199] The term “codon modified coding sequence” relates to coding sequences that differ in at least one codon (triplets of nucleotides coding for one amino acid) compared to the corresponding wild type coding sequence. Suitably, a codon modified coding sequence in the context of the invention may show improved resistance to in vivo degradation and/or improved stability in vivo, and/or improved translatability in vivo. Codon modifications in the broadest sense make use of the degeneracy of the genetic code wherein multiple codons may encode the same amino acid and may be used interchangeably (cf. Table 2) to optimize/modify the coding sequence for in vivo applications as outlined above.

[0200] In particularly preferred embodiments of the first aspect, the at least one sequence is a codon modified coding sequence, wherein the codon modified coding sequence is selected from C maximized coding sequence, CAI maximized coding sequence, human codon usage adapted coding sequence, G/C content modified coding sequence, and G/C optimized coding sequence, or any combination thereof, or any combination thereof.

[0201] In preferred embodiments, the RNA may be modified, wherein the C content of the at least one coding sequence may be increased, preferably maximized, compared to the C content of the corresponding wild type coding sequence (herein referred to as “C maximized coding sequence”). The amino acid sequence encoded by the C maximized coding sequence of the RNA is preferably not modified as compared to the amino acid sequence encoded by the respective wild type nucleic acid coding sequence. The generation of a C maximized nucleic acid sequences may suitably be carried out using a modification method according to WO2015/062738. In this context, the disclosure of WO2015/062738 is included herewith by reference. Throughout the description, including the <223> identifier of the sequence listing, C maximized coding sequences are indicated by the abbreviation “opt2”.

[0202] In embodiments, the RNA may be modified, wherein the G/C content of the at least one coding sequence may be modified compared to the G/C content of the corresponding wild type coding sequence (herein referred to as “G/C content modified coding sequence”). In this context, the terms “G/C optimization” or “G/C content modification” relate to an RNA that comprises a modified, preferably an increased number of guanosine and/or cytosine nucleotides as compared to the corresponding wild type RNA sequence. Such an increased number may be generated by substitution of codons containing adenosine or thymidine nucleotides by codons containing guanosine or cytosine nucleotides. Advantageously, RNA sequences having an increased G (guanosine)/C (cytosine) content are more stable than sequences having an increased A (adenosine)/U (uracil) content. The amino acid sequence encoded by the G/C content modified coding sequence of the RNA is preferably not modified as compared to the amino acid sequence encoded by the respective wild type sequence. Preferably, the G/C content of the coding sequence of the RNA sequence is increased by at least 10%, 20%, 30%, preferably by at least 40% compared to the G/C content of the coding sequence of the corresponding wild type RNA sequence.

[0203] In preferred embodiments, the RNA may be modified, wherein the G/C content of the at least one coding sequence may be optimized compared to the G/C content of the corresponding wild type coding sequence (herein referred to as “G/C content optimized coding sequence”). “Optimized” in that context refers to a coding sequence wherein the G/C content is preferably increased to the essentially highest possible G/C content. The amino acid sequence encoded by the G/C content optimized coding sequence of the RNA is preferably not modified as compared to the amino acid sequence encoded by the respective wild type coding sequence. The generation of a G/C content optimized RNA sequence may be carried out using a G/C content optimization method according to WO2002/098443. In this context, the disclosure of WO2002/098443 is included in its full scope in the present invention. Throughout the description, including the <223> identifier of the sequence listing, G/C optimized coding sequences are indicated by the abbreviations “opt1, opt5, opt6, opt11”.

[0204] In embodiments, the RNA may be modified, wherein the codons in the at least one coding sequence may be adapted to human codon usage (herein referred to as “human codon usage adapted coding sequence”). Codons encoding the same amino acid occur at different frequencies in a subject, e.g. a human. Accordingly, the coding sequence of the RNA is preferably modified such that the frequency of the codons encoding the same amino acid corresponds to the naturally occurring frequency of that codon according to the human codon usage e.g. as shown in Table 2. For example, in the case of the amino acid Ala, the wild type coding sequence is preferably adapted in a way that the codon “GCC” is used with a frequency of 0.40, the codon “GCT” is used with a frequency of 0.28, the codon “GCA” is used with a frequency of 0.22 and the codon “GCG” is used with a frequency of 0.10 etc. (see Table 2). Accordingly, such a procedure (as exemplified for Ala) is applied for each amino acid encoded by the coding sequence of the RNA to obtain sequences adapted to human codon usage. Throughout the description, including the <223> identifier of the sequence listing, human codon usage adapted coding sequences are indicated by the abbreviation “opt3”.

TABLE 2
Human codon usage table with frequencies indicated for each amino acid

| Amino | | | Amino | | |
|---|---|---|---|---|---|
| acid | codon | frequency | acid | codon | frequency |
| Ala | GCG | 0.10 | Pro | CCG | 0.11 |
| Ala | GCA | 0.22 | Pro | CCA | 0.27 |
| Ala | GCT | 0.28 | Pro | CCT | 0.29 |
| Ala | GCC* | 0.40 | Pro | CCC* | 0.33 |
| Cys | TGT | 0.42 | Gln | CAG* | 0.73 |
| Cys | TGC* | 0.58 | Gln | CAA | 0.27 |
| Asp | GAT | 0.44 | Arg | AGG | 0.22 |
| Asp | GAC* | 0.56 | Arg | AGA* | 0.21 |
| Glu | GAG* | 0.59 | Arg | CGG | 0.19 |
| Glu | GAA | 0.41 | Arg | CGA | 0.10 |
| Phe | TTT | 0.43 | Arg | CGT | 0.09 |
| Phe | TTC* | 0.57 | Arg | CGC | 0.19 |
| Gly | GGG | 0.23 | Ser | AGT | 0.14 |
| Gly | GGA | 0.26 | Ser | AGC* | 0.25 |
| Gly | GGT | 0.18 | Ser | TCG | 0.06 |
| Gly | GGC* | 0.33 | Ser | TCA | 0.15 |
| His | CAT | 0.41 | Ser | TCT | 0.18 |
| His | CAC* | 0.59 | Ser | TCC | 0.23 |
| Ile | ATA | 0.14 | Thr | ACG | 0.12 |
| Ile | ATT | 0.35 | Thr | ACA | 0.27 |
| Ile | ATC* | 0.52 | Thr | ACT | 0.23 |
| Lys | AAG* | 0.60 | Thr | ACC* | 0.38 |
| Lys | AAA | 0.40 | Val | GTG* | 0.48 |
| Leu | TTG | 0.12 | Val | GTA | 0.10 |
| Leu | TTA | 0.06 | Val | GTT | 0.17 |
| Leu | CTG* | 0.43 | Val | GTC | 0.25 |
| Leu | CTA | 0.07 | Trp | TGG* | 1 |
| Leu | CTT | 0.12 | Tyr | TAT | 0.42 |
| Leu | CTC | 0.20 | Tyr | TAC* | 0.58 |
| Met | ATG* | 1 | Stop | TGA* | 0.61 |
| Asn | AAT | 0.44 | Stop | TAG | 0.17 |
| Asn | AAC* | 0.56 | Stop | TAA | 0.22 |

*most frequent human codon

[0205] In embodiments, the RNA may be modified, wherein the codon adaptation index (CAI) may be increased or preferably maximised in the at least one coding sequence (herein referred to as “CAI maximized coding sequence”). Accordingly, it is preferred that all codons of the wild type nucleic acid sequence that are relatively rare in e.g. a human cell are exchanged for a respective codon that is frequent in the e.g. a human cell, wherein the frequent codon encodes the same amino acid as the relatively rare codon. Suitably, the most frequent codons are used for each encoded amino acid (see Table 2, most frequent human codons are marked with asterisks). Suitably, the RNA of the first aspect comprises at least one coding sequence, wherein the codon adaptation index (CAI) of the at least one coding sequence is at least 0.5, at least 0.8, at least 0.9 or at least 0.95. Most preferably, the codon adaptation index (CAI) of the at least one coding sequence is 1. For example, in the case of the amino acid Ala, the wild type coding sequence is adapted in a way that the most frequent human codon “GCC” is always used for said amino acid. Accordingly, such a procedure (as exemplified for Ala) is applied for each amino acid encoded by the coding sequence of the RNA to obtain CAI maximized coding sequences. Throughout the description, including the <223> identifier of the sequence listing, CAI maximized coding sequences are indicated by the abbreviation “opt4”.

[0206] In preferred embodiments, the RNA of the first aspect comprises at least one coding sequence comprising a codon modified nucleic acid sequence which is identical or at least 70%, 80%, 85%, 86%, 87%, 88%, 89%, 90%, 91%, 92%, 93%, 94%, 95%, 96%, 97%, 98%, or 99% identical to a codon modified nucleic acid sequence selected from the group consisting of SEQ ID NOs: 41-328, 2161-2480, 3293-6134, 8754-8855, 10092-10139 or a fragment or variant of any of these sequences. Additional information regarding each of these suitable nucleic acid sequences encoding may also be derived from the sequence listing, in particular from the details provided therein under identifier <223>.

[0207] In particularly preferred embodiments, the RNA of the first aspect comprises at least one coding sequence comprising a codon modified nucleic acid sequence which is identical or at least 70%, 80%, 85%, 86%, 87%, 88%, 89%, 90%, 91%, 92%, 93%, 94%, 95%, 96%, 97%, 98%, or 99% identical to a codon modified nucleic acid sequence selected from the group consisting of SEQ ID NOs: 41-328, 8754-8855 or a fragment or variant of any of these sequences. Additional information regarding each of these suitable nucleic acid sequences encoding may also be derived from the sequence listing, in particular from the details provided therein under identifier <223>.

[0208] In preferred embodiments, the coding RNA of the first aspect comprises at least one coding sequence comprising a codon modified nucleic acid sequence which is identical or at least 50%, 60%, 70%, 80%, 85%, 86%, 87%, 88%, 89%, 90%, 91%, 92%, 93%, 94%, 95%, 96%, 97%, 98%, or 99% identical to any one of the G/C optimized nucleic acid sequence according to the SEQ ID NOs: 41-112, 2161-2240, 3293-3698, 8754-8783, 10092-10103 or a fragment or variant of any of these sequences (“opt1”). Additional information regarding each of these suitable nucleic acid sequences encoding may also be derived from the sequence listing, in particular from the details provided therein under identifier <223>.

[0209] In particularly preferred embodiments, the coding RNA of the first aspect comprises at least one coding sequence comprising a codon modified nucleic acid sequence which is identical or at least 50%, 60%, 70%, 80%, 85%, 86%, 87%, 88%, 89%, 90%, 91%, 92%, 93%, 94%, 95%, 96%, 97%, 98%, or 99% identical to any one of the G/C optimized nucleic acid sequence according to the SEQ ID NOs: 41-112, 8754-8783 or a fragment or variant of any of these sequences (“opt1”). Additional information regarding each of these suitable nucleic acid sequences encoding may also be derived from the sequence listing, in particular from the details provided therein under identifier <223>.

[0210] In particularly preferred embodiments, the coding RNA of the first aspect comprises at least one coding sequence comprising a codon modified nucleic acid sequence which is identical or at least 50%, 60%, 70%, 80%, 85%, 86%, 87%, 88%, 89%, 90%, 91%, 92%, 93%, 94%, 95%, 96%, 97%, 98%, or 99% identical to any one of the G/C optimized nucleic acid sequence according to the SEQ ID NOs: 44, 80, 8755, or a fragment or variant of any of these sequences (“opt1”). Additional information regarding each of these suitable nucleic acid sequences encoding may also be derived from the sequence listing, in particular from the details provided therein under identifier <223>.

[0211] As outlined above, the coding RNA of the first aspect comprises at least one coding sequence comprising a nucleic acid sequence encoding a CSP of a malaria parasite. Preferably said CSP is a more full length CSP as defined herein, more preferably a full length CSP as defined herein. Said CSP is preferably derived from Plasmodium falciparum (Pf). Alternatively, the CSP may be derived from Plasmodium knowlesi (Pk), Plasmodium malariae (Pm), Plasmodium ovale curtisi (Poc), Plasmodium ovale wallikeri (Pow), Plasmodium ovale (Po), Plasmodium vivax (Pv), Plasmodium berghei (Pb).

[0212] CSP proteins and coding sequences of malaria parasites are disclosed in Table A. Therein, rows 1-7 corresponds to CSP derived from the indicated malaria parasite species. The respective species is provided in Column A (abbreviations, see e.g. List 1). Column B of Table A provides the SEQ ID NO of the corresponding amino acid sequences, column C of Table A provides the SEQ ID NO of the corresponding wild type RNA coding sequences, and column D-J of Table A provides the SEQ ID NO of the codon modified coding sequences for each fragment (in the following order: “opt1”, “opt2”, “opt3”, “opt4”, “opt5”, “opt6”, “opt11”). Additional information regarding each of these suitable sequences may also be derived from the sequence listing, in particular from the details provided therein under identifier <223>.

TABLE A
CSP antigens and respective coding sequences:

| | A | B | C | D | E | F | G | H | I | J |
|---|---|---|---|---|---|---|---|---|---|---|
| 1 | Pf, Pk, | 1, 31, | 37, 40, | 41, 71, 77, | 113, | 149, | 185, | 221, | 257, | 293, |
| | Pm, Poc, | 2081, | 2121, | 107, 2161, | 143, | 179, | 215, | 251, | 287, | 323, |
| | Pow, Po, | 2481- | 2887- | 2201, 3293- | 2241, | 2281, | 2321, | 2361, | 2401, | 2441, |
| | Pv, Pb | 2886 | 3292 | 3698 | 3699- | 4105- | 4511- | 4917- | 5323- | 5729- |
| | | | | | 4104 | 4510 | 4916 | 5322 | 5728 | 6134 |
| 2 | Pf | 1, | 37, 2121, | 41, 77, 2161, | 113, | 149, | 185, | 221, | 257, | 293, |
| | | 2081, | 2887- | 2201, 3293- | 2241, | 2281, | 2321, | 2361, | 2401, | 2441, |
| | | 2481- | 3094 | 3500 | 3699- | 4105- | 4511- | 4917- | 5323- | 5729- |
| | | 2688 | | | 3906 | 4312 | 4718 | 5124 | 5530 | 5936 |
| 3 | Pk | 2689- | 3095- | 3501-3625 | 3907- | 4313- | 4719- | 5125- | 5531- | 5937- |
| | | 2813 | 3219 | | 4031 | 4437 | 4843 | 5249 | 5655 | 6061 |
| 4 | Pm | 2814- | 3220- | 3626-3630 | 4032- | 4438- | 4844- | 5250- | 5656- | 6062- |
| | | 2818 | 3224 | | 4036 | 4442 | 4848 | 5254 | 5660 | 6066 |
| 5 | Poc, | 2819- | 3225- | 3631-3636 | 4037- | 4443- | 4849- | 5255- | 5661- | 6067- |
| | Pow, Po | 2824 | 3230 | | 4042 | 4448 | 4854 | 5260 | 5666 | 6072 |
| 6 | Pv | 2825- | 3231- | 3637-3697 | 4043- | 4449- | 4855- | 5261- | 5667- | 6073- |
| | | 2885 | 3291 | | 4103 | 4509 | 4915 | 5321 | 5727 | 6133 |
| 7 | Pb | 31, | 40, 3292 | 71, 107, | 143, | 179, | 215, | 251, | 287, | 323, |
| | | 2886 | | 3698 | 4104 | 4510 | 4916 | 5322 | 5728 | 6134 |

[0213] CSP fragments, e.g. fragments described above (E1-E27) are disclosed in Table 3. Therein, each row (row 1-46) corresponds to a certain fragment of CSP derived from Pf(3D7), wherein e.g. row 1 represents the full length CSP. All amino acid positions described in the present descriptions are in relation to the amino acid positions of CSP from Pf(3D7) (row 1, column B, SEQ ID NO: 1). Column A Table 3 provides a description of the fragments, with an indication of the amino acid position in relation to the full length protein. For example, sequences provided in row 4 “CSP(19-397) CSP-delSP” relate to a CSP fragment ranging from amino acid position 19 to amino acid position 397, characterized in that the construct lacks the signal peptide (“delSP”). Column B Table 3 provides the SEQ ID NO of the corresponding amino acid sequences, column C Table 3 provides the SEQ ID NO of the corresponding wild type RNA coding sequences, and column D Table 3 provides the SEQ ID NO of the codon modified coding sequences for each fragment (in the following order: “opt1”, “opt1”, “opt2”, “opt3”, “opt4”, “opt5”, “opt6”, “opt11”). Additional information regarding each of these suitable sequences may also be derived from the sequence listing, in particular from the details provided therein under identifier <223>.

TABLE 3
CSP fragments and respective coding sequences:

| | A | B | C | D |
|---|---|---|---|---|
| 1 | CSP | 1 | 2121 | 2161, 2201, 2241, 2281, 2321, 2361, 2401, 2441 |
| 2 | CSP(1-374)_CSP-delGPI | 2082 | 2122 | 2162, 2202, 2242, 2282, 2322, 2362, 2402, 2442 |
| 3 | CSP(1-325)_CSP-delTSR(v2)- | 2083 | 2123 | 2163, 2203, 2243, 2283, 2323, 2363, 2403, 2443 |
| | delGPI | | | |
| 4 | CSP(19-397)_CSP-delSP | 2084 | 2124 | 2164, 2204, 2244, 2284, 2324, 2364, 2404, 2444 |
| 5 | CSP(19-374)_CSP-delSP-delGPI | 2085 | 2125 | 2165, 2205, 2245, 2285, 2325, 2365, 2405, 2445 |
| 6 | CSP(19-325)_CSP-delSP- | 2086 | 2126 | 2166, 2206, 2246, 2286, 2326, 2366, 2406, 2446 |
| | delTSR(v2)-delGPI | | | |
| 7 | CSP(19-135) | 2087 | 2127 | 2167, 2207, 2247, 2287, 2327, 2367, 2407, 2447 |
| 8 | CSP(19-193) | 2088 | 2128 | 2168, 2208, 2248, 2288, 2328, 2368, 2408, 2448 |
| 9 | CSP(19-272) | 2089 | 2129 | 2169, 2209, 2249, 2289, 2329, 2369, 2409, 2449 |
| 10 | CSP(19-384) | 2090 | 2130 | 2170, 2210, 2250, 2290, 2330, 2370, 2410, 2450 |
| 11 | CSP(82-397) | 2091 | 2131 | 2171, 2211, 2251, 2291, 2331, 2371, 2411, 2451 |
| 12 | CSP(93-192) | 2092 | 2132 | 2172, 2212, 2252, 2292, 2332, 2372, 2412, 2452 |
| 13 | CSP(93-272)_RI region_NANP | 2093 | 2133 | 2173, 2213, 2253, 2293, 2333, 2373, 2413, 2453 |
| | repeat region | | | |
| 14 | CSP(93-397) | 2094 | 2134 | 2174, 2214, 2254, 2294, 2334, 2374, 2414, 2454 |
| 15 | CSP(98-192) | 2095 | 2135 | 2175, 2215, 2255, 2295, 2335, 2375, 2415, 2455 |
| 16 | CSP(98-374) | 2096 | 2136 | 2176, 2216, 2256, 2296, 2336, 2376, 2416, 2456 |
| 17 | CSP(98-397) | 2097 | 2137 | 2177, 2217, 2257, 2297, 2337, 2377, 2417, 2457 |
| 18 | CSP(199-377) | 2098 | 2138 | 2178, 2218, 2258, 2298, 2338, 2378, 2418, 2458 |
| 19 | CSP(199-387) | 2099 | 2139 | 2179, 2219, 2259, 2299, 2339, 2379, 2419, 2459 |
| 20 | CSP(309-327)_RIII region, Th2R | 2100 | 2140 | 2180, 2220, 2260, 2300, 2340, 2380, 2420, 2460 |
| | v2 | | | |
| 21 | CSP(346-366)_Th3R v2 | 2101 | 2141 | 2181, 2221, 2261, 2301, 2341, 2381, 2421, 2461 |
| 22 | CSP(346-376)_Th3R_CS.T3 v2 | 2102 | 2142 | 2182, 2222, 2262, 2302, 2342, 2382, 2422, 2462 |
| 23 | CSP(1-18)_signal peptide | 2103 | 2143 | 2183, 2223, 2263, 2303, 2343, 2383, 2423, 2463 |
| 24 | CSP(27-384)_EcCSP fragment | 2104 | 2144 | 2184, 2224, 2264, 2304, 2344, 2384, 2424, 2464 |
| 25 | CSP(69-74)_3A1 antibody binding | 2105 | 2145 | 2185, 2225, 2265, 2305, 2345, 2385, 2425, 2465 |
| | site | | | |
| 26 | CSP(74-383)_PpCSP fragment | 2106 | 2146 | 2186, 2226, 2266, 2306, 2346, 2386, 2426, 2466 |
| 27 | CSP(75-94)_2C3 antibody binding | 2107 | 2147 | 2187, 2227, 2267, 2307, 2347, 2387, 2427, 2467 |
| | site | | | |
| 28 | CSP(93-97)_RI region | 2108 | 2148 | 2188, 2228, 2268, 2308, 2348, 2388, 2428, 2468 |
| 29 | CSP(95-100)_3H10/3B4 antibody | 2109 | 2149 | 2189, 2229, 2269, 2309, 2349, 2389, 2429, 2469 |
| | binding site | | | |
| 30 | CSP(98-272)_NANP repeat region | 2110 | 2150 | 2190, 2230, 2270, 2310, 2350, 2390, 2430, 2470 |
| 31 | CSP(105-272)_central repeat | 2111 | 2151 | 2191, 2231, 2271, 2311, 2351, 2391, 2431, 2471 |
| | region | | | |
| 32 | CSP(207-395)_RTS,S fragment | 2112 | 2152 | 2192, 2232, 2272, 2312, 2352, 2392, 2432, 2472 |
| 33 | CSP(310-327)_RIII region, Th2R | 2113 | 2153 | 2193, 2233, 2273, 2313, 2353, 2393, 2433, 2473 |
| | v1 | | | |
| | | 2108 | 2148 | 2188, 2228, |
| 33 | v1 (310-327) RIII region, Th2R n | 2113 | 2153 | 2193, 2233,2273, 2313, 2353, 2393,2433, 2473 |
| 34 | CSP(310-374)_RIII region_TSR | 2114 | 2154 | 2194, 2234, 2274, 2314, 2354, 2394, 2434, 2474 |
| | (RII+) | | | |
| 35 | CSP(319-375)_TSR region v3 | 2115 | 2155 | 2195, 2235, 2275, 2315, 2355, 2395, 2435, 2475 |
| 36 | CSP(326-374)_TSR region v1 | 2116 | 2156 | 2196, 2236, 2276, 2316, 2356, 2396, 2436, 2476 |
| 37 | CSP(328-374)_TSR region v2 | 2117 | 2157 | 2197, 2237, 2277, 2317, 2357, 2397, 2437, 2477 |
| 38 | CSP(330-347)_RII+ region v1 | 2118 | 2158 | 2198, 2238, 2278, 2318, 2358, 2398, 2438, 2478 |
| 39 | CSP(330-351)_RII+ region v2 | 2119 | 2159 | 2199, 2239, 2279, 2319, 2359, 2399, 2439, 2479 |
| 40 | CSP(375-397)_GPI anchor signal | 2120 | 2160 | 2200, 2240, 2280, 2320, 2360, 2400, 2440, 2480 |
| 41 | CSP(93-384) | 10080 | 10086 | 10092, 10098, 10104, 10110, 10116, 10122, |
| | | | | 10128, 10134 |
| 42 | CSP(19-152) | 10081 | 10087 | 10093, 10099, 10105, 10111, 10117, 10123, |
| | | | | 10129, 10135 |
| 43 | CSP(19-192) | 10082 | 10088 | 10094, 10100, 10106, 10112, 10118, 10124, |
| | | | | 10130, 10136 |
| 44 | CSP(346-365)_Th3R v1 | 10083 | 10089 | 10095, 10101, 10107, 10113, 10119, 10125, |
| | | | | 10131, 10137 |
| 45 | CSP(346-375)_Th3R_CS.T3 v1 | 10084 | 10090 | 10096, 10102, 10108, 10114, 10120, 10126, |
| | | | | 10132, 10138 |
| 46 | CSP(346-397) | 10085 | 10091 | 10097, 10103, 10109, 10115, 10121, 10127, |
| | | | | 10133, 10139 |

[0214] Heterologous elements suitable in the context of the invention, e.g. elements described above (secretory signal peptides, helper epitopes, etc.) are disclosed in Table 4. Therein, each row (row 1-16) corresponds to a certain heterologous element. Column A of Table 4 provides a description of the fragments. For example, sequences provided in row 3 “signal peptide_HsALB” relate to a heterologous signal peptide derived from a human albumin protein. Column B of Table 4 provides the SEQ ID NO of the corresponding amino acid sequences, column C of Table 4 provides the SEQ ID NO of the corresponding wild type RNA coding sequences, and column D of Table 4 provides the SEQ ID NO of the codon modified coding sequences for each fragment (“opt1”, “opt1”, “opt2”, “opt3”, “opt4”, “opt5”, “opt6”, “opt11”). Additional information regarding each of these suitable sequences may also be derived from the sequence listing, in particular from the details provided therein under identifier <223>.

TABLE 4
Heterologous elements and respective coding sequences:

| | A | B | C | D |
|---|---|---|---|---|
| 1 | signal peptide_HsALB | 6205 | 6209 | 6213, 10140, 6217, 6221, 6225, 6229, 6233, 6237 |
| 2 | signal peptide_IgE | 6206 | 6210 | 6214, 6218, 6222, 6226, 6230, 6234, 6238 |
| 3 | signal peptide_HsIns-iso1 | 6207 | 6211 | 6215, 6219, 6223, 6227, 6231, 6235, 6239 |
| 4 | signal peptide_HsSPARC | 6208 | 6212 | 6216, 6220, 6224, 6228, 6232, 6236, 6240 |
| 5 | Linker(AAY) | 6241 | | 6245-6251 |
| 6 | Linker(G4S) | 6242 | | 6252-6261 |
| 7 | Linker(PVTN) | 6243 | | 6262-6265 |
| 8 | Linker(G4SG4) | 6244 | | 6266-6271 |
| 9 | Linker(SGG) | 10141 | | 10142-10146 |
| 10 | Linker(GGS4-GGG) | 10147 | | 10148-10152 |
| 11 | P2 | 6272 | 6275 | 6278, 6281, 6284, 6287, 6290, 6293, 6296, 6299 |
| 12 | PADRE | 6273 | 6276 | 6279, 6282, 6285, 6288, 6291, 6294, 6297, 6300 |
| 13 | HBsAg | 6274 | 6277 | 6280, 6283, 6286, 6289, 6292, 6295, 6298, 6301 |
| 14 | TM domain HA | 6302 | 6303 | 6304, 6305, 6306, 6307, 6308, 6309, 6310, 6311 |
| 15 | Lumazine Synthase | 10153 | | 10154, 10155, 10156, 10157, 10158, 10159, 10160, |
| | (LumSynt) | | | 10161 |
| 16 | Ferritin | 10162 | 10163 | 10164, 10165, 10166, 10167, 10168, 10169, 10170, |
| | | | | 10171 |

[0215] In various embodiments, the coding RNA of the invention comprises at least one coding sequence comprising a nucleic acid sequence comprising at least one of the following nucleic acid sequences, preferably in 5′ to 3′ direction:
[0216] a) optionally, at least one nucleic acid sequences encoding a heterologous secretory signal sequence selected from SEQ ID NOs: 6209-6240, 10140, or fragments or variants thereof, and, optionally,
[0217] b) at least one nucleic acid sequences encoding an antigenic protein derived from CSP, preferably any one of the nucleic acid sequences selected from SEQ ID NOs: 37-328, 2121-2480, 2887-6134, 8754-8855, 10086-10139, or fragments or variants thereof, and
[0218] c) optionally, at least one nucleic acid sequences encoding a heterologous helper epitope selected from SEQ ID NOs: 6275, 6276, 6277, 6278, 6281, 6284, 6287, 6290, 6293, 6296, 6299, 6279, 6282, 6285, 6288, 6291, 6294, 6297, 6300, 6280, 6283, 6286, 6289, 6292, 6295, 6298, 6301, or fragments or variants thereof,
[0219] d) optionally, at least one nucleic acid sequences encoding a heterologous antigen clustering domain selected from SEQ ID NOs: 6277, 6280, 6283, 6286, 6289, 6292, 6295, 6298, 6301, 10154, 10155, 10156, 10157, 10158, 10159, 10160, 10161, 10163, 10164, 10165, 10166, 10167, 10168, 10169, 10170, 10171 or fragments or variants thereof,
[0220] e) optionally, at least one nucleic acid sequences encoding a heterologous transmembrane domain selected from SEQ ID NOs: 6303-6311 or fragments or variants thereof.

[0221] Further, a), b), c), d), and e) may be connected with linker elements, preferably via at least one nucleic acid sequence encoding a linker element selected from SEQ ID NOs: 6245-6271, 10142-10146, 10148-10152 or fragments or variants thereof.

[0222] Particularly preferred and suitable coding sequences of the coding RNA of the first aspect are provided in Table 5. Therein, each row (row 1-41) corresponds to a certain CSP constructs of the invention. Column A of Table 5 provides a description of the CSP constructs (cf. Table 1). Column B of Table 5 provides the SEQ ID NOs of the corresponding amino acid sequences (cf. Table 1). Column C of Table 5 provides the SEQ ID NOs of the corresponding opt1 RNA coding sequences, Column D of Table 5 provides the SEQ ID NOs of the corresponding “opt2” RNA coding sequences, Column E of Table 5 provides the SEQ ID NOs of the corresponding “opt3” RNA coding sequences, Column F of Table 5 provides the SEQ ID NOs of the corresponding “opt4” RNA coding sequences, Column G of Table 5 provides the SEQ ID NOs of the corresponding “opt5” RNA coding sequences, Column G of Table 5 provides the SEQ ID NOs of the corresponding “opt5” RNA coding sequences, Column H of Table 5 provides the SEQ ID NOs of the corresponding “opt6” RNA coding sequences, Column I of Table 5 provides the SEQ ID NOs of the corresponding “opt11” RNA coding sequences. Additional information regarding each of these suitable coding sequences may also be derived from the sequence listing, in particular from the details provided therein under identifier <223>.

TABLE 5
Preferred coding sequences of the invention

| A | B | C | D | E | F | G | H | I |
|---|---|---|---|---|---|---|---|---|
| Pf-CSP | 1 | 41, 77 | 113 | 149 | 185 | 221 | 257 | 293 |
| Pf-CSP(1-374) | 2 | 42, 78 | 114 | 150 | 186 | 222 | 258 | 294 |
| Pf-CSP(1-325) | 3 | 43, 79 | 115 | 151 | 187 | 223 | 259 | 295 |
| HsALB_Pf-CSP(19-397) | 4 | 44, 80, | 116 | 152 | 188 | 224 | 260 | 296 |
| | | 8755 | | | | | | |
| HsIns-isol_Pf-CSP(19-397) | 5 | 45, 81 | 117 | 153 | 189 | 225 | 261 | 297 |
| HsSPARC_Pf-CSP(19-397) | 6 | 46, 82 | 118 | 154 | 190 | 226 | 262 | 298 |
| IgE_Pf-CSP(19-397) | 7 | 47, 83 | 119 | 155 | 191 | 227 | 263 | 299 |
| Pf-CSP_Linker(G4SG4)_TM domain HA | 8 | 48, 84 | 120 | 156 | 192 | 228 | 264 | 300 |
| Pf-CSP(199-377)_Linker(PVTN)_HBsAg | 9 | 49, 85 | 121 | 157 | 193 | 229 | 265 | 301 |
| Pf-CSP(199-387)_Linker(PVTN)_HBsAg | 10 | 50, 86 | 122 | 158 | 194 | 230 | 266 | 302 |
| HsALB_Pf-CSP(19-152) | 11 | 51, 87 | 123 | 159 | 195 | 231 | 267 | 303 |
| HsALB_Pf-CSP(19-192) | 12 | 52, 88 | 124 | 160 | 196 | 232 | 268 | 304 |
| HsALB_Pf-CSP(19-272) | 13 | 53, 89 | 125 | 161 | 197 | 233 | 269 | 305 |
| HsALB_Pf-CSP(19-272)_Linker(AAY)_Pf- | 14 | 54, 90, | 126 | 162 | 198 | 234 | 270 | 306 |
| CSP(310-327)_Linker(AAY)_Pf-CSP(346-375) | | 8766 | | | | | | |
| HsALB_Pf-CSP(19-272)_Linker(AAY)_Pf- | 15 | 55, 91 | 127 | 163 | 199 | 235 | 271 | 307 |
| CSP(346-365)_Linker(AAY)_P2 | | | | | | | | |
| HsALB_Pf-CSP(19-272)_Linker(AAY)_Pf- | 16 | 56, 92 | 128 | 164 | 200 | 236 | 272 | 308 |
| CSP(346-365)_Linker(AAY)_PADRE | | | | | | | | |
| HsALB_Pf-CSP(19-272)_Linker(G4S)_Pf- | 17 | 57, 93 | 129 | 165 | 201 | 237 | 273 | 309 |
| CSP(310-327)_Linker(G4S)_Pf-CSP(346-375) | | | | | | | | |
| HsALB_Pf-CSP(19-272)_Linker(G4S)_Pf- | 18 | 58, 94 | 130 | 166 | 202 | 238 | 274 | 310 |
| CSP(310-327)_Pf-CSP(346-375) | | | | | | | | |
| HsALB_Pf-CSP(19-325) | 19 | 59, 95 | 131 | 167 | 203 | 239 | 275 | 311 |
| HsALB_Pf-CSP(19-384) | 20 | 60, 96 | 132 | 168 | 204 | 240 | 276 | 312 |
| HsALB_Pf-CSP(19-384)_TM domain HA | 21 | 61, 97 | 133 | 169 | 205 | 241 | 277 | 313 |
| HsALB_Pf-CSP(82-397) | 22 | 62, 98 | 134 | 170 | 206 | 242 | 278 | 314 |
| HsALB_Pf-CSP(93-192) | 23 | 63, 99 | 135 | 171 | 207 | 243 | 279 | 315 |
| HsALB_Pf-CSP(93-272) | 24 | 64, 100 | 136 | 172 | 208 | 244 | 280 | 316 |
| HsALB_Pf-CSP(93-397) | 25 | 65, 101 | 137 | 173 | 209 | 245 | 281 | 317 |
| HsALB_Pf-CSP(98-192) | 26 | 66, 102 | 138 | 174 | 210 | 246 | 282 | 318 |
| HsALB_Pf-CSP(98-272) | 27 | 67, 103 | 139 | 175 | 211 | 247 | 283 | 319 |
| HsALB_Pf-CSP(98-374) | 28 | 68, 104 | 140 | 176 | 212 | 248 | 284 | 320 |
| HsALB_Pf-CSP(98-397) | 29 | 69, 105 | 141 | 177 | 213 | 249 | 285 | 321 |
| HsALB_Pf-CSP(199-377)_Linker(PVTN)_HBsAg | 30 | 70, | 142 | 178 | 214 | 250 | 286 | 322 |
| | | 106, | | | | | | |
| | | 8765 | | | | | | |
| LumSynt_Linker(GGS4-GGG)_Pf-CSP(19-397) | 8742 | 8754, | 8784 | 8796 | 8808 | 8820 | 8832 | 8844 |
| | | 8772 | | | | | | |
| HsALB_Pf-CSP(19-272)_Linker(PVTN)_HBsAg | 8743 | 8756, | 8785 | 8797 | 8809 | 8821 | 8833 | 8845 |
| | | 8773 | | | | | | |
| HsALB_Pf-CSP(19-272)_Linker(AAY)_Pf- | 8744 | 8757, | 8786 | 8798 | 8810 | 8822 | 8834 | 8846 |
| CSP(346- | | 8758, | | | | | | |
| 365)_Linker(AAY)_PADRE_Linker(PVTN)_HBsAg | | 8774 | | | | | | |
| HsALB_Pf-CSP(19-384)_Linker(PVTN)_HBsAg | 8745 | 8759, | 8787 | 8799 | 8811 | 8823 | 8835 | 8847 |
| | | 8760, | | | | | | |
| | | 8775 | | | | | | |
| HsALB_Pf-CSP(19-384)_Linker(SGG)Ferritin | 8746 | 8761, | 8788 | 8800 | 8812 | 8824 | 8836 | 8848 |
| | | 8762, | | | | | | |
| | | 8776 | | | | | | |
| HsALB_Pf-CSP(93-384)_Linker(PVTN)_HBsAg | 8747 | 8763, | 8789 | 8801 | 8813 | 8825 | 8837 | 8849 |
| | | 8764, | | | | | | |
| | | 8777 | | | | | | |
| HsALB_Pf-CSP(19-272)_Linker(AAY)_Pf- | 8749 | 8767, | 8791 | 8803 | 8815 | 8827 | 8839 | 8851 |
| CSP(346-375)_Linker(AAY)_Pf-CSP(310-327) | | 8779 | | | | | | |
| HsALB_Pf-CSP(19-272)_Linker(AAY)_Pf- | 8750 | 8768, | 8792 | 8804 | 8816 | 8828 | 8840 | 8852 |
| CSP(346-375)_Linker(AAY)_Pf-CSP(310- | | 8780 | | | | | | |
| 327)_Linker(AAY)_PADRE | | | | | | | | |
| HsALB_Pf-CSP(19-272)_Linker(AAY)_Pf- | 8751 | 8769, | 8793 | 8805 | 8817 | 8829 | 8841 | 8853 |
| CSP(310-327)_Linker(AAY)_Pf-CSP(346- | | 8781 | | | | | | |
| 375)_Linker(AAY)_PADRE | | | | | | | | |
| HsALB_Pf-CSP(19-272)_Linker(AAY)_Pf- | 8752 | 8770, | 8794 | 8806 | 8818 | 8830 | 8842 | 8854 |
| CSP(310-327)_Linker(AAY)_Pf-CSP(346- | | 8782 | | | | | | |
| 375)_Linker(AAY)_PADRE_Linker(AAY)_P2 | | | | | | | | |
| HsALB_Pf-CSP(19-272)_Linker(AAY)_Pf- | 8753 | 8771, | 8795 | 8807 | 8819 | 8831 | 8843 | 8855 |
| CSP(310-327)_Linker (AAY)_Pf-CSP(346-397) | | 8783 | | | | | | |

RNA Elements, mRNA Elements:

[0223] In embodiments, the coding RNA of the first aspect may be monocistronic, bicistronic, or multicistronic.

[0224] The term “monocistronic” will be recognized and understood by the person of ordinary skill in the art, and is e.g. intended to refer to an RNA that comprises only one coding sequences. The terms “bicistronic”, or “multicistronic” as used herein will be recognized and understood by the person of ordinary skill in the art, and are e.g. intended to refer to an RNA that may have two (bicistronic) or more (multicistronic) coding sequences.

[0225] In preferred embodiments, the coding RNA of the first aspect is monocistronic.

[0226] In embodiments, the coding RNA is monocistronic and the coding sequence of said RNA encodes at least two different antigenic peptides or proteins derived from a Malaria parasite (e.g. Plasmodium CSP). Accordingly, said coding sequence may encode at least two, three, four, five, six, seven, eight and more antigenic peptides or proteins derived from a Malaria parasite (e.g. Plasmodium CSP), linked with or without an amino acid linker sequence, wherein said linker sequence can comprise rigid linkers, flexible linkers, cleavable linkers, or a combination thereof. Such constructs are herein referred to as “multi-antigen-constructs”.

[0227] In embodiments, the coding RNA may be bicistronic or multicistronic and comprises at least two coding sequences, wherein the at least two coding sequences encode two or more different antigenic peptides or proteins derived from a Malaria parasite (e.g. Plasmodium CSP). Accordingly, the coding sequences in a bicistronic or multicistronic RNA suitably encode distinct antigenic proteins or peptides as defined herein or immunogenic fragments or immunogenic variants thereof. Preferably, the coding sequences in said bicistronic or multicistronic constructs may be separated by at least one IRES (internal ribosomal entry site) sequence. Thus, the term “encoding two or more antigenic peptides or proteins” may mean, without being limited thereto, that the bicistronic or multicistronic RNA encodes e.g. at least two, three, four, five, six or more (preferably different) antigenic peptides or proteins of different Malaria parasites. Alternatively, the bicistronic or multicistronic RNA may encode e.g. at least two, three, four, five, six or more (preferably different) antigenic peptides or proteins derived from the same Malaria parasite. In that context, suitable IRES sequences may be selected from the list of nucleic acid sequences according to SEQ ID NOs: 1566-1662 of the patent application WO2017/081082, or fragments or variants of these sequences. In this context, the disclosure of WO2017/081082 relating to IRES sequences is herewith incorporated by reference.

[0228] It has to be understood that, in the context of the invention, certain combinations of coding sequences may be generated by any combination of monocistronic, bicistronic and multicistronic RNA constructs and/or multi-antigen-constructs to obtain a composition encoding multiple antigenic peptides or proteins as defined herein.

[0229] Preferably, the coding RNA of the first aspect typically comprises about 50 to about 20000 nucleotides, or about 500 to about 10000 nucleotides, or about 1000 to about 10000 nucleotides, or preferably about 1000 to about 5000 nucleotides, or even more preferably about 1000 to about 2500 nucleotides.

[0230] According to preferred embodiments, the coding RNA of the first aspect may be an mRNA, a self-replicating RNA, a circular RNA, or a replicon RNA.

[0231] In embodiments, the coding RNA of the first aspect is a circular RNA. As used herein, “circular RNA” or “circRNAs” have to be understood as a circular polynucleotide constructs that encode at least one antigenic peptide or protein as defined herein. Accordingly, in preferred embodiments, said circRNA comprises at least one coding sequence encoding at least one antigenic protein derived from a Malaria parasite (e.g., Plasmodium CSP), or an immunogenic fragment or an immunogenic variant thereof. The production of circRNA can be performed using various methods provided in the art. Accordingly, methods for producing circular RNA as provided in U.S. Pat. Nos. 6,210,931, 5,773,244, WO1992/001813, WO2015/034925 and WO2016/011222 are incorporated herewith by reference.

[0232] In embodiments, the coding RNA is a replicon RNA. The term “replicon RNA” will be recognized and understood by the person of ordinary skill in the art, and is e.g. intended to be an optimized self-replicating RNA. Such constructs may include replicase elements derived from e.g. alphaviruses (e.g. SFV, SIN, VEE, or RRV) and the substitution of the structural virus proteins with the nucleic acid of interest. Alternatively, the replicase may be provided on an independent coding RNA construct. Downstream of the replicase may be a sub-genomic promoter that controls replication of the replicon RNA.

[0233] In preferred embodiments, the coding RNA of the first aspect is an mRNA.

[0234] The terms “RNA” and “mRNA” will be recognized and understood by the person of ordinary skill in the art, and are e.g. intended to be a ribonucleic acid molecule, i.e. a polymer consisting of nucleotides. These nucleotides are usually adenosine-monophosphate, uridine-monophosphate, guanosine-monophosphate and cytidine-monophosphate monomers which are connected to each other along a so-called backbone. The backbone is formed by phosphodiester bonds between the sugar, i.e. ribose, of a first and a phosphate moiety of a second, adjacent monomer. The specific succession of the monomers is called the RNA-sequence. The mRNA (messenger RNA) usually provides the nucleotide sequence that may be translated into an amino-acid sequence of a particular peptide or protein.

[0235] In the context of the invention, the coding RNA, preferably the mRNA of the first aspect, may provide at least one coding sequence encoding an antigen derived from a Malaria parasite that is translated into a functional antigen after administration (e.g. after administration to a subject, e.g. a human subject). Accordingly, the coding RNA, preferably the mRNA, is suitable for a vaccine, preferable for a malaria vaccine.

[0236] Suitably, the RNA may be modified by the addition of a 5′-cap structure, which preferably stabilizes the RNA and/or enhances expression of the encoded antigen.

[0237] The RNA may suitably be modified by the addition of a 5′-cap structure, which preferably stabilizes the RNA as described herein and/or enhances expression of the encoded antigen and/or reduces the stimulation of the innate immune system (after administration to a subject). A 5′-cap structure is of particular importance in embodiments where the RNA is a linear, coding RNA, e.g. an mRNA or a linear coding replicon RNA.

[0238] Accordingly, in preferred embodiments, the RNA, in particular the mRNA of the first aspect comprises a 5′-cap structure, preferably m7G (m7G(5′)ppp(5′)G), cap0, cap1, cap2, a modified cap0 or a modified cap1 structure.

[0239] In particularly preferred embodiments, the mRNA of the first aspect comprises a cap1.

[0240] The term “5′-cap structure” as used herein will be recognized and understood by the person of ordinary skill in the art, and is e.g. intended to refer to a 5′ modified nucleotide, particularly a guanine nucleotide, positioned at the 5′-end of an RNA molecule, e.g. an mRNA molecule. Preferably, the 5′-cap structure is connected via a 5′-5′-triphosphate linkage to the RNA.

[0241] 5′-cap structures which may be suitable in the context of the present invention are cap0 (methylation of the first nucleobase, e.g. m7GpppN), cap1 (additional methylation of the ribose of the adjacent nucleotide of m7GpppN), cap2 (additional methylation of the ribose of the 2nd nucleotide downstream of the m7GpppN), cap3 (additional methylation of the ribose of the 3rd nucleotide downstream of the m7GpppN), cap4 (additional methylation of the ribose of the 4th nucleotide downstream of the m7GpppN), ARCA (anti-reverse cap analogue), modified ARCA (e.g. phosphothioate modified ARCA), inosine, N1-methyl-guanosine, 2′-fluoro-guanosine, 7-deaza-guanosine, 8-oxo-guanosine, 2-amino-guanosine, LNA-guanosine, and 2-azido-guanosine.

[0242] A 5′-cap (cap0 or cap1) structure may be formed in chemical RNA synthesis or RNA in vitro transcription (co-transcriptional capping) using cap analogues.

[0243] The term “cap analogue” as used herein will be recognized and understood by the person of ordinary skill in the art, and is e.g. intended to refer to a non-polymerizable di-nucleotide or tri-nucleotide that has cap functionality in that it facilitates translation or localization, and/or prevents degradation of a nucleic acid molecule, particularly of an RNA molecule, when incorporated at the 5′-end of the nucleic acid molecule. Non-polymerizable means that the cap analogue will be incorporated only at the 5′-terminus because it does not have a 5′ triphosphate and therefore cannot be extended in the 3′-direction by a template-dependent polymerase, particularly, by template-dependent RNA polymerase. Examples of cap analogues include, but are not limited to, a chemical structure selected from the group consisting of m7GpppG, m7GpppA, m7GpppC; unmethylated cap analogues (e.g. GpppG); dimethylated cap analogue (e.g. m2,7GpppG), trimethylated cap analogue (e.g. m2,2,7GpppG), dimethylated symmetrical cap analogues (e.g. m7Gpppm7G), or anti reverse cap analogues (e.g. ARCA; m7,2′OmeGpppG, m7,2′dGpppG, m7,3′OmeGpppG, m7,3′dGpppG and their tetraphosphate derivatives). Further cap analogues have been described previously (WO2008/016473, WO2008/157688, WO2009/149253, WO2011/015347, and WO2013/059475). Further suitable cap analogues in that context are described in WO2017/066793, WO2017/066781, WO2017/066791, WO2017/066789, WO2017/053297, WO2017/066782, WO2018/075827 and WO2017/066797 wherein the disclosures referring to cap analogues are incorporated herewith by reference.

[0244] In embodiments, a modified cap1 structure is generated using tri-nucleotide cap analogue as disclosed in WO2017/053297, WO2017/066793, WO2017/066781, WO2017/066791, WO2017/066789, WO2017/066782, WO2018/075827 and WO2017/066797. In particular, any cap structures derivable from the structure disclosed in claim 1-5 of WO2017/053297 may be suitably used to co-transcriptionally generate a modified cap1 structure. Further, any cap structures derivable from the structure defined in claim 1 or claim 21 of WO2018/075827 may be suitably used to co-transcriptionally generate a modified cap1 structure.

[0245] In preferred embodiments, the 5′-cap structure may suitably be added co-transcriptionally using tri-nucleotide cap analogue as defined herein in an RNA in vitro transcription reaction as defined herein.

[0246] In particularly preferred embodiments, the coding RNA, in particular the mRNA of the first aspect comprises a cap1 structure. As shown in the Example section, the presence of a cap1 structure is of particular importance as the induction of a specific immune response against Malaria CSP could be increased (see Examples 11 and 12).

[0247] Preferred cap-analogues are the di-nucleotide cap analogues m7G(5′)ppp(5′)G (m7G) or 3′-O-Me-m7G(5′)ppp(5′)G to co-transcriptionally generate cap0 structures. Further preferred cap-analogues are the tri-nucleotide cap analogues m7G(5′)ppp(5′)(2′OMeA)pG or m7G(5′)ppp(5′)(2′OMeG)pG to co-transcriptionally generate cap1 structures.

[0248] In other embodiments, the 5′-cap structure is formed via enzymatic capping using capping enzymes (e.g. vaccinia virus capping enzymes and/or cap-dependent 2′-0 methyltransferases) to generate cap0 or cap1 or cap2 structures. The 5′-cap structure (cap0 or cap1) may be added using immobilized capping enzymes and/or cap-dependent 2′-0 methyltransferases using methods and means disclosed in WO2016/193226.

[0249] In preferred embodiments, about 70%, 75%, 80%, 85%, 90%, 95% of the coding RNA (species) comprises a cap1 structure as determined using a capping assay. In preferred embodiments, less than about 20%, 15%, 10%, 5%, 4%, 3%, 2%, 1% of the coding RNA (species) does not comprises a cap1 structure as determined using a capping assay. In preferred embodiments, less than about 20%, 15%, 10%, 5%, 4%, 3%, 2%, 1% of the coding RNA (species) comprises a cap0 structure as determined using a capping assay. In preferred embodiments, less than about 20%, 15%, 10%, 5%, 4%, 3%, 2%, 1% of the coding RNA (species) comprises a cap1 intermediate structure as determined using a capping assay.

[0250] The term “coding RNA species” is not restricted to mean “one single molecule” but is understood to comprise an ensemble of essentially identical RNA molecules. Accordingly, it may relate to a plurality of essentially identical coding RNA molecules.

[0251] For determining the capping degree or the presence of cap1 intermediates, a capping assays as described in published PCT application WO2015/101416, in particular, as described in claims 27 to 46 of published PCT application WO2015/101416 can be used. Other capping assays that may be used to determine the capping degree of the coding RNA are described in PCT/EP2018/08667, or published PCT applications WO2014/152673 and WO2014/152659.

[0252] In preferred embodiments, the coding RNA comprises an m7G(5′)ppp(5′)(2′OMeA) cap structure. In such embodiments, the coding RNA comprises a 5′-terminal m7G cap, and an additional methylation of the ribose of the adjacent nucleotide of m7GpppN, in that case, a 2′O methylated adenosine. Preferably, about 70%, 75%, 80%, 85%, 90%, 95% of the coding RNA (species) comprises such a cap1 structure as determined using a capping assay.

[0253] In other preferred embodiments, the coding RNA of the first aspect comprises an m7G(5′)ppp(5′)(2′OMeG) cap structure. In such embodiments, the coding RNA comprises a 5′-terminal m7G cap, and an additional methylation of the ribose of the adjacent nucleotide, in that case, a 2′O methylated guanosine. Preferably, about 70%, 75%, 80%, 85%, 90%, 95% of the coding RNA (species) comprises such a cap1 structure as determined using a capping assay.

[0254] In a particularly preferred embodiment, the RNA of the first aspect comprises a cap1 structure, wherein said cap1 structure may be formed enzymatically or co-transcriptionally (e.g. using m7G(5′)ppp(5′)(2′OMeA), or m7G(5′)ppp(5′)(2′OMeG) analogues).

[0255] In preferred embodiments, the RNA of the first aspect comprises an m7G(5′)ppp(5′)(2′OMeA) cap structure. In such embodiments, the coding RNA comprises a 5′ terminal m7G cap, and an additional methylation of the ribose of the adjacent nucleotide of m7GpppN, in that case, a 2′O methylated adenosine.

[0256] In other preferred embodiments, the RNA of the first aspect comprises an m7G(5′)ppp(5′)(2′OMeG) cap structure. In such embodiments, the coding RNA comprises a 5′ terminal m7G cap, and an additional methylation of the ribose of the adjacent nucleotide, in that case, a 2′O methylated guanosine.

[0257] Accordingly, whenever reference is made to suitable RNA or mRNA sequences in the context of the invention, the first nucleotide of said RNA or mRNA sequence, that is, the nucleotide downstream of the m7G(5′)ppp structure, may be a 2′O methylated guanosine or a 2′O methylated adenosine.

[0258] In embodiments, the A/U content in the environment of the ribosome binding site of the coding RNA may be increased compared to the A/U content in the environment of the ribosome binding site of its respective wild type nucleic acid. This modification (an increased A/U content around the ribosome binding site) increases the efficiency of ribosome binding to the nucleic acid, preferably the RNA. An effective binding of the ribosomes to the ribosome binding site in turn has the effect of an efficient translation of the RNA.

[0259] Accordingly, in a particularly preferred embodiment, the coding RNA comprises a ribosome binding site, also referred to as “Kozak sequence” identical to or at least 80%, 85%, 90%, 95% identical to any one of the sequences SEQ ID NOs: 6175, 6176, or fragments or variants thereof.

[0260] In preferred embodiments, the RNA of the invention comprises at least one poly(N) sequence, e.g. at least one poly(A) sequence, at least one poly(U) sequence, at least one poly(C) sequence, or combinations thereof.

[0261] In preferred embodiments, the RNA of the invention comprises at least one poly(A) sequence.

[0262] The terms “poly(A) sequence”, “poly(A) tail” or “3′-poly(A) tail” as used herein will be recognized and understood by the person of ordinary skill in the art, and are e.g. intended to be a sequence of adenosine nucleotides, typically located at the 3′-end of an RNA, of up to about 1000 adenosine nucleotides. Preferably, said poly(A) sequence is essentially homopolymeric, e.g. a poly(A) sequence of e.g. 100 adenosine nucleotides has essentially the length of 100 nucleotides. In other embodiments, the poly(A) sequence may be interrupted by at least one nucleotide different from an adenosine nucleotide, e.g. a poly(A) sequence of e.g. 100 adenosine nucleotides may have a length of more than 100 nucleotides (comprising 100 adenosine nucleotides and in addition said at least one nucleotide different from an adenosine nucleotide).

[0263] The poly(A) sequence, suitable located downstream of the 3′-UTR as defined herein, may comprise about 10 to about 500 adenosine nucleotides, about 10 to about 200 adenosine nucleotides, about 40 to about 200 adenosine nucleotides, or about 40 to about 150 adenosine nucleotides. Suitably, the length of the poly(A) sequence may be at least about or even more than about 10, 50, 64, 75, 100, 200, 300, 400, or 500 adenosine nucleotides. Suitably, the poly(A) sequence of the RNA of the first aspect may be long enough to bind at least 2, 3, 4, 5 or more monomers of PolyA Binding Proteins. In preferred embodiments, the poly(A) sequence comprises about 50 to about 250 adenosines. In a particularly preferred embodiment, the poly(A) sequence comprises about 64 adenosine nucleotides. In further particularly preferred embodiments, the poly(A) sequence comprises about 75 adenosine nucleotides.

[0264] In preferred embodiments, the coding RNA comprises at least one poly(A) sequence comprising about 30 to about 200 adenosine nucleotides. In preferred embodiments, the poly(A) sequence comprises about 64 adenosine nucleotides (A64). In particularly preferred embodiments, the poly(A) sequence comprises about 100 adenosine nucleotides (A100). In preferred embodiments, the poly(A) sequence comprises about 150 adenosine nucleotides.

[0265] The poly(A) sequence as defined herein is suitably located at the 3′ terminus of the coding RNA. Accordingly it is preferred that the 3′-terminal nucleotide of the coding RNA (that is the last 3′-terminal nucleotide in the polynucleotide chain) is the 3′-terminal A nucleotide of the at least one poly(A) sequence. The term “located at the 3′ terminus” has to be understood as being located exactly at the 3′ terminus—in other words, the 3′ terminus of the coding RNA consists of a poly(A) sequence terminating with an A nucleotide. Examples of sequences having a 3′ terminus consisting of a poly(A) sequence are e.g. SEQ ID NOs: 8013-8741, 9774-10079. For further examples of sequences having a poly(A) sequence located (exactly) at the 3′ terminus see also Table 9 (column “3′-end” with hSL-A100) or Table 6B, column H. The presence of a poly(A) sequence exactly at the 3′ terminus of the coding RNA encoding a Malaria antigenic protein (e.g. CSP) is advantageous as all mRNA vaccine comprising a 3′-end with hSL-A100 induces very strong humoral and cellular immune responses (see Example 13).

[0266] Preferably, the poly(A) sequence of the RNA is obtained from a DNA template during RNA in vitro transcription. In other embodiments, the poly(A) sequence is obtained in vitro by common methods of chemical synthesis without being necessarily transcribed from a DNA template. In other embodiments, poly(A) sequences are generated by enzymatic polyadenylation of the RNA (after RNA in vitro transcription) using commercially available polyadenylation kits and corresponding protocols known in the art, or alternatively, by using immobilized poly(A)polymerases e.g. using a methods and means as described in WO2016/174271.

[0267] In embodiments, the RNA may comprise a poly(A) sequence derived from a template DNA and may comprise at least one additional poly(A) sequence generated by enzymatic polyadenylation, e.g. as described in WO2016/091391.

[0268] In embodiments where enzymatic polyadenylation of RNA is used, it has to be understood that RNA or mRNA sequences as e.g. provided in the sequence listing, may additionally comprise about 30 to about 500 adenosine nucleotides.

[0269] In preferred embodiments, the RNA may comprise at least one poly(C) sequence.

[0270] The term “poly(C) sequence” as used herein will be recognized and understood by the person of ordinary skill in the art, and are for example intended to be a sequence of cytosine nucleotides, typically located at the 3′-end of an RNA, of up to about 200 cytosine nucleotides.

[0271] In preferred embodiments, the poly(C) sequence, suitable located at the 3′ terminus downstream of the 3′-UTR as defined herein, comprises about 10 to about 200 cytosine nucleotides, about 10 to about 100 cytosine nucleotides, about 20 to about 70 cytosine nucleotides, about 20 to about 60 cytosine nucleotides, or about 10 to about 40 cytosine nucleotides. In a particularly preferred embodiment, the poly(C) sequence comprises about 30 cytosine nucleotides.

[0272] Preferably, the poly(C) sequence in the RNA sequence of the present invention is derived from a DNA template by RNA in vitro transcription. In other embodiments, the poly(C) sequence is obtained in vitro by common methods of chemical synthesis, or enzymatically, without being necessarily transcribed from a DNA template.

[0273] In other embodiments, the RNA of the invention does not comprise a poly(C) sequence as defined herein.

[0274] In further embodiments, the coding RNA of the invention does comprise a poly(A) sequence as defined herein, preferably A100 located (exactly) at the 3′ terminus, and does not comprise a poly(C) sequence.

[0275] In a particularly preferred embodiment, the coding RNA of the invention comprises a cap1 structure as defined herein and at least one poly(A) sequence as defined in herein. Preferably, said cap1 structure is obtainable by co-transcriptional capping as defined herein, and said poly(A) sequence is preferably (exactly) at the 3′ terminus.

[0276] In preferred embodiments, the RNA of the first aspect comprises at least one histone stem-loop (sequence).

[0277] The term “histone stem-loop” (abbreviated as “hSL” in e.g. the sequence listing) as used herein will be recognized and understood by the person of ordinary skill in the art, and are for example intended to refer to nucleic acid sequences that are predominantly found in histone mRNAs. Exemplary histone stem-loop sequences are described in Lopez et al. (Davila Lopez et al, (2008), RNA, 14(1)).

[0278] Histone stem-loop sequences/structures may suitably be selected from histone stem-loop sequences as disclosed in WO2012/019780, the disclosure relating to histone stem-loop sequences/histone stem-loop structures incorporated herewith by reference. A histone stem-loop sequence that may be used within the present invention may preferably be derived from formulae (I) or (II) of WO2012/019780. According to a further preferred embodiment the RNA as defined herein may comprise at least one histone stem-loop sequence derived from at least one of the specific formulae (Ia) or (IIa) of the patent application WO2012/019780.

[0279] In particularly preferred embodiment, the RNA of the invention comprises at least one histone stem-loop sequence, wherein said histone stem-loop sequence comprises a nucleic acid sequence identical or at least 70%, 80%, 90%, 91%, 92%, 93%, 94%, 95%, 96%, 97%, 98%, or 99% identical to SEQ ID NOs: 6173 or 6174, or fragments or variants thereof.

[0280] In other embodiments, the RNA of the first aspect does not comprise a histone stem-loop as defined herein.

[0281] In embodiments, the RNA of the invention comprises a 3″-terminal sequence element. Said 3″-terminal sequence element comprises a poly(A)sequence and a histone-stem-loop sequence, wherein said sequence element is located at the 3′ terminus of the RNA of the invention.

[0282] Accordingly, the RNA of the invention may comprise a 3′-terminal sequence element comprising or consisting of a nucleic acid sequence being identical or at least 70%, 80%, 90%, 91%, 92%, 93%, 94%, 95%, 96%, 97%, 98%, or 99% identical to SEQ ID NOs: 6179-6200, 10173-10196, or a fragment or variant thereof.

[0283] In various embodiments, the RNA may comprise a 5′-terminal sequence element according to SEQ ID NOs: 6177, 6178, or a fragment or variant thereof. Such a 5′-terminal sequence element comprises e.g. a binding site for T7 RNA polymerase. Further, the first nucleotide of said 5′-terminal start sequence may preferably comprise a 2′O methylation, e.g. 2′O methylated guanosine or a 2′O methylated adenosine.

[0284] In embodiments, the RNA may comprise a sequence element which represents a cleavage site for a catalytic nucleic acid molecule, wherein the catalytic nucleic acid molecule may be a Ribozyme or a DNAzyme. Said elements may, e.g., allow for the analysis of capping efficiency/quality of the RNA as described in WO2015/101416, or allow for the analysis of poly(N)sequences length/quality of the RNA as described in WO2017/001058. A cleavage site for a catalytic nucleic acid molecule may be located in proximity to the 5′ terminus of the RNA (that is, about 1, 2, 3, 4, 5, 6, 7, 8, 9, 10, 1-30, 1-20, 5-15 nucleotides from the 5′ terminal cap structure). Alternatively, or in addition, a cleavage site for a catalytic nucleic acid molecule as described above may also be positioned in proximity to the 3′ terminus of the RNA (that is, about 50-300, 50-200, 50-150 nucleotides from the 3′ terminus). Said elements may, e.g., allow for the analysis of poly(N)sequences length/quality of the RNA as described in WO2017/001058.

### UTRs:

[0285] The RNA of the invention may be composed of a protein-coding region (“coding sequence” or “cds”), and 5′-UTR and/or 3′-UTR. Notably, UTRs may harbor regulatory sequence elements that determine RNA turnover, stability, and localization. Moreover, UTRs may harbor sequence elements that enhance translation. In medical application of RNA, translation of the RNA into at least one peptide or protein is of paramount importance to therapeutic efficacy. Certain combinations of 3′-UTRs and/or 5′-UTRs may enhance the expression of operably linked coding sequences encoding peptides or proteins of the invention. RNA molecules harboring said UTR combinations advantageously enable rapid and transient expression of antigenic peptides or proteins after administration to a subject, preferably after intramuscular administration. Accordingly, the coding RNA comprising certain combinations of 3′-UTRs and/or 5′-UTRs as provided herein is particularly suitable for administration as a vaccine, in particular, suitable for administration into the muscle, the dermis, or the epidermis of a subject.

[0286] Suitably, the RNA of the first aspect may comprise at least one heterologous 5′-UTR and/or at least one heterologous 3′-UTR. Said heterologous 5′-UTRs or 3′-UTRs may be derived from naturally occurring genes or may be synthetically engineered. In preferred embodiments, the RNA of the first aspect comprises at least one coding sequence operably linked to at least one (heterologous) 3′-UTR and/or at least one (heterologous) 5′-UTR.

[0287] In preferred embodiments, the at least one RNA comprises at least one heterologous 3′-UTR.

[0288] The term “3′-untranslated region” or “3′-UTR” or “3′-UTR element” will be recognized and understood by the person of ordinary skill in the art, and are e.g. intended to refer to a part of a nucleic acid molecule located 3′ (i.e. downstream) of a coding sequence and which is not translated into protein. A 3′-UTR may be part of an RNA, e.g. an mRNA, located between a cds and a terminal poly(A) sequence. A 3′-UTR may comprise elements for controlling gene expression, also called regulatory elements. Such regulatory elements may be, e.g., ribosomal binding sites, miRNA binding sites etc.

[0289] Preferably the RNA comprises a 3′-UTR, which may be derivable from a gene that relates to an RNA with enhanced half-life (i.e. that provides a stable RNA).

[0290] In some embodiments, a 3′-UTR comprises one or more of a polyadenylation signal, a binding site for proteins that affect an RNA stability of location in a cell, or one or more miRNA or binding sites for miRNAs.

[0291] MicroRNAs (or miRNA) are 19-25 nucleotide long noncoding RNAs that bind to the 3′-UTR of nucleic acid molecules and down-regulate gene expression either by reducing nucleic acid molecule stability or by inhibiting translation. For examples microRNAs are known to regulate RNA, and thereby protein expression, for example in liver (miR-122), heart (miR-Id, miR-149), endothelial cells (miR-17-92, miR-126), adipose tissue (let-7, miR-30c), kidney (miR-192, miR-194, miR-204), myeloid cells (miR-142-3p, miR-142-5p, miR-16, miR-21, miR-223, miR-24, miR-27), muscle (miR-133, miR-206, miR-208), and lung epithelial cells (let-7, miR-133, miR-126). The RNA of the invention may comprise one or more microRNA target sequences, microRNA sequences, or microRNA seeds. Such sequences may e.g. correspond to any known microRNA such as those taught in US Publication US2005/0261218 and US Publication US2005/0059005, the contents of which are incorporated herein by reference in their entirety.

[0292] Accordingly, miRNA, or binding sites miRNAs as defined above for may be removed from the 3′-UTR or introduced into the 3′-UTR in order to tailor the expression of the RNA expression to desired cell types or tissues.

[0293] In preferred embodiments of the first aspect, the RNA comprises at least one heterologous 3′-UTR, wherein the at least one heterologous 3′-UTR comprises a nucleic acid sequence derived from a 3′-UTR of a gene selected from PSMB3, ALB7, alpha-globin (referred to as “muag”), CASP1, COX6B1, GNAS, NDUFA1 and RPS9, or from a homolog, a fragment or variant of any one of these genes.

[0294] Preferred in the context of the invention are nucleic acid sequences derived from a 3′-UTR of an alpha-globin (referred to as “muag”), an ALB7 gene, or a PSMB3 gene, or from a homolog, a fragment or variant of any one of these genes.

[0295] In preferred embodiments the 3′-UTR of the coding RNA comprises a nucleic acid sequences derived from a 3′-UTR of a PSMB3 gene.

[0296] In embodiments, the RNA may comprise a 3′-UTR derived from a ALB7 gene, wherein said 3′-UTR derived from an ALB7 gene comprises or consists of a nucleic acid sequence being identical or at least 70%, 80%, 85%, 86%, 87%, 88%, 89%, 90%, 91%, 92%, 93%, 94%, 95%, 96%, 97%, 98%, or 99% identical to SEQ ID NOs: 6169 or 6170 or a fragment or a variant thereof.

[0297] In embodiments, the RNA may comprise a 3′-UTR derived from a alpha-globin gene, wherein said 3′-UTR derived from a alpha-globin gene (“muag”) comprises or consists of a nucleic acid sequence being identical or at least 70%, 80%, 85%, 86%, 87%, 88%, 89%, 90%, 91%, 92%, 93%, 94%, 95%, 96%, 97%, 98%, or 99% identical to SEQ ID NOs: 6171 or 6172 or a fragment or a variant thereof.

[0298] In preferred embodiments, the RNA may comprise a 3′-UTR derived from a PSMB3 gene, wherein said 3′-UTR derived from a PSMB3 gene comprises or consists of a nucleic acid sequence being identical or at least 70%, 80%, 85%, 86%, 87%, 88%, 89%, 90%, 91%, 92%, 93%, 94%, 95%, 96%, 97%, 98%, or 99% identical to SEQ ID NOs: 6157 or 6158 or a fragment or a variant thereof.

[0299] In embodiments, the RNA may comprise a 3′-UTR derived from a CASP1 gene, wherein said 3′-UTR derived from a CASP1 gene comprises or consists of a nucleic acid sequence being identical or at least 70%, 80%, 85%, 86%, 87%, 88%, 89%, 90%, 91%, 92%, 93%, 94%, 95%, 96%, 97%, 98%, or 99% identical to SEQ ID NOs: 6159 or 6160 or a fragment or a variant thereof.

[0300] In embodiments, the RNA may comprise a 3′-UTR derived from a COX6B1 gene, wherein said 3′-UTR derived from a COX6B1 gene comprises or consists of a nucleic acid sequence being identical or at least 70%, 80%, 85%, 86%, 87%, 88%, 89%, 90%, 91%, 92%, 93%, 94%, 95%, 96%, 97%, 98%, or 99% identical to SEQ ID NOs: 6161 or 6162 or a fragment or a variant thereof.

[0301] In embodiments, the RNA may comprise a 3′-UTR derived from a GNAS gene, wherein said 3′-UTR derived from a GNAS gene comprises or consists of a nucleic acid sequence being identical or at least 70%, 80%, 85%, 86%, 87%, 88%, 89%, 90%, 91%, 92%, 93%, 94%, 95%, 96%, 97%, 98%, or 99% identical to SEQ ID NOs: 6163 or 6164 or a fragment or a variant thereof.

[0302] In embodiments, the RNA may comprise a 3′-UTR derived from a NDUFA1 gene, wherein said 3′-UTR derived from a NDUFA1 gene comprises or consists of a nucleic acid sequence being identical or at least 70%, 80%, 85%, 86%, 87%, 88%, 89%, 90%, 91%, 92%, 93%, 94%, 95%, 96%, 97%, 98%, or 99% identical to SEQ ID NOs: 6165 or 6166 or a fragment or a variant thereof.

[0303] In embodiments, the RNA may comprise a 3′-UTR derived from a RPS9 gene, wherein said 3′-UTR derived from a RPS9 gene comprises or consists of a nucleic acid sequence being identical or at least 70%, 80%, 85%, 86%, 87%, 88%, 89%, 90%, 91%, 92%, 93%, 94%, 95%, 96%, 97%, 98%, or 99% identical to SEQ ID NOs: 6167 or 6168 or a fragment or a variant thereof.

[0304] Accordingly, the coding RNA of the first aspect may suitably comprise at least one 3′-UTR comprising or consisting of a nucleic acid sequence being identical or at least 70%, 80%, 85%, 86%, 87%, 88%, 89%, 90%, 91%, 92%, 93%, 94%, 95%, 96%, 97%, 98%, or 99% identical to SEQ ID NOs: 6157 to 6172 or a fragment or a variant thereof.

[0305] In other embodiments, the RNA of the first aspect comprises a 3′-UTR as described in WO2016/107877, the disclosure of WO2016/107877 relating to 3′-UTR sequences herewith incorporated by reference. Suitable 3′-UTRs are SEQ ID NOs: 1 to 24 and SEQ ID NOs: 49 to 318 of WO2016/107877, or fragments or variants of these sequences. Accordingly, the 3′-UTRs of the RNA may comprise or consist of a corresponding RNA sequence of the nucleic acid sequence according SEQ ID NOs: 1 to 24 and SEQ ID NOs: 49 to 318 of WO2016/107877. In other embodiments, the RNA of the first aspect comprises a 3′-UTR as described in WO2017/036580, the disclosure of WO2017/036580 relating to 3′-UTR sequences herewith incorporated by reference. Suitable 3′-UTRs are SEQ ID NOs: 152 to 204 of WO2017/036580, or fragments or variants of these sequences. Accordingly, the 3′-UTR of the RNA may comprise or consist of a corresponding RNA sequence of the nucleic acid sequence according SEQ ID NOs: 152 to 204 of WO2017/036580. In other embodiments, the RNA of the first aspect comprises a 3′-UTR as described in WO2016/022914, the disclosure of WO2016/022914 relating to 3′-UTR sequences herewith incorporated by reference. Particularly preferred 3′-UTRs are nucleic acid sequences according to SEQ ID NOs: 20 to 36 of WO2016/022914, or fragments or variants of these sequences. In this context, it is particularly preferred that the 3′-UTR of the RNA comprises or consists of a corresponding RNA sequence of the nucleic acid sequence according to SEQ ID NOs: 20 to 36 of WO2016/022914.

[0306] In preferred embodiments, the at least one RNA comprises at least one heterologous 5′-UTR.

[0307] The terms “5′-untranslated region” or “5′-UTR” or “5′-UTR element” will be recognized and understood by the person of ordinary skill in the art, and are e.g. intended to refer to a part of a nucleic acid molecule located 5′ (i.e. “upstream”) of a coding sequence and which is not translated into protein. A 5′-UTR may be part of an RNA located 5′ of the coding sequence. Typically, a 5′-UTR starts with the transcriptional start site and ends before the start codon of the coding sequence. A 5′-UTR may comprise elements for controlling gene expression, also called regulatory elements. Such regulatory elements may be, e.g., ribosomal binding sites, miRNA binding sites etc. The 5′-UTR may be post-transcriptionally modified, e.g. by enzymatic or post-transcriptional addition of a 5′-cap structure (as defined above).

[0308] Preferably the RNA comprises a 5′-UTR, which may be derivable from a gene that relates to an RNA with enhanced half-life (i.e. that provides a stable RNA).

[0309] In some embodiments, a 5′-UTR comprises one or more of a binding site for proteins that affect an RNA stability of location in a cell, or one or more miRNA or binding sites for miRNAs.

[0310] Accordingly, miRNA or binding sites miRNAs as defined above for may be removed from the 5′-UTR or introduced into the 5′-UTR in order to tailor the expression of the RNA expression to desired cell types or tissues.

[0311] In preferred embodiments of the first aspect, the RNA comprises at least one heterologous 5′-UTR, wherein the at least one heterologous 5′-UTR comprises a nucleic acid sequence derived from a 5′-UTR of gene selected from HSD17B4, RPL32, ASAH1, ATP5A1, MP68, NDUFA4, NOSIP, RPL31, SLC7A3, TUBB4B, and UBQLN2, or from a homolog, a fragment or variant of any one of these genes.

[0312] Particularly preferred in the context of the invention are nucleic acid sequences derived from a 5′-UTR of a HSD17B4 gene, a SLC7A3 gene, or a RPL32 gene, or from a homolog, a fragment or variant of any one of these genes.

[0313] In preferred embodiments the 5′-UTR of the coding RNA comprises a nucleic acid sequences derived from a 5′-UTR of a SLC7A3 gene.

[0314] In particularly preferred embodiments the 5′-UTR of the coding RNA comprises a nucleic acid sequences derived from a 5′-UTR of a HSD17B4 gene.

[0315] In embodiments, the RNA may comprise a 5′-UTR derived from a RPL32 gene, wherein said 5′-UTR derived from a RPL32 gene comprises or consists of a nucleic acid sequence being identical or at least 70%, 80%, 85%, 86%, 87%, 88%, 89%, 90%, 91%, 92%, 93%, 94%, 95%, 96%, 97%, 98%, or 99% identical to SEQ ID NOs: 6155 or 6156 or a fragment or a variant thereof.

[0316] In preferred embodiments, the RNA may comprise a 5′-UTR derived from a HSD17B4 gene, wherein said 5′-UTR derived from a HSD17B4 gene comprises or consists of a nucleic acid sequence being identical or at least 70%, 80%, 85%, 86%, 87%, 88%, 89%, 90%, 91%, 92%, 93%, 94%, 95%, 96%, 97%, 98%, or 99% identical to SEQ ID NOs: 6135 or 6136 or a fragment or a variant thereof.

[0317] In embodiments, the RNA may comprise a 5′-UTR derived from a ASAH1 gene, wherein said 5′-UTR derived from a ASAH1 gene comprises or consists of a nucleic acid sequence being identical or at least 70%, 80%, 85%, 86%, 87%, 88%, 89%, 90%, 91%, 92%, 93%, 94%, 95%, 96%, 97%, 98%, or 99% identical to SEQ ID NOs: 6137 or 6138 or a fragment or a variant thereof.

[0318] In embodiments, the RNA may comprise a 5′-UTR derived from a ATP5A1 gene, wherein said 5′-UTR derived from a ATP5A1 gene comprises or consists of a nucleic acid sequence being identical or at least 70%, 80%, 85%, 86%, 87%, 88%, 89%, 90%, 91%, 92%, 93%, 94%, 95%, 96%, 97%, 98%, or 99% identical to SEQ ID NOs: 6139 or 6140 or a fragment or a variant thereof.

[0319] In embodiments, the RNA may comprise a 5′-UTR derived from a MP68 gene, wherein said 5′-UTR derived from a MP68 gene comprises or consists of a nucleic acid sequence being identical or at least 70%, 80%, 85%, 86%, 87%, 88%, 89%, 90%, 91%, 92%, 93%, 94%, 95%, 96%, 97%, 98%, or 99% identical to SEQ ID NOs: 6141 or 6142 or a fragment or a variant thereof.

[0320] In embodiments, the RNA may comprise a 5′-UTR derived from a NDUFA4 gene, wherein said 5′-UTR derived from a NDUFA4 gene comprises or consists of a nucleic acid sequence being identical or at least 70%, 80%, 85%, 86%, 87%, 88%, 89%, 90%, 91%, 92%, 93%, 94%, 95%, 96%, 97%, 98%, or 99% identical to SEQ ID NOs: 6143 or 6144 or a fragment or a variant thereof.

[0321] In embodiments, the RNA may comprise a 5′-UTR derived from a NOSIP gene, wherein said 5′-UTR derived from a NOSIP gene comprises or consists of a nucleic acid sequence being identical or at least 70%, 80%, 85%, 86%, 87%, 88%, 89%, 90%, 91%, 92%, 93%, 94%, 95%, 96%, 97%, 98%, or 99% identical to SEQ ID NOs: 6145 or 6146 or a fragment or a variant thereof.

[0322] In embodiments, the RNA may comprise a 5′-UTR derived from a RPL31 gene, wherein said 5′-UTR derived from a RPL31 gene comprises or consists of a nucleic acid sequence being identical or at least 70%, 80%, 85%, 86%, 87%, 88%, 89%, 90%, 91%, 92%, 93%, 94%, 95%, 96%, 97%, 98%, or 99% identical to SEQ ID NOs: 6147 or 6148 or a fragment or a variant thereof.

[0323] In preferred embodiments, the RNA may comprise a 5′-UTR derived from a SLC7A3 gene, wherein said 5′-UTR derived from a SLC7A3 gene comprises or consists of a nucleic acid sequence being identical or at least 70%, 80%, 85%, 86%, 87%, 88%, 89%, 90%, 91%, 92%, 93%, 94%, 95%, 96%, 97%, 98%, or 99% identical to SEQ ID NOs: 6149 or 6150 or a fragment or a variant thereof.

[0324] In embodiments, the RNA may comprise a 5′-UTR derived from a TUBB4B gene, wherein said 5′-UTR derived from a TUBB4B gene comprises or consists of a nucleic acid sequence being identical or at least 70%, 80%, 85%, 86%, 87%, 88%, 89%, 90%, 91%, 92%, 93%, 94%, 95%, 96%, 97%, 98%, or 99% identical to SEQ ID NOs: 6151 or 6152 or a fragment or a variant thereof.

[0325] In embodiments, the RNA may comprise a 5′-UTR derived from a UBQLN2 gene, wherein said 5′-UTR derived from a UBQLN2 gene comprises or consists of a nucleic acid sequence being identical or at least 70%, 80%, 85%, 86%, 87%, 88%, 89%, 90%, 91%, 92%, 93%, 94%, 95%, 96%, 97%, 98%, or 99% identical to SEQ ID NO: 6153 or 6154 or a fragment or a variant thereof.

[0326] Accordingly, the RNA of the first aspect may suitably comprise at least one 5′-UTR comprising or consisting of a nucleic acid sequence being identical or at least 70%, 80%, 85%, 86%, 87%, 88%, 89%, 90%, 91%, 92%, 93%, 94%, 95%, 96%, 97%, 98%, or 99% identical to SEQ ID NOs: 6135-6156 or a fragment or a variant thereof.

[0327] In other embodiments, the RNA of the first aspect comprises a 5′-UTR as described in WO2013/143700, the disclosure of WO2013/143700 relating to 5′-UTR sequences herewith incorporated by reference. Particularly preferred 5′-UTRs are nucleic acid sequences derived from SEQ ID NOs: 1-1363, SEQ ID NO: 1395, SEQ ID NO: 1421 and SEQ ID NO: 1422 of WO2013/143700, or fragments or variants of these sequences. In this context, it is preferred that the 5′-UTR of the RNA comprises or consists of a corresponding RNA sequence of the nucleic acid sequence according SEQ ID NOs: 1-1363, SEQ ID NO: 1395, SEQ ID NO: 1421 and SEQ ID NO: 1422 of WO2013/143700. In other embodiments, the RNA of the first aspect comprises a 5′-UTR as described in WO2016/107877, the disclosure of WO2016/107877 relating to 5′-UTR sequences herewith incorporated by reference. Particularly preferred 5′-UTRs are nucleic acid sequences according to SEQ ID NOs: 25 to 30 and SEQ ID NOs: 319 to 382 of WO2016/107877, or fragments or variants of these sequences. In this context, it is particularly preferred that the 5′-UTR of the RNA comprises or consists of a corresponding RNA sequence of the nucleic acid sequence according SEQ ID NOs: 25 to 30 and SEQ ID NOs: 319 to 382 of WO2016/107877. In other embodiments, the RNA of the first aspect comprises a 5′-UTR as described in WO2017/036580, the disclosure of WO2017/036580 relating to 5′-UTR sequences herewith incorporated by reference. Particularly preferred 5′-UTRs are nucleic acid sequences according to SEQ ID NOs: 1 to 151 of WO2017/036580, or fragments or variants of these sequences. In this context, it is particularly preferred that the 5′-UTR of the RNA comprises or consists of a corresponding RNA sequence of the nucleic acid sequence according to SEQ ID NOs: 1 to 151 of WO2017/036580. In other embodiments, the RNA of the first aspect comprises a 5′-UTR as described in WO2016/022914, the disclosure of WO2016/022914 relating to 5′-UTR sequences herewith incorporated by reference. Particularly preferred 5′-UTRs are nucleic acid sequences according to SEQ ID NOs: 3 to 19 of WO2016/022914, or fragments or variants of these sequences. In this context, it is particularly preferred that the 5′-UTR of the RNA comprises or consists of a corresponding RNA sequence of the nucleic acid sequence according to SEQ ID NOs: 3 to 19 of WO2016/022914.

[0328] Suitably, in preferred embodiments, the RNA of the first aspect comprises at least one coding sequence encoding at least one peptide or protein derived from a Malaria parasite, operably linked to a 3′-UTR and/or a 5′-UTR selected from the following 5′UTR/3′UTR combinations (“also referred to mRNA designs”): a-1 (HSD17B4/PSMB3), a-2 (NDUFA4/PSMB3), a-3 (SLC7A3/PSMB3), a-4 (NOSIP/PSMB3), a-5 (MP68/PSMB3), b-1 (UBQLN2/RPS9), b-2 (ASAH1/RPS9), b-3 (HSD17B4/RPS9), b-4 (HSD17B4/CASP1), b-5 (NOSIP/COX6B1), c-1 (NDUFA4/RPS9), c-2 (NOSIP/NDUFA1), c-3 (NDUFA4/COX6B1), c-4 (NDUFA4/NDUFA1), c-5 (ATP5A1/PSMB3), d-1 (RpI31/PSMB3), d-2 (ATP5A1/CASP1), d-3 (SLC7A3/GNAS), d-4 (HSD17B4/NDUFA1), d-5 (Slc7a3/Ndufa1), e-1 (TUBB4B/RPS9), e-2 (RPL31/RPS9), e-3 (MP68/RPS9), e-4 (NOSIP/RPS9), e-5 (ATP5A1/RPS9), e-6 (ATP5A1/COX6B1), f-1 (ATP5A1/GNAS), f-2 (ATP5A1/NDUFA1), f-3 (HSD17B4/COX6B1), f-4 (HSD17B4/GNAS), f-5 (MP68/COX6B1), g-1 (MP68/NDUFA1), g-2 (NDUFA4/CASP1), g-3 (NDUFA4/GNAS), g-4 (NOSIP/CASP1), g-5 (RPL31/CASP1), h-1 (RPL31/COX6B1), h-2 (RPL31/GNAS), h-3 (RPL31/NDUFA1), h-4 (Slc7a3/CASP1), h-5 (SLC7A3/COX6B1), i-1 (SLC7A3/RPS9), i-2 (RPL32/ALB7), i-2 (RPL32/ALB7), or i-3 (α-globin gene).

[0329] In particularly preferred embodiments of the first aspect, the RNA comprises at least one coding sequence as specified herein encoding at least one peptide or protein derived from a Malaria parasite, wherein said coding sequence is operably linked to a 5′-UTR selected from HSD17B4 and a 3′-UTR selected from PSMB3 (mRNA design a-1 (HSD17B4/PSMB3)).

[0330] In preferred embodiments of the first aspect, the RNA comprises at least one coding sequence as specified herein encoding at least one peptide or protein derived from a Malaria parasite, wherein said coding sequence is operably linked to a 5′-UTR selected from SLC7A3 and a 3′-UTR selected from PSMB3 (mRNA design a-3 (SLC7A3/PSMB3)).

[0331] Accordingly, the RNA of the first aspect comprises at least one coding sequence encoding at least one peptide or protein as defined herein, wherein administration of said RNA results in expression and/or activity of the encoded peptide or protein in the subject, wherein said coding sequence as defined herein is operably linked to a 5′-UTR and/or 3′-UTR, wherein suitably
[0332] said 5′-UTR derived from a HSD17B4 gene comprises or consists of a nucleic acid sequence being identical or at least 70%, 80%, 85%, 86%, 87%, 88%, 89%, 90%, 91%, 92%, 93%, 94%, 95%, 96%, 97%, 98%, or 99% identical to SEQ ID NOs: 6135 or 6136 or a fragment or a variant thereof;
[0333] said 5′-UTR derived from a ASAH1 gene comprises or consists of a nucleic acid sequence being identical or at least 70%, 80%, 85%, 86%, 87%, 88%, 89%, 90%, 91%, 92%, 93%, 94%, 95%, 96%, 97%, 98%, or 99% identical to SEQ ID NOs: 6137 or 6138 or a fragment or a variant thereof;
[0334] said 5′-UTR derived from a ATP5A1 gene comprises or consists of a nucleic acid sequence being identical or at least 70%, 80%, 85%, 86%, 87%, 88%, 89%, 90%, 91%, 92%, 93%, 94%, 95%, 96%, 97%, 98%, or 99% identical to SEQ ID NOs: 6139 or 6140 or a fragment or a variant thereof;
[0335] said 5′-UTR derived from a MP68 gene comprises or consists of a nucleic acid sequence being identical or at least 70%, 80%, 85%, 86%, 87%, 88%, 89%, 90%, 91%, 92%, 93%, 94%, 95%, 96%, 97%, 98%, or 99% identical to SEQ ID NOs: 6141 or 6142 or a fragment or a variant thereof;
[0336] said 5′-UTR derived from a NDUFA4 gene comprises or consists of a nucleic acid sequence being identical or at least 70%, 80%, 85%, 86%, 87%, 88%, 89%, 90%, 91%, 92%, 93%, 94%, 95%, 96%, 97%, 98%, or 99% identical to SEQ ID NOs: 6143 or 6144 or a fragment or a variant thereof;
[0337] said 5′-UTR derived from a NOSIP gene comprises or consists of a nucleic acid sequence being identical or at least 70%, 80%, 85%, 86%, 87%, 88%, 89%, 90%, 91%, 92%, 93%, 94%, 95%, 96%, 97%, 98%, or 99% identical to SEQ ID NOs: 6145 or 6146 or a fragment or a variant thereof;
[0338] said 5′-UTR derived from a RPL31 gene comprises or consists of a nucleic acid sequence being identical or at least 70%, 80%, 85%, 86%, 87%, 88%, 89%, 90%, 91%, 92%, 93%, 94%, 95%, 96%, 97%, 98%, or 99% identical to SEQ ID NOs: 6147 or 6148 or a fragment or a variant thereof;
[0339] said 5′-UTR derived from a RPL32 gene comprises or consists of a nucleic acid sequence being identical or at least 70%, 80%, 85%, 86%, 87%, 88%, 89%, 90%, 91%, 92%, 93%, 94%, 95%, 96%, 97%, 98%, or 99% identical to SEQ ID NOs: 6155 or 6156 or a fragment or a variant thereof;
[0340] said 5′-UTR derived from a SLC7A3 gene comprises or consists of a nucleic acid sequence being identical or at least 70%, 80%, 85%, 86%, 87%, 88%, 89%, 90%, 91%, 92%, 93%, 94%, 95%, 96%, 97%, 98%, or 99% identical to SEQ ID NOs: 6149 or 6150 or a fragment or a variant thereof;
[0341] said 5′-UTR derived from a TUBB4B gene comprises or consists of a nucleic acid sequence being identical or at least 70%, 80%, 85%, 86%, 87%, 88%, 89%, 90%, 91%, 92%, 93%, 94%, 95%, 96%, 97%, 98%, or 99% identical to SEQ ID NOs: 6151 or 6152 or a fragment or a variant thereof;
[0342] said 5′-UTR derived from a UBQLN2 gene comprises or consists of a nucleic acid sequence being identical or at least 70%, 80%, 85%, 86%, 87%, 88%, 89%, 90%, 91%, 92%, 93%, 94%, 95%, 96%, 97%, 98%, or 99% identical to SEQ ID NO: 6153 or 6154 or a fragment or a variant thereof;
[0343] said 3′-UTR derived from a PSMB3 gene comprises or consists of a nucleic acid sequence being identical or at least 70%, 80%, 85%, 86%, 87%, 88%, 89%, 90%, 91%, 92%, 93%, 94%, 95%, 96%, 97%, 98%, or 99% identical to SEQ ID NOs: 6157 or 6158 or a fragment or a variant thereof;
[0344] said 3′-UTR derived from a CASP1 gene comprises or consists of a nucleic acid sequence being identical or at least 70%, 80%, 85%, 86%, 87%, 88%, 89%, 90%, 91%, 92%, 93%, 94%, 95%, 96%, 97%, 98%, or 99% identical to SEQ ID NOs: 6159 or 6160 or a fragment or a variant thereof;
[0345] said 3′-UTR derived from a COX6B1 gene comprises or consists of a nucleic acid sequence being identical or at least 70%, 80%, 85%, 86%, 87%, 88%, 89%, 90%, 91%, 92%, 93%, 94%, 95%, 96%, 97%, 98%, or 99% identical to SEQ ID NOs: 6161 or 6162 or a fragment or a variant thereof;
[0346] said 3′-UTR derived from a GNAS gene comprises or consists of a nucleic acid sequence being identical or at least 70%, 80%, 85%, 86%, 87%, 88%, 89%, 90%, 91%, 92%, 93%, 94%, 95%, 96%, 97%, 98%, or 99% identical to SEQ ID NOs: 6163 or 6164 or a fragment or a variant thereof;
[0347] said 3′-UTR derived from a NDUFA1 gene comprises or consists of a nucleic acid sequence being identical or at least 70%, 80%, 85%, 86%, 87%, 88%, 89%, 90%, 91%, 92%, 93%, 94%, 95%, 96%, 97%, 98%, or 99% identical to SEQ ID NOs: 6165 or 6166 or a fragment or a variant thereof;
[0348] said 3′-UTR derived from a RPS9 gene comprises or consists of a nucleic acid sequence being identical or at least 70%, 80%, 85%, 86%, 87%, 88%, 89%, 90%, 91%, 92%, 93%, 94%, 95%, 96%, 97%, 98%, or 99% identical to SEQ ID NOs: 6167 or 6168 or a fragment or a variant thereof;
[0349] said 3′-UTR derived from a ALB7 gene comprises or consists of a nucleic acid sequence being identical or at least 70%, 80%, 85%, 86%, 87%, 88%, 89%, 90%, 91%, 92%, 93%, 94%, 95%, 96%, 97%, 98%, or 99% identical to SEQ ID NOs: 6169 or 6170 or a fragment or a variant thereof;
[0350] said 3′-UTR derived from a alpha-globin gene comprises or consists of a nucleic acid sequence being identical or at least 70%, 80%, 85%, 86%, 87%, 88%, 89%, 90%, 91%, 92%, 93%, 94%, 95%, 96%, 97%, 98%, or 99% identical to SEQ ID NOs: 6171 or 6172 or a fragment or a variant thereof.
   Suitable mRNA for a Malaria Vaccine:

[0351] In various embodiments of the first aspect, the coding RNA, preferably mRNA comprises, preferably in 5′- to 3′-direction, the following elements:
[0352] A) 5′-cap structure, preferably as specified herein;
[0353] B) 5′-terminal start element, preferably as specified herein;
[0354] C) optionally, a cleavage site for a catalytic nucleic acid molecule, preferably as specified herein;
[0355] D) optionally, 5′-UTR, preferably as specified herein;
[0356] F) a ribosome binding site, preferably as specified herein;
[0357] E) at least one coding sequence, preferably as specified herein;
[0358] F) 3′-UTR, preferably as specified herein;
[0359] G) optionally, poly(A) sequence, preferably as specified herein;
[0360] H) optionally, poly(C) sequence, preferably as specified herein;
[0361] I) optionally, histone stem-loop preferably as specified herein;
[0362] J) optionally, 3″-terminal sequence element, preferably as specified herein.

[0363] In preferred embodiments of the first aspect, the coding RNA, preferably mRNA comprises the following elements preferably in 5′- to 3′-direction:
[0364] A) 5′-cap structure selected from m7G(5′), m7G(5′)ppp(5′)(2′OMeA), or m7G(5′)ppp(5′)(2′OMeG);
[0365] B) 5′-terminal start element selected from SEQ ID NOs: 6177 or 6178 or fragments or variants thereof;
[0366] C) optionally, a cleavage site for a catalytic nucleic acid molecule, preferably as specified herein;
[0367] D) optionally, 5′-UTR selected from SEQ ID NOs: 6135-6156 or fragments or variants thereof;
[0368] F) a ribosome binding site selected from SEQ ID NOs: 6175, 6176 or fragments or variants thereof;
[0369] E) at least one coding sequence selected from SEQ ID NOs: 37-328, 2121-2480, 2887-6134, 8754-8855, 10086-10139 or fragments or variants thereof;
[0370] F) 3′-UTR selected from SEQ ID NOs: 6157 to 6172;
[0371] G) optionally, poly(A) sequence comprising about 50 to about 500 adenosines;
[0372] H) optionally, poly(C) sequence comprising about 10 to about 100 cytosines;
[0373] I) optionally, histone stem-loop selected from SEQ ID NOs: 6173 or 6174;
[0374] J) optionally, 3″-terminal sequence element SEQ ID NOs: 6179-6200, 10173-10196.

[0375] In further preferred embodiments of the first aspect, the coding RNA, preferably mRNA comprises the following elements:
[0376] A) 5′-cap structure selected from m7G(5′), m7G(5′)ppp(5′)(2′OMeA), or m7G(5′)ppp(5′)(2′OMeG);
[0377] B) 5′-terminal start element selected from SEQ ID NOs: 6177 or 6178 or fragments or variants thereof;
[0378] C) 3′-UTR and/or 5′-UTR element according to a-1, a-2, a-3, a-4, a-5, b-1, b-2, b-3, b-4, b-5, c-1, c-2, c-3, c-4, c-5, d-1, d-2, d-3, d-4, d-5, e-1, e-2, e-3, e-4, e-5, e-6, f-1, f-2, f-3, f-4, f-5, g-1, g-2, g-3, g- 4, g-5, h-1, h-2, h-3, h-4, h-5, i-1, i-2, or i-3, as specified herein, wherein a-1, a-3, i-2, i-3 are preferred;
[0379] D) a ribosome binding site selected from SEQ ID NOs: 6175, 6176 or fragments or variants thereof;
[0380] E) at least one coding sequence selected from SEQ ID NOs: 37-328, 8754-8855 or fragments or variants thereof;
[0381] G) poly(A) sequence comprising about 50 to about 500 adenosines, preferably about 64 or 100 adenosines;
[0382] H) optionally, poly(C) sequence comprising about 10 to about 100 cytosines, preferably about 30 cytosines;
[0383] I) optionally, histone stem-loop selected from SEQ ID NOs: 6173 or 6174.

[0384] In particularly preferred embodiments of the first aspect, the coding RNA, preferably mRNA comprises the following elements:
[0385] A) 5′-cap structure selected from m7G(5′), m7G(5′)ppp(5′)(2′OMeA), or m7G(5′)ppp(5′)(2′OMeG);
[0386] B) 5′-terminal start element selected from SEQ ID NOs: 6177 or 6178 or fragments or variants thereof;
[0387] C) 3′-UTR and/or 5′-UTR element according to a-1, a-3, i-2, i-3;
[0388] D) a ribosome binding site selected from SEQ ID NOs: 6175, 6176 or fragments or variants thereof;
[0389] E) at least one coding sequence selected from SEQ ID NOs: 44, 80, 116, 152, 188, 224, 260, 296, 8755 (HsALB_Pf-CSP(19-397)) or fragments or variants thereof;
[0390] G) poly(A) sequence comprising about 50 to about 500 adenosines, preferably about 64 or 100 adenosines;
[0391] H) optionally, poly(C) sequence comprising about 10 to about 100 cytosines, preferably about 30 cytosines;
[0392] I) optionally, histone stem-loop selected from SEQ ID NOs: 6173 or 6174.

[0393] Preferred amino acid sequences, coding sequences, and mRNA sequences of the invention are provided in Table 6A and 6B. Therein, each row represents a specific suitable CSP construct of the invention, wherein the description of the CSP construct is indicated in column A, the SEQ ID NOs of the amino acid sequence is provided in column B. The respective accession number(s), and further information is provided under <223> identifier of the respective SEQ ID NOs in the sequence listing.

[0394] The corresponding SEQ ID NOs of the coding sequences encoding the respective CSP constructs are provided in column C of Table 6A and 6B (wild type cds) and D (opt1, opt2, opt3, opt4, opt5, opt11 cds). Further information is provided under <223> identifier of the respective SEQ ID NO in the sequence listing.

[0395] For Table 6A, the corresponding RNA sequences comprising preferred coding sequences are provided in columns E to H, wherein column E (“a-1”) provides RNA sequences with advantageous UTR combination “a-1” as defined herein, and wherein column F (“i-2”) provides RNA sequences with advantageous UTR combination “i-2” as defined herein, and wherein column G (1-3″) provides RNA sequences with advantageous UTR combination “i-3” as defined herein, and wherein column H (“a-3”) provides RNA sequences with advantageous UTR combination “a-3” as defined herein.

TABLE 6A
Preferred mRNA constructs encoding CSP

| A | B | C | D | E | F | G | H |
|---|---|---|---|---|---|---|---|
| Pf-CSP | 1 | 37 | 41, 77, | 329, 333, 369, 405, | 913, 917, | 1497, 1501, 1537, | 6312, 6315, 6345, |
| | | | 113, | 441, 477, 513, 549, | 953, 989, | 1573, 1609, 1645, | 6375, 6405, 6435, |
| | | | 149, | 585, 621, 625, 661, | 1025, 1061, | 1681, 1717, 1753, | 6465, 6495, 6525, |
| | | | 185, | 697, 733, 769, 805, | 1097, 1133, | 1789, 1793, 1829, | 6798, 6801, 6831, |
| | | | 221, | 841, 877, 6555, | 1169, 1205, | 1865, 1901, 1937, | 6861, 6891, 6921, |
| | | | 257, | 6558, 6588, 6618, | 1209, 1245, | 1973, 2009, 2045, | 6951, 6981, 7011, |
| | | | 293 | 6648, 6678, 6708, | 1281, 1317, | 7041, 7044, 7074, | 7527, 7530, 7560, |
| | | | | 6738, 6768, 7284, | 1353, 1389, | 7104, 7134, 7164, | 7590, 7620, 7650, |
| | | | | 7287, 7317, 7347, | 1425, 1461 | 7194, 7224, 7254, | 7680, 7710, 7740, |
| | | | | 7377, 7407, 7437, | | 7770, 7773, 7803, | 8256, 8259, 8289, |
| | | | | 7467, 7497, 8013, | | 7833, 7863, 7893, | 8319, 8349, 8379, |
| | | | | 8016, 8046, 8076, | | 7923, 7953, 7983, | 8409, 8439, 8469 |
| | | | | 8106, 8136, 8166, | | 8499, 8502, 8532, | |
| | | | | 8196, 8226 | | 8562, 8592, 8622, | |
| | | | | | | 8652, 8682, 8712 | |
| Pf-CSP(1- | 2 | 38 | 42, 78, | 330, 334, 370, 406, | 914, 918, | 1498, 1502, 1538, | 6313, 6316, 6346, |
| 374) | | | 114, | 442, 478, 514, 550, | 954, 990, | 1574, 1610, 1646, | 6376, 6406, 6436, |
| | | | 150, | 586, 622, 626, 662, | 1026, 1062, | 1682, 1718, 1754, | 6466, 6496, 6526, |
| | | | 186, | 698, 734, 770, 806, | 1098, 1134, | 1790, 1794, 1830, | 6799, 6802, 6832, |
| | | | 222, | 842, 878, 6556, | 1170, 1206, | 1866, 1902, 1938, | 6862, 6892, 6922, |
| | | | 258, | 6559, 6589, 6619, | 1210, 1246, | 1974, 2010, 2046, | 6952, 6982, 7012, |
| | | | 294 | 6649, 6679, 6709, | 1282, 1318, | 7042, 7045, 7075, | 7528, 7531, 7561, |
| | | | | 6739, 6769, 7285, | 1354, 1390, | 7105, 7135, 7165, | 7591, 7621, 7651, |
| | | | | 7288, 7318, 7348, | 1426, 1462 | 7195, 7225, 7255, | 7681, 7711, 7741, |
| | | | | 7378, 7408, 7438, | | 7771, 7774, 7804, | 8257, 8260, 8290, |
| | | | | 7468, 7498, 8014, | | 7834, 7864, 7894, | 8320, 8350, 8380, |
| | | | | 8017, 8047, 8077, | | 7924, 7954, 7984, | 8410, 8440, 8470 |
| | | | | 8107, 8137, 8167, | | 8500, 8503, 8533, | |
| | | | | 8197, 8227 | | 8563, 8593, 8623, | |
| | | | | | | 8653, 8683, 8713 | |
| Pf-CSP(1- | 3 | 39 | 43, 79, | 331, 335, 371, 407, | 915, 919, | 1499, 1503, 1539, | 6314, 6317, 6347, |
| 325) | | | 115, | 443, 479, 515, 551, | 955, 991, | 1575, 1611, 1647, | 6377, 6407, 6437, |
| | | | 151, | 587, 623, 627, 663, | 1027, 1063, | 1683, 1719, 1755, | 6467, 6497, 6527, |
| | | | 187, | 699, 735, 771, 807, | 1099, 1135, | 1791, 1795, 1831, | 6800, 6803, 6833, |
| | | | 223, | 843, 879, 6557, | 1171, 1207, | 1867, 1903, 1939, | 6863, 6893, 6923, |
| | | | 259, | 6560, 6590, 6620, | 1211, 1247, | 1975, 2011, 2047, | 6953, 6983, 7013, |
| | | | 295 | 6650, 6680, 6710, | 1283, 1319, | 7043, 7046, 7076, | 7529, 7532, 7562, |
| | | | | 6740, 6770, 7286, | 1355, 1391, | 7106, 7136, 7166, | 7592, 7622, 7652, |
| | | | | 7289, 7319, 7349, | 1427, 1463 | 7196, 7226, 7256, | 7682, 7712, 7742, |
| | | | | 7379, 7409, 7439, | | 7772, 7775, 7805, | 8258, 8261, 8291, |
| | | | | 7469, 7499, 8015, | | 7835, 7865, 7895, | 8321, 8351, 8381, |
| | | | | 8018, 8048, 8078, | | 7925, 7955, 7985, | 8411, 8441, 8471 |
| | | | | 8108, 8138, 8168, | | 8501, 8504, 8534, | |
| | | | | 8198, 8228 | | 8564, 8594, 8624, | |
| | | | | | | 8654, 8684, 8714 | |
| HsALB_Pf | 4 | | 44, 80, | 336, 372, 408, 444, | 920, 956, | 1504, 1540, 1576, | 6318, 6348, 6378, |
| 4DSP(19- | | | 8755, | 480, 516, 552, 588, | 992, 1028, | 1612, 1648, 1684, | 6408, 6438, 6468, |
| 397) | | | 116, | 628, 664, 700, 736, | 1064, 1100, | 1720, 1756, 1796, | 6498, 6528, 8959, |
| | | | 152, | 772, 808, 844, 880, | 1136, 1172, | 1832, 1868, 1904, | 6804, 6834, 6864, |
| | | | 188, | 8857, 6561, 6591, | 1212, 1248, | 1940, 1976, 2012, | 6894, 6924, 6954, |
| | | | 224, | 6621, 6651, 6681, | 1284, 1320, | 2048, 9061, 7047, | 6984, 7014, 9265, |
| | | | 260, | 6711, 6741, 6771, | 1356, 1392, | 7077, 7107, 7137, | 7533, 7563, 7593, |
| | | | 296 | 9163, 7290, 7320, | 1428, 1464 | 7167, 7197, 7227, | 7623, 7653, 7683, |
| | | | | 7350, 7380, 7410, | | 7257, 9367, 7776, | 7713, 7743, 9571, |
| | | | | 7440, 7470, 7500, | | 7806, 7836, 7866, | 8262, 8292, 8322, |
| | | | | 9469, 8019, 8049, | | 7896, 7926, 7956, | 8352, 8382, 8412, |
| | | | | 8079, 8109, 8139, | | 7986, 9673, 8505, | 8442, 8472, 9877 |
| | | | | 8169, 8199, 8229, | | 8535, 8565, 8595, | |
| | | | | 9775 | | 8625, 8655, 8685, | |
| | | | | | | 8715, 9979 | |
| Hsins- | 5 | | 45, 81, | 337, 373, 409, 445, | 921, 957, | 1505, 1541, 1577, | 6319, 6349, 6379, |
| isol_Pf- | | | 117, | 481, 517, 553, 589, | 993, 1029, | 1613, 1649, 1685, | 6409, 6439, 6469, |
| CSP(19- | | | 153, | 629, 665, 701, 737, | 1065, 1101, | 1721, 1757, 1797, | 6499, 6529, 6805, |
| 397) | | | 189, | 773, 809, 845, 881, | 1137, 1173, | 1833, 1869, 1905, | 6835, 6865, 6895, |
| | | | 225, | 6562, 6592, 6622, | 1213, 1249, | 1941, 1977, 2013, | 6925, 6955, 6985, |
| | | | 261, | 6652, 6682, 6712, | 1285, 1321, | 2049, 7048, 7078, | 7015, 7534, 7564, |
| | | | 297 | 6742, 6772, 7291, | 1357, 1393, | 7108, 7138, 7168, | 7594, 7624, 7654, |
| | | | | 7321, 7351, 7381, | 1429, 1465 | 7198, 7228, 7258, | 7684, 7714, 7744, |
| | | | | 7411, 7441, 7471, | | 7777, 7807, 7837, | 8263, 8293, 8323, |
| | | | | 7501, 8020, 8050, | | 7867, 7897, 7927, | 8353, 8383, 8413, |
| | | | | 8080, 8110, 8140, | | 7957, 7987, 8506, | 8443, 8473 |
| | | | | 8170, 8200, 8230 | | 8536, 8566, 8596, | |
| | | | | | | 8626, 8656, 8686, | |
| | | | | | | 8716 | |
| HsSPARC | 6 | | 46, 82, | 338, 374, 410, 446, | 922, 958, | 1506, 1542, 1578, | 6320, 6350, 6380, |
| Pf- | | | 118, | 482, 518, 554, 590, | 994, 1030, | 1614, 1650, 1686, | 6410, 6440, 6470, |
| CSP(19- | | | 154, | 630, 666, 702, 738, | 1066, 1102, | 1722, 1758, 1798, | 6500, 6530, 6806, |
| 397) | | | 190, | 774, 810, 846, 882, | 1138, 1174, | 1834, 1870, 1906, | 6836, 6866, 6896, |
| | | | 226, | 6563, 6593, 6623, | 1214, 1250, | 1942, 1978, 2014, | 6926, 6956, 6986, |
| | | | 262, | 6653, 6683, 6713, | 1286, 1322, | 2050, 7049, 7079, | 7016, 7535, 7565, |
| | | | 298 | 6743, 6773, 7292, | 1358, 1394, | 7109, 7139, 7169, | 7595, 7625, 7655, |
| | | | | 7322, 7352, 7382, | 1430, 1466 | 7199, 7229, 7259, | 7685, 7715, 7745, |
| | | | | 7412, 7442, 7472, | | 7778, 7808, 7838, | 8264, 8294, 8324, |
| | | | | 7502, 8021, 8051, | | 7868, 7898, 7928, | 8354, 8384, 8414, |
| | | | | 8081, 8111, 8141, | | 7958, 7988, 8507, | 8444, 8474 |
| | | | | 8171, 8201, 8231 | | 8537, 8567, 8597, | |
| | | | | | | 8627, 8657, 8687, | |
| | | | | | | 8717 | |
| IgE_Pf- | 7 | | 47, 83, | 339, 375, 411, 447, | 923, 959, | 1507, 1543, 1579, | 6321, 6351, 6381, |
| CSP(19- | | | 119, | 483, 519, 555, 591, | 995, 1031, | 1615, 1651, 1687, | 6411, 6441, 6471, |
| 397) | | | 155, | 631, 667, 703, 739, | 1067, 1103, | 1723, 1759, 1799, | 6501, 6531, 6807, |
| | | | 191, | 775, 811, 847, 883, | 1139, 1175, | 1835, 1871, 1907, | 6837, 6867, 6897, |
| | | | 227, | 6564, 6594, 6624, | 1215, 1251, | 1943, 1979, 2015, | 6927, 6957, 6987, |
| | | | 263, | 6654, 6684, 6714, | 1287, 1323, | 2051, 7050, 7080, | 7017, 7536, 7566, |
| | | | 299 | 6744, 6774, 7293, | 1359, 1395, | 7110, 7140, 7170, | 7596, 7626, 7656, |
| | | | | 7323, 7353, 7383, | 1431, 1467 | 7200, 7230, 7260, | 7686, 7716, 7746, |
| | | | | 7413, 7443, 7473, | | 7779, 7809, 7839, | 8265, 8295, 8325, |
| | | | | 7503, 8022, 8052, | | 7869, 7899, 7929, | 8355, 8385, 8415, |
| | | | | 8082, 8112, 8142, | | 7959, 7989, 8508, | 8445, 8475 |
| | | | | 8172, 8202, 8232 | | 8538, 8568, 8598, | |
| | | | | | | 8628, 8658, 8688, | |
| | | | | | | 8718 | |
| Pf- | 8 | | 48, 84, | 340, 376, 412, 448, | 924, 960, | 1508, 1544, 1580, | 6322, 6352, 6382, |
| CSP_Link- | | | 120, | 484, 520, 556, 592, | 996, 1032, | 1616, 1652, 1688, | 6412, 6442, 6472, |
| er(G4S | | | 156, | 632, 668, 704, 740, | 1068, 1104, | 1724, 1760, 1800, | 6502, 6532, 6808, |
| G4)_TIm | | | 192, | 776, 812, 848, 884, | 1140, 1176, | 1836, 1872, 1908, | 6838, 6868, 6898, |
| domain | | | 228, | 6565, 6595, 6625, | 1216, 1252, | 1944, 1980, 2016, | 6928, 6958, 6988, |
| HA | | | 264, | 6655, 6685, 6715, | 1288, 1324, | 2052, 7051, 7081, | 7018, 7537, 7567, |
| | | | 300 | 6745, 6775, 7294, | 1360, 1396, | 7111, 7141, 7171, | 7597, 7627, 7657, |
| | | | | 7324, 7354, 7384, | 1432, 1468 | 7201, 7231, 7261, | 7687, 7717, 7747, |
| | | | | 7414, 7444, 7474, | | 7780, 7810, 7840, | 8266, 8296, 8326, |
| | | | | 7504, 8023, 8053, | | 7870, 7900, 7930, | 8356, 8386, 8416, |
| | | | | 8083, 8113, 8143, | | 7960, 7990, 8509, | 8446, 8476 |
| | | | | 8173, 8203, 8233 | | 8539, 8569, 8599, | |
| | | | | | | 8629, 8659, 8689, | |
| | | | | | | 8719 | |
| Pf- | 9 | | 49, 85, | 341, 377, 413, 449, | 925, 961, | 1509, 1545, 1581, | 6323, 6353, 6383, |
| CSP(199- | | | 121, | 485, 521, 557, 593, | 997, 1033, | 1617, 1653, 1689, | 6413, 6443, 6473, |
| 377)_Link- | | | 157, | 633, 669, 705, 741, | 1069, 1105, | 1725, 1761, 1801, | 6503, 6533, 6809, |
| er(PVTN) | | | 193, | 777, 813, 849, 885, | 1141, 1177, | 1837, 1873, 1909, | 6839, 6869, 6899, |
| HBsAg | | | 229, | 6566, 6596, 6626, | 1217, 1253, | 1945, 1981, 2017, | 6929, 6959, 6989, |
| | | | 265, | 6656, 6686, 6716, | 1289, 1325, | 2053, 7052, 7082, | 7019, 7538, 7568, |
| | | | 301 | 6746, 6776, 7295, | 1361, 1397, | 7112, 7142, 7172, | 7598, 7628, 7658, |
| | | | | 7325, 7355, 7385, | 1433, 1469 | 7202, 7232, 7262, | 7688, 7718, 7748, |
| | | | | 7415, 7445, 7475, | | 7781, 7811, 7841, | 8267, 8297, 8327, |
| | | | | 7505, 8024, 8054, | | 7871, 7901, 7931, | 8357, 8387, 8417, |
| | | | | 8084, 8114, 8144, | | 7961, 7991, 8510, | 8447, 8477 |
| | | | | 8174, 8204, 8234 | | 8540, 8570, 8600, | |
| | | | | | | 8630, 8660, 8690, | |
| | | | | | | 8720 | |
| Pf- | 10 | | 50, 86, | 342, 378, 414, 450, | 926, 962, | 1510, 1546, 1582, | 6324, 6354, 6384, |
| CSP(199- | | | 122, | 486, 522, 558, 594, | 998, 1034, | 1618, 1654, 1690, | 6414, 6444, 6474, |
| 387)_Link- | | | 158, | 634, 670, 706, 742, | 1070, 1106, | 1726, 1762, 1802, | 6504, 6534, 6810, |
| er(PVTN) | | | 194, | 778, 814, 850, 886, | 1142, 1178, | 1838, 1874, 1910, | 6840, 6870, 6900, |
| HBsAg | | | 230, | 6567, 6597, 6627, | 1218, 1254, | 1946, 1982, 2018, | 6930, 6960, 6990, |
| | | | 266, | 6657, 6687, 6717, | 1290, 1326, | 2054, 7053, 7083, | 7020, 7539, 7569, |
| | | | 302 | 6747, 6777, 7296, | 1362, 1398, | 7113, 7143, 7173, | 7599, 7629, 7659, |
| | | | | 7326, 7356, 7386, | 1434, 1470 | 7203, 7233, 7263, | 7689, 7719, 7749, |
| | | | | 7416, 7446, 7476, | | 7782, 7812, 7842, | 8268, 8298, 8328, |
| | | | | 7506, 8025, 8055, | | 7872, 7902, 7932, | 8358, 8388, 8418, |
| | | | | 8085, 8115, 8145, | | 7962, 7992, 8511, | 8448, 8478 |
| | | | | 8175, 8205, 8235 | | 8541, 8571, 8601, | |
| | | | | | | 8631, 8661, 8691, | |
| | | | | | | 8721 | |
| HsALB_Pf- | 11 | | 51, 87, | 343, 379, 415, 451, | 927, 963, | 1511, 1547, 1583, | 6325, 6355, 6385, |
| CSP(19- | | | 123, | 487, 523, 559, 595, | 999, 1035, | 1619, 1655, 1691, | 6415, 6445, 6475, |
| 152) | | | 159, | 635, 671, 707, 743, | 1071, 1107, | 1727, 1763, 1803, | 6505, 6535, 6811, |
| | | | 195, | 779, 815, 851, 887, | 1143, 1179, | 1839, 1875, 1911, | 6841, 6871, 6901, |
| | | | 231, | 6568, 6598, 6628, | 1219, 1255, | 1947, 1983, 2019, | 6931, 6961, 6991, |
| | | | 267, | 6658, 6688, 6718, | 1291, 1327, | 2055, 7054, 7084, | 7021, 7540, 7570, |
| | | | 303 | 6748, 6778, 7297, | 1363, 1399, | 7114, 7144, 7174, | 7600, 7630, 7660, |
| | | | | 7327, 7357, 7387, | 1435, 1471 | 7204, 7234, 7264, | 7690, 7720, 7750, |
| | | | | 7417, 7447, 7477, | | 7783, 7813, 7843, | 8269, 8299, 8329, |
| | | | | 7507, 8026, 8056, | | 7873, 7903, 7933, | 8359, 8389, 8419, |
| | | | | 8086, 8116, 8146, | | 7963, 7993, 8512, | 8449, 8479 |
| | | | | 8176, 8206, 8236 | | 8542, 8572, 8602, | |
| | | | | | | 8632, 8662, 8692, | |
| | | | | | | 8722 | |
| HsALB_Pf- | 12 | | 52, 88, | 344, 380, 416, 452, | 928, 964, | 1512, 1548, 1584, | 6326, 6356, 6386, |
| CSP(19- | | | 124, | 488, 524, 560, 596, | 1000, 1036, | 1620, 1656, 1692, | 6416, 6446, 6476, |
| 192) | | | 160, | 636, 672, 708, 744, | 1072, 1108, | 1728, 1764, 1804, | 6506, 6536, 6812, |
| | | | 196, | 780, 816, 852, 888, | 1144, 1180, | 1840, 1876, 1912, | 6842, 6872, 6902, |
| | | | 232, | 6569, 6599, 6629, | 1220, 1256, | 1948, 1984, 2020, | 6932, 6962, 6992, |
| | | | 268, | 6659, 6689, 6719, | 1292, 1328, | 2056, 7055, 7085, | 7022, 7541, 7571, |
| | | | 304 | 6749, 6779, 7298, | 1364, 1400, | 7115, 7145, 7175, | 7601, 7631, 7661, |
| | | | | 7328, 7358, 7388, | 1436, 1472 | 7205, 7235, 7265, | 7691, 7721, 7751, |
| | | | | 7418, 7448, 7478, | | 7784, 7814, 7844, | 8270, 8300, 8330, |
| | | | | 7508, 8027, 8057, | | 7874, 7904, 7934, | 8360, 8390, 8420, |
| | | | | 8087, 8117, 8147, | | 7964, 7994, 8513, | 8450, 8480 |
| | | | | 8177, 8207, 8237 | | 8543, 8573, 8603, | |
| | | | | | | 8633, 8663, 8693, | |
| | | | | | | 8723 | |
| HsALB_P-f | 13 | | 53, 89, | 345, 381, 417, 453, | 929, 965, | 1513, 1549, 1585, | 6327, 6357, 6387, |
| CSP(19- | | | 125, | 489, 525, 561, 597, | 1001, 1037, | 1621, 1657, 1693, | 6417, 6447, 6477, |
| 272) | | | 161, | 637, 673, 709, 745, | 1073, 1109, | 1729, 1765, 1805, | 6507, 6537, 6813, |
| | | | 197, | 781, 817, 853, 889, | 1145, 1181, | 1841, 1877, 1913, | 6843, 6873, 6903, |
| | | | 233, | 6570, 6600, 6630, | 1221, 1257, | 1949, 1985, 2021, | 6933, 6963, 6993, |
| | | | 269, | 6660, 6690, 6720, | 1293, 1329, | 2057, 7056, 7086, | 7023, 7542, 7572, |
| | | | 305 | 6750, 6780, 7299, | 1365, 1401, | 7116, 7146, 7176, | 7602, 7632, 7662, |
| | | | | 7329, 7359, 7389, | 1437, 1473 | 7206, 7236, 7266, | 7692, 7722, 7752, |
| | | | | 7419, 7449, 7479, | | 7785, 7815, 7845, | 8271, 8301, 8331, |
| | | | | 7509, 8028, 8058, | | 7875, 7905, 7935, | 8361, 8391, 8421, |
| | | | | 8088, 8118, 8148, | | 7965, 7995, 8514, | 8451, 8481 |
| | | | | 8178, 8208, 8238 | | 8544, 8574, 8604, | |
| | | | | | | 8634, 8664, 8694, | |
| | | | | | | 8724 | |
| HsALB_Pf- | 14 | | 54, 90, | 346, 382, 418, 454, | 930, 966, | 1514, 1550, 1586, | 6328, 6358, 6388, |
| CSP(19- | | | 8766, | 490, 526, 562, 598, | 1002, 1038, | 1622, 1658, 1694, | 6418, 6448, 6478, |
| 272)_Link- | | | 126, | 638, 674, 710, 746, | 1074, 1110, | 1730, 1766, 1806, | 6508, 6538, 8970, |
| er(AAY)_ | | | 162, | 782, 818, 854, 890, | 1146, 1182, | 1842, 1878, 1914, | 6814, 6844, 6874, |
| Pf- | | | 198, | 8868, 6571, 6601, | 1222, 1258, | 1950, 1986, 2022, | 6904, 6934, 6964, |
| CSP(310- | | | 234, | 6631, 6661, 6691, | 1294, 1330, | 2058, 9072, 7057, | 6994, 7024, 9276, |
| 327)_Link | | | 270, | 6721, 6751, 6781, | 1366, 1402, | 7087, 7117, 7147, | 7543, 7573, 7603, |
| er(AAY)_ | | | 306 | 9174, 7300, 7330, | 1438, 1474 | 7177, 7207, 7237, | 7633, 7663, 7693, |
| Pf- | | | | 7360, 7390, 7420, | | 7267, 9378, 7786, | 7723, 7753, 9582, |
| CSP(346- | | | | 7450, 7480, 7510, | | 7816, 7846, 7876, | 8272, 8302, 8332, |
| 375) | | | | 9480, 8029, 8059, | | 7906, 7936, 7966, | 8362, 8392, 8422, |
| | | | | 8089, 8119, 8149, | | 7996, 9684, 8515, | 8452, 8482, 9888 |
| | | | | 8179, 8209, 8239, | | 8545, 8575, 8605, | |
| | | | | 9786 | | 8635, 8665, 8695, | |
| | | | | | | 8725, 9990 | |
| HsALB_Pf- | 15 | | 55, 91, | 347, 383, 419, 455, | 931, 967, | 1515, 1551, 1587, | 6329, 6359, 6389, |
| CSP(19- | | | 127, | 491, 527, 563, 599, | 1003, 1039, | 1623, 1659, 1695, | 6419, 6449, 6479, |
| 272)_Link- | | | 163, | 639, 675, 711, 747, | 1075, 1111, | 1731, 1767, 1807, | 6509, 6539, 6815, |
| er(AAY)_ | | | 199, | 783, 819, 855, 891, | 1147, 1183, | 1843, 1879, 1915, | 6845, 6875, 6905, |
| Pf- | | | 235, | 6572, 6602, 6632, | 1223, 1259, | 1951, 1987, 2023, | 6935, 6965, 6995, |
| CSP(346- | | | 271, | 6662, 6692, 6722, | 1295, 1331, | 2059, 7058, 7088, | 7025, 7544, 7574, |
| 365)_Link- | | | 307 | 6752, 6782, 7301, | 1367, 1403, | 7118, 7148, 7178, | 7604, 7634, 7664, |
| er(AAY)_ | | | | 7331, 7361, 7391, | 1439, 1475 | 7208, 7238, 7268, | 7694, 7724, 7754, |
| P2 | | | | 7421, 7451, 7481, | | 7787, 7817, 7847, | 8273, 8303, 8333, |
| | | | | 7511, 8030, 8060, | | 7877, 7907, 7937, | 8363, 8393, 8423, |
| | | | | 8090, 8120, 8150, | | 7967, 7997, 8516, | 8453, 8483 |
| | | | | 8180, 8210, 8240 | | 8546, 8576, 8606, | |
| | | | | | | 8636, 8666, 8696, | |
| | | | | | | 8726 | |
| HsALB_Pf- | 16 | | 56, 92, | 348, 384, 420, 456, | 932, 968, | 1516, 1552, 1588, | 6330, 6360, 6390, |
| CSP(19- | | | 128, | 492, 528, 564, 600, | 1004, 1040, | 1624, 1660, 1696, | 6420, 6450, 6480, |
| 272)_Link- | | | 164, | 640, 676, 712, 748, | 1076, 1112, | 1732, 1768, 1808, | 6510, 6540, 6816, |
| er(AAY)_ | | | 200, | 784, 820, 856, 892, | 1148, 1184, | 1844, 1880, 1916, | 6846, 6876, 6906, |
| Pf- | | | 236, | 6573, 6603, 6633, | 1224, 1260, | 1952, 1988, 2024, | 6936, 6966, 6996, |
| CSP(346- | | | 272, | 6663, 6693, 6723, | 1296, 1332, | 2060, 7059, 7089, | 7026, 7545, 7575, |
| 365)_Link- | | | 308 | 6753, 6783, 7302, | 1368, 1404, | 7119, 7149, 7179, | 7605, 7635, 7665, |
| er(AAY)_ | | | | 7332, 7362, 7392, | 1440, 1476 | 7209, 7239, 7269, | 7695, 7725, 7755, |
| PADRE | | | | 7422, 7452, 7482, | | 7788, 7818, 7848, | 8274, 8304, 8334, |
| | | | | 7512, 8031, 8061, | | 7878, 7908, 7938, | 8364, 8394, 8424, |
| | | | | 8091, 8121, 8151, | | 7968, 7998, 8517, | 8454, 8484 |
| | | | | 8181, 8211, 8241 | | 8547, 8577, 8607, | |
| | | | | | | 8637, 8667, 8697, | |
| | | | | | | 8727 | |
| HsALB_Pf- | 17 | | 57, 93, | 349, 385, 421, 457, | 933, 969, | 1517, 1553, 1589, | 6331, 6361, 6391, |
| CSP(19- | | | 129, | 493, 529, 565, 601, | 1005, 1041, | 1625, 1661, 1697, | 6421, 6451, 6481, |
| 272)_Link- | | | 165, | 641, 677, 713, 749, | 1077, 1113, | 1733, 1769, 1809, | 6511, 6541, 6817, |
| er(G4S)_ | | | 201, | 785, 821, 857, 893, | 1149, 1185, | 1845, 1881, 1917, | 6847, 6877, 6907, |
| Pf- | | | 237, | 6574, 6604, 6634, | 1225, 1261, | 1953, 1989, 2025, | 6937, 6967, 6997, |
| CSP(310- | | | 273, | 6664, 6694, 6724, | 1297, 1333, | 2061, 7060, 7090, | 7027, 7546, 7576, |
| 327)_Link- | | | 309 | 6754, 6784, 7303, | 1369, 1405, | 7120, 7150, 7180, | 7606, 7636, 7666, |
| er(G4S)_ | | | | 7333, 7363, 7393, | 1441, 1477 | 7210, 7240, 7270, | 7696, 7726, 7756, |
| Pf- | | | | 7423, 7453, 7483, | | 7789, 7819, 7849, | 8275, 8305, 8335, |
| CSP(346- | | | | 7513, 8032, 8062, | | 7879, 7909, 7939, | 8365, 8395, 8425, |
| 375) | | | | 8092, 8122, 8152, | | 7969, 7999, 8518, | 8455, 8485 |
| | | | | 8182, 8212, 8242 | | 8548, 8578, 8608, | |
| | | | | | | 8638, 8668, 8698, | |
| | | | | | | 8728 | |
| HsALB_Pf- | 18 | | 58, 94, | 350, 386, 422, 458, | 934, 970, | 1518, 1554, 1590, | 6332, 6362, 6392, |
| CSP(19- | | | 130, | 494, 530, 566, 602, | 1006, 1042, | 1626, 1662, 1698, | 6422, 6452, 6482, |
| 272)_Link- | | | 166, | 642, 678, 714, 750, | 1078, 1114, | 1734, 1770, 1810, | 6512, 6542, 6818, |
| er(G4S)_ | | | 202, | 786, 822, 858, 894, | 1150, 1186, | 1846, 1882, 1918, | 6848, 6878, 6908, |
| Pf- | | | 238, | 6575, 6605, 6635, | 1226, 1262, | 1954, 1990, 2026, | 6938, 6968, 6998, |
| CSP(310- | | | 274, | 6665, 6695, 6725, | 1298, 1334, | 2062, 7061, 7091, | 7028, 7547, 7577, |
| 327)_Pf- | | | 310 | 6755, 6785, 7304, | 1370, 1406, | 7121, 7151, 7181, | 7607, 7637, 7667, |
| CSP(346- | | | | 7334, 7364, 7394, | 1442, 1478 | 7211, 7241, 7271, | 7697, 7727, 7757, |
| 375) | | | | 7424, 7454, 7484, | | 7790, 7820, 7850, | 8276, 8306, 8336, |
| | | | | 7514, 8033, 8063, | | 7880, 7910, 7940, | 8366, 8396, 8426, |
| | | | | 8093, 8123, 8153, | | 7970, 8000, 8519, | 8456, 8486 |
| | | | | 8183, 8213, 8243 | | 8549, 8579, 8609, | |
| | | | | | | 8639, 8669, 8699, | |
| | | | | | | 8729 | |
| HsALB_Pf- | 19 | | 59, 95, | 351, 387, 423, 459, | 935, 971, | 1519, 1555, 1591, | 6333, 6363, 6393, |
| CSP(19- | | | 131, | 495, 531, 567, 603, | 1007, 1043, | 1627, 1663, 1699, | 6423, 6453, 6483, |
| 325) | | | 167, | 643, 679, 715, 751, | 1079, 1115, | 1735, 1771, 1811, | 6513, 6543, 6819, |
| | | | 203, | 787, 823, 859, 895, | 1151, 1187, | 1847, 1883, 1919, | 6849, 6879, 6909, |
| | | | 239, | 6576, 6606, 6636, | 1227, 1263, | 1955, 1991, 2027, | 6939, 6969, 6999, |
| | | | 275, | 6666, 6696, 6726, | 1299, 1335, | 2063, 7062, 7092, | 7029, 7548, 7578, |
| | | | 311 | 6756, 6786, 7305, | 1371, 1407, | 7122, 7152, 7182, | 7608, 7638, 7668, |
| | | | | 7335, 7365, 7395, | 1443, 1479 | 7212, 7242, 7272, | 7698, 7728, 7758, |
| | | | | 7425, 7455, 7485, | | 7791, 7821, 7851, | 8277, 8307, 8337, |
| | | | | 7515, 8034, 8064, | | 7881, 7911, 7941, | 8367, 8397, 8427, |
| | | | | 8094, 8124, 8154, | | 7971, 8001, 8520, | 8457, 8487 |
| | | | | 8184, 8214, 8244 | | 8550, 8580, 8610, | |
| | | | | | | 8640, 8670, 8700, | |
| | | | | | | 8730 | |
| HsALB_Pf- | 20 | | 60, 96, | 352, 388, 424, 460, | 936, 972, | 1520, 1556, 1592, | 6334, 6364, 6394, |
| CSP(19- | | | 132, | 496, 532, 568, 604, | 1008, 1044, | 1628, 1664, 1700, | 6424, 6454, 6484, |
| 384) | | | 168, | 644, 680, 716, 752, | 1080, 1116, | 1736, 1772, 1812, | 6514, 6544, 6820, |
| | | | 204, | 788, 824, 860, 896, | 1152, 1188, | 1848, 1884, 1920, | 6850, 6880, 6910, |
| | | | 240, | 6577, 6607, 6637, | 1228, 1264, | 1956, 1992, 2028, | 6940, 6970, 7000, |
| | | | 276, | 6667, 6697, 6727, | 1300, 1336, | 2064, 7063, 7093, | 7030, 7549, 7579, |
| | | | 312 | 6757, 6787, 7306, | 1372, 1408, | 7123, 7153, 7183, | 7609, 7639, 7669, |
| | | | | 7336, 7366, 7396, | 1444, 1480 | 7213, 7243, 7273, | 7699, 7729, 7759, |
| | | | | 7426, 7456, 7486, | | 7792, 7822, 7852, | 8278, 8308, 8338, |
| | | | | 7516, 8035, 8065, | | 7882, 7912, 7942, | 8368, 8398, 8428, |
| | | | | 8095, 8125, 8155, | | 7972, 8002, 8521, | 8458, 8488 |
| | | | | 8185, 8215, 8245 | | 8551, 8581, 8611, | |
| | | | | | | 8641, 8671, 8701, | |
| | | | | | | 8731 | |
| HsALB_Pf- | 21 | | 61, 97, | 353, 389, 425, 461, | 937, 973, | 1521, 1557, 1593, | 6335, 6365, 6395, |
| CSP(19- | | | 133, | 497, 533, 569, 605, | 1009, 1045, | 1629, 1665, 1701, | 6425, 6455, 6485, |
| 384)_TM | | | 169, | 645, 681, 717, 753, | 1081, 1117, | 1737, 1773, 1813, | 6515, 6545, 6821, |
| domain | | | 205, | 789, 825, 861, 897, | 1153, 1189, | 1849, 1885, 1921, | 6851, 6881, 6911, |
| HA | | | 241, | 6578, 6608, 6638, | 1229, 1265, | 1957, 1993, 2029, | 6941, 6971, 7001, |
| | | | 277, | 6668, 6698, 6728, | 1301, 1337, | 2065, 7064, 7094, | 7031, 7550, 7580, |
| | | | 313 | 6758, 6788, 7307, | 1373, 1409, | 7124, 7154, 7184, | 7610, 7640, 7670, |
| | | | | 7337, 7367, 7397, | 1445, 1481 | 7214, 7244, 7274, | 7700, 7730, 7760, |
| | | | | 7427, 7457, 7487, | | 7793, 7823, 7853, | 8279, 8309, 8339, |
| | | | | 7517, 8036, 8066, | | 7883, 7913, 7943, | 8369, 8399, 8429, |
| | | | | 8096, 8126, 8156, | | 7973, 8003, 8522, | 8459, 8489 |
| | | | | 8186, 8216, 8246 | | 8552, 8582, 8612, | |
| | | | | | | 8642, 8672, 8702, | |
| | | | | | | 8732 | |
| HsALB_Pf- | 22 | | 62, 98, | 354, 390, 426, 462, | 938, 974, | 1522, 1558, 1594, | 6336, 6366, 6396, |
| CSP(82- | | | 134, | 498, 534, 570, 606, | 1010, 1046, | 1630, 1666, 1702, | 6426, 6456, 6486, |
| 397) | | | 170, | 646, 682, 718, 754, | 1082, 1118, | 1738, 1774, 1814, | 6516, 6546, 6822, |
| | | | 206, | 790, 826, 862, 898, | 1154, 1190, | 1850, 1886, 1922, | 6852, 6882, 6912, |
| | | | 242, | 6579, 6609, 6639, | 1230, 1266, | 1958, 1994, 2030, | 6942, 6972, 7002, |
| | | | 278, | 6669, 6699, 6729, | 1302, 1338, | 2066, 7065, 7095, | 7032, 7551, 7581, |
| | | | 314 | 6759, 6789, 7308, | 1374, 1410, | 7125, 7155, 7185, | 7611, 7641, 7671, |
| | | | | 7338, 7368, 7398, | 1446, 1482 | 7215, 7245, 7275, | 7701, 7731, 7761, |
| | | | | 7428, 7458, 7488, | | 7794, 7824, 7854, | 8280, 8310, 8340, |
| | | | | 7518, 8037, 8067, | | 7884, 7914, 7944, | 8370, 8400, 8430, |
| | | | | 8097, 8127, 8157, | | 7974, 8004, 8523, | 8460, 8490 |
| | | | | 8187, 8217, 8247 | | 8553, 8583, 8613, | |
| | | | | | | 8643, 8673, 8703, | |
| | | | | | | 8733 | |
| HsALB_Pf- | 23 | | 63, 99, | 355, 391, 427, 463, | 939, 975, | 1523, 1559, 1595, | 6337, 6367, 6397, |
| CSP(93- | | | 135, | 499, 535, 571, 607, | 1011, 1047, | 1631, 1667, 1703, | 6427, 6457, 6487, |
| 192) | | | 171, | 647, 683, 719, 755, | 1083, 1119, | 1739, 1775, 1815, | 6517, 6547, 6823, |
| | | | 207, | 791, 827, 863, 899, | 1155, 1191, | 1851, 1887, 1923, | 6853, 6883, 6913, |
| | | | 243, | 6580, 6610, 6640, | 1231, 1267, | 1959, 1995, 2031, | 6943, 6973, 7003, |
| | | | 279, | 6670, 6700, 6730, | 1303, 1339, | 2067, 7066, 7096, | 7033, 7552, 7582, |
| | | | 315 | 6760, 6790, 7309, | 1375, 1411, | 7126, 7156, 7186, | 7612, 7642, 7672, |
| | | | | 7339, 7369, 7399, | 1447, 1483 | 7216, 7246, 7276, | 7702, 7732, 7762, |
| | | | | 7429, 7459, 7489, | | 7795, 7825, 7855, | 8281, 8311, 8341, |
| | | | | 7519, 8038, 8068, | | 7885, 7915, 7945, | 8371, 8401, 8431, |
| | | | | 8098, 8128, 8158, | | 7975, 8005, 8524, | 8461, 8491 |
| | | | | 8188, 8218, 8248 | | 8554, 8584, 8614, | |
| | | | | | | 8644, 8674, 8704, | |
| | | | | | | 8734 | |
| HsALB_Pf- | 24 | | 64, | 356, 392, 428, 464, | 940, 976, | 1524, 1560, 1596, | 6338, 6368, 6398, |
| CSP(93- | | | 100, | 500, 536, 572, 608, | 1012, 1048, | 1632, 1668, 1704, | 6428, 6458, 6488, |
| 272) | | | 136, | 648, 684, 720, 756, | 1084, 1120, | 1740, 1776, 1816, | 6518, 6548, 6824, |
| | | | 172, | 792, 828, 864, 900, | 1156, 1192, | 1852, 1888, 1924, | 6854, 6884, 6914, |
| | | | 208, | 6581, 6611, 6641, | 1232, 1268, | 1960, 1996, 2032, | 6944, 6974, 7004, |
| | | | 244, | 6671, 6701, 6731, | 1304, 1340, | 2068, 7067, 7097, | 7034, 7553, 7583, |
| | | | 280, | 6761, 6791, 7310, | 1376, 1412, | 7127, 7157, 7187, | 7613, 7643, 7673, |
| | | | 316 | 7340, 7370, 7400, | 1448, 1484 | 7217, 7247, 7277, | 7703, 7733, 7763, |
| | | | | 7430, 7460, 7490, | | 7796, 7826, 7856, | 8282, 8312, 8342, |
| | | | | 7520, 8039, 8069, | | 7886, 7916, 7946, | 8372, 8402, 8432, |
| | | | | 8099, 8129, 8159, | | 7976, 8006, 8525, | 8462, 8492 |
| | | | | 8189, 8219, 8249 | | 8555, 8585, 8615, | |
| | | | | | | 8645, 8675, 8705, | |
| | | | | | | 8735 | |
| HsALB_Pf- | 25 | | 65, | 357, 393, 429, 465, | 941, 977, | 1525, 1561, 1597, | 6339, 6369, 6399, |
| CSP(93- | | | 101, | 501, 537, 573, 609, | 1013, 1049, | 1633, 1669, 1705, | 6429, 6459, 6489, |
| 397) | | | 137, | 649, 685, 721, 757, | 1085, 1121, | 1741, 1777, 1817, | 6519, 6549, 6825, |
| | | | 173, | 793, 829, 865, 901, | 1157, 1193, | 1853, 1889, 1925, | 6855, 6885, 6915, |
| | | | 209, | 6582, 6612, 6642, | 1233, 1269, | 1961, 1997, 2033, | 6945, 6975, 7005, |
| | | | 245, | 6672, 6702, 6732, | 1305, 1341, | 2069, 7068, 7098, | 7035, 7554, 7584, |
| | | | 281, | 6762, 6792, 7311, | 1377, 1413, | 7128, 7158, 7188, | 7614, 7644, 7674, |
| | | | 317 | 7341, 7371, 7401, | 1449, 1485 | 7218, 7248, 7278, | 7704, 7734, 7764, |
| | | | | 7431, 7461, 7491, | | 7797, 7827, 7857, | 8283, 8313, 8343, |
| | | | | 7521, 8040, 8070, | | 7887, 7917, 7947, | 8373, 8403, 8433, |
| | | | | 8100, 8130, 8160, | | 7977, 8007, 8526, | 8463, 8493 |
| | | | | 8190, 8220, 8250 | | 8556, 8586, 8616, | |
| | | | | | | 8646, 8676, 8706, | |
| | | | | | | 8736 | |
| HsALB_Pf- | 26 | | 66, | 358, 394, 430, 466, | 942, 978, | 1526, 1562, 1598, | 6340, 6370, 6400, |
| CSP(98- | | | 102, | 502, 538, 574, 610, | 1014, 1050, | 1634, 1670, 1706, | 6430, 6460, 6490, |
| 192) | | | 138, | 650, 686, 722, 758, | 1086, 1122, | 1742, 1778, 1818, | 6520, 6550, 6826, |
| | | | 174, | 794, 830, 866, 902, | 1158, 1194, | 1854, 1890, 1926, | 6856, 6886, 6916, |
| | | | 210, | 6583, 6613, 6643, | 1234, 1270, | 1962, 1998, 2034, | 6946, 6976, 7006, |
| | | | 246, | 6673, 6703, 6733, | 1306, 1342, | 2070, 7069, 7099, | 7036, 7555, 7585, |
| | | | 282, | 6763, 6793, 7312, | 1378, 1414, | 7129, 7159, 7189, | 7615, 7645, 7675, |
| | | | 318 | 7342, 7372, 7402, | 1450, 1486 | 7219, 7249, 7279, | 7705, 7735, 7765, |
| | | | | 7432, 7462, 7492, | | 7798, 7828, 7858, | 8284, 8314, 8344, |
| | | | | 7522, 8041, 8071, | | 7888, 7918, 7948, | 8374, 8404, 8434, |
| | | | | 8101, 8131, 8161, | | 7978, 8008, 8527, | 8464, 8494 |
| | | | | 8191, 8221, 8251 | | 8557, 8587, 8617, | |
| | | | | | | 8647, 8677, 8707, | |
| | | | | | | 8737 | |
| HsALB_Pf- | 27 | | 67, | 359, 395, 431, 467, | 943, 979, | 1527, 1563, 1599, | 6341, 6371, 6401, |
| CSP(98- | | | 103, | 503, 539, 575, 611, | 1015, 1051, | 1635, 1671, 1707, | 6431, 6461, 6491, |
| 272) | | | 139, | 651, 687, 723, 759, | 1087, 1123, | 1743, 1779, 1819, | 6521, 6551, 6827, |
| | | | 175, | 795, 831, 867, 903, | 1159, 1195, | 1855, 1891, 1927, | 6857, 6887, 6917, |
| | | | 211, | 6584, 6614, 6644, | 1235, 1271, | 1963, 1999, 2035, | 6947, 6977, 7007, |
| | | | 247, | 6674, 6704, 6734, | 1307, 1343, | 2071, 7070, 7100, | 7037, 7556, 7586, |
| | | | 283, | 6764, 6794, 7313, | 1379, 1415, | 7130, 7160, 7190, | 7616, 7646, 7676, |
| | | | 319 | 7343, 7373, 7403, | 1451, 1487 | 7220, 7250, 7280, | 7706, 7736, 7766, |
| | | | | 7433, 7463, 7493, | | 7799, 7829, 7859, | 8285, 8315, 8345, |
| | | | | 7523, 8042, 8072, | | 7889, 7919, 7949, | 8375, 8405, 8435, |
| | | | | 8102, 8132, 8162, | | 7979, 8009, 8528, | 8465, 8495 |
| | | | | 8192, 8222, 8252 | | 8558, 8588, 8618, | |
| | | | | | | 8648, 8678, 8708, | |
| | | | | | | 8738 | |
| HsALB_Pf- | 28 | | 68, | 360, 396, 432, 468, | 944, 980, | 1528, 1564, 1600, | 6342, 6372, 6402, |
| CSP(98- | | | 104, | 504, 540, 576, 612, | 1016, 1052, | 1636, 1672, 1708, | 6432, 6462, 6492, |
| 374) | | | 140, | 652, 688, 724, 760, | 1088, 1124, | 1744, 1780, 1820, | 6522, 6552, 6828, |
| | | | 176, | 796, 832, 868, 904, | 1160, 1196, | 1856, 1892, 1928, | 6858, 6888, 6918, |
| | | | 212, | 6585, 6615, 6645, | 1236, 1272, | 1964, 2000, 2036, | 6948, 6978, 7008, |
| | | | 248, | 6675, 6705, 6735, | 1308, 1344, | 2072, 7071, 7101, | 7038, 7557, 7587, |
| | | | 284, | 6765, 6795, 7314, | 1380, 1416, | 7131, 7161, 7191, | 7617, 7647, 7677, |
| | | | 320 | 7344, 7374, 7404, | 1452, 1488 | 7221, 7251, 7281, | 7707, 7737, 7767, |
| | | | | 7434, 7464, 7494, | | 7800, 7830, 7860, | 8286, 8316, 8346, |
| | | | | 7524, 8043, 8073, | | 7890, 7920, 7950, | 8376, 8406, 8436, |
| | | | | 8103, 8133, 8163, | | 7980, 8010, 8529, | 8466, 8496 |
| | | | | 8193, 8223, 8253 | | 8559, 8589, 8619, | |
| | | | | | | 8649, 8679, 8709, | |
| | | | | | | 8739 | |
| HsALB_Pf- | 29 | | 69, | 361, 397, 433, 469, | 945, 981, | 1529, 1565, 1601, | 6343, 6373, 6403, |
| CSP(98- | | | 105, | 505, 541, 577, 613, | 1017, 1053, | 1637, 1673, 1709, | 6433, 6463, 6493, |
| 397) | | | 141, | 653, 689, 725, 761, | 1089, 1125, | 1745, 1781, 1821, | 6523, 6553, 6829, |
| | | | 177, | 797, 833, 869, 905, | 1161, 1197, | 1857, 1893, 1929, | 6859, 6889, 6919, |
| | | | 213, | 6586, 6616, 6646, | 1237, 1273, | 1965, 2001, 2037, | 6949, 6979, 7009, |
| | | | 249, | 6676, 6706, 6736, | 1309, 1345, | 2073, 7072, 7102, | 7039, 7558, 7588, |
| | | | 285, | 6766, 6796, 7315, | 1381, 1417, | 7132, 7162, 7192, | 7618, 7648, 7678, |
| | | | 321 | 7345, 7375, 7405, | 1453, 1489 | 7222, 7252, 7282, | 7708, 7738, 7768, |
| | | | | 7435, 7465, 7495, | | 7801, 7831, 7861, | 8287, 8317, 8347, |
| | | | | 7525, 8044, 8074, | | 7891, 7921, 7951, | 8377, 8407, 8437, |
| | | | | 8104, 8134, 8164, | | 7981, 8011, 8530, | 8467, 8497 |
| | | | | 8194, 8224, 8254 | | 8560, 8590, 8620, | |
| | | | | | | 8650, 8680, 8710, | |
| | | | | | | 8740 | |
| HsALB_Pf- | 30 | | 70, | 362, 398, 434, 470, | 946, 982, | 1530, 1566, 1602, | 6344, 6374, 6404, |
| CSP(199- | | | 106, | 506, 542, 578, 614, | 1018, 1054, | 1638, 1674, 1710, | 6434, 6464, 6494, |
| 377)_Link- | | | 8765, | 654, 690, 726, 762, | 1090, 1126, | 1746, 1782, 1822, | 6524, 6554, 8969, |
| er(PVTN) | | | 142, | 798, 834, 870, 906, | 1162, 1198, | 1858, 1894, 1930, | 6830, 6860, 6890, |
| HBsAg | | | 178, | 8867, 6587, 6617, | 1238, 1274, | 1966, 2002, 2038, | 6920, 6950, 6980, |
| | | | 214, | 6647, 6677, 6707, | 1310, 1346, | 2074, 9071, 7073, | 7010, 7040, 9275, |
| | | | 250, | 6737, 6767, 6797, | 1382, 1418, | 7103, 7133, 7163, | 7559, 7589, 7619, |
| | | | 286, | 9173, 7316, 7346, | 1454, 1490 | 7193, 7223, 7253, | 7649, 7679, 7709, |
| | | | 322 | 7376, 7406, 7436, | | 7283, 9377, 7802, | 7739, 7769, 9581, |
| | | | | 7466, 7496, 7526, | | 7832, 7862, 7892, | 8288, 8318, 8348, |
| | | | | 9479, 8045, 8075, | | 7922, 7952, 7982, | 8378, 8408, 8438, |
| | | | | 8105, 8135, 8165, | | 8012, 9683, 8531, | 8468, 8498, 9887 |
| | | | | 8195, 8225, 8255, | | 8561, 8591, 8621, | |
| | | | | 9785 | | 8651, 8681, 8711, | |
| | | | | | | 8741, 9989 | |
| LuntSynt_ | 8742 | | 8754, | 8856, 8874, 8886, | — | 9060, 9078, 9090, | 8958, 8976, 8988, |
| Linker(GG | | | 8772, | 8898, 8910, 8922, | | 9102, 9114, 9126, | 9000, 9012, 9024, |
| S4- | | | 8784, | 8934, 8946, 9162, | | 9138, 9150, 9366, | 9036, 9048, 9264, |
| GGG)_Pf- | | | 8796, | 9180, 9192, 9204, | | 9384, 9396, 9408, | 9282, 9294, 9306, |
| CSP(19- | | | 8808, | 9216, 9228, 9240, | | 9420, 9432, 9444, | 9318, 9330, 9342, |
| 397) | | | 8820, | 9252, 9468, 9486, | | 9456, 9672, 9690, | 9354, 9570, 9588, |
| | | | 8832, | 9498, 9510, 9522, | | 9702, 9714, 9726, | 9600, 9612, 9624, |
| | | | 8844 | 9534, 9546, 9558, | | 9738, 9750, 9762, | 9636, 9648, 9660, |
| | | | | 9774, 9792, 9804, | | 9978, 9996, 10008, | |
| | | | | 9816, 9828, 9840, | | 10020, 10032, | |
| | | | | 9852, 9864 | | 10044, 10056, | |
| | | | | | | 10068 | |
| HsALB_Pf- | 8743 | | 8756, | 8858, 8875, 8887, | — | 9062, 9079, 9091, | 8960, 8977, 8989, |
| CSP(19- | | | 8773, | 8899, 8911, 8923, | | 9103, 9115, 9127, | 9001, 9013, 9025, |
| 272)_Link- | | | 8785, | 8935, 8947, 9164, | | 9139, 9151, 9368, | 9037, 9049, 9266, |
| er(PVTN) | | | 8797, | 9181, 9193, 9205, | | 9385, 9397, 9409, | 9283, 9295, 9307, |
| HBsAg | | | 8809, | 9217, 9229, 9241, | | 9421, 9433, 9445, | 9319, 9331, 9343, |
| | | | 8821, | 9253, 9470, 9487, | | 9457, 9674, 9691, | 9355, 9572, 9589, |
| | | | 8833, | 9499, 9511, 9523, | | 9703, 9715, 9727, | 9601, 9613, 9625, |
| | | | 8845 | 9535, 9547, 9559, | | 9739, 9751, 9763, | 9637, 9649, 9661, |
| | | | | 9776, 9793, 9805, | | 9980, 9997, 10009, | 9878, 9895, 9907, |
| | | | | 9817, 9829, 9841, | | 10021, 10033, | 9919, 9931, 9943, |
| | | | | 9853, 9865 | | 10045, 10057, | 9955, 9967 |
| | | | | | | 10069 | |
| HsALB_Pf- | 8744 | | 8757, | 8859, 8876, 8888, | — | 9063, 9080, 9092, | 8961, 8978, 8990, |
| CSP(19- | | | 8758, | 8900, 8912, 8924, | | 9104, 9116, 9128, | 9002, 9014, 9026, |
| 272)_Link- | | | 8774, | 8936, 8948, 8860, | | 9140, 9152, 9064, | 9038, 9050, 8962, |
| er(AAY)_ | | | 8786, | 9165, 9182, 9194, | | 9369, 9386, 9398, | 9267, 9284, 9296, |
| Pf- | | | 8798, | 9206, 9218, 9230, | | 9410, 9422, 9434, | 9308, 9320, 9332, |
| CSP(346- | | | 8810, | 9242, 9254, 9166, | | 9446, 9458, 9370, | 9344, 9356, 9268, |
| 365)_Link- | | | 8822, | 9471, 9488, 9500, | | 9675, 9692, 9704, | 9573, 9590, 9602, |
| er(AAY)_ | | | 8834, | 9512, 9524, 9536, | | 9716, 9728, 9740, | 9614, 9626, 9638, |
| PADRE_L | | | 8846 | 9548, 9560, 9472, | | 9752, 9764, 9676, | 9650, 9662, 9574, |
| inker(PVT | | | | 9777, 9794, 9806, | | 9981, 9998, 10010, | 9879, 9896, 9908, |
| N)_HBsA | | | | 9818, 9830, 9842, | | 10022, 10034, | 9920, 9932, 9944, |
| g | | | | 9854, 9866, 9778 | | 10046, 10058, | 9956, 9968, 9880 |
| | | | | | | 10070, 9982 | |
| HsALB_Pf- | 8745 | | 8759, | 8861, 8877, 8889, | — | 9065, 9081, 9093, | 8963, 8979, 8991, |
| CSP(19- | | | 8760, | 8901, 8913, 8925, | | 9105, 9117, 9129, | 9003, 9015, 9027, |
| 384)_Link- | | | 8775, | 8937, 8949, 8862, | | 9141, 9153, 9066, | 9039, 9051, 8964, |
| er(PVTN) | | | 8787, | 9167, 9183, 9195, | | 9371, 9387, 9399, | 9269, 9285, 9297, |
| HBsAg | | | 8799, | 9207, 9219, 9231, | | 9411, 9423, 9435, | 9309, 9321, 9333, |
| | | | 8811, | 9243, 9255, 9168, | | 9447, 9459, 9372, | 9345, 9357, 9270, |
| | | | 8823, | 9473, 9489, 9501, | | 9677, 9693, 9705, | 9575, 9591, 9603, |
| | | | 8835, | 9513, 9525, 9537, | | 9717, 9729, 9741, | 9615, 9627, 9639, |
| | | | 8847 | 9549, 9561, 9474, | | 9753, 9765, 9678, | 9651, 9663, 9576, |
| | | | | 9779, 9795, 9807, | | 9983, 9999, 10011, | 9881, 9897, 9909, |
| | | | | 9819, 9831, 9843, | | 10023, 10035, | 9921, 9933, 9945, |
| | | | | 9855, 9867, 9780 | | 10047, 10059, | 9957, 9969, 9882 |
| | | | | | | 10071, 9984 | |
| HsALB_Pf- | 8746 | | 8761, | 8863, 8878, 8890, | — | 9067, 9082, 9094, | 8965, 8980, 8992, |
| CSP(19- | | | 8762, | 8902, 8914, 8926, | | 9106, 9118, 9130, | 9004, 9016, 9028, |
| 384)_Link- | | | 8776, | 8938, 8950, 8864, | | 9142, 9154, 9068, | 9040, 9052, 8966, |
| er(SG(3)_ | | | 8788, | 9169, 9184, 9196, | | 9373, 9388, 9400, | 9271, 9286, 9298, |
| Ferritin | | | 8800, | 9208, 9220, 9232, | | 9412, 9424, 9436, | 9310, 9322, 9334, |
| | | | 8812, | 9244, 9256, 9170, | | 9448, 9460, 9374, | 9346, 9358, 9272, |
| | | | 8824, | 9475, 9490, 9502, | | 9679, 9694, 9706, | 9577, 9592, 9604, |
| | | | 8836, | 9514, 9526, 9538, | | 9718, 9730, 9742, | 9616, 9628, 9640, |
| | | | 8848 | 9550, 9562, 9476, | | 9754, 9766, 9680, | 9652, 9664, 9578, |
| | | | | 9781, 9796, 9808, | | 9985, 10000, | 9883, 9898, 9910, |
| | | | | 9820, 9832, 9844, | | 10012, 10024, | 9922, 9934, 9946, |
| | | | | 9856, 9868, 9782 | | 10036, 10048, | 9958, 9970, 9884 |
| | | | | | | 10060, 10072, | |
| | | | | | | 9986 | |
| HsALB_Pf- | 8747 | | 8763, | 8865, 8879, 8891, | — | 9069, 9083, 9095, | 8967, 8981, 8993, |
| CSP(93- | | | 8764, | 8903, 8915, 8927, | | 9107, 9119, 9131, | 9005, 9017, 9029, |
| 384)_Link- | | | 8777, | 8939, 8951, 8866, | | 9143, 9155, 9070, | 9041, 9053, 8968, |
| er(PVTN) | | | 8789, | 9171, 9185, 9197, | | 9375, 9389, 9401, | 9273, 9287, 9299, |
| HBsAg | | | 8801, | 9209, 9221, 9233, | | 9413, 9425, 9437, | 9311, 9323, 9335, |
| | | | 8813, | 9245, 9257, 9172, | | 9449, 9461, 9376, | 9347, 9359, 9274, |
| | | | 8825, | 9477, 9491, 9503, | | 9681, 9695, 9707, | 9579, 9593, 9605, |
| | | | 8837, | 9515, 9527, 9539, | | 9719, 9731, 9743, | 9617, 9629, 9641, |
| | | | 8849 | 9551, 9563, 9478, | | 9755, 9767, 9682, | 9653, 9665, 9580, |
| | | | | 9783, 9797, 9809, | | 9987, 10001, | 9885, 9899, 9911, |
| | | | | 9821, 9833, 9845, | | 10013, 10025, | 9923, 9935, 9947, |
| | | | | 9857, 9869, 9784 | | 10037, 10049, | 9959, 9971, 9886 |
| | | | | | | 10061, 10073, | |
| | | | | | | 9988 | |
| HsALB_Pf- | 8749 | | 8767, | 8869, 8881, 8893, | — | 9073, 9085, 9097, | 8971, 8983, 8995, |
| CSP(19- | | | 8779, | 8905, 8917, 8929, | | 9109, 9121, 9133, | 9007, 9019, 9031, |
| 272)_Link- | | | 8791, | 8941, 8953, 9175, | | 9145, 9157, 9379, | 9043, 9055, 9277, |
| er(AAY)_ | | | 8803, | 9187, 9199, 9211, | | 9391, 9403, 9415, | 9289, 9301, 9313, |
| Pf- | | | 8815, | 9223, 9235, 9247, | | 9427, 9439, 9451, | 9325, 9337, 9349, |
| CSP(346- | | | 8827, | 9259, 9481, 9493, | | 9463, 9685, 9697, | 9361, 9583, 9595, |
| 375)_Link- | | | 8839, | 9505, 9517, 9529, | | 9709, 9721, 9733, | 9607, 9619, 9631, |
| er(AAY)_ | | | 8851 | 9541, 9553, 9565, | | 9745, 9757, 9769, | 9643, 9655, 9667, |
| Pf- | | | | 9787, 9799, 9811, | | 9991, 10003, | 9889, 9901, 9913, |
| CSP(310- | | | | 9823, 9835, 9847, | | 10015, 10027, | 9925, 9937, 9949, |
| 327) | | | | 9859, 9871 | | 10039, 10051, | 9961, 9973 |
| | | | | | | 10063, 10075 | |
| HsALB_Pf- | 8750 | | 8768, | 8870, 8882, 8894, | — | 9074, 9086, 9098, | 8972, 8984, 8996, |
| CSP(19- | | | 8780, | 8906, 8918, 8930, | | 9110, 9122, 9134, | 9008, 9020, 9032, |
| 272)_Link- | | | 8792, | 8942, 8954, 9176, | | 9146, 9158, 9380, | 9044, 9056, 9278, |
| er(AAY)_ | | | 8804, | 9188, 9200, 9212, | | 9392, 9404, 9416, | 9290, 9302, 9314, |
| Pf- | | | 8816, | 9224, 9236, 9248, | | 9428, 9440, 9452, | 9326, 9338, 9350, |
| CSP(346- | | | 8828, | 9260, 9482, 9494, | | 9464, 9686, 9698, | 9362, 9584, 9596, |
| 375)_Link- | | | 8840, | 9506, 9518, 9530, | | 9710, 9722, 9734, | 9608, 9620, 9632, |
| er(AAY)_ | | | 8852 | 9542, 9554, 9566, | | 9746, 9758, 9770, | 9644, 9656, 9668, |
| Pf- | | | | 9788, 9800, 9812, | | 9992, 10004, | 9890, 9902, 9914, |
| CSP(310- | | | | 9824, 9836, 9848, | | 10016, 10028, | 9926, 9938, 9950, |
| 327)_Link | | | | 9860, 9872 | | 10040, 10052, | 9962, 9974 |
| er(AAY)_ | | | | | | 10064, 10076 | |
| PADRE | | | | | | | |
| HsALB_Pf- | 8751 | | 8769, | 8871, 8883, 8895, | — | 9075, 9087, 9099, | 8973, 8985, 8997, |
| CSP(19- | | | 8781, | 8907, 8919, 8931, | | 9111, 9123, 9135, | 9009, 9021, 9033, |
| 272)_Link- | | | 8793, | 8943, 8955, 9177, | | 9147, 9159, 9381, | 9045, 9057, 9279, |
| er(AAY)_ | | | 8805, | 9189, 9201, 9213, | | 9393, 9405, 9417, | 9291, 9303, 9315, |
| Pf- | | | 8817, | 9225, 9237, 9249, | | 9429, 9441, 9453, | 9327, 9339, 9351, |
| CSP(310- | | | 8829, | 9261, 9483, 9495, | | 9465, 9687, 9699, | 9363, 9585, 9597, |
| 327)_Link- | | | 8841, | 9507, 9519, 9531, | | 9711, 9723, 9735, | 9609, 9621, 9633, |
| er(AAY)_ | | | 8853 | 9543, 9555, 9567, | | 9747, 9759, 9771, | 9645, 9657, 9669, |
| Pf- | | | | 9789, 9801, 9813, | | 9993, 10005, | 9891, 9903, 9915, |
| CSP(346- | | | | 9825, 9837, 9849, | | 10017, 10029, | 9927, 9939, 9951, |
| 375)_Link- | | | | 9861, 9873 | | 10041, 10053, | 9963, 9975 |
| er(AAY)_ | | | | | | 10065, 10077 | |
| PADRE | | | | | | | |
| HsALB_Pf- | 8752 | | 8770, | 8872, 8884, 8896, | — | 9076, 9088, 9100, | 8974, 8986, 8998, |
| CSP(19- | | | 8782, | 8908, 8920, 8932, | | 9112, 9124, 9136, | 9010, 9022, 9034, |
| 272)_Link- | | | 8794, | 8944, 8956, 9178, | | 9148, 9160, 9382, | 9046, 9058, 9280, |
| er(AAY)_ | | | 8806, | 9190, 9202, 9214, | | 9394, 9406, 9418, | 9292, 9304, 9316, |
| Pf- | | | 8818, | 9226, 9238, 9250, | | 9430, 9442, 9454, | 9328, 9340, 9352, |
| CSP(310- | | | 8830, | 9262, 9484, 9496, | | 9466, 9688, 9700, | 9364, 9586, 9598, |
| 327)_Link- | | | 8842, | 9508, 9520, 9532, | | 9712, 9724, 9736, | 9610, 9622, 9634, |
| er(AAY)_ | | | 8854 | 9544, 9556, 9568, | | 9748, 9760, 9772, | 9646, 9658, 9670, |
| Pf- | | | | 9790, 9802, 9814, | | 9994, 10006, | 9892, 9904, 9916, |
| CSP(346- | | | | 9826, 9838, 9850, | | 10018, 10030, | 9928, 9940, 9952, |
| 375)_Link- | | | | 9862, 9874 | | 10042, 10054, | 9964, 9976 |
| er(AAY)_ | | | | | | 10066, 10078 | |
| PADRE_L | | | | | | | |
| inker(AA | | | | | | | |
| Y)_P2 | | | | | | | |
| HsALB_Pf- | 8753 | | 8771, | 8873, 8885, 8897, | — | 9077, 9089, 9101, | 8975, 8987, 8999, |
| CSP(19- | | | 8783, | 8909, 8921, 8933, | | 9113, 9125, 9137, | 9011, 9023, 9035, |
| 272)_Link- | | | 8795, | 8945, 8957, 9179, | | 9149, 9161, 9383, | 9047, 9059, 9281, |
| er(AAY)_ | | | 8807, | 9191, 9203, 9215, | | 9395, 9407, 9419, | 9293, 9305, 9317, |
| Pf- | | | 8819, | 9227, 9239, 9251, | | 9431, 9443, 9455, | 9329, 9341, 9353, |
| CSP(310- | | | 8831, | 9263, 9485, 9497, | | 9467, 9689, 9701, | 9365, 9587, 9599, |
| 327)_Link- | | | 8843, | 9509, 9521, 9533, | | 9713, 9725, 9737, | 9611, 9623, 9635, |
| er | | | 8855 | 9545, 9557, 9569, | | 9749, 9761, 9773, | 9647, 9659, 9671, |
| (AAY)_Pf- | | | | 9791, 9803, 9815, | | 9995, 10007, | 9893, 9905, 9917, |
| CSP(346- | | | | 9827, 9839, 9851, | | 10019, 10031, | 9929, 9941, 9953, |
| 397) | | | | 9863, 9875 | | 10043, 10055, | 9965, 9977 |
| | | | | | | 10067, 10079 | |
| Pb-CSP | 31 | 40 | 71, | 332, 363, 399, 435, | 916, 947, | 1500, 1531, 1567, | — |
| | | | 107, | 471, 507, 543, 579, | 983, 1019, | 1603, 1639, 1675, | |
| | | | 143, | 615, 624, 655, 691, | 1055, 1091, | 1711, 1747, 1783, | |
| | | | 179, | 727, 763, 799, 835, | 1127, 1163, | 1792, 1823, 1859, | |
| | | | 215, | 871, 907 | 1199, 1208, | 1895, 1931, 1967, | |
| | | | 251, | | 1239, 1275, | 2003, 2039, 2075 | |
| | | | 287, | | 1311, 1347, | | |
| | | | 323 | | 1383, 1419, | | |
| | | | | | 1455, 1491 | | |
| Pb- | 32 | | 72, | 364, 400, 436, 472, | 948, 984, | 1532, 1568, 1604, | — |
| CSP_Link- | | | 108, | 508, 544, 580, 616, | 1020, 1056, | 1640, 1676, 1712, | |
| er(G4SG4 | | | 144, | 656, 692, 728, 764, | 1092, 1128, | 1748, 1784, 1824, | |
| )_TIm | | | 180, | 800, 836, 872, 908 | 1164, 1200, | 1860, 1896, 1932, | |
| domain | | | 216, | | 1240, 1276, | 1968, 2004, 2040, | |
| HA | | | 252, | | 1312, 1348, | 2076 | |
| | | | 288, | | 1384, 1420, | | |
| | | | 324 | | 1456, 1492 | | |
| HsALB_Pb- | 33 | | 73, | 365, 401, 437, 473, | 949, 985, | 1533, 1569, 1605, | — |
| CSP(24- | | | 109, | 509, 545, 581, 617, | 1021, 1057, | 1641, 1677, 1713, | |
| 340) | | | 145, | 657, 693, 729, 765, | 1093, 1129, | 1749, 1785, 1825, | |
| | | | 181, | 801, 837, 873, 909 | 1165, 1201, | 1861, 1897, 1933, | |
| | | | 217, | | 1241, 1277, | 1969, 2005, 2041, | |
| | | | 253, | | 1313, 1349, | 2077 | |
| | | | 289, | | 1385, 1421, | | |
| | | | 325 | | 1457, 1493 | | |
| HsIns- | 34 | | 74, | 366, 402, 438, 474, | 950, 986, | 1534, 1570, 1606, | — |
| iso-I_Pb- | | | 110, | 510, 546, 582, 618, | 1022, 1058, | 1642, 1678, 1714, | |
| CSP(24- | | | 146, | 658, 694, 730, 766, | 1094, 1130, | 1750, 1786, 1826, | |
| 340) | | | 182, | 802, 838, 874, 910 | 1166, 1202, | 1862, 1898, 1934, | |
| | | | 218, | | 1242, 1278, | 1970, 2006, 2042, | |
| | | | 254, | | 1314, 1350, | 2078 | |
| | | | 290, | | 1386, 1422, | | |
| | | | 326 | | 1458, 1494 | | |
| HsSPARC | 35 | | 75, | 367, 403, 439, 475, | 951, 987, | 1535, 1571, 1607, | — |
| Pb- | | | 111, | 511, 547, 583, 619, | 1023, 1059, | 1643, 1679, 1715, | |
| CSP(24- | | | 147, | 659, 695, 731, 767, | 1095, 1131, | 1751, 1787, 1827, | |
| 340) | | | 183, | 803, 839, 875, 911 | 1167, 1203, | 1863, 1899, 1935, | |
| | | | 219, | | 1243, 1279, | 1971, 2007, 2043, | |
| | | | 255, | | 1315, 1351, | 2079 | |
| | | | 291, | | 1387, 1423, | | |
| | | | 327 | | 1459, 1495 | | |
| IgE_Pb- | 36 | | 76, | 368, 404, 440, 476, | 952, 988, | 1536, 1572, 1608, | — |
| CSP(24- | | | 112, | 512, 548, 584, 620, | 1024, 1060, | 1644, 1680, 1716, | |
| 340) | | | 148, | 660, 696, 732, 768, | 1096, 1132, | 1752, 1788, 1828, | |
| | | | 184, | 804, 840, 876, 912 | 1168, 1204, | 1864, 1900, 1936, | |
| | | | 220, | | 1244, 1280, | 1972, 2008, 2044, | |
| | | | 256, | | 1316, 1352, | 2080 | |
| | | | 292, | | 1388, 1424, | | |
| | | | 328 | | 1460, 1496 | | |

[0396] Preferred amino acid sequences, coding sequences, and mRNA sequences of the invention are provided in Table 6A and 6B. Therein, each row represents a specific suitable CSP construct of the invention, wherein the description of the CSP construct is indicated in column A, the SEQ ID NOs of the amino acid sequence is provided in column B. The respective accession number(s), and further information is provided under <223> identifier of the respective SEQ ID NOs in the sequence listing.

[0397] The corresponding SEQ ID NOs of the coding sequences encoding the respective CSP constructs are provided in column C of Table 6A and 6B (wild type cds) and D (opt1, opt2, opt3, opt4, opt5, opt11 cds). Further information is provided under <223> identifier of the respective SEQ ID NO in the sequence listing.

[0398] For Table 6B, the corresponding RNA sequences comprising a preferred 3′ end/3′ terminus are provided in columns E to H, wherein column E provides RNA sequences with advantageous 3′ end/3′ terminus “A64-N5-C30-hSL-N5” as defined herein, and wherein column F provides RNA sequences with advantageous 3′ end “hSL-A64-N5” as defined herein, and wherein column G provides RNA sequences with advantageous 3′ end/3′ terminus “hSL-A100-N5” as defined herein, and wherein column H provides RNA sequences with advantageous 3′ end/3′ terminus “hSL-A100” as defined herein.

TABLE 6B
Preferred mRNA constructs encoding CSP

| A | B | C | D | E | F | G | H |
|---|---|---|---|---|---|---|---|
| Pf-CSP | 1 | 37 | 41, 77, | 329, 333, 369, 405, | 6555, 6558, | 7284, 7287, 7317, | 8013, 8016, 8046, |
| | | | 113, | 441, 477, 513, 549, | 6588, 6618, | 7347, 7377, 7407, | 8076, 8106, 8136, |
| | | | 149, | 585, 621, 625, 661, | 6648, 6678, | 7437, 7467, 7497, | 8166, 8196, 8226, |
| | | | 185, | 697, 733, 769, 805, | 6708, 6738, | 7527, 7530, 7560, | 8256, 8259, 8289, |
| | | | 221, | 841, 877, 913, 917, | 6768, 6798, | 7590, 7620, 7650, | 8319, 8349, 8379, |
| | | | 257, | 953, 989, 1025, | 6801, 6831, | 7680, 7710, 7740, | 8409, 8439, 8469, |
| | | | 293 | 1061, 1097, 1133, | 6861, 6891, | 7770, 7773, 7803, | 8499, 8502, 8532, |
| | | | | 1169, 1205, 1209, | 6921, 6951, | 7833, 7863, 7893, | 8562, 8592, 8622, |
| | | | | 1245, 1281, 1317, | 6981, 7011, | 7923, 7953, 7983 | 8652, 8682, 8712 |
| | | | | 1353, 1389, 1425, | 7041, 7044, | | |
| | | | | 1461, 1497, 1501, | 7074, 7104, | | |
| | | | | 1537, 1573, 1609, | 7134, 7164, | | |
| | | | | 1645, 1681, 1717, | 7194, 7224, | | |
| | | | | 1753, 1789, 1793, | 7254 | | |
| | | | | 1829, 1865, 1901, | | | |
| | | | | 1937, 1973, 2009, | | | |
| | | | | 2045, 6312, 6315, | | | |
| | | | | 6345, 6375, 6405, | | | |
| | | | | 6435, 6465, 6495, | | | |
| | | | | 6525 | | | |
| Pf-CSP(1- | 2 | 38 | 42, 78, | 330, 334, 370, 406, | 6556, 6559, | 7285, 7288, 7318, | 8014, 8017, 8047, |
| 374) | | | 114, | 442, 478, 514, 550, | 6589, 6619, | 7348, 7378, 7408, | 8077, 8107, 8137, |
| | | | 150, | 586, 622, 626, 662, | 6649, 6679, | 7438, 7468, 7498, | 8167, 8197, 8227, |
| | | | 186, | 698, 734, 770, 806, | 6709, 6739, | 7528, 7531, 7561, | 8257, 8260, 8290, |
| | | | 222, | 842, 878, 914, 918, | 6769, 6799, | 7591, 7621, 7651, | 8320, 8350, 8380, |
| | | | 258, | 954, 990, 1026, | 6802, 6832, | 7681, 7711, 7741, | 8410, 8440, 8470, |
| | | | 294 | 1062, 1098, 1134, | 6862, 6892, | 7771, 7774, 7804, | 8500, 8503, 8533, |
| | | | | 1170, 1206, 1210, | 6922, 6952, | 7834, 7864, 7894, | 8563, 8593, 8623, |
| | | | | 1246, 1282, 1318, | 6982, 7012, | 7924, 7954, 7984 | 8653, 8683, 8713 |
| | | | | 1354, 1390, 1426, | 7042, 7045, | | |
| | | | | 1462, 1498, 1502, | 7075, 7105, | | |
| | | | | 1538, 1574, 1610, | 7135, 7165, | | |
| | | | | 1646, 1682, 1718, | 7195, 7225, | | |
| | | | | 1754, 1790, 1794, | 7255 | | |
| | | | | 1830, 1866, 1902, | | | |
| | | | | 1938, 1974, 2010, | | | |
| | | | | 2046, 6313, 6316, | | | |
| | | | | 6346, 6376, 6406, | | | |
| | | | | 6436, 6466, 6496, | | | |
| | | | | 6526 | | | |
| Pf-CSP(1- | 3 | 39 | 43, 79, | 331, 335, 371, 407, | 6557, 6560, | 7286, 7289, 7319, | 8015, 8018, 8048, |
| 325) | | | 115, | 443, 479, 515, 551, | 6590, 6620, | 7349, 7379, 7409, | 8078, 8108, 8138, |
| | | | 151, | 587, 623, 627, 663, | 6650, 6680, | 7439, 7469, 7499, | 8168, 8198, 8228, |
| | | | 187, | 699, 735, 771, 807, | 6710, 6740, | 7529, 7532, 7562, | 8258, 8261, 8291, |
| | | | 223, | 843, 879, 915, 919, | 6770, 6800, | 7592, 7622, 7652, | 8321, 8351, 8381, |
| | | | 259, | 955, 991, 1027, | 6803, 6833, | 7682, 7712, 7742, | 8411, 8441, 8471, |
| | | | 295 | 1063, 1099, 1135, | 6863, 6893, | 7772, 7775, 7805, | 8501, 8504, 8534, |
| | | | | 1171, 1207, 1211, | 6923, 6953, | 7835, 7865, 7895, | 8564, 8594, 8624, |
| | | | | 1247, 1283, 1319, | 6983, 7013, | 7925, 7955, 7985 | 8654, 8684, 8714 |
| | | | | 1355, 1391, 1427, | 7043, 7046, | | |
| | | | | 1463, 1499, 1503, | 7076, 7106, | | |
| | | | | 1539, 1575, 1611, | 7136, 7166, | | |
| | | | | 1647, 1683, 1719, | 7196, 7226, | | |
| | | | | 1755, 1791, 1795, | 7256 | | |
| | | | | 1831, 1867, 1903, | | | |
| | | | | 1939, 1975, 2011, | | | |
| | | | | 2047, 6314, 6317, | | | |
| | | | | 6347, 6377, 6407, | | | |
| | | | | 6437, 6467, 6497, | | | |
| | | | | 6527 | | | |
| HsALB_Pf | 4 | | 44, 80, | 336, 372, 408, 444, | 6561, 6591, | 7290, 7320, 7350, | 8019, 8049, 8079, |
| 4DSP(19- | | | 8755, | 480, 516, 552, 588, | 6621, 6651, | 7380, 7410, 7440, | 8109, 8139, 8169, |
| 397) | | | 116, | 628, 664, 700, 736, | 6681, 6711, | 7470, 7500, 9469, | 8199, 8229, 9775, |
| | | | 152, | 772, 808, 844, 880, | 6741, 6771, | 7533, 7563, 7593, | 8262, 8292, 8322, |
| | | | 188, | 8857, 920, 956, | 9163, 6804, | 7623, 7653, 7683, | 8352, 8382, 8412, |
| | | | 224, | 992, 1028, 1064, | 6834, 6864, | 7713, 7743, 9571, | 8442, 8472, 9877, |
| | | | 260, | 1100, 1136, 1172, | 6894, 6924, | 7776, 7806, 7836, | 8505, 8535, 8565, |
| | | | 296 | 1212, 1248, 1284, | 6954, 6984, | 7866, 7896, 7926, | 8595, 8625, 8655, |
| | | | | 1320, 1356, 1392, | 7014, 9265, | 7956, 7986, 9673 | 8685, 8715, 9979 |
| | | | | 1428, 1464, 1504, | 7047, 7077, | | |
| | | | | 1540, 1576, 1612, | 7107, 7137, | | |
| | | | | 1648, 1684, 1720, | 7167, 7197, | | |
| | | | | 1756, 1796, 1832, | 7227, 7257, | | |
| | | | | 1868, 1904, 1940, | 9367 | | |
| | | | | 1976, 2012, 2048, | | | |
| | | | | 9061, 6318, 6348, | | | |
| | | | | 6378, 6408, 6438, | | | |
| | | | | 6468, 6498, 6528, | | | |
| | | | | 8959 | | | |
| Hshis- | 5 | | 45, 81, | 337, 373, 409, 445, | 6562, 6592, | 7291, 7321, 7351, | 8020, 8050, 8080, |
| isol_Pf- | | | 117, | 481, 517, 553, 589, | 6622, 6652, | 7381, 7411, 7441, | 8110, 8140, 8170, |
| CSP(19- | | | 153, | 629, 665, 701, 737, | 6682, 6712, | 7471, 7501, 7534, | 8200, 8230, 8263, |
| 397) | | | 189, | 773, 809, 845, 881, | 6742, 6772, | 7564, 7594, 7624, | 8293, 8323, 8353, |
| | | | 225, | 921, 957, 993, | 6805, 6835, | 7654, 7684, 7714, | 8383, 8413, 8443, |
| | | | 261, | 1029, 1065, 1101, | 6865, 6895, | 7744, 7777, 7807, | 8473, 8506, 8536, |
| | | | 297 | 1137, 1173, 1213, | 6925, 6955, | 7837, 7867, 7897, | 8566, 8596, 8626, |
| | | | | 1249, 1285, 1321, | 6985, 7015, | 7927, 7957, 7987 | 8656, 8686, 8716 |
| | | | | 1357, 1393, 1429, | 7048, 7078, | | |
| | | | | 1465, 1505, 1541, | 7108, 7138, | | |
| | | | | 1577, 1613, 1649, | 7168, 7198, | | |
| | | | | 1685, 1721, 1757, | 7228, 7258 | | |
| | | | | 1797, 1833, 1869, | | | |
| | | | | 1905, 1941, 1977, | | | |
| | | | | 2013, 2049, 6319, | | | |
| | | | | 6349, 6379, 6409, | | | |
| | | | | 6439, 6469, 6499, | | | |
| | | | | 6529 | | | |
| HsSPARC | 6 | | 46, 82, | 338, 374, 410, 446, | 6563, 6593, | 7292, 7322, 7352, | 8021, 8051, 8081, |
| Pf- | | | 118, | 482, 518, 554, 590, | 6623, 6653, | 7382, 7412, 7442, | 8111, 8141, 8171, |
| CSP(19- | | | 154, | 630, 666, 702, 738, | 6683, 6713, | 7472, 7502, 7535, | 8201, 8231, 8264, |
| 397) | | | 190, | 774, 810, 846, 882, | 6743, 6773, | 7565, 7595, 7625, | 8294, 8324, 8354, |
| | | | 226, | 922, 958, 994, | 6806, 6836, | 7655, 7685, 7715, | 8384, 8414, 8444, |
| | | | 262, | 1030, 1066, 1102, | 6866, 6896, | 7745, 7778, 7808, | 8474, 8507, 8537, |
| | | | 298 | 1138, 1174, 1214, | 6926, 6956, | 7838, 7868, 7898, | 8567, 8597, 8627, |
| | | | | 1250, 1286, 1322, | 6986, 7016, | 7928, 7958, 7988 | 8657, 8687, 8717 |
| | | | | 1358, 1394, 1430, | 7049, 7079, | | |
| | | | | 1466, 1506, 1542, | 7109, 7139, | | |
| | | | | 1578, 1614, 1650, | 7169, 7199, | | |
| | | | | 1686, 1722, 1758, | 7229, 7259 | | |
| | | | | 1798, 1834, 1870, | | | |
| | | | | 1906, 1942, 1978, | | | |
| | | | | 2014, 2050, 6320, | | | |
| | | | | 6350, 6380, 6410, | | | |
| | | | | 6440, 6470, 6500, | | | |
| | | | | 6530 | | | |
| IgE_Pf- | 7 | | 47, 83, | 339, 375, 411, 447, | 6564, 6594, | 7293, 7323, 7353, | 8022, 8052, 8082, |
| CSP(19- | | | 119, | 483, 519, 555, 591, | 6624, 6654, | 7383, 7413, 7443, | 8112, 8142, 8172, |
| 397) | | | 155, | 631, 667, 703, 739, | 6684, 6714, | 7473, 7503, 7536, | 8202, 8232, 8265, |
| | | | 191, | 775, 811, 847, 883, | 6744, 6774, | 7566, 7596, 7626, | 8295, 8325, 8355, |
| | | | 227, | 923, 959, 995, | 6807, 6837, | 7656, 7686, 7716, | 8385, 8415, 8445, |
| | | | 263, | 1031, 1067, 1103, | 6867, 6897, | 7746, 7779, 7809, | 8475, 8508, 8538, |
| | | | 299 | 1139, 1175, 1215, | 6927, 6957, | 7839, 7869, 7899, | 8568, 8598, 8628, |
| | | | | 1251, 1287, 1323, | 6987, 7017, | 7929, 7959, 7989 | 8658, 8688, 8718 |
| | | | | 1359, 1395, 1431, | 7050, 7080, | | |
| | | | | 1467, 1507, 1543, | 7110, 7140, | | |
| | | | | 1579, 1615, 1651, | 7170, 7200, | | |
| | | | | 1687, 1723, 1759, | 7230, 7260 | | |
| | | | | 1799, 1835, 1871, | | | |
| | | | | 1907, 1943, 1979, | | | |
| | | | | 2015, 2051, 6321, | | | |
| | | | | 6351, 6381, 6411, | | | |
| | | | | 6441, 6471, 6501, | | | |
| | | | | 6531 | | | |
| Pf- | 8 | | 48, 84, | 340, 376, 412, 448, | 6565, 6595, | 7294, 7324, 7354, | 8023, 8053, 8083, |
| CSP_Link- | | | 120, | 484, 520, 556, 592, | 6625, 6655, | 7384, 7414, 7444, | 8113, 8143, 8173, |
| er(G4S | | | 156, | 632, 668, 704, 740, | 6685, 6715, | 7474, 7504, 7537, | 8203, 8233, 8266, |
| G4)_TIm | | | 192, | 776, 812, 848, 884, | 6745, 6775, | 7567, 7597, 7627, | 8296, 8326, 8356, |
| domain | | | 228, | 924, 960, 996, | 6808, 6838, | 7657, 7687, 7717, | 8386, 8416, 8446, |
| HA | | | 264, | 1032, 1068, 1104, | 6868, 6898, | 7747, 7780, 7810, | 8476, 8509, 8539, |
| | | | 300 | 1140, 1176, 1216, | 6928, 6958, | 7840, 7870, 7900, | 8569, 8599, 8629, |
| | | | | 1252, 1288, 1324, | 6988, 7018, | 7930, 7960, 7990 | 8659, 8689, 8719 |
| | | | | 1360, 1396, 1432, | 7051, 7081, | | |
| | | | | 1468, 1508, 1544, | 7111, 7141, | | |
| | | | | 1580, 1616, 1652, | 7171, 7201, | | |
| | | | | 1688, 1724, 1760, | 7231, 7261 | | |
| | | | | 1800, 1836, 1872, | | | |
| | | | | 1908, 1944, 1980, | | | |
| | | | | 2016, 2052, 6322, | | | |
| | | | | 6352, 6382, 6412, | | | |
| | | | | 6442, 6472, 6502, | | | |
| | | | | 6532 | | | |
| Pf- | 9 | | 49, 85, | 341, 377, 413, 449, | 6566, 6596, | 7295, 7325, 7355, | 8024, 8054, 8084, |
| CSP(199- | | | 121, | 485, 521, 557, 593, | 6626, 6656, | 7385, 7415, 7445, | 8114, 8144, 8174, |
| 377)_Link- | | | 157, | 633, 669, 705, 741, | 6686, 6716, | 7475, 7505, 7538, | 8204, 8234, 8267, |
| er(PVTN) | | | 193, | 777, 813, 849, 885, | 6746, 6776, | 7568, 7598, 7628, | 8297, 8327, 8357, |
| HBsAg | | | 229, | 925, 961, 997, | 6809, 6839, | 7658, 7688, 7718, | 8387, 8417, 8447, |
| | | | 265, | 1033, 1069, 1105, | 6869, 6899, | 7748, 7781, 7811, | 8477, 8510, 8540, |
| | | | 301 | 1141, 1177, 1217, | 6929, 6959, | 7841, 7871, 7901, | 8570, 8600, 8630, |
| | | | | 1253, 1289, 1325, | 6989, 7019, | 7931, 7961, 7991 | 8660, 8690, 8720 |
| | | | | 1361, 1397, 1433, | 7052, 7082, | | |
| | | | | 1469, 1509, 1545, | 7112, 7142, | | |
| | | | | 1581, 1617, 1653, | 7172, 7202, | | |
| | | | | 1689, 1725, 1761, | 7232, 7262 | | |
| | | | | 1801, 1837, 1873, | | | |
| | | | | 1909, 1945, 1981, | | | |
| | | | | 2017, 2053, 6323, | | | |
| | | | | 6353, 6383, 6413, | | | |
| | | | | 6443, 6473, 6503, | | | |
| | | | | 6533 | | | |
| Pf- | 10 | | 50, 86, | 342, 378, 414, 450, | 6567, 6597, | 7296, 7326, 7356, | 8025, 8055, 8085, |
| CSP(199- | | | 122, | 486, 522, 558, 594, | 6627, 6657, | 7386, 7416, 7446, | 8115, 8145, 8175, |
| 387)_Link- | | | 158, | 634, 670, 706, 742, | 6687, 6717, | 7476, 7506, 7539, | 8205, 8235, 8268, |
| er(PVTN) | | | 194, | 778, 814, 850, 886, | 6747, 6777, | 7569, 7599, 7629, | 8298, 8328, 8358, |
| HBsAg | | | 230, | 926, 962, 998, | 6810, 6840, | 7659, 7689, 7719, | 8388, 8418, 8448, |
| | | | 266, | 1034, 1070, 1106, | 6870, 6900, | 7749, 7782, 7812, | 8478, 8511, 8541, |
| | | | 302 | 1142, 1178, 1218, | 6930, 6960, | 7842, 7872, 7902, | 8571, 8601, 8631, |
| | | | | 1254, 1290, 1326, | 6990, 7020, | 7932, 7962, 7992 | 8661, 8691, 8721 |
| | | | | 1362, 1398, 1434, | 7053, 7083, | | |
| | | | | 1470, 1510, 1546, | 7113, 7143, | | |
| | | | | 1582, 1618, 1654, | 7173, 7203, | | |
| | | | | 1690, 1726, 1762, | 7233, 7263 | | |
| | | | | 1802, 1838, 1874, | | | |
| | | | | 1910, 1946, 1982, | | | |
| | | | | 2018, 2054, 6324, | | | |
| | | | | 6354, 6384, 6414, | | | |
| | | | | 6444, 6474, 6504, | | | |
| | | | | 6534 | | | |
| HsALB_Pf- | 11 | | 51, 87, | 343, 379, 415, 451, | 6568, 6598, | 7297, 7327, 7357, | 8026, 8056, 8086, |
| CSP(19- | | | 123, | 487, 523, 559, 595, | 6628, 6658, | 7387, 7417, 7447, | 8116, 8146, 8176, |
| 152) | | | 159, | 635, 671, 707, 743, | 6688, 6718, | 7477, 7507, 7540, | 8206, 8236, 8269, |
| | | | 195, | 779, 815, 851, 887, | 6748, 6778, | 7570, 7600, 7630, | 8299, 8329, 8359, |
| | | | 231, | 927, 963, 999, | 6811, 6841, | 7660, 7690, 7720, | 8389, 8419, 8449, |
| | | | 267, | 1035, 1071, 1107, | 6871, 6901, | 7750, 7783, 7813, | 8479, 8512, 8542, |
| | | | 303 | 1143, 1179, 1219, | 6931, 6961, | 7843, 7873, 7903, | 8572, 8602, 8632, |
| | | | | 1255, 1291, 1327, | 6991, 7021, | 7933, 7963, 7993 | 8662, 8692, 8722 |
| | | | | 1363, 1399, 1435, | 7054, 7084, | | |
| | | | | 1471, 1511, 1547, | 7114, 7144, | | |
| | | | | 1583, 1619, 1655, | 7174, 7204, | | |
| | | | | 1691, 1727, 1763, | 7234, 7264 | | |
| | | | | 1803, 1839, 1875, | | | |
| | | | | 1911, 1947, 1983, | | | |
| | | | | 2019, 2055, 6325, | | | |
| | | | | 6355, 6385, 6415, | | | |
| | | | | 6445, 6475, 6505, | | | |
| | | | | 6535 | | | |
| HsALB_Pf | 12 | | 52, 88, | 344, 380, 416, 452, | 6569, 6599, | 7298, 7328, 7358, | 8027, 8057, 8087, |
| 4DSP(19- | | | 124, | 488, 524, 560, 596, | 6629, 6659, | 7388, 7418, 7448, | 8117, 8147, 8177, |
| 192) | | | 160, | 636, 672, 708, 744, | 6689, 6719, | 7478, 7508, 7541, | 8207, 8237, 8270, |
| | | | 196, | 780, 816, 852, 888, | 6749, 6779, | 7571, 7601, 7631, | 8300, 8330, 8360, |
| | | | 232, | 928, 964, 1000, | 6812, 6842, | 7661, 7691, 7721, | 8390, 8420, 8450, |
| | | | 268, | 1036, 1072, 1108, | 6872, 6902, | 7751, 7784, 7814, | 8480, 8513, 8543, |
| | | | 304 | 1144, 1180, 1220, | 6932, 6962, | 7844, 7874, 7904, | 8573, 8603, 8633, |
| | | | | 1256, 1292, 1328, | 6992, 7022, | 7934, 7964, 7994 | 8663, 8693, 8723 |
| | | | | 1364, 1400, 1436, | 7055, 7085, | | |
| | | | | 1472, 1512, 1548, | 7115, 7145, | | |
| | | | | 1584, 1620, 1656, | 7175, 7205, | | |
| | | | | 1692, 1728, 1764, | 7235, 7265 | | |
| | | | | 1804, 1840, 1876, | | | |
| | | | | 1912, 1948, 1984, | | | |
| | | | | 2020, 2056, 6326, | | | |
| | | | | 6356, 6386, 6416, | | | |
| | | | | 6446, 6476, 6506, | | | |
| | | | | 6536 | | | |
| HsALB_Pf | 13 | | 53, 89, | 345, 381, 417, 453, | 6570, 6600, | 7299, 7329, 7359, | 8028, 8058, 8088, |
| 4DSP(19- | | | 125, | 489, 525, 561, 597, | 6630, 6660, | 7389, 7419, 7449, | 8118, 8148, 8178, |
| 272) | | | 161, | 637, 673, 709, 745, | 6690, 6720, | 7479, 7509, 7542, | 8208, 8238, 8271, |
| | | | 197, | 781, 817, 853, 889, | 6750, 6780, | 7572, 7602, 7632, | 8301, 8331, 8361, |
| | | | 233, | 929, 965, 1001, | 6813, 6843, | 7662, 7692, 7722, | 8391, 8421, 8451, |
| | | | 269, | 1037, 1073, 1109, | 6873, 6903, | 7752, 7785, 7815, | 8481, 8514, 8544, |
| | | | 305 | 1145, 1181, 1221, | 6933, 6963, | 7845, 7875, 7905, | 8574, 8604, 8634, |
| | | | | 1257, 1293, 1329, | 6993, 7023, | 7935, 7965, 7995 | 8664, 8694, 8724 |
| | | | | 1365, 1401, 1437, | 7056, 7086, | | |
| | | | | 1473, 1513, 1549, | 7116, 7146, | | |
| | | | | 1585, 1621, 1657, | 7176, 7206, | | |
| | | | | 1693, 1729, 1765, | 7236, 7266 | | |
| | | | | 1805, 1841, 1877, | | | |
| | | | | 1913, 1949, 1985, | | | |
| | | | | 2021, 2057, 6327, | | | |
| | | | | 6357, 6387, 6417, | | | |
| | | | | 6447, 6477, 6507, | | | |
| | | | | 6537 | | | |
| HsALB_Pf- | 14 | | 54, 90, | 346, 382, 418, 454, | 6571, 6601, | 7300, 7330, 7360, | 8029, 8059, 8089, |
| CSP(19- | | | 8766, | 490, 526, 562, 598, | 6631, 6661, | 7390, 7420, 7450, | 8119, 8149, 8179, |
| 272)_Link- | | | 126, | 638, 674, 710, 746, | 6691, 6721, | 7480, 7510, 9480, | 8209, 8239, 9786, |
| er(AAY)_ | | | 162, | 782, 818, 854, 890, | 6751, 6781, | 7543, 7573, 7603, | 8272, 8302, 8332, |
| Pf- | | | 198, | 8868, 930, 966, | 9174, 6814, | 7633, 7663, 7693, | 8362, 8392, 8422, |
| CSP(310- | | | 234, | 1002, 1038, 1074, | 6844, 6874, | 7723, 7753, 9582, | 8452, 8482, 9888, |
| 327)_Link | | | 270, | 1110, 1146, 1182, | 6904, 6934, | 7786, 7816, 7846, | 8515, 8545, 8575, |
| er(AAY)_ | | | 306 | 1222, 1258, 1294, | 6964, 6994, | 7876, 7906, 7936, | 8605, 8635, 8665, |
| Pf- | | | | 1330, 1366, 1402, | 7024, 9276, | 7966, 7996, 9684 | 8695, 8725, 9990 |
| CSP(346- | | | | 1438, 1474, 1514, | 7057, 7087, | | |
| 375) | | | | 1550, 1586, 1622, | 7117, 7147, | | |
| | | | | 1658, 1694, 1730, | 7177, 7207, | | |
| | | | | 1766, 1806, 1842, | 7237, 7267, | | |
| | | | | 1878, 1914, 1950, | 9378 | | |
| | | | | 1986, 2022, 2058, | | | |
| | | | | 9072, 6328, 6358, | | | |
| | | | | 6388, 6418, 6448, | | | |
| | | | | 6478, 6508, 6538, | | | |
| | | | | 8970 | | | |
| HsALB_Pf- | 15 | | 55, 91, | 347, 383, 419, 455, | 6572, 6602, | 7301, 7331, 7361, | 8030, 8060, 8090, |
| CSP(19- | | | 127, | 491, 527, 563, 599, | 6632, 6662, | 7391, 7421, 7451, | 8120, 8150, 8180, |
| 272)_Link- | | | 163, | 639, 675, 711, 747, | 6692, 6722, | 7481, 7511, 7544, | 8210, 8240, 8273, |
| er(AAY)_ | | | 199, | 783, 819, 855, 891, | 6752, 6782, | 7574, 7604, 7634, | 8303, 8333, 8363, |
| Pf- | | | 235, | 931, 967, 1003, | 6815, 6845, | 7664, 7694, 7724, | 8393, 8423, 8453, |
| CSP(346- | | | 271, | 1039, 1075, 1111, | 6875, 6905, | 7754, 7787, 7817, | 8483, 8516, 8546, |
| 365)_Link- | | | 307 | 1147, 1183, 1223, | 6935, 6965, | 7847, 7877, 7907, | 8576, 8606, 8636, |
| er(AAY)_ | | | | 1259, 1295, 1331, | 6995, 7025, | 7937, 7967, 7997 | 8666, 8696, 8726 |
| P2 | | | | 1367, 1403, 1439, | 7058, 7088, | | |
| | | | | 1475, 1515, 1551, | 7118, 7148, | | |
| | | | | 1587, 1623, 1659, | 7178, 7208, | | |
| | | | | 1695, 1731, 1767, | 7238, 7268 | | |
| | | | | 1807, 1843, 1879, | | | |
| | | | | 1915, 1951, 1987, | | | |
| | | | | 2023, 2059, 6329, | | | |
| | | | | 6359, 6389, 6419, | | | |
| | | | | 6449, 6479, 6509, | | | |
| | | | | 6539 | | | |
| HsALB_Pf- | 16 | | 56, 92, | 348, 384, 420, 456, | 6573, 6603, | 7302, 7332, 7362, | 8031, 8061, 8091, |
| CSP(19- | | | 128, | 492, 528, 564, 600, | 6633, 6663, | 7392, 7422, 7452, | 8121, 8151, 8181, |
| 272)_Link- | | | 164, | 640, 676, 712, 748, | 6693, 6723, | 7482, 7512, 7545, | 8211, 8241, 8274, |
| er(AAY)_ | | | 200, | 784, 820, 856, 892, | 6753, 6783, | 7575, 7605, 7635, | 8304, 8334, 8364, |
| Pf- | | | 236, | 932, 968, 1004, | 6816, 6846, | 7665, 7695, 7725, | 8394, 8424, 8454, |
| CSP(346- | | | 272, | 1040, 1076, 1112, | 6876, 6906, | 7755, 7788, 7818, | 8484, 8517, 8547, |
| 365)_Link- | | | 308 | 1148, 1184, 1224, | 6936, 6966, | 7848, 7878, 7908, | 8577, 8607, 8637, |
| er(AAY)_ | | | | 1260, 1296, 1332, | 6996, 7026, | 7938, 7968, 7998 | 8667, 8697, 8727 |
| PADRE | | | | 1368, 1404, 1440, | 7059, 7089, | | |
| | | | | 1476, 1516, 1552, | 7119, 7149, | | |
| | | | | 1588, 1624, 1660, | 7179, 7209, | | |
| | | | | 1696, 1732, 1768, | 7239, 7269 | | |
| | | | | 1808, 1844, 1880, | | | |
| | | | | 1916, 1952, 1988, | | | |
| | | | | 2024, 2060, 6330, | | | |
| | | | | 6360, 6390, 6420, | | | |
| | | | | 6450, 6480, 6510, | | | |
| | | | | 6540 | | | |
| HsALB_Pf- | 17 | | 57, 93, | 349, 385, 421, 457, | 6574, 6604, | 7303, 7333, 7363, | 8032, 8062, 8092, |
| CSP(19- | | | 129, | 493, 529, 565, 601, | 6634, 6664, | 7393, 7423, 7453, | 8122, 8152, 8182, |
| 272)_Link- | | | 165, | 641, 677, 713, 749, | 6694, 6724, | 7483, 7513, 7546, | 8212, 8242, 8275, |
| er(G4S)_ | | | 201, | 785, 821, 857, 893, | 6754, 6784, | 7576, 7606, 7636, | 8305, 8335, 8365, |
| Pf- | | | 237, | 933, 969, 1005, | 6817, 6847, | 7666, 7696, 7726, | 8395, 8425, 8455, |
| CSP(310- | | | 273, | 1041, 1077, 1113, | 6877, 6907, | 7756, 7789, 7819, | 8485, 8518, 8548, |
| 327)_Link- | | | 309 | 1149, 1185, 1225, | 6937, 6967, | 7849, 7879, 7909, | 8578, 8608, 8638, |
| er(G4S)_ | | | | 1261, 1297, 1333, | 6997, 7027, | 7939, 7969, 7999 | 8668, 8698, 8728 |
| Pf- | | | | 1369, 1405, 1441, | 7060, 7090, | | |
| CSP(346- | | | | 1477, 1517, 1553, | 7120, 7150, | | |
| 375) | | | | 1589, 1625, 1661, | 7180, 7210, | | |
| | | | | 1697, 1733, 1769, | 7240, 7270 | | |
| | | | | 1809, 1845, 1881, | | | |
| | | | | 1917, 1953, 1989, | | | |
| | | | | 2025, 2061, 6331, | | | |
| | | | | 6361, 6391, 6421, | | | |
| | | | | 6451, 6481, 6511, | | | |
| | | | | 6541 | | | |
| HsALB_Pf- | 18 | | 58, 94, | 350, 386, 422, 458, | 6575, 6605, | 7304, 7334, 7364, | 8033, 8063, 8093, |
| CSP(19- | | | 130, | 494, 530, 566, 602, | 6635, 6665, | 7394, 7424, 7454, | 8123, 8153, 8183, |
| 272)_Link- | | | 166, | 642, 678, 714, 750, | 6695, 6725, | 7484, 7514, 7547, | 8213, 8243, 8276, |
| er(G4S)_ | | | 202, | 786, 822, 858, 894, | 6755, 6785, | 7577, 7607, 7637, | 8306, 8336, 8366, |
| Pf- | | | 238, | 934, 970, 1006, | 6818, 6848, | 7667, 7697, 7727, | 8396, 8426, 8456, |
| CSP(310- | | | 274, | 1042, 1078, 1114, | 6878, 6908, | 7757, 7790, 7820, | 8486, 8519, 8549, |
| 327)_Pf- | | | 310 | 1150, 1186, 1226, | 6938, 6968, | 7850, 7880, 7910, | 8579, 8609, 8639, |
| CSP(346- | | | | 1262, 1298, 1334, | 6998, 7028, | 7940, 7970, 8000 | 8669, 8699, 8729 |
| 375) | | | | 1370, 1406, 1442, | 7061, 7091, | | |
| | | | | 1478, 1518, 1554, | 7121, 7151, | | |
| | | | | 1590, 1626, 1662, | 7181, 7211, | | |
| | | | | 1698, 1734, 1770, | 7241, 7271 | | |
| | | | | 1810, 1846, 1882, | | | |
| | | | | 1918, 1954, 1990, | | | |
| | | | | 2026, 2062, 6332, | | | |
| | | | | 6362, 6392, 6422, | | | |
| | | | | 6452, 6482, 6512, | | | |
| | | | | 6542 | | | |
| HsALB_Pf | 19 | | 59, 95, | 351, 387, 423, 459, | 6576, 6606, | 7305, 7335, 7365, | 8034, 8064, 8094, |
| 4DSP(19- | | | 131, | 495, 531, 567, 603, | 6636, 6666, | 7395, 7425, 7455, | 8124, 8154, 8184, |
| 325) | | | 167, | 643, 679, 715, 751, | 6696, 6726, | 7485, 7515, 7548, | 8214, 8244, 8277, |
| | | | 203, | 787, 823, 859, 895, | 6756, 6786, | 7578, 7608, 7638, | 8307, 8337, 8367, |
| | | | 239, | 935, 971, 1007, | 6819, 6849, | 7668, 7698, 7728, | 8397, 8427, 8457, |
| | | | 275, | 1043, 1079, 1115, | 6879, 6909, | 7758, 7791, 7821, | 8487, 8520, 8550, |
| | | | 311 | 1151, 1187, 1227, | 6939, 6969, | 7851, 7881, 7911, | 8580, 8610, 8640, |
| | | | | 1263, 1299, 1335, | 6999, 7029, | 7941, 7971, 8001 | 8670, 8700, 8730 |
| | | | | 1371, 1407, 1443, | 7062, 7092, | | |
| | | | | 1479, 1519, 1555, | 7122, 7152, | | |
| | | | | 1591, 1627, 1663, | 7182, 7212, | | |
| | | | | 1699, 1735, 1771, | 7242, 7272 | | |
| | | | | 1811, 1847, 1883, | | | |
| | | | | 1919, 1955, 1991, | | | |
| | | | | 2027, 2063, 6333, | | | |
| | | | | 6363, 6393, 6423, | | | |
| | | | | 6453, 6483, 6513, | | | |
| | | | | 6543 | | | |
| HsALB_Pf | 20 | | 60, 96, | 352, 388, 424, 460, | 6577, 6607, | 7306, 7336, 7366, | 8035, 8065, 8095, |
| 4DSP(19- | | | 132, | 496, 532, 568, 604, | 6637, 6667, | 7396, 7426, 7456, | 8125, 8155, 8185, |
| 384) | | | 168, | 644, 680, 716, 752, | 6697, 6727, | 7486, 7516, 7549, | 8215, 8245, 8278, |
| | | | 204, | 788, 824, 860, 896, | 6757, 6787, | 7579, 7609, 7639, | 8308, 8338, 8368, |
| | | | 240, | 936, 972, 1008, | 6820, 6850, | 7669, 7699, 7729, | 8398, 8428, 8458, |
| | | | 276, | 1044, 1080, 1116, | 6880, 6910, | 7759, 7792, 7822, | 8488, 8521, 8551, |
| | | | 312 | 1152, 1188, 1228, | 6940, 6970, | 7852, 7882, 7912, | 8581, 8611, 8641, |
| | | | | 1264, 1300, 1336, | 7000, 7030, | 7942, 7972, 8002 | 8671, 8701, 8731 |
| | | | | 1372, 1408, 1444, | 7063, 7093, | | |
| | | | | 1480, 1520, 1556, | 7123, 7153, | | |
| | | | | 1592, 1628, 1664, | 7183, 7213, | | |
| | | | | 1700, 1736, 1772, | 7243, 7273 | | |
| | | | | 1812, 1848, 1884, | | | |
| | | | | 1920, 1956, 1992, | | | |
| | | | | 2028, 2064, 6334, | | | |
| | | | | 6364, 6394, 6424, | | | |
| | | | | 6454, 6484, 6514, | | | |
| | | | | 6544 | | | |
| HsALB_Pf | 21 | | 61, 97, | 353, 389, 425, 461, | 6578, 6608, | 7307, 7337, 7367, | 8036, 8066, 8096, |
| 4DSP(19- | | | 133, | 497, 533, 569, 605, | 6638, 6668, | 7397, 7427, 7457, | 8126, 8156, 8186, |
| 384)_TM | | | 169, | 645, 681, 717, 753, | 6698, 6728, | 7487, 7517, 7550, | 8216, 8246, 8279, |
| domain | | | 205, | 789, 825, 861, 897, | 6758, 6788, | 7580, 7610, 7640, | 8309, 8339, 8369, |
| HA | | | 241, | 937, 973, 1009, | 6821, 6851, | 7670, 7700, 7730, | 8399, 8429, 8459, |
| | | | 277, | 1045, 1081, 1117, | 6881, 6911, | 7760, 7793, 7823, | 8489, 8522, 8552, |
| | | | 313 | 1153, 1189, 1229, | 6941, 6971, | 7853, 7883, 7913, | 8582, 8612, 8642, |
| | | | | 1265, 1301, 1337, | 7001, 7031, | 7943, 7973, 8003 | 8672, 8702, 8732 |
| | | | | 1373, 1409, 1445, | 7064, 7094, | | |
| | | | | 1481, 1521, 1557, | 7124, 7154, | | |
| | | | | 1593, 1629, 1665, | 7184, 7214, | | |
| | | | | 1701, 1737, 1773, | 7244, 7274 | | |
| | | | | 1813, 1849, 1885, | | | |
| | | | | 1921, 1957, 1993, | | | |
| | | | | 2029, 2065, 6335, | | | |
| | | | | 6365, 6395, 6425, | | | |
| | | | | 6455, 6485, 6515, | | | |
| | | | | 6545 | | | |
| HsALB_Pf- | 22 | | 62, 98, | 354, 390, 426, 462, | 6579, 6609, | 7308, 7338, 7368, | 8037, 8067, 8097, |
| CSP(82- | | | 134, | 498, 534, 570, 606, | 6639, 6669, | 7398, 7428, 7458, | 8127, 8157, 8187, |
| 397) | | | 170, | 646, 682, 718, 754, | 6699, 6729, | 7488, 7518, 7551, | 8217, 8247, 8280, |
| | | | 206, | 790, 826, 862, 898, | 6759, 6789, | 7581, 7611, 7641, | 8310, 8340, 8370, |
| | | | 242, | 938, 974, 1010, | 6822, 6852, | 7671, 7701, 7731, | 8400, 8430, 8460, |
| | | | 278, | 1046, 1082, 1118, | 6882, 6912, | 7761, 7794, 7824, | 8490, 8523, 8553, |
| | | | 314 | 1154, 1190, 1230, | 6942, 6972, | 7854, 7884, 7914, | 8583, 8613, 8643, |
| | | | | 1266, 1302, 1338, | 7002, 7032, | 7944, 7974, 8004 | 8673, 8703, 8733 |
| | | | | 1374, 1410, 1446, | 7065, 7095, | | |
| | | | | 1482, 1522, 1558, | 7125, 7155, | | |
| | | | | 1594, 1630, 1666, | 7185, 7215, | | |
| | | | | 1702, 1738, 1774, | 7245, 7275 | | |
| | | | | 1814, 1850, 1886, | | | |
| | | | | 1922, 1958, 1994, | | | |
| | | | | 2030, 2066, 6336, | | | |
| | | | | 6366, 6396, 6426, | | | |
| | | | | 6456, 6486, 6516, | | | |
| | | | | 6546 | | | |
| HsALB_Pf- | 23 | | 63, 99, | 355, 391, 427, 463, | 6580, 6610, | 7309, 7339, 7369, | 8038, 8068, 8098, |
| CSP(93- | | | 135, | 499, 535, 571, 607, | 6640, 6670, | 7399, 7429, 7459, | 8128, 8158, 8188, |
| 192) | | | 171, | 647, 683, 719, 755, | 6700, 6730, | 7489, 7519, 7552, | 8218, 8248, 8281, |
| | | | 207, | 791, 827, 863, 899, | 6760, 6790, | 7582, 7612, 7642, | 8311, 8341, 8371, |
| | | | 243, | 939, 975, 1011, | 6823, 6853, | 7672, 7702, 7732, | 8401, 8431, 8461, |
| | | | 279, | 1047, 1083, 1119, | 6883, 6913, | 7762, 7795, 7825, | 8491, 8524, 8554, |
| | | | 315 | 1155, 1191, 1231, | 6943, 6973, | 7855, 7885, 7915, | 8584, 8614, 8644, |
| | | | | 1267, 1303, 1339, | 7003, 7033, | 7945, 7975, 8005 | 8674, 8704, 8734 |
| | | | | 1375, 1411, 1447, | 7066, 7096, | | |
| | | | | 1483, 1523, 1559, | 7126, 7156, | | |
| | | | | 1595, 1631, 1667, | 7186, 7216, | | |
| | | | | 1703, 1739, 1775, | 7246, 7276 | | |
| | | | | 1815, 1851, 1887, | | | |
| | | | | 1923, 1959, 1995, | | | |
| | | | | 2031, 2067, 6337, | | | |
| | | | | 6367, 6397, 6427, | | | |
| | | | | 6457, 6487, 6517, | | | |
| | | | | 6547 | | | |
| HsALB_Pf | 24 | | 64, | 356, 392, 428, 464, | 6581, 6611, | 7310, 7340, 7370, | 8039, 8069, 8099, |
| 4DSP(93- | | | 100, | 500, 536, 572, 608, | 6641, 6671, | 7400, 7430, 7460, | 8129, 8159, 8189, |
| 272) | | | 136, | 648, 684, 720, 756, | 6701, 6731, | 7490, 7520, 7553, | 8219, 8249, 8282, |
| | | | 172, | 792, 828, 864, 900, | 6761, 6791, | 7583, 7613, 7643, | 8312, 8342, 8372, |
| | | | 208, | 940, 976, 1012, | 6824, 6854, | 7673, 7703, 7733, | 8402, 8432, 8462, |
| | | | 244, | 1048, 1084, 1120, | 6884, 6914, | 7763, 7796, 7826, | 8492, 8525, 8555, |
| | | | 280, | 1156, 1192, 1232, | 6944, 6974, | 7856, 7886, 7916, | 8585, 8615, 8645, |
| | | | 316 | 1268, 1304, 1340, | 7004, 7034, | 7946, 7976, 8006 | 8675, 8705, 8735 |
| | | | | 1376, 1412, 1448, | 7067, 7097, | | |
| | | | | 1484, 1524, 1560, | 7127, 7157, | | |
| | | | | 1596, 1632, 1668, | 7187, 7217, | | |
| | | | | 1704, 1740, 1776, | 7247, 7277 | | |
| | | | | 1816, 1852, 1888, | | | |
| | | | | 1924, 1960, 1996, | | | |
| | | | | 2032, 2068, 6338, | | | |
| | | | | 6368, 6398, 6428, | | | |
| | | | | 6458, 6488, 6518, | | | |
| | | | | 6548 | | | |
| HsALB_Pf | 25 | | 65, | 357, 393, 429, 465, | 6582, 6612, | 7311, 7341, 7371, | 8040, 8070, 8100, |
| 4DSP(93- | | | 101, | 501, 537, 573, 609, | 6642, 6672, | 7401, 7431, 7461, | 8130, 8160, 8190, |
| 397) | | | 137, | 649, 685, 721, 757, | 6702, 6732, | 7491, 7521, 7554, | 8220, 8250, 8283, |
| | | | 173, | 793, 829, 865, 901, | 6762, 6792, | 7584, 7614, 7644, | 8313, 8343, 8373, |
| | | | 209, | 941, 977, 1013, | 6825, 6855, | 7674, 7704, 7734, | 8403, 8433, 8463, |
| | | | 245, | 1049, 1085, 1121, | 6885, 6915, | 7764, 7797, 7827, | 8493, 8526, 8556, |
| | | | 281, | 1157, 1193, 1233, | 6945, 6975, | 7857, 7887, 7917, | 8586, 8616, 8646, |
| | | | 317 | 1269, 1305, 1341, | 7005, 7035, | 7947, 7977, 8007 | 8676, 8706, 8736 |
| | | | | 1377, 1413, 1449, | 7068, 7098, | | |
| | | | | 1485, 1525, 1561, | 7128, 7158, | | |
| | | | | 1597, 1633, 1669, | 7188, 7218, | | |
| | | | | 1705, 1741, 1777, | 7248, 7278 | | |
| | | | | 1817, 1853, 1889, | | | |
| | | | | 1925, 1961, 1997, | | | |
| | | | | 2033, 2069, 6339, | | | |
| | | | | 6369, 6399, 6429, | | | |
| | | | | 6459, 6489, 6519, | | | |
| | | | | 6549 | | | |
| HsALB_Pf | 26 | | 66, | 358, 394, 430, 466, | 6583, 6613, | 7312, 7342, 7372, | 8041, 8071, 8101, |
| 4DSP(98- | | | 102, | 502, 538, 574, 610, | 6643, 6673, | 7402, 7432, 7462, | 8131, 8161, 8191, |
| 192) | | | 138, | 650, 686, 722, 758, | 6703, 6733, | 7492, 7522, 7555, | 8221, 8251, 8284, |
| | | | 174, | 794, 830, 866, 902, | 6763, 6793, | 7585, 7615, 7645, | 8314, 8344, 8374, |
| | | | 210, | 942, 978, 1014, | 6826, 6856, | 7675, 7705, 7735, | 8404, 8434, 8464, |
| | | | 246, | 1050, 1086, 1122, | 6886, 6916, | 7765, 7798, 7828, | 8494, 8527, 8557, |
| | | | 282, | 1158, 1194, 1234, | 6946, 6976, | 7858, 7888, 7918, | 8587, 8617, 8647, |
| | | | 318 | 1270, 1306, 1342, | 7006, 7036, | 7948, 7978, 8008 | 8677, 8707, 8737 |
| | | | | 1378, 1414, 1450, | 7069, 7099, | | |
| | | | | 1486, 1526, 1562, | 7129, 7159, | | |
| | | | | 1598, 1634, 1670, | 7189, 7219, | | |
| | | | | 1706, 1742, 1778, | 7249, 7279 | | |
| | | | | 1818, 1854, 1890, | | | |
| | | | | 1926, 1962, 1998, | | | |
| | | | | 2034, 2070, 6340, | | | |
| | | | | 6370, 6400, 6430, | | | |
| | | | | 6460, 6490, 6520, | | | |
| | | | | 6550 | | | |
| HsALB_Pf- | 27 | | 67, | 359, 395, 431, 467, | 6584, 6614, | 7313, 7343, 7373, | 8042, 8072, 8102, |
| CSP(98- | | | 103, | 503, 539, 575, 611, | 6644, 6674, | 7403, 7433, 7463, | 8132, 8162, 8192, |
| 272) | | | 139, | 651, 687, 723, 759, | 6704, 6734, | 7493, 7523, 7556, | 8222, 8252, 8285, |
| | | | 175, | 795, 831, 867, 903, | 6764, 6794, | 7586, 7616, 7646, | 8315, 8345, 8375, |
| | | | 211, | 943, 979, 1015, | 6827, 6857, | 7676, 7706, 7736, | 8405, 8435, 8465, |
| | | | 247, | 1051, 1087, 1123, | 6887, 6917, | 7766, 7799, 7829, | 8495, 8528, 8558, |
| | | | 283, | 1159, 1195, 1235, | 6947, 6977, | 7859, 7889, 7919, | 8588, 8618, 8648, |
| | | | 319 | 1271, 1307, 1343, | 7007, 7037, | 7949, 7979, 8009 | 8678, 8708, 8738 |
| | | | | 1379, 1415, 1451, | 7070, 7100, | | |
| | | | | 1487, 1527, 1563, | 7130, 7160, | | |
| | | | | 1599, 1635, 1671, | 7190, 7220, | | |
| | | | | 1707, 1743, 1779, | 7250, 7280 | | |
| | | | | 1819, 1855, 1891, | | | |
| | | | | 1927, 1963, 1999, | | | |
| | | | | 2035, 2071, 6341, | | | |
| | | | | 6371, 6401, 6431, | | | |
| | | | | 6461, 6491, 6521, | | | |
| | | | | 6551 | | | |
| HsALB_Pf- | 28 | | 68, | 360, 396, 432, 468, | 6585, 6615, | 7314, 7344, 7374, | 8043, 8073, 8103, |
| CSP(98- | | | 104, | 504, 540, 576, 612, | 6645, 6675, | 7404, 7434, 7464, | 8133, 8163, 8193, |
| 374) | | | 140, | 652, 688, 724, 760, | 6705, 6735, | 7494, 7524, 7557, | 8223, 8253, 8286, |
| | | | 176, | 796, 832, 868, 904, | 6765, 6795, | 7587, 7617, 7647, | 8316, 8346, 8376, |
| | | | 212, | 944, 980, 1016, | 6828, 6858, | 7677, 7707, 7737, | 8406, 8436, 8466, |
| | | | 248, | 1052, 1088, 1124, | 6888, 6918, | 7767, 7800, 7830, | 8496, 8529, 8559, |
| | | | 284, | 1160, 1196, 1236, | 6948, 6978, | 7860, 7890, 7920, | 8589, 8619, 8649, |
| | | | 320 | 1272, 1308, 1344, | 7008, 7038, | 7950, 7980, 8010 | 8679, 8709, 8739 |
| | | | | 1380, 1416, 1452, | 7071, 7101, | | |
| | | | | 1488, 1528, 1564, | 7131, 7161, | | |
| | | | | 1600, 1636, 1672, | 7191, 7221, | | |
| | | | | 1708, 1744, 1780, | 7251, 7281 | | |
| | | | | 1820, 1856, 1892, | | | |
| | | | | 1928, 1964, 2000, | | | |
| | | | | 2036, 2072, 6342, | | | |
| | | | | 6372, 6402, 6432, | | | |
| | | | | 6462, 6492, 6522, | | | |
| | | | | 6552 | | | |
| HsALB_Pf- | 29 | | 69, | 361, 397, 433, 469, | 6586, 6616, | 7315, 7345, 7375, | 8044, 8074, 8104, |
| CSP(98- | | | 105, | 505, 541, 577, 613, | 6646, 6676, | 7405, 7435, 7465, | 8134, 8164, 8194, |
| 397) | | | 141, | 653, 689, 725, 761, | 6706, 6736, | 7495, 7525, 7558, | 8224, 8254, 8287, |
| | | | 177, | 797, 833, 869, 905, | 6766, 6796, | 7588, 7618, 7648, | 8317, 8347, 8377, |
| | | | 213, | 945, 981, 1017, | 6829, 6859, | 7678, 7708, 7738, | 8407, 8437, 8467, |
| | | | 249, | 1053, 1089, 1125, | 6889, 6919, | 7768, 7801, 7831, | 8497, 8530, 8560, |
| | | | 285, | 1161, 1197, 1237, | 6949, 6979, | 7861, 7891, 7921, | 8590, 8620, 8650, |
| | | | 321 | 1273, 1309, 1345, | 7009, 7039, | 7951, 7981, 8011 | 8680, 8710, 8740 |
| | | | | 1381, 1417, 1453, | 7072, 7102, | | |
| | | | | 1489, 1529, 1565, | 7132, 7162, | | |
| | | | | 1601, 1637, 1673, | 7192, 7222, | | |
| | | | | 1709, 1745, 1781, | 7252, 7282 | | |
| | | | | 1821, 1857, 1893, | | | |
| | | | | 1929, 1965, 2001, | | | |
| | | | | 2037, 2073, 6343, | | | |
| | | | | 6373, 6403, 6433, | | | |
| | | | | 6463, 6493, 6523, | | | |
| | | | | 6553 | | | |
| HsALB_Pf- | 30_{T} | | 70, | 362, 398, 434, 470, | 6587, 6617, | 7316, 7346, 7376, | 8045, 8075, 8105, |
| CSP(199- | | | 106, | 506, 542, 578, 614, | 6647, 6677, | 7406, 7436, 7466, | 8135, 8165, 8195, |
| 377)_Link- | | | 8765, | 654, 690, 726, 762, | 6707, 6737, | 7496, 7526, 9479, | 8225, 8255, 9785, |
| er(PVTN) | | | 142, | 798, 834, 870, 906, | 6767, 6797, | 7559, 7589, 7619, | 8288, 8318, 8348, |
| HBsAg | | | 178, | 8867, 946, 982, | 9173, 6830, | 7649, 7679, 7709, | 8378, 8408, 8438, |
| | | | 214, | 1018, 1054, 1090, | 6860, 6890, | 7739, 7769, 9581, | 8468, 8498, 9887, |
| | | | 250, | 1126, 1162, 1198, | 6920, 6950, | 7802, 7832, 7862, | 8531, 8561, 8591, |
| | | | 286, | 1238, 1274, 1310, | 6980, 7010, | 7892, 7922, 7952, | 8621, 8651, 8681, |
| | | | 322 | 1346, 1382, 1418, | 7040, 9275, | 7982, 8012, 9683 | 8711, 8741, 9989 |
| | | | | 1454, 1490, 1530, | 7073, 7103, | | |
| | | | | 1566, 1602, 1638, | 7133, 7163, | | |
| | | | | 1674, 1710, 1746, | 7193, 7223, | | |
| | | | | 1782, 1822, 1858, | 7253, 7283, | | |
| | | | | 1894, 1930, 1966, | 9377 | | |
| | | | | 2002, 2038, 2074, | | | |
| | | | | 9071, 6344, 6374, | | | |
| | | | | 6404, 6434, 6464, | | | |
| | | | | 6494, 6524, 6554, | | | |
| | | | | 8969 | | | |
| LuntSynt_ | 8742 | | 8754, | 8856, 8874, 8886, | 9162, 9180, | 9468, 9486, 9498, | 9774, 9792, 9804, |
| Linker(GG | | | 8772, | 8898, 8910, 8922, | 9192, 9204, | 9510, 9522, 9534, | 9816, 9828, 9840, |
| S4- | | | 8784, | 8934, 8946, , 9060, | 9216, 9228, | 9546, 9558, 9570, | 9852, 9864, 9876, |
| GG(S)jPf- | | | 8796, | 9078, 9090, 9102, | 9240, 9252, | 9588, 9600, 9612, | 9894, 9906, 9918, |
| CSP(19- | | | 8808, | 9114, 9126, 9138, | 9264, 9282, | 9624, 9636, 9648, | 9930, 9942, 9954, |
| 397) | | | 8820, | 9150, 8958, 8976, | 9294, 9306, | 9660, 9672, 9690, | 9966, 9978, 9996, |
| | | | 8832, | 8988, 9000, 9012, | 9318, 9330, | 9702, 9714, 9726, | 10008, 10020, |
| | | | 8844 | 9024, 9036, 9048 | 9342, 9354, | 9738, 9750, 9762 | 10032, 10044, |
| | | | | | 9366, 9384, | | 10056, 10068 |
| | | | | | 9396, 9408, | | |
| | | | | | 9420, 9432, | | |
| | | | | | 9444, 9456 | | |
| HsALB_Pf- | 8743 | | 8756, | 8858, 8875, 8887, | 9164, 9181, | 9470, 9487, 9499, | 9776, 9793, 9805, |
| CSP(19- | | | 8773, | 8899, 8911, 8923, | 9193, 9205, | 9511, 9523, 9535, | 9817, 9829, 9841, |
| 272)_Link- | | | 8785, | 8935, 8947, , 9062, | 9217, 9229, | 9547, 9559, 9572, | 9853, 9865, 9878, |
| er(PVTN) | | | 8797, | 9079, 9091, 9103, | 9241, 9253, | 9589, 9601, 9613, | 9895, 9907, 9919, |
| HBsAg | | | 8809, | 9115, 9127, 9139, | 9266, 9283, | 9625, 9637, 9649, | 9931, 9943, 9955, |
| | | | 8821, | 9151, 8960, 8977, | 9295, 9307, | 9661, 9674, 9691, | 9967, 9980, 9997, |
| | | | 8833, | 8989, 9001, 9013, | 9319, 9331, | 9703, 9715, 9727, | 10009, 10021, |
| | | | 8845 | 9025, 9037, 9049 | 9343, 9355, | 9739, 9751, 9763 | 10033, 10045, |
| | | | | | 9368, 9385, | | 10057, 10069 |
| | | | | | 9397, 9409, | | |
| | | | | | 9421, 9433, | | |
| | | | | | 9445, 9457 | | |
| HsALB_Pf- | 8744 | | 8757, | 8859, 8876, 8888, | 9165, 9182, | 9471, 9488, 9500, | 9777, 9794, 9806, |
| CSP(19- | | | 8758, | 8900, 8912, 8924, | 9194, 9206, | 9512, 9524, 9536, | 9818, 9830, 9842, |
| 272)_Link- | | | 8774, | 8936, 8948, 8860, , | 9218, 9230, | 9548, 9560, 9472, | 9854, 9866, 9778, |
| er(AAY)_ | | | 8786, | 9063, 9080, 9092, | 9242, 9254, | 9573, 9590, 9602, | 9879, 9896, 9908, |
| Pf- | | | 8798, | 9104, 9116, 9128, | 9166, 9267, | 9614, 9626, 9638, | 9920, 9932, 9944, |
| CSP(346- | | | 8810, | 9140, 9152, 9064, | 9284, 9296, | 9650, 9662, 9574, | 9956, 9968, 9880, |
| 365)_Link- | | | 8822, | 8961, 8978, 8990, | 9308, 9320, | 9675, 9692, 9704, | 9981, 9998, 10010, |
| er(AAY)_ | | | 8834, | 9002, 9014, 9026, | 9332, 9344, | 9716, 9728, 9740, | 10022, 10034, |
| PADRE_ | | | 8846 | 9038, 9050, 8962 | 9356, 9268, | 9752, 9764, 9676 | 10046, 10058, |
| Linker(PVT | | | | | 9369, 9386, | | 10070, 9982 |
| N)_HBsA | | | | | 9398, 9410, | | |
| g | | | | | 9422, 9434, | | |
| | | | | | 9446, 9458, | | |
| | | | | | 9370 | | |
| HsALB_Pf- | 8745 | | 8759, | 8861, 8877, 8889, | 9167, 9183, | 9473, 9489, 9501, | 9779, 9795, 9807, |
| CSP(19- | | | 8760, | 8901, 8913, 8925, | 9195, 9207, | 9513, 9525, 9537, | 9819, 9831, 9843, |
| 384)_Link- | | | 8775, | 8937, 8949, 8862, , | 9219, 9231, | 9549, 9561, 9474, | 9855, 9867, 9780, |
| er(PVTN) | | | 8787, | 9065, 9081, 9093, | 9243, 9255, | 9575, 9591, 9603, | 9881, 9897, 9909, |
| HBsAg | | | 8799, | 9105, 9117, 9129, | 9168, 9269, | 9615, 9627, 9639, | 9921, 9933, 9945, |
| | | | 8811, | 9141, 9153, 9066, | 9285, 9297, | 9651, 9663, 9576, | 9957, 9969, 9882, |
| | | | 8823, | 8963, 8979, 8991, | 9309, 9321, | 9677, 9693, 9705, | 9983, 9999, 10011, |
| | | | 8835, | 9003, 9015, 9027, | 9333, 9345, | 9717, 9729, 9741, | 10023, 10035, |
| | | | 8847 | 9039, 9051, 8964 | 9357, 9270, | 9753, 9765, 9678 | 10047, 10059, |
| | | | | | 9371, 9387, | | 10071, 9984 |
| | | | | | 9399, 9411, | | |
| | | | | | 9423, 9435, | | |
| | | | | | 9447, 9459, | | |
| | | | | | 9372 | | |
| HsALB_Pf- | 8746 | | 8761, | 8863, 8878, 8890, | 9169, 9184, | 9475, 9490, 9502, | 9781, 9796, 9808, |
| CSP(19- | | | 8762, | 8902, 8914, 8926, | 9196, 9208, | 9514, 9526, 9538, | 9820, 9832, 9844, |
| 384)_Link- | | | 8776, | 8938, 8950, 8864, , | 9220, 9232, | 9550, 9562, 9476, | 9856, 9868, 9782, |
| er(SD3)_ | | | 8788, | 9067, 9082, 9094, | 9244, 9256, | 9577, 9592, 9604, | 9883, 9898, 9910, |
| Ferritin | | | 8800, | 9106, 9118, 9130, | 9170, 9271, | 9616, 9628, 9640, | 9922, 9934, 9946, |
| | | | 8812, | 9142, 9154, 9068, | 9286, 9298, | 9652, 9664, 9578, | 9958, 9970, 9884, |
| | | | 8824, | 8965, 8980, 8992, | 9310, 9322, | 9679, 9694, 9706, | 9985, 10000, |
| | | | 8836, | 9004, 9016, 9028, | 9334, 9346, | 9718, 9730, 9742, | 10012, 10024, |
| | | | 8848 | 9040, 9052, 8966 | 9358, 9272, | 9754, 9766, 9680 | 10036, 10048, |
| | | | | | 9373, 9388, | | 10060, 10072, |
| | | | | | 9400, 9412, | | 9986 |
| | | | | | 9424, 9436, | | |
| | | | | | 9448, 9460, | | |
| | | | | | 9374 | | |
| HsALB_Pf- | 8747 | | 8763, | 8865, 8879, 8891, | 9171, 9185, | 9477, 9491, 9503, | 9783, 9797, 9809, |
| CSP(93- | | | 8764, | 8903, 8915, 8927, | 9197, 9209, | 9515, 9527, 9539, | 9821, 9833, 9845, |
| 384)_Link- | | | 8777, | 8939, 8951, 8866, , | 9221, 9233, | 9551, 9563, 9478, | 9857, 9869, 9784, |
| er(PVTN) | | | 8789, | 9069, 9083, 9095, | 9245, 9257, | 9579, 9593, 9605, | 9885, 9899, 9911, |
| HBsAg | | | 8801, | 9107, 9119, 9131, | 9172, 9273, | 9617, 9629, 9641, | 9923, 9935, 9947, |
| | | | 8813, | 9143, 9155, 9070, | 9287, 9299, | 9653, 9665, 9580, | 9959, 9971, 9886, |
| | | | 8825, | 8967, 8981, 8993, | 9311, 9323, | 9681, 9695, 9707, | 9987, 10001, |
| | | | 8837, | 9005, 9017, 9029, | 9335, 9347, | 9719, 9731, 9743, | 10013, 10025, |
| | | | 8849 | 9041, 9053, 8968 | 9359, 9274, | 9755, 9767, 9682 | 10037, 10049, |
| | | | | | 9375, 9389, | | 10061, 10073, |
| | | | | | 9401, 9413, | | 9988 |
| | | | | | 9425, 9437, | | |
| | | | | | 9449, 9461, | | |
| | | | | | 9376 | | |
| HsALB_Pf- | 8749 | | 8767, | 8869, 8881, 8893, | 9175, 9187, | 9481, 9493, 9505, | 9787, 9799, 9811, |
| CSP(19- | | | 8779, | 8905, 8917, 8929, | 9199, 9211, | 9517, 9529, 9541, | 9823, 9835, 9847, |
| 272)_Link- | | | 8791, | 8941, 8953, , 9073, | 9223, 9235, | 9553, 9565, 9583, | 9859, 9871, 9889, |
| er(AAY)_ | | | 8803, | 9085, 9097, 9109, | 9247, 9259, | 9595, 9607, 9619, | 9901, 9913, 9925, |
| Pf- | | | 8815, | 9121, 9133, 9145, | 9277, 9289, | 9631, 9643, 9655, | 9937, 9949, 9961, |
| CSP(346- | | | 8827, | 9157, 8971, 8983, | 9301, 9313, | 9667, 9685, 9697, | 9973, 9991, 10003, |
| 375)_Link- | | | 8839, | 8995, 9007, 9019, | 9325, 9337, | 9709, 9721, 9733, | 10015, 10027, |
| er(AAY)_ | | | 8851 | 9031, 9043, 9055 | 9349, 9361, | 9745, 9757, 9769 | 10039, 10051, |
| Pf- | | | | | 9379, 9391, | | 10063, 10075 |
| CSP(310- | | | | | 9403, 9415, | | |
| 327) | | | | | 9427, 9439, | | |
| | | | | | 9451, 9463 | | |
| HsALB_Pf- | 8750 | | 8768, | 8870, 8882, 8894, | 9176, 9188, | 9482, 9494, 9506, | 9788, 9800, 9812, |
| CSP(19- | | | 8780, | 8906, 8918, 8930, | 9200, 9212, | 9518, 9530, 9542, | 9824, 9836, 9848, |
| 272)_Link- | | | 8792, | 8942, 8954, , 9074, | 9224, 9236, | 9554, 9566, 9584, | 9860, 9872, 9890, |
| er(AAY)_ | | | 8804, | 9086, 9098, 9110, | 9248, 9260, | 9596, 9608, 9620, | 9902, 9914, 9926, |
| Pf- | | | 8816, | 9122, 9134, 9146, | 9278, 9290, | 9632, 9644, 9656, | 9938, 9950, 9962, |
| CSP(346- | | | 8828, | 9158, 8972, 8984, | 9302, 9314, | 9668, 9686, 9698, | 9974, 9992, 10004, |
| 375)_Link- | | | 8840, | 8996, 9008, 9020, | 9326, 9338, | 9710, 9722, 9734, | 10016, 10028, |
| er(AAY)_ | | | 8852 | 9032, 9044, 9056 | 9350, 9362, | 9746, 9758, 9770 | 10040, 10052, |
| Pf- | | | | | 9380, 9392, | | 10064, 10076 |
| CSP(310- | | | | | 9404, 9416, | | |
| 327)_Link- | | | | | 9428, 9440, | | |
| er(AAY)_ | | | | | 9452, 9464 | | |
| PADRE | | | | | | | |
| HsALB Pf- | 8751 | | 8769, | 8871, 8883, 8895, | 9177, 9189, | 9483, 9495, 9507, | 9789, 9801, 9813, |
| CSP(19- | | | 8781, | 8907, 8919, 8931, | 9201, 9213, | 9519, 9531, 9543, | 9825, 9837, 9849, |
| 272)_Link- | | | 8793, | 8943, 8955, , 9075, | 9225, 9237, | 9555, 9567, 9585, | 9861, 9873, 9891, |
| er(AAY)_ | | | 8805, | 9087, 9099, 9111, | 9249, 9261, | 9597, 9609, 9621, | 9903, 9915, 9927, |
| Pf- | | | 8817, | 9123, 9135, 9147, | 9279, 9291, | 9633, 9645, 9657, | 9939, 9951, 9963, |
| CSP(310- | | | 8829, | 9159, 8973, 8985, | 9303, 9315, | 9669, 9687, 9699, | 9975, 9993, 10005, |
| 327)_Link- | | | 8841, | 8997, 9009, 9021, | 9327, 9339, | 9711, 9723, 9735, | 10017, 10029, |
| er(AAY)_ | | | 8853 | 9033, 9045, 9057 | 9351, 9363, | 9747, 9759, 9771 | 10041, 10053, |
| Pf- | | | | | 9381, 9393, | | 10065, 10077 |
| CSP(346- | | | | | 9405, 9417, | | |
| 375)_Link- | | | | | 9429, 9441, | | |
| er(AAY)_ | | | | | 9453, 9465 | | |
| PADRE | | | | | | | |
| HsALBPf- | 8752 | | 8770, | 8872, 8884, 8896, | 9178, 9190, | 9484. 9496, 9508, | 9790, 9802, 9814, |
| CSP(19- | | | 8782, | 8908, 8920, 8932, | 9202, 9214, | 9520, 9532, 9544, | 9826, 9838, 9850, |
| 272)_Link- | | | 8794, | 8944, 8956, , 9076, | 9226, 9238, | 9556, 9568, 9586, | 9862, 9874, 9892, |
| er(AAY)_ | | | 8806, | 9088, 9100, 9112, | 9250, 9262, | 9598, 9610, 9622, | 9904, 9916, 9928, |
| Pf- | | | 8818, | 9124, 9136, 9148, | 9280, 9292, | 9634, 9646, 9658, | 9940, 9952, 9964, |
| CSP(310- | | | 8830, | 9160, 8974, 8986, | 9304, 9316, | 9670, 9688, 9700, | 9976, 9994, 10006, |
| 327)_Link- | | | 8842, | 8998, 9010, 9022, | 9328, 9340, | 9712, 9724, 9736, | 10018, 10030, |
| er(AAY)_ | | | 8854 | 9034, 9046, 9058 | 9352, 9364, | 9748, 9760, 9772 | 10042, 10054, |
| Pf- | | | | | 9382, 9394, | | 10066, 10078 |
| CSP(346- | | | | | 9406, 9418, | | |
| 375)_Link- | | | | | 9430, 9442, | | |
| er(AAY)_ | | | | | 9454, 9466 | | |
| PADRE_ | | | | | | | |
| Linker(AA | | | | | | | |
| Y)_P2 | | | | | | | |
| HsALB_Pf- | 8753 | | 8771, | 8873, 8885, 8897, | 9179, 9191, | 9485, 9497, 9509, | 9791, 9803, 9815, |
| CSP(19* | | | 8783, | 8909, 8921, 8933, | 9203, 9215, | 9521, 9533, 9545, | 9827, 9839, 9851, |
| 272)_Link- | | | 8795, | 8945, 8957, , 9077, | 9227, 9239, | 9557, 9569, 9587, | 9863, 9875, 9893, |
| er(AAY)_ | | | 8807, | 9089, 9101, 9113, | 9251, 9263, | 9599, 9611, 9623, | 9905, 9917, 9929, |
| Pf- | | | 8819, | 9125, 9137, 9149, | 9281, 9293, | 9635, 9647, 9659, | 9941, 9953, 9965, |
| CSP(310- | | | 8831, | 9161, 8975, 8987, | 9305, 9317, | 9671, 9689, 9701, | 9977, 9995, 10007, |
| 327)_Link- | | | 8843, | 8999, 9011, 9023, | 9329, 9341, | 9713, 9725, 9737, | 10019, 10031, |
| er | | | 8855 | 9035, 9047, 9059 | 9353, 9365, | 9749, 9761, 9773 | 10043, 10055, |
| (AAY)_Pf- | | | | | 9383, 9395, | | 10067, 10079 |
| CSP(346- | | | | | 9407, 9419, | | |
| 397) | | | | | 9431, 9443, | | |
| | | | | | 9455, 9467 | | |
| Pb-CSP | 31 | 40 | 71, | 332, 363, 399, 435, | — | — | — |
| | | | 107, | 471, 507, 543, 579, | | | |
| | | | 143, | 615, 624, 655, 691, | | | |
| | | | 179, | 727, 763, 799, 835, | | | |
| | | | 215, | 871, 907, 916, 947, | | | |
| | | | 251, | 983, 1019, 1055, | | | |
| | | | 287, | 1091, 1127, 1163, | | | |
| | | | 323 | 1199, 1208, 1239, | | | |
| | | | | 1275, 1311, 1347, | | | |
| | | | | 1383, 1419, 1455, | | | |
| | | | | 1491, 1500, 1531, | | | |
| | | | | 1567, 1603, 1639, | | | |
| | | | | 1675, 1711, 1747, | | | |
| | | | | 1783, 1792, 1823, | | | |
| | | | | 1859, 1895, 1931, | | | |
| | | | | 1967, 2003, 2039, | | | |
| | | | | 2075 | | | |
| Pb- | 32 | | 72, | 364, 400, 436, 472, | — | — | — |
| CSP_Link- | | | 108, | 508, 544, 580, 616, | | | |
| er(G4S | | | 144, | 656, 692, 728, 764, | | | |
| G4)_TIm | | | 180, | 800, 836, 872, 908, | | | |
| domain | | | 216, | 948, 984, 1020, | | | |
| HA | | | 252, | 1056, 1092, 1128, | | | |
| | | | 288, | 1164, 1200, 1240, | | | |
| | | | 324 | 1276, 1312, 1348, | | | |
| | | | | 1384, 1420, 1456, | | | |
| | | | | 1492, 1532, 1568, | | | |
| | | | | 1604, 1640, 1676, | | | |
| | | | | 1712, 1748, 1784, | | | |
| | | | | 1824, 1860, 1896, | | | |
| | | | | 1932, 1968, 2004, | | | |
| | | | | 2040, 2076 | | | |
| HsALB_Pb- | 33 | | 73, | 365, 401, 437, 473, | — | — | — |
| CSP(24- | | | 109, | 509, 545, 581, 617, | | | |
| 340) | | | 145, | 657, 693, 729, 765, | | | |
| | | | 181, | 801, 837, 873, 909, | | | |
| | | | 217, | 949, 985, 1021, | | | |
| | | | 253, | 1057, 1093, 1129, | | | |
| | | | 289, | 1165, 1201, 1241, | | | |
| | | | 325 | 1277, 1313, 1349, | | | |
| | | | | 1385, 1421, 1457, | | | |
| | | | | 1493, 1533, 1569, | | | |
| | | | | 1605, 1641, 1677, | | | |
| | | | | 1713, 1749, 1785, | | | |
| | | | | 1825, 1861, 1897, | | | |
| | | | | 1933, 1969, 2005, | | | |
| | | | | 2041, 2077 | | | - |
| Hshis- | 34 | | 74, | 366, 402, 438, 474, | - | - | |
| isol_Pb- | | | 110, | 510, 546, 582, 618, | | | |
| CSP(24- | | | 146, | 658, 694, 730, 766, | | | |
| 340) | | | 182, | 802, 838, 874, 910, | | | |
| | | | 218, | 950, 986, 1022, | | | |
| | | | 254, | 1058, 1094, 1130, | | | |
| | | | 290, | 1166, 1202, 1242, | | | |
| | | | 326 | 1278, 1314, 1350, | | | |
| | | | | 1386, 1422, 1458, | | | |
| | | | | 1494, 1534, 1570, | | | |
| | | | | 1606, 1642, 1678, | | | |
| | | | | 1714, 1750, 1786, | | | |
| | | | | 1826, 1862, 1898, | | | |
| | | | | 1934, 1970, 2006, | | | |
| | | | | 2042, 2078 | | | |
| HsSPARC | 35 | | 75, | 367, 403, 439, 475, | — | — | — |
| Pb- | | | 111, | 511, 547, 583, 619, | | | |
| CSP(24- | | | 147, | 659, 695, 731, 767, | | | |
| 340) | | | 183, | 803, 839, 875, 911, | | | |
| | | | 219, | 951, 987, 1023, | | | |
| | | | 255, | 1059, 1095, 1131, | | | |
| | | | 291, | 1167, 1203, 1243, | | | |
| | | | 327 | 1279, 1315, 1351, | | | |
| | | | | 1387, 1423, 1459, | | | |
| | | | | 1495, 1535, 1571, | | | |
| | | | | 1607, 1643, 1679, | | | |
| | | | | 1715, 1751, 1787, | | | |
| | | | | 1827, 1863, 1899, | | | |
| | | | | 1935, 1971, 2007, | | | |
| | | | | 2043, 2079 | | | |
| IgE_Pb- | 36 | | 76, | 368, 404, 440, 476, | — | — | — |
| CSP(24- | | | 112, | 512, 548, 584, 620, | | | |
| 340) | | | 148, | 660, 696, 732, 768, | | | |
| | | | 184, | 804, 840, 876, 912, | | | |
| | | | 220, | 952, 988, 1024, | | | |
| | | | 256, | 1060, 1096, 1132, | | | |
| | | | 292, | 1168, 1204, 1244, | | | |
| | | | 328 | 1280, 1316, 1352, | | | |
| | | | | 1388, 1424, 1460, | | | |
| | | | | 1496, 1536, 1572, | | | |
| | | | | 1608, 1644, 1680, | | | |
| | | | | 1716, 1752, 1788, | | | |
| | | | | 1828, 1864, 1900, | | | |
| | | | | 1936, 1972, 2008, | | | |
| | | | | 2044, 2080 | | | |

[0399] In preferred embodiments, the coding RNA comprises or consists of an RNA sequence which is identical or at least 70%, 80%, 85%, 86%, 87%, 88%, 89%, 90%, 91%, 92%, 93%, 94%, 95%, 96%, 97%, 98%, or 99% identical to a nucleic acid sequence selected from the group consisting of SEQ ID NOs: 329-2080, 6312-8741, 8856-10079, or a fragment or variant of any of these sequences. Further information is provided under <223> identifier of the respective SEQ ID NO in the sequence listing.

[0400] In particularly preferred embodiments, the coding RNA comprises or consists of an RNA sequence which is identical or at least 70%, 80%, 85%, 86%, 87%, 88%, 89%, 90%, 91%, 92%, 93%, 94%, 95%, 96%, 97%, 98%, or 99% identical to a nucleic acid sequence selected from the group consisting of SEQ ID NOs: 329-2080, 6312-8741, 8856-10079, or a fragment or variant of any of these sequences. Further information is provided under <223> identifier of the respective SEQ ID NO in the sequence listing.

[0401] In preferred embodiments, the coding RNA comprises or consists of an RNA sequence which is identical or at least 70%, 80%, 85%, 86%, 87%, 88%, 89%, 90%, 91%, 92%, 93%, 94%, 95%, 96%, 97%, 98%, or 99% identical to a nucleic acid sequence selected from the group consisting of SEQ ID NOs: 329, 333, 369, 405, 441, 477, 513, 549, 585, 332, 363, 399, 435, 471, 507, 543, 579, 615, 621, 625, 661, 697, 733, 769, 805, 841, 877, 624, 655, 691, 727, 763, 799, 835, 871, 907, 913, 917, 953, 989, 1025, 1061, 1097, 1133, 1169, 916, 947, 983, 1019, 1055, 1091, 1127, 1163, 1199, 1205, 1209, 1245, 1281, 1317, 1353, 1389, 1425, 1461, 1208, 1239, 1275, 1311, 1347, 1383, 1419, 1455, 1491, 1497, 1501, 1537, 1573, 1609, 1645, 1681, 1717, 1753, 1500, 1531, 1567, 1603, 1639, 1675, 1711, 1747, 1783, 1789, 1793, 1829, 1865, 1901, 1937, 1973, 2009, 2045, 1792, 1823, 1859, 1895, 1931, 1967, 2003, 2039, 2075, 6312, 6315, 6345, 6375, 6405, 6435, 6465, 6495, 6525, 6555, 6558, 6588, 6618, 6648, 6678, 6708, 6738, 6768, 6798, 6801, 6831, 6861, 6891, 6921, 6951, 6981, 7011, 7041, 7044, 7074, 7104, 7134, 7164, 7194, 7224, 7254, 7284, 7287, 7317, 7347, 7377, 7407, 7437, 7467, 7497, 7527, 7530, 7560, 7590, 7620, 7650, 7680, 7710, 7740, 7770, 7773, 7803, 7833, 7863, 7893, 7923, 7953, 7983, 8013, 8016, 8046, 8076, 8106, 8136, 8166, 8196, 8226, 8256, 8259, 8289, 8319, 8349, 8379, 8409, 8439, 8469, 8499, 8502, 8532, 8562, 8592, 8622, 8652, 8682, 8712, or a fragment or variant of any of these sequences. Further information is provided under <223> identifier of the respective SEQ ID NO in the sequence listing.

[0402] In preferred embodiments, the coding RNA comprises or consists of an RNA sequence which is identical or at least 70%, 80%, 85%, 86%, 87%, 88%, 89%, 90%, 91%, 92%, 93%, 94%, 95%, 96%, 97%, 98%, or 99% identical to a nucleic acid sequence selected from the group consisting of SEQ ID NOs: 336, 372, 408, 444, 480, 516, 552, 588, 628, 664, 700, 736, 772, 808, 844, 880, 8857, 6561, 6591, 6621, 6651, 6681, 6711, 6741, 6771, 9163, 7290, 7320, 7350, 7380, 7410, 7440, 7470, 7500, 9469, 8019, 8049, 8079, 8109, 8139, 8169, 8199, 8229, 9775, 920, 956, 992, 1028, 1064, 1100, 1136, 1172, 1212, 1248, 1284, 1320, 1356, 1392, 1428, 1464, 1504, 1540, 1576, 1612, 1648, 1684, 1720, 1756, 1796, 1832, 1868, 1904, 1940, 1976, 2012, 2048, 9061, 7047, 7077, 7107, 7137, 7167, 7197, 7227, 7257, 9367, 7776, 7806, 7836, 7866, 7896, 7926, 7956, 7986, 9673, 8505, 8535, 8565, 8595, 8625, 8655, 8685, 8715, 9979, 6318, 6348, 6378, 6408, 6438, 6468, 6498, 6528, 8959, 6804, 6834, 6864, 6894, 6924, 6954, 6984, 7014, 9265, 7533, 7563, 7593, 7623, 7653, 7683, 7713, 7743, 9571, 8262, 8292, 8322, 8352, 8382, 8412, 8442, 8472, 9877 (encoding HsALB_Pf-CSP(19-397)), or a fragment or variant of any of these sequences. Further information is provided under <223> identifier of the respective SEQ ID NO in the sequence listing.

[0403] As outlined throughout the specification, additional information regarding suitable amino acid sequences or nucleic acid sequences (coding sequences, mRNA sequences) may also be derived from the sequence listing, in particular from the details provided therein under identifier <223> as explained in the following.

[0404] It has to be noted that throughout the sequence listing, information provided under numeric identifier <223> follows the same structure: “<SEQUENCE_DESCRIPTOR> from <CONSTRUCT_IDENTIFIER>”. The <SEQUENCE_DESCRIPTOR> relates to the type of sequence (e.g., “derived and/or modified protein sequence”, “derived and/or modified CDS” “mRNA product design a-1 comprising derived and/or modified sequence”, or “mRNA product Design i-2 comprising derived and/or modified sequence”, or “mRNA product Design i-3 comprising derived and/or modified sequence”, etc.) and whether the sequence comprises or consists of a wild type sequence (“wt”) or whether the sequence comprises or consists of a sequence-optimized sequence (e.g. “opt1”, “opt2”, “opt3”, “opt4”, “opt5”, “opt6”, “opt11”; sequence optimizations are described in further detail below). The <CONSTRUCT_IDENTIFIER> provided under numeric identifier <223> has the following structures: (“organism construct name”, or “organism accession number construct name”) and is intended to help the person skilled in the art to explicitly derive suitable nucleic acid sequences (e.g., RNA, mRNA) encoding the same CSP protein according to the invention.

### RNA Manufacturing Methods:

[0405] The coding RNA, preferably the mRNA of the invention may be prepared using any method known in the art, including chemical synthesis such as e.g. solid phase RNA synthesis, as well as in vitro methods, such as RNA in vitro transcription reactions.

[0406] In a preferred embodiment, the coding RNA, preferably the mRNA is obtained by RNA in vitro transcription.

[0407] Accordingly, the coding RNA of the invention is preferably an in vitro transcribed RNA.

[0408] The terms “RNA in vitro transcription” or “in vitro transcription” relate to a process wherein RNA is synthesized in a cell-free system (in vitro). RNA may be obtained by DNA-dependent in vitro transcription of an appropriate DNA template, which according to the present invention is a linearized plasmid DNA template or a PCR-amplified DNA template. The promoter for controlling RNA in vitro transcription can be any promoter for any DNA-dependent RNA polymerase. Particular examples of DNA-dependent RNA polymerases are the T7, T3, SP6, or Syn5 RNA polymerases. In a preferred embodiment of the present invention the DNA template is linearized with a suitable restriction enzyme, before it is subjected to RNA in vitro transcription.

[0409] Reagents used in RNA in vitro transcription typically include: a DNA template (linearized plasmid DNA or PCR product) with a promoter sequence that has a high binding affinity for its respective RNA polymerase such as bacteriophage-encoded RNA polymerases (T7, T3, SP6, or Syn5); ribonucleotide triphosphates (NTPs) for the four bases (adenine, cytosine, guanine and uracil); optionally, a cap analogue as defined herein (e.g. m7G(5′)ppp(5′)G (m7G)); optionally, further modified nucleotides as defined herein; a DNA-dependent RNA polymerase capable of binding to the promoter sequence within the DNA template (e.g. T7, T3, SP6, or Syn5 RNA polymerase); optionally, a ribonuclease (RNase) inhibitor to inactivate any potentially contaminating RNase; optionally, a pyrophosphatase to degrade pyrophosphate, which may inhibit RNA in vitro transcription; MgCl2, which supplies Mg2+ ions as a co-factor for the polymerase; a buffer (TRIS or HEPES) to maintain a suitable pH value, which can also contain antioxidants (e.g. DTT), and/or polyamines such as spermidine at optimal concentrations, e.g. a buffer system comprising TRIS-Citrate as disclosed in WO2017/109161.

[0410] In preferred embodiments, the cap1 structure of the coding RNA of the invention is formed using co-transcriptional capping using tri-nucleotide cap analogues m7G(5′)ppp(5′)(2′OMeA)pG or m7G(5′)ppp(5′)(2′OMeG)pG. A preferred cap1 analogue that may suitably be used in manufacturing the coding RNA of the invention is m7G(5′)ppp(5′)(2′OMeA)pG.

[0411] In embodiments, the nucleotide mixture used in RNA in vitro transcription may additionally contain modified nucleotides as defined herein. In that context, preferred modified nucleotides comprise pseudouridine (ψ), Ni-methylpseudouridine (m1ψ), 5-methylcytosine, and 5-methoxyuridine. In particular embodiments, uracil nucleotides in the nucleotide mixture are replaced (either partially or completely) by pseudouridine (ψ) and/or N1-methylpseudouridine (m1ψ) to obtain a modified coding RNA.

[0412] In preferred embodiments, the nucleotide mixture (i.e. the fraction of each nucleotide in the mixture) used for RNA in vitro transcription reactions may be optimized for the given RNA sequence, preferably as described WO2015/188933.

[0413] In embodiment where more than one different coding RNA as defined herein has to be produced, e.g. where 2, 3, 4, 5, 6, 7, 8, 9, 10 or even more different coding RNAs have to be produced (e.g. encoding different CSP antigens, or e.g. a combination of different antigens; see second aspect), procedures as described in WO2017/109134 may be suitably used.

[0414] In the context of RNA vaccine production, it may be required to provide GMP-grade RNA. GMP-grade RNA may be produced using a manufacturing process approved by regulatory authorities. Accordingly, in a particularly preferred embodiment, RNA production is performed under current good manufacturing practice (GMP), implementing various quality control steps on DNA and RNA level, preferably according to WO2016/180430. In preferred embodiments, the RNA of the invention is a GMP-grade RNA, particularly a GMP-grade mRNA. Accordingly, a coding RNA for a vaccine is a GMP grade RNA.

[0415] The obtained RNA products are preferably purified using PureMessenger® (CureVac, Tubingen, Germany; RP-HPLC according to WO2008/077592) and/or tangential flow filtration (as described in WO2016/193206).

[0416] In a further preferred embodiment, the coding RNA, particularly the purified coding RNA, is lyophilized according to WO2016/165831 or WO2011/069586 to yield a temperature stable dried coding RNA (powder) as defined herein. The RNA of the invention, particularly the purified RNA may also be dried using spray-drying or spray-freeze drying according to WO2016/184575 or WO2016/184576 to yield a temperature stable RNA (powder) as defined herein. Accordingly, in the context of manufacturing and purifying RNA, the disclosures of WO2017/109161, WO2015/188933, WO2016/180430, WO2008/077592, WO2016/193206, WO2016/165831, WO2011/069586, WO2016/184575, and WO2016/184576 are incorporated herewith by reference.

[0417] Accordingly, in preferred embodiments, the coding RNA is a dried RNA, particularly a dried mRNA.

[0418] The term “dried RNA” as used herein has to be understood as RNA that has been lyophilized, or spray-dried, or spray-freeze dried as defined above to obtain a temperature stable dried RNA (powder).

[0419] In preferred embodiments, the coding RNA of the invention is a purified RNA, particularly purified mRNA.

[0420] The term “purified RNA” or “purified mRNA” as used herein has to be understood as RNA which has a higher purity after certain purification steps (e.g. HPLC, TFF, Oligo d(T) purification, precipitation steps) than the starting material (e.g. in vitro transcribed RNA). Typical impurities that are essentially not present in purified RNA comprise peptides or proteins (e.g. enzymes derived from DNA dependent RNA in vitro transcription, e.g. RNA polymerases, RNases, pyrophosphatase, restriction endonuclease, DNase), spermidine, BSA, abortive RNA sequences, RNA fragments (short double stranded RNA fragments, abortive sequences etc.), free nucleotides (modified nucleotides, conventional NTPs, cap analogue), template DNA fragments, buffer components (HEPES, TRIS, MgCl2) etc. Other potential impurities that may be derived from e.g. fermentation procedures comprise bacterial impurities (bioburden, bacterial DNA) or impurities derived from purification procedures (organic solvents etc.). Accordingly, it is desirable in this regard for the “degree of RNA purity” to be as close as possible to 100%. It is also desirable for the degree of RNA purity that the amount of full-length RNA transcripts is as close as possible to 100%. Accordingly “purified RNA” as used herein has a degree of purity of more than 75%, 80%, 85%, very particularly 90%, 91%, 92%, 93%, 94%, 95%, 96%, 97%, 98% and most favorably 99% or more. The degree of purity may for example be determined by an analytical HPLC, wherein the percentages provided above correspond to the ratio between the area of the peak for the target RNA and the total area of all peaks representing the by-products. Alternatively, the degree of purity may for example be determined by an analytical agarose gel electrophoresis or capillary gel electrophoresis.

[0421] It has to be understood that “dried RNA” as defined herein and “purified RNA” as defined herein or “GMP-grade mRNA” as defined herein may have superior stability characteristics (in vitro, in vivo) and improved efficiency (e.g. better translatability of the mRNA in vivo) and are therefore particularly suitable for a medical purpose, e.g. a vaccine. Moreover, “dried RNA” as defined herein and “purified RNA” as defined herein or “GMP-grade mRNA” may be particularly suitable for medical use as defined herein.

[0422] Accordingly, in preferred embodiments, the coding RNA for a vaccine of the first aspect may be a GMP-grade coding RNA, a purified coding RNA, and/or a dried coding RNA.

[0423] Following co-transcriptional capping as defined herein, and following purification as defined herein, the capping degree of the obtained coding RNA may be determined using capping assays as described in published PCT application WO2015/101416, in particular, as described in claims 27 to 46 of published PCT application WO2015/101416 can be used. Alternatively, a capping assays described in PCT/EP2018/08667 may be used.

### Composition, Pharmaceutical Composition:

[0424] A second aspect relates to a composition comprising at least one coding RNA of the first aspect.

[0425] Notably, embodiments relating to the composition of the second aspect may likewise be read on and be understood as suitable embodiments of the vaccine of the third aspect. Also, embodiments relating to the vaccine of the third aspect may likewise be read on and be understood as suitable embodiments of the composition of the second aspect (comprising the RNA of the first aspect).

[0426] In preferred embodiments of the second aspect, said composition comprises at least one RNA encoding CSP of a Malaria parasite according to the first aspect, or an immunogenic fragment or immunogenic variant thereof, wherein said composition is to be, preferably, administered intramuscularly or intradermal.

[0427] Preferably, intramuscular or intradermal administration of said composition results in expression of the encoded CSP antigen in a subject. Preferably, the composition of the second aspect is suitable for a vaccine, in particular, suitable for a Malaria vaccine.

[0428] The composition may comprise a safe and effective amount of the RNA as specified herein. As used herein, “safe and effective amount” means an amount of the RNA that is sufficient to results in expression and/or activity of the encoded CSP antigenic protein. At the same time, a “safe and effective amount” is small enough to avoid serious side-effects.

[0429] A “safe and effective amount” of the RNA of the composition as defined above will furthermore vary in connection with the particular condition to be treated and also with the age and physical condition of the patient to be treated, the severity of the condition, the duration of the treatment, the nature of the accompanying therapy, of the particular pharmaceutically acceptable carrier used, and similar factors, within the knowledge and experience of the accompanying medical doctor. Moreover, the “safe and effective amount” of the RNA or the composition as described herein may depend from application route (e.g. intramuscular, intradermal), application device (needle injection, injection device), and/or complexation/formulation (e.g. RNA in association with a polymeric carrier or LNP). Moreover, the “safe and effective amount” of the RNA or the composition may depend from the condition of the treated subject (infant, immunocompromised human subject etc.). Accordingly, the suitable “safe and effective amount” has to be adapted and will be chosen and defined by the skilled person.

[0430] In the context of the invention, a “composition” refers to any type of composition in which the specified ingredients (e.g. RNA encoding CSP e.g. in association with a polymeric carrier or LNP), may be incorporated, optionally along with any further constituents, usually with at least one pharmaceutically acceptable carrier or excipient. The composition may be a dry composition such as a powder or granules, or a solid unit such as a lyophilized form. Alternatively, the composition may be in liquid form, and each constituent may be independently incorporated in dissolved or dispersed (e.g. suspended or emulsified) form.

[0431] In a preferred embodiment of the second aspect, the composition comprises at least one coding RNA of the first aspect and, optionally, at least one pharmaceutically acceptable carrier or excipient.

[0432] In particularly preferred embodiments of the second aspect, the composition comprises at least one coding RNA, wherein the coding RNA comprises or consists of an RNA sequence which is identical or at least 70%, 80%, 85%, 86%, 87%, 88%, 89%, 90%, 91%, 92%, 93%, 94%, 95%, 96%, 97%, 98%, or 99% identical to a nucleic acid sequence selected from the group consisting of SEQ ID NOs: 37-328, 329-2080, 2121-2480, 2887-6134, 6312-8741, 8754-8855, 8856-10079, 10086-10139, and, optionally, at least one pharmaceutically acceptable carrier or excipient.

[0433] The term “pharmaceutically acceptable carrier” or “pharmaceutically acceptable excipient” as used herein preferably includes the liquid or non-liquid basis of the composition for administration. If the composition is provided in liquid form, the carrier may be water, e.g. pyrogen-free water; isotonic saline or buffered (aqueous) solutions, e.g. phosphate, citrate etc. buffered solutions. Water or preferably a buffer, more preferably an aqueous buffer, may be used, containing a sodium salt, preferably at least 50 mM of a sodium salt, a calcium salt, preferably at least 0.01 mM of a calcium salt, and optionally a potassium salt, preferably at least 3 mM of a potassium salt. According to preferred embodiments, the sodium, calcium and, optionally, potassium salts may occur in the form of their halogenides, e.g. chlorides, iodides, or bromides, in the form of their hydroxides, carbonates, hydrogen carbonates, or sulfates, etc. Examples of sodium salts include NaCl, NaI, NaBr, Na₂CO₃, NaHCO₃, Na₂SO₄, examples of the optional potassium salts include KCl, KI, KBr, K₂CO₃, KHCO₃, K₂SO₄, and examples of calcium salts include CaCl₂), CaI₂, CaBr₂, CaCO₃, CaSO₄, Ca(OH)₂.

[0434] Furthermore, organic anions of the aforementioned cations may be in the buffer. Accordingly, in embodiments, the RNA composition of the invention may comprise pharmaceutically acceptable carriers or excipients using one or more pharmaceutically acceptable carriers or excipients to e.g. increase stability, increase cell transfection, permit the sustained or delayed, increase the translation of encoded CSP protein in vivo, and/or alter the release profile of encoded CSP protein in vivo. In addition to traditional excipients such as any and all solvents, dispersion media, diluents, or other liquid vehicles, dispersion or suspension aids, surface active agents, isotonic agents, thickening or emulsifying agents, preservatives, excipients of the present invention can include, without limitation, lipidoids, liposomes, lipid nanoparticles, polymers, lipoplexes, core-shell nanoparticles, peptides, proteins, cells transfected with polynucleotides, hyaluronidase, nanoparticle mimics and combinations thereof. In embodiments, one or more compatible solid or liquid fillers or diluents or encapsulating compounds may be used as well, which are suitable for administration to a subject. The term “compatible” as used herein means that the constituents of the composition are capable of being mixed with the at least one RNA and, optionally, a plurality of RNAs of the composition, in such a manner that no interaction occurs, which would substantially reduce the biological activity or the pharmaceutical effectiveness of the composition under typical use conditions (e.g., intramuscular or intradermal administration). Pharmaceutically acceptable carriers or excipients must have sufficiently high purity and sufficiently low toxicity to make them suitable for administration to a subject to be treated. Compounds which may be used as pharmaceutically acceptable carriers or excipients may be sugars, such as, for example, lactose, glucose, trehalose, mannose, and sucrose; starches, such as, for example, corn starch or potato starch; dextrose; cellulose and its derivatives, such as, for example, sodium carboxymethylcellulose, ethylcellulose, cellulose acetate; powdered tragacanth; malt; gelatin; tallow; solid glidants, such as, for example, stearic acid, magnesium stearate; calcium sulfate; vegetable oils, such as, for example, groundnut oil, cottonseed oil, sesame oil, olive oil, corn oil and oil from theobroma; polyols, such as, for example, polypropylene glycol, glycerol, sorbitol, mannitol and polyethylene glycol; alginic acid.

[0435] The at least one pharmaceutically acceptable carrier or excipient of the composition may preferably be selected to be suitable for intramuscular or intradermal delivery of said composition. Accordingly, the composition is preferably a pharmaceutical composition, suitable for intramuscular or intradermal administration.

[0436] Subjects to which administration of the compositions, preferably the pharmaceutical composition, is contemplated include, but are not limited to, humans and/or other primates; mammals, including commercially relevant mammals such as cattle, pigs, horses, sheep, cats, dogs, mice, and/or rats; and/or birds, including commercially relevant birds such as poultry, chickens, ducks, geese, and/or turkeys.

[0437] Pharmaceutical compositions of the present invention may suitably be sterile and/or pyrogen-free.

[0438] Furthermore, one or more compatible solid or liquid fillers or diluents or encapsulating compounds may be used as well, which are suitable for administration to a person. The term “compatible” as used herein means that the constituents of the composition are capable of being mixed with the at least one RNA and, optionally, the further coding RNA of the composition, in such a manner that no interaction occurs, which would substantially reduce the biological activity or the pharmaceutical effectiveness of the composition under typical use conditions. Pharmaceutically acceptable carriers, fillers and diluents must have sufficiently high purity and sufficiently low toxicity to make them suitable for administration to a person to be treated. Compounds which may be used as pharmaceutically acceptable carriers, fillers or constituents thereof are sugars, such as, for example, lactose, glucose, trehalose and sucrose; starches, such as, for example, corn starch or potato starch; dextrose; cellulose and its derivatives, such as, for example, sodium carboxymethylcellulose, ethylcellulose, cellulose acetate; powdered tragacanth; malt; gelatin; tallow; solid glidants, such as, for example, stearic acid, magnesium stearate; calcium sulfate; vegetable oils, such as, for example, groundnut oil, cottonseed oil, sesame oil, olive oil, corn oil and oil from theobroma; polyols, such as, for example, polypropylene glycol, glycerol, sorbitol, mannitol and polyethylene glycol; alginic acid.

[0439] Further additives, which may be included in the composition are emulsifiers, such as, for example, Tween; wetting agents, such as, for example, sodium lauryl sulfate; colouring agents; taste-imparting agents, pharmaceutical carriers; tablet-forming agents; stabilizers; antioxidants; preservatives.

[0440] In embodiments, the composition as defined herein may comprise a plurality or at least more than one of the coding RNA species as defined in the context of the first aspect of the invention.

[0441] In embodiments, the at least one RNA comprised in the composition is a bi- or multicistronic nucleic acid, particularly a bi- or multicistronic nucleic acid as defined herein, which encodes the at least two, three, four, five, six, seven, eight, nine, ten, eleven or twelve distinct antigenic peptides or protein derived from the same Malaria parasite and/or a Malaria parasite.

[0442] In embodiments, the composition as defined herein may comprise a plurality or at least more than one of the coding RNA species as defined in the context of the first aspect of the invention. Preferably, the composition as defined herein may comprise 2, 3, 4, 5, 6, 7, 8, 9, or 10 different coding RNAs each defined in the context of the first aspect.

[0443] In embodiment, the composition may comprise at least 2, 3, 4, 5, 6, 7, 8, 9, 10 or even more different coding RNA species as defined in the context of the first aspect, each encoding at least one antigenic peptide or protein derived from genetically the same Malaria parasite, or a fragment or variant thereof. Particularly, said (genetically) same Malaria parasite expresses (essentially) the same repertoire of proteins or peptides, wherein all proteins or peptides have (essentially) the same amino acid sequence. Particularly, said (genetically) same Malaria parasite expresses essentially the same proteins, peptides or polyproteins, wherein these protein, peptide or polyproteins preferably do not differ in their amino acid sequence(s). A non-limiting list of exemplary Malaria parasites is provided in List 1.

[0444] In preferred embodiments, the composition comprises at least 2, 3, 4, 5, 6, 7, 8, 9, 10 or even more coding RNA construct species each encoding a different CSP Malaria antigen (constructs) as defined in the first aspect, preferably wherein each of the coding RNA constructs are selected from SEQ ID NOs: 329-2080, 6312-8741, 8856-10079.

[0445] In preferred embodiments, the composition of the second aspect comprises

(i) at least one coding RNA encoding at least a more full length CSP, and
(ii) at least one coding RNA encoding at least a shortened CSP fragment with HBsAg.

[0446] In preferred embodiments, the composition of the second aspect comprises

(i) at least one coding RNA encoding at least a CSP variant inducing strong humoral immune response, and
(ii) at least one coding RNA encoding at least a CSP fragment inducing strong cellular immune response.

[0447] In further preferred embodiments, the composition of the second aspect comprises

(i) at least one coding RNA encoding at least a CSP variant inducing strong B-cell immune response,
(ii) at least one coding RNA encoding at least a CSP fragment inducing strong CD4+ T-cell response; and
(ii) at least one coding RNA encoding at least a CSP fragment inducing strong CD8+ T-cell response.

[0448] In embodiments, the composition comprises at least 2, 3, 4, 5, 6, 7, 8, 9, 10 or even more different coding RNA species as defined in the context of the first aspect, each encoding at least one peptide or protein derived from a genetically different Malaria parasite, or a fragment or variant thereof. The terms “different” or “different Malaria parasite” as used throughout the present specification in that, has to be understood as the difference between at least two respective Malaria parasites, wherein the difference is manifested on the genome of the respective different Malaria parasites. Particularly, said (genetically) different Malaria parasites may express at least one different protein, peptide or polyprotein, wherein the at least one different protein, peptide or polyprotein preferably differs in at least one amino acid.

[0449] In other embodiments, the composition comprises at least 1, 2, 3, 4, 5, 6, 7, 8, 9, 10 or even more coding RNA construct species each encoding a different Malaria antigen selected from CSP, LSA1, MSP1, AMA1, TRAP, VAR2CSA, Pfs230, Pfs28, pfs25, Pfs45/48, RHS, Ripr, EMP1, SSP2, or combinations, or immunogenic fragments, or immunogenic variants of any of these.

[0450] In embodiments, the composition comprises at least one coding RNA encoding CSP as defined in the context of the first aspect and, in addition, one coding RNA species encoding an antigen selected from LSA1, MSP1, AMA1, TRAP, VAR2CSA, Pfs230, Pfs28, pfs25, Pfs45/48, RHS, Ripr, EMP1, SSP2.

[0451] In embodiments, the composition comprises at least one coding RNA encoding CSP as defined in the context of the first aspect and, in addition, two coding RNA species each encoding a different antigen selected from LSA1, MSP1, AMA1, TRAP, VAR2CSA, Pfs230, Pfs28, pfs25, Pfs45/48, RHS, Ripr, EMP1, SSP2.

[0452] In embodiments, the composition comprises at least one coding RNA encoding CSP as defined in the context of the first aspect and, in addition, three coding RNA species each encoding a different antigen selected from LSA1, MSP1, AMA1, TRAP, VAR2CSA, Pfs230, Pfs28, pfs25, Pfs45/48, RHS, Ripr, EMP1, SSP2.

[0453] In embodiments, the composition comprises at least one coding RNA encoding CSP as defined in the context of the first aspect and, in addition, at least one coding RNA encoding VAR2CSA.

[0454] In embodiments, the composition comprises at least one coding RNA encoding CSP as defined in the context of the first aspect and, in addition, at least one coding RNA encoding VAR2CSA, and at least one coding RNA encoding Pfs25 and/or Pfs230.

[0455] In embodiments, the composition comprises at least one coding RNA encoding CSP as defined in the context of the first aspect and, in addition, at least one coding RNA encoding VAR2CSA, and at least one coding RNA encoding Pfs230 and/or Pfs28, and in addition, at least one coding RNA encoding LSA1, MSP1, AMA1, TRAP, VAR2CSA, pfs25, Pfs45/48, RH5, Ripr, EMP1, SSP2

[0456] In embodiments, the composition comprises at least one coding RNA encoding CSP as defined in the context of the first aspect and, in addition, at least one coding RNA encoding AMA1, and at least one coding RNA encoding TRAP, and at least one coding RNA encoding MSP1, and/or at least one coding RNA encoding LSA.

[0457] In embodiments, the composition comprises at least one coding RNA encoding CSP as defined in the context of the first aspect and, in addition, at least one coding RNA encoding Vaqr2CSA.

[0458] In embodiments, the composition comprises at least one coding RNA encoding CSP as defined in the context of the first aspect and, in addition, at least one coding RNA encoding Pfs230, PFS28, Pfs25, Pfs48/50CyRPA, RH5 and/or RIPR.

[0459] In embodiments, the composition comprises at least one coding RNA encoding CSP as defined in the context of the first aspect and, in addition, at least one coding RNA encoding AMA1, TRAP, MSP1, LSA, Vaqr2CSA, Pfs230, PFS28, Pfs25, Pfs48/50CyRPA, RH5 and/or RIPR.

### Complexation:

[0460] In a preferred embodiment of the second aspect, the at least one coding RNA, or the plurality of coding RNAs (RNA species), is complexed or associated with to obtain a formulated composition. A formulation in that context may have the function of a transfection agent. A formulation in that context may also have the function of protecting the coding RNA from degradation.

[0461] In a preferred embodiment of the second aspect, the at least one coding RNA is complexed or associated with or at least partially complexed or partially associated with one or more cationic or polycationic compound, preferably cationic or polycationic polymer, cationic or polycationic polysaccharide, cationic or polycationic lipid, cationic or polycationic protein, cationic or polycationic peptide, or any combinations thereof.

[0462] Notably, embodiments relating to “at least one coding RNA” may likewise be read on and be understood as suitable embodiments of more than one or a plurality, e.g. 2, 3, 4, 5, 6, 7, 8, 9, 10, 11, 12, 13, 14, 15 of the RNAs as specified in the context of the first aspect.

[0463] The term “cationic or polycationic compound” as used herein will be recognized and understood by the person of ordinary skill in the art, and are for example intended to refer to a charged molecule, which is positively charged at a pH value ranging from about 1 to 9, at a pH value ranging from about 3 to 8, at a pH value ranging from about 4 to 8, at a pH value ranging from about 5 to 8, more preferably at a pH value ranging from about 6 to 8, even more preferably at a pH value ranging from about 7 to 8, most preferably at a physiological pH, e.g. ranging from about 7.2 to about 7.5. Accordingly, a cationic component, e.g. a cationic peptide, cationic protein, cationic polymer, cationic polysaccharide, cationic lipid may be any positively charged compound or polymer which is positively charged under physiological conditions. A “cationic or polycationic peptide or protein” may contain at least one positively charged amino acid, or more than one positively charged amino acid, e.g. selected from Arg, His, Lys or Orn. Accordingly, “polycationic” components are also within the scope exhibiting more than one positive charge under the given conditions.

[0464] Cationic or polycationic compounds, being particularly preferred in this context may be selected from the following list of cationic or polycationic peptides or proteins of fragments thereof: protamine, nucleoline, spermine or spermidine, or other cationic peptides or proteins, such as poly-L-lysine (PLL), poly-arginine, basic polypeptides, cell penetrating peptides (CPPs), including HIV-binding peptides, HIV-1 Tat (HIV), Tat-derived peptides, Penetratin, VP22 derived or analog peptides, HSV VP22 (Herpes simplex), MAP, KALA or protein transduction domains (PTDs), PpT620, prolin-rich peptides, arginine-rich peptides, lysine-rich peptides, MPG-peptide(s), Pep-1, L-oligomers, Calcitonin peptide(s), Antennapedia-derived peptides, pAntp, p151, FGF, Lactoferrin, Transportan, Buforin-2, Bac715-24, SynB, SynB(1), pVEC, hCT-derived peptides, SAP, or histones. More preferably, the nucleic acid as defined herein, preferably the mRNA as defined herein, is complexed with one or more polycations, preferably with protamine or oligofectamine, most preferably with protamine.

[0465] In a preferred embodiment of the second aspect, the at least one coding RNA is complexed with protamine

[0466] Further preferred cationic or polycationic compounds, which can be used as transfection or complexation agent may include cationic polysaccharides, for example chitosan, polybrene etc.; cationic lipids, e.g. DOTMA, DMRIE, di-C14-amidine, DOTIM, SAINT, DC-Chol, BGTC, CTAP, DOPC, DODAP, DOPE: Dioleyl phosphatidylethanol-amine, DOSPA, DODAB, DOIC, DMEPC, DOGS, DIMRI, DOTAP, DC-6-14, CLIP1, CLIP6, CLIP9, oligofectamine; or cationic or polycationic polymers, e.g. modified polyaminoacids, such as beta-aminoacid-polymers or reversed polyamides, etc., modified polyethylenes, such as PVP etc., modified acrylates, such as pDMAEMA etc., modified amidoamines such as pAMAM etc., modified polybetaaminoester (PBAE), such as diamine end modified 1,4 butanediol diacrylate-co-5-amino-1-pentanol polymers, etc., dendrimers, such as polypropylamine dendrimers or pAMAM based dendrimers, etc., polyimine(s), such as PEI, poly(propyleneimine), etc., polyallylamine, sugar backbone based polymers, such as cyclodextrin based polymers, dextran based polymers, etc., silan backbone based polymers, such as PMOXA-PDMS copolymers, etc., blockpolymers consisting of a combination of one or more cationic blocks (e.g. selected from a cationic polymer as mentioned above) and of one or more hydrophilic or hydrophobic blocks (e.g. polyethyleneglycole); etc.

[0467] In this context it is particularly preferred that the at least one coding RNA is complexed or at least partially complexed with a cationic or polycationic compound and/or a polymeric carrier, preferably cationic proteins or peptides. In this context, the disclosure of WO2010/037539 and WO2012/113513 is incorporated herewith by reference. Partially means that only a part of the coding RNA is complexed with a cationic compound and that the rest of the RNA is (comprised in the inventive (pharmaceutical) composition) in uncomplexed form (“free”).

[0468] In a preferred embodiment of the second aspect, the composition comprises at least one coding RNA complexed with one or more cationic or polycationic compounds, preferably protamine, and at least one free coding RNA.

[0469] In this context it is particularly preferred that at least one coding RNA is complexed, or at least partially complexed with protamine. Preferably, the molar ratio of the nucleic acid, particularly the RNA of the protamine-complexed RNA to the free RNA may be selected from a molar ratio of about 0.001:1 to about 1:0.001, including a ratio of about 1:1. Suitably, the complexed RNA is complexed with protamine by addition of protamine-trehalose solution to the RNA sample at a RNA:protamine weight to weight ratio (w/w) of 2:1.

[0470] Further preferred cationic or polycationic proteins or peptides that may be used for complexation can be derived from formula (Arg)I;(Lys)m;(His)n;(Orn)o;(Xaa)x of the patent application WO2009/030481 or WO2011/026641, the disclosure of WO2009/030481 or WO2011/026641 relating thereto incorporated herewith by reference.

[0471] In a preferred embodiment of the second aspect, the at least one coding RNA is complexed, or at least partially complexed, with at least one cationic or polycationic proteins or peptides preferably selected from SEQ ID NOs: 6201-6204 or any combinations thereof.

[0472] According to embodiments, the composition of the present invention comprises the coding RNA as defined in the context of the first aspect, and a polymeric carrier.

[0473] The term “polymeric carrier” as used herein will be recognized and understood by the person of ordinary skill in the art, and are e.g. intended to refer to a compound that facilitates transport and/or complexation of another compound (e.g. cargo RNA). A polymeric carrier is typically a carrier that is formed of a polymer. A polymeric carrier may be associated to its cargo (e.g. coding RNA) by covalent or non-covalent interaction. A polymer may be based on different subunits, such as a copolymer.

[0474] Suitable polymeric carriers in that context may include, for example, polyacrylates, polyalkycyanoacrylates, polylactide, polylactide-polyglycolide copolymers, polycaprolactones, dextran, albumin, gelatin, alginate, collagen, chitosan, cyclodextrins, protamine, PEGylated protamine, PEGylated PLL and polyethylenimine (PEI), dithiobis(succinimidylpropionate) (DSP), Dimethyl-3,3′-dithiobispropionimidate (DTBP), poly(ethylene imine) biscarbamate (PEIC), poly(L-lysine) (PLL), histidine modified PLL, poly(N-vinylpyrrolidone) (PVP), poly(propylenimine (PPI), poly(amidoamine) (PAMAM), poly(amido ethylenimine) (SS-PAEI), triehtylenetetramine (TETA), poly(β-aminoester), poly(4-hydroxy-L-proine ester) (PHP), poly(allylamine), poly(α-[4-aminobutyl]-L-glycolic acid (PAGA), Poly(D,L-lactic-co-glycolid acid (PLGA), Poly(N-ethyl-4-vinylpyridinium bromide), poly(phosphazene)s (PPZ), poly(phosphoester)s (PPE), poly(phosphoramidate)s (PPA), poly(N-2-hydroxypropylmethacrylamide) (pHPMA), poly(2-(dimethylamino)ethyl methacrylate) (pDMAEMA), poly(2-aminoethyl propylene phosphate) PPE_EA), galactosylated chitosan, N-dodecylated chitosan, histone, collagen and dextran-spermine. In one embodiment, the polymer may be an inert polymer such as, but not limited to, PEG. In one embodiment, the polymer may be a cationic polymer such as, but not limited to, PEI, PLL, TETA, poly(allylamine), Poly(N-ethyl-4-vinylpyridinium bromide), pHPMA and pDMAEMA. In one embodiment, the polymer may be a biodegradable PEI such as, but not limited to, DSP, DTBP and PEIC. In one embodiment, the polymer may be biodegradable such as, but not limited to, histine modified PLL, SS-PAEI, poly(β-aminoester), PHP, PAGA, PLGA, PPZ, PPE, PPA and PPE-EA.

[0475] When PEI is present, it may be branched PEI of a molecular weight ranging from 10 to 40 kDA, e.g., 25 kDa branched PEI (Sigma #408727).

[0476] In some embodiments, the polymer based nanoparticle comprises PEI. In some embodiments, the PEI is branched PEI. PEI may be a branched PEI of a molecular weight ranging from 10 to 40 kDA, e.g., 25 kDa. In some embodiments, the PEI is linear PEI. In some embodiments, the nanoparticle has a size of or less than about 60 nm (e.g., of or less than about 55 nm, of or less than about 50 nm, of or less than about 45 nm, of or less than about 40 nm, of or less than about 35 nm, of or less than about 30 nm, or of or less than about 25 nm). Suitable nanoparticles may be in the range of 25 nm to 60 nm, e.g. 30 nm to 50 nm.

[0477] A suitable polymeric carrier may be a polymeric carrier formed by disulfide-crosslinked cationic compounds. The disulfide-crosslinked cationic compounds may be the same or different from each other. The polymeric carrier can also contain further components. The polymeric carrier used according to the present invention may comprise mixtures of cationic peptides, proteins or polymers and optionally further components as defined herein, which are crosslinked by disulfide bonds (via —SH groups).

[0478] In this context, polymeric carriers according to formula {(Arg)I;(Lys)m;(His)n;(Orn)o;(Xaa′)x(Cys)y} and formula Cys,{(Arg)I;(Lys)m;(His)n;(Orn)o;(Xaa)x}Cys₂ of the patent application WO2012/013326 are preferred, the disclosure of WO2012/013326 relating thereto incorporated herewith by reference.

[0479] In embodiments, the polymeric carrier used to complex the coding RNA may be derived from a polymeric carrier molecule according formula (L—P¹—S—[S—P²—S]ₙ—S—P³—L) of the patent application WO2011/026641, the disclosure of WO2011/026641 relating thereto incorporated herewith by reference.

[0480] In embodiments, the polymeric carrier compound is formed by, or comprises or consists of the peptide elements CysArg12Cys (SEQ ID NO: 6201) or CysArg12 (SEQ ID NO: 6202) or TrpArg12Cys (SEQ ID NO: 6203). In particularly preferred embodiments, the polymeric carrier compound consists of a (R₁₂C)-(R₁₂C) dimer, a (WR₁₂C)-(WR₁₂C) dimer, or a (CR₁₂)-(CR₁₂C)-(CR₁₂) trimer, wherein the individual peptide elements in the dimer (e.g. (WR₁₂C)), or the trimer (e.g. (CR₁₂)), are connected via —SH groups.

[0481] In a preferred embodiment of the second aspect, the at least one coding RNA of the first aspect is complexed or associated with a polyethylene glycol/peptide polymer comprising HO-PEG5000-S-(S—CHHHHHHRRRRHHHHHHC-S-)7-S-PEG5000-OH (SEQ ID NO: 6204 as peptide monomer), HO-PEG5000-S-(S—CHHHHHHRRRRHHHHHHC-S-)4-S-PEG5000-OH (SEQ ID NO: 6204 as peptide monomer), HO-PEG5000-S-(S-CGHHHHHRRRRHHHHHGC-S-)7-S-PEG5000-OH (SEQ ID NO: 10172 as peptide monomer) and/or a polyethylene glycol/peptide polymer comprising HO-PEG5000-S-(S-CGHHHHHRRRRHHHHHGC-S-)4-S-PEG5000-OH (SEQ ID NO: 10172 of the peptide monomer).

[0482] In other embodiments, the composition comprises at least one coding RNA, wherein the at least one coding RNA is complexed or associated with polymeric carriers and, optionally, with at least one lipid component as described in WO2017/212008A1, WO2017/212006A1, WO2017/212007A1, and WO2017/212009A1. In this context, the disclosures of WO2017/212008A1, WO2017/212006A1, WO2017/212007A1, and WO2017/212009A1 are herewith incorporated by reference.

[0483] In a particularly preferred embodiment, the polymeric carrier is a peptide polymer, preferably a polyethylene glycol/peptide polymer as defined above, and a lipid component, preferably a lipidoid component.

[0484] In preferred embodiment of the second aspect, the at least one coding RNA of the first aspect is complexed or associated with a polymeric carrier, preferably with a polyethylene glycol/peptide polymer as defined above, and a lipidoid component, wherein the lipidoid component is a compound according to formula A

[chemical structure]

wherein
[0485] R_{A} is independently selected for each occurrence an unsubstituted, cyclic or acyclic, branched or unbranched C₁₋₂₀ aliphatic group; a substituted or unsubstituted, cyclic or acyclic, branched or unbranched C₁₋₂₀ heteroaliphatic group; a substituted or unsubstituted aryl; a substituted or unsubstituted heteroaryl;

[chemical structure]

[0486] wherein at least one R_{A} is

[chemical structure]

[0487] R₅ is independently selected for each occurrence of from an unsubstituted, cyclic or acyclic, branched or unbranched C₀₋₁₆ aliphatic; a substituted or unsubstituted aryl; or a substituted or unsubstituted heteroaryl;
[0488] each occurrence of x is an integer from 1 to 10;
[0489] each occurrence of y is an integer from 1 to 10; or a pharmaceutically acceptable salt thereof.

[0490] In a preferred embodiment, the lipidoid component may be any one selected from the lipidoids of Table 7.

TABLE 7
Lipidoids suitable for the invention:

| | |
|---|---|
| 3-C12-OH | [chemical structure] |
| 3-C12-OH-cat | [chemical structure] |
| 3-C12-amide | [chemical structure] |
| 3-C12-amide monomethyl | [chemical structure] |
| 3-C12-amide dimethyl | [chemical structure] |
| RevPEG(10)-3- C12-OH | [chemical structure] |
| RevPEG(10)- DLin-pAbenzoic | [chemical structure] |
| 3C12amide-TMA cat. | [chemical structure] |
| 3C12amide-DMA | [chemical structure] |
| 3C12amide-NH2 | [chemical structure] |
| 3C12amide-OH | [chemical structure] |
| 3C12Ester-OH | [chemical structure] |
| 3C12 Ester-amin | [chemical structure] |
| 3C12Ester-DMA | [chemical structure] |
| 2C12Amid-DMA | [chemical structure] |
| 3C12-lin-amid- DMA | [chemical structure] |
| 2C12-sperm- amid-DMA | [chemical structure] |
| 3C12-sperm- amid-DMA | [chemical structure] |

[0491] According preferred embodiments, the peptide polymer comprises a lipidoid of Table 7, preferably lipidoid 3-C12-OH as specified above, is used to complex the at least one coding RNA of the first aspect to form complexes having an N/P ratio from about 0.1 to about 20, or from about 0.2 to about 15, or from about 2 to about 15, or from about 2 to about 12, wherein the N/P ratio is defined as the mole ratio of the nitrogen atoms of the basic groups of the cationic peptide or polymer to the phosphate groups of the nucleic acid. In that context, the disclosure of WO2017/212009A1, in particular claims 1 to 10 of WO2017/212009A1, and the specific disclosure relating thereto is herewith incorporated by reference.

### Encapsulation/Complexation in LNPs:

[0492] In preferred embodiments of the second aspect, the at least one coding RNA is complexed, encapsulated, partially encapsulated, or associated with one or more lipids (e.g. cationic lipids and/or neutral lipids), thereby forming liposomes, lipid nanoparticles (LNPs), lipoplexes, and/or nanoliposomes.

[0493] The liposomes, lipid nanoparticles (LNPs), lipoplexes, and/or nanoliposomes—incorporated RNA may be completely or partially located in the interior space of the liposomes, lipid nanoparticles (LNPs), lipoplexes, and/or nanoliposomes, within the membrane, or associated with the exterior surface of the membrane. The incorporation of a nucleic acid into liposomes is also referred to herein as “encapsulation” wherein the RNA is entirely contained within the interior space of the liposomes, lipid nanoparticles (LNPs), lipoplexes, and/or nanoliposomes. The purpose of incorporating an RNA into liposomes, lipid nanoparticles (LNPs), lipoplexes, and/or nanoliposomes is to protect the RNA from an environment which may contain enzymes or chemicals that degrade RNA and/or systems or receptors that cause the rapid excretion of the RNA. Moreover, incorporating an RNA into liposomes, lipid nanoparticles (LNPs), lipoplexes, and/or nanoliposomes may promote the uptake of the RNA, and hence, may enhance the therapeutic effect of the RNA encoding antigenic CSP. Accordingly, incorporating an RNA into liposomes, lipid nanoparticles (LNPs), lipoplexes, and/or nanoliposomes may be particularly suitable for a vaccine, e.g. for intramuscular or intradermal administration.

[0494] In this context, the terms “complexed” or “associated” refer to the essentially stable combination of coding RNA of the first aspect and with one or more lipids into larger complexes or assemblies without covalent binding.

[0495] The term “lipid nanoparticle”, also referred to as “LNP”, is not restricted to any particular morphology, and include any morphology generated when a cationic lipid and optionally one or more further lipids are combined, e.g. in an aqueous environment and/or in the presence of RNA. For example, a liposome, a lipid complex, a lipoplex and the like are within the scope of a lipid nanoparticle (LNP).

[0496] Liposomes, lipid nanoparticles (LNPs), lipoplexes, and/or nanoliposomes can be of different sizes such as, but not limited to, a multilamellar vesicle (MLV) which may be hundreds of nanometers in diameter and may contain a series of concentric bilayers separated by narrow aqueous compartments, a small unicellular vesicle (SUV) which may be smaller than 50 nm in diameter, and a large unilamellar vesicle (LUV) which may be between 50 and 500 nm in diameter.

[0497] LNPs of the invention are suitably characterized as microscopic vesicles having an interior aqua space sequestered from an outer medium by a membrane of one or more bilayers. Bilayer membranes of LNPs are typically formed by amphiphilic molecules, such as lipids of synthetic or natural origin that comprise spatially separated hydrophilic and hydrophobic domains. Bilayer membranes of the liposomes can also be formed by amphophilic polymers and surfactants (e.g., polymerosomes, niosomes, etc.). In the context of the present invention, an LNP typically serves to transport the RNA of the first aspect to a target tissue.

[0498] Accordingly, in preferred embodiments of the second aspect, the at least one RNA is complexed with one or more lipids thereby forming lipid nanoparticles (LNP), wherein said LNP is particularly suitable for intramuscular and/or intradermal administration.

[0499] LNPs typically comprise a cationic lipid and one or more excipient selected from neutral lipids, charged lipids, steroids and polymer conjugated lipids (e.g. PEGylated lipid). The coding RNA may be encapsulated in the lipid portion of the LNP or an aqueous space enveloped by some or the entire lipid portion of the LNP. The coding RNA or a portion thereof may also be associated and complexed with the LNP. An LNP may comprise any lipid capable of forming a particle to which the nucleic acids are attached, or in which the one or more nucleic acids are encapsulated. Preferably, the LNP comprising nucleic acids comprises one or more cationic lipids, and one or more stabilizing lipids. Stabilizing lipids include neutral lipids and PEGylated lipids.

[0500] The cationic lipid of an LNP may be cationisable, i.e. it becomes protonated as the pH is lowered below the pK of the ionizable group of the lipid, but is progressively more neutral at higher pH values. At pH values below the pK, the lipid is then able to associate with negatively charged nucleic acids. In certain embodiments, the cationic lipid comprises a zwitterionic lipid that assumes a positive charge on pH decrease.

[0501] The LNP may comprise any further cationic or cationisable lipid, i.e. any of a number of lipid species which carry a net positive charge at a selective pH, such as physiological pH.

[0502] Such lipids include, but are not limited to, DSDMA, N,N-dioleyl-N,N-dimethylammonium chloride (DODAC), N,N-distearyl-N,N-dimethylammonium bromide (DDAB), 1,2-dioleoyltrimethyl ammonium propane chloride (DOTAP) (also known as N-(2,3-dioleoyloxy)propyl)-N,N,N-trimethylammonium chloride and 1,2-Dioleyloxy-3-trimethylaminopropane chloride salt), N-(1-(2,3-dioleyloxy)propyI)-N,N,N-trimethylammonium chloride (DOTMA), N,N-dimethyl-2,3-dioleyloxy)propylamine (DODMA), ckk-E12, ckk, 1,2-DiLinoleyloxy-N,N-dimethylaminopropane (DLinDMA), 1,2-Dilinolenyloxy-N,N-dimethylaminopropane (DLenDMA), 1,2-di-y-linolenyloxy-N,N-dimethylaminopropane (y-DLenDMA), 98N12-5,1,2-Dilinoleylcarbamoyloxy-3-dimethylaminopropane (DLin-C-DAP), 1,2-Dilinoleyoxy-3-(dimethylamino)acetoxypropane (DLin-DAC), 1,2-Dilinoleyoxy-3-morpholinopropane (DLin-MA), 1,2-Dilinoleoyl-3-dimethylaminopropane (DLinDAP), 1,2-Dilinoleylthio-3-dimethylaminopropane (DLin-S-DMA), 1-Linoleoyl-2-linoleyloxy-3-dimethylaminopropane (DLin-2-DMAP), 1,2-Dilinoleyloxy-3-trimethylaminopropane chloride salt (DLin-TMA.CI), ICE (Imidazol-based), HGT5000, HGT5001, DMDMA, CLinDMA, CpLinDMA, DMOBA, DOcarbDAP, DLincarbDAP, DLinCDAP, KLin-K-DMA, DLin-K-XTC2-DMA, XTC (2,2-Dilinoleyl-4-dimethylaminoethyl[1,3]-dioxolane) HGT4003, 1,2-Dilinoleoyl-3-trimethylaminopropane chloride salt (DLin-TAP.CI), 1,2-Dilinoleyloxy-3-(N-methylpiperazino)propane (DLin-MPZ), or 3-(N,N-Dilinoleylamino)-1,2-propanediol (DLinAP), 3-(N,N-Dioleylamino)-1,2-propanedio (DOAP), 1,2-Dilinoleyloxo-3-(2-N,N-dimethylamino)ethoxypropane (DLin-EG-DM A), 2,2-Dilinoleyl-4-dimethylaminomethyl[1,3]-dioxolane (DLin-K-DMA) or analogs thereof, (3aR,5s,6aS)-N,N-dimethyl-2,2-di((9Z,12Z)-octadeca-9,12-dienyl)tetrahydro-3aH-cyclopenta[d][1,3]dioxol-5-amine, (6Z,9Z,28Z,31Z)-heptatriaconta-6,9,28,31-tetraen-19-yl-4-(dimethylamino)butanoate (MC3), ALNY-100 ((3aR,5s,6aS)-N,N-dimethyl-2,2-di((9Z,12Z)-octadeca-9,12-dienyl)tetrahydro-3aH-cyclopenta[d][1,3]dioxol-5-amine)), 1,1″-(2-(4-(2-((2-(bis(2-hydroxydodecyl)amino)ethyl)(2-hydroxydodecyl)amino)ethyl)piperazin-1-yl)ethylazanediyl)didodecan-2-ol (C12-200), 2,2-dilinoleyl-4-(2-dimethylaminoethyl)[1,3]-dioxolane (DLin-K-C2-DMA), 2,2-dilinoleyl-4-dimethylaminomethyl[1,3]-dioxolane (DLin-K-DMA), NC98-5 (4,7,13-tris(3-oxo-3-(undecylamino)propyl)-N1,N 16-diundecyl-4,7,10,13-tetraazahexadecane-1,16-diamide), (6Z,9Z,28Z,31Z)-heptatriaconta-6,9,28,31-tetraen-19-yl 4-(dimethylamino) butanoate (DLin-M-C3-DMA), 3-((6Z,9Z,28Z,31Z)-heptatriaconta-6,9,28,31-tetraen-19-yloxy)-N,N-dimethylpropan-1-amine (MC3 Ether), 4-((6Z,9Z,28Z,31Z)-heptatriaconta-6,9,28,31-tetraen-19-yloxy)-N,N-dimethylbutan-1-amine (MC4 Ether), LIPOFECTIN® (commercially available cationic liposomes comprising DOTMA and 1,2-dioleoyl-sn-3phosphoethanolamine (DOPE), from GIBCO/BRL, Grand Island, N.Y.); LIPOFECTAMINE® (commercially available cationic liposomes comprising N-(1-(2,3dioleyloxy)propyl)-N-(2-(sperminecarboxamido)ethyl)-N,N-dimethylammonium trifluoroacetate (DOSPA) and (DOPE), from GIBCO/BRL); and TRANSFECTAM® (commercially available cationic lipids comprising dioctadecylamidoglycyl carboxyspermine (DOGS) in ethanol from Promega Corp., Madison, Wis.) or any combination of any of the foregoing. Further suitable cationic lipids for use in the compositions and methods of the invention include those described in international patent publications WO2010/053572 (and particularly, CI 2-200 described at paragraph [00225]) and WO2012/170930, both of which are incorporated herein by reference, HGT4003, HGT5000, HGTS001, HGT5001, HGT5002 (see US20150140070A1).

[0503] In some embodiments, the lipid is selected from the group consisting of 98N12-5, C12-200, and ckk-E12.

[0504] In one embodiment, the further cationic lipid is an amino lipid.

[0505] Representative amino lipids include, but are not limited to, 1,2-dilinoleyoxy-3-(dimethylamino)acetoxypropane (DLin-DAC), 1,2-dilinoleyoxy-3morpholinopropane (DLin-MA), 1,2-dilinoleoyl-3-dimethylaminopropane (DLinDAP), 1,2-dilinoleylthio-3-dimethylaminopropane (DLin-S-DMA), 1-linoleoyl-2-linoleyloxy-3dimethylaminopropane (DLin-2-DMAP), 1,2-dilinoleyloxy-3-trimethylaminopropane chloride salt (DLin-TMA.CI), 1,2-dilinoleoyl-3-trimethylaminopropane chloride salt (DLin-TAP.CI), 1,2-dilinoleyloxy-3-(N-methylpiperazino)propane (DLin-MPZ), 3-(N,Ndilinoleylamino)-1,2-propanediol (DLinAP), 3-(N,N-dioleylamino)-1,2-propanediol (DOAP), 1,2-dilinoleyloxo-3-(2-N,N-dimethylamino)ethoxypropane (DLin-EG-DMA), and 2,2-dilinoleyl-4-dimethylaminomethyl-[1,3]-dioxolane (DLin-K-DMA), 2,2-dilinoleyl-4-(2-dimethylaminoethyl)-[1,3]-dioxolane (DLin-KC2-DMA); dilinoleyl-methyl-4-dimethylaminobutyrate (DLin-MC3-DMA); MC3 (US20100324120).

[0506] In one embodiment, the coding RNA of the first aspect may be formulated in an aminoalcohol lipidoid.

[0507] Aminoalcohol lipidoids which may be used in the present invention may be prepared by the methods described in U.S. Pat. No. 8,450,298, herein incorporated by reference in its entirety. Suitable (ionizable) lipids can also be the compounds as disclosed in Tables 1, 2 and 3 and as defined in claims 1-24 of WO2017/075531A1, hereby incorporated by reference.

[0508] In another embodiment, ionizable lipids can also be the compounds as disclosed in WO2015/074085A1 (i.e. ATX-001 to ATX-032 or the compounds as specified in claims 1-26), U.S. Appl. Nos. 61/905,724 and 15/614,499 or U.S. Pat. Nos. 9,593,077 and 9,567,296 hereby incorporated by reference in their entirety.

[0509] In that context, any lipid derived from generic formula (X1)

[chemical structure]

wherein, Ri and R2 are the same or different, each a linear or branched alkyl consisting of 1 to 9 carbons, an alkenyl or alkynyl consisting of 2 to 11carbons, Li and L2 are the same or different, each a linear alkylene or alkenylene consisting of 5 to 18 carbons, or forming a heterocycle with N, Xi is a bond, or is —CO—O— whereby —L2-CO—O—R2 is formed, X2 is S or O, L3 is a bond or a linear or branched alkylene consisting of 1 to 6 carbons, or forming a heterocycle with N, R3 is a linear or branched alkylene consisting of 1 to 6 carbons, and R4 and R 5 are the same or different, each hydrogen or a linear or branched alkyl consisting of 1 to 6 carbons; or a pharmaceutically acceptable salt thereof may be suitably used.

[0510] In other embodiments, suitable cationic lipids can also be the compounds as disclosed in WO2017/117530A1 (i.e. lipids 13, 14, 15, 16, 17, 18, 19, 20, or the compounds as specified in the claims), hereby incorporated by reference in its entirety.

[0511] In that context, any lipid derived from generic formula (X2)

[chemical structure]

wherein
X is a linear or branched alkylene or alkenylene, monocyclic, bicyclic, or tricyclic arene or heteroarene;
Y is a bond, an ethene, or an unsubstituted or substituted aromatic or heteroaromatic ring; Z is S or 0;
L is a linear or branched alkylene of 1 to 6 carbons;
R-3 and R4 are independently a linear or branched alkyl of 1 to 6 carbons;
Ri and R2 are independently a linear or branched alkyl or alkenyl of 1 to 20 carbons; r is 0 to 6; and
m, n, p, and q are independently 1 to 18;
wherein when n=q, m=p, and Ri=R2, then X and Y differ;
wherein when X=Y, n=q, m=p, then Ri and R2 differ;
wherein when X=Y, n=q, and Ri=R2, then m and p differ; and
wherein when X=Y, m=p, and Ri=R2, then n and q differ;
or a pharmaceutically acceptable salt thereof.

[0512] In preferred embodiments, a lipid may be used derived from formula (X2), wherein, X is a bond, linear or branched alkylene, alkenylene, or monocyclic, bicyclic, or tricyclic arene or heteroarene; Y is a monocyclic, bicyclic, or tricyclic arene or heteroarene; Z is S or O; L is a linear or branched alkylene of 1 to 6 carbons; R3 and R4 are independently a linear or branched alkyl of 1 to 6 carbons; Ri and R2 are independently a linear or branched alkyl or alkenyl of 1 to 20 carbons; r is 0 to 6; and m, n, p, and q are independently 1 to 18; or a pharmaceutically acceptable salt thereof may be suitably used.

[0513] In preferred embodiments, ionizable lipids may also be selected from the lipids disclosed in WO2018/078053A1 (i.e. lipids derived from formula I, II, and III of WO2018/078053A1, or lipids as specified in claims 1 to 12 of WO2018/078053A1), the disclosure of WO2018/078053A1 hereby incorporated by reference in its entirety. In that context, lipids disclosed in Table 7 of WO2018/078053A1 (e.g. lipids derived from formula I-1 to I-41) and lipids disclosed in Table 8 of WO2018/078053A1 (e.g. lipids derived from formula II-1 to II-36) may be suitably used in the context of the invention. Accordingly, formula I-1 to formula I-41 and formula II-1 to formula II-36 of WO2018/078053A1, and the specific disclosure relating thereto, are herewith incorporated by reference.

[0514] In particularly preferred embodiments of the second aspect, a suitable lipid may be a cationic lipid according to formula (III)

[chemical structure]

or a pharmaceutically acceptable salt, tautomer, prodrug or stereoisomer thereof, wherein, R1, R2, R3, L1, L2, G1, G2, and G3 are as below.
Formula (III) is further defined in that:
one of L¹ or L² is —O(C═O)—, —(C═O)O—, —C(═O)—, —O—, —S(O)ₓ—, —S—S—, SC(═O)—, —NR^{a}C(═O)—, —C(═O)NR^{a}—, —NR^{a}C(═O)NR^{a}—, —OC(═O)NR^{a}— or —NR^{a}C(═O)O—, and the other of L¹ or L² is —O(C═O)—, —(C═O)O—, —C(═O)—, —O—, —S(O)ₓ—, —S—S—, SC(═O)—, —NR^{a}C(═O)—, —C(═O)NR^{a}—, —NR^{a}C(═O)NR^{a}—, —OC(═O)NR^{a}— or —NR^{a}C(═O)O- or a direct bond;
G¹ and G² are each independently unsubstituted C₁-C₁₂ alkylene or C₁-C₁₂ alkenylene;
G³ is C₁-C₂₄ alkylene, C₁-C₂₄ alkenylene, C₃-C₈ cycloalkylene, C₃-C₈ cycloalkenylene;
R^{a} is H or C₁-C₁₂ alkyl;
R¹ and R² are each independently C₆-C₂₄ alkyl or C₆-C₂₄ alkenyl;
R³ is H, OR⁵, CN, —C(═O)OR⁴, —OC(═O)R⁴ or —NR⁵C(═O)R⁴;
R⁴ is C₁-C₁₂ alkyl;
R⁵ is H or C₁-C₆ alkyl; and
x is 0, 1 or 2.

[0515] In some of the foregoing embodiments of formula (III), the lipid has one of the following structures (IIIA) or (IIIB):

[chemical structure]

wherein:
A is a 3 to 8-membered cycloalkyl or cycloalkylene ring; R⁶ is, at each occurrence, independently H, OH or C₁-C₂₄ alkyl; n is an integer ranging from 1 to 15.

[0516] In some of the foregoing embodiments of formula (III), the lipid has structure (IIIA), and in other embodiments, the lipid has structure (IIIB).

[0517] In other embodiments of formula (III), the lipid has one of the following structures (IIIC) or (IIID):

[chemical structure]

wherein y and z are each independently integers ranging from 1 to 12.

[0518] In any of the foregoing embodiments of formula (III), one of L¹ or L² is —O(C═O)—. For example, in some embodiments each of L¹ and L² are —O(C═O)—. In some different embodiments of any of the foregoing, L¹ and L² are each independently —(C═O)O— or —O(C═O)—. For example, in some embodiments each of L¹ and L² is —(C═O)O—.

[0519] In preferred embodiments of the second aspect, the cationic lipid of the LNP is a compound of formula III,

wherein:
L¹ and L² are each independently —O(C═O)— or (C═O)—O—;
G³ is C₁-C₂₄ alkylene or C₁-C₂₄ alkenylene; and
R³ is H or OR⁵.

[0520] In some different embodiments of formula (III), the lipid has one of the following structures (IIIE) or (IIIF):

[chemical structure]

[0521] In some of the foregoing embodiments of formula (III), the lipid has one of the following structures (IIIG), (IIIH), (IIII), or (IIIJ):

[chemical structure]

[0522] In some of the foregoing embodiments of formula (III), n is an integer ranging from 2 to 12, for example from 2 to 8 or from 2 to 4. In some embodiments, n is 3, 4, 5 or 6. In some embodiments, n is 3. In some embodiments, n is 4. In some embodiments, n is 5. In some embodiments, n is 6. In some other of the foregoing embodiments of formula (III), y and z are each independently an integer ranging from 2 to 10. For example, in some embodiments, y and z are each independently an integer ranging from 4 to 9 or from 4 to 6. In some of the foregoing embodiments of formula (III), R⁶ is H. In other of the foregoing embodiments, R⁶ is C₁-C₂₄ alkyl. In other embodiments, R⁶ is OH. In some embodiments of formula (III), G³ is unsubstituted. In other embodiments, G3 is substituted. In various different embodiments, G³ is linear C₁-C₂₄ alkylene or linear C₁-C₂₄ alkenylene. In some other foregoing embodiments of formula (III), R¹ or R², or both, is C₆-C₂₄ alkenyl. For example, in some embodiments, R¹ and R² each, independently have the following structure:

[chemical structure]

wherein:
R^{7a} and R^{7b} are, at each occurrence, independently H or C₁-C₁₂ alkyl; and a is an integer from 2 to 12, wherein R^{7a}, R^{7b} and a are each selected such that R¹ and R² each independently comprise from 6 to 20 carbon atoms. For example, in some embodiments a is an integer ranging from 5 to 9 or from 8 to 12. In some of the foregoing embodiments of formula (III), at least one occurrence of R^{7a} is H. For example, in some embodiments, R^{7a} is H at each occurrence. In other different embodiments of the foregoing, at least one occurrence of R^{7b} is C₁-C₈ alkyl. For example, in some embodiments, C₁-C₈ alkyl is methyl, ethyl, n-propyl, iso-propyl, n-butyl, iso-butyl, tert-butyl, n-hexyl or n-octyl.

[0523] In different embodiments of formula (III), R¹ or R², or both, has one of the following structures:

[chemical structure]

[0524] In preferred embodiments of the second aspect, the cationic lipid of the LNP is a compound of formula III, wherein:

L¹ and L² are each independently —O(C═O)— or (C═O)—O—; and
R¹ and R² each independently have one of the following structures:

[chemical structure]

[0525] In some of the foregoing embodiments of formula (III), R³ is OH, CN, —C(═O)OR⁴, —OC(═O)R⁴ or —NHC(═O)R⁴. In some embodiments, R⁴ is methyl or ethyl.

[0526] In preferred embodiments of the second aspect, the cationic lipid of the LNP is a compound of formula III, wherein R³ is OH.

[0527] In particularly preferred embodiment of the second aspect, the coding RNA of the first aspect and is complexed with one or more lipids thereby forming lipid nanoparticles (LNP), wherein the LNP is selected from structures III-1 to III-36 (see Table 8).

TABLE 8
Representative lipid compounds derived from formula (III)

| No. | Structure |
|---|---|
| III-1 | [chemical structure] |
| III-2 | [chemical structure] |
| III-3 | [chemical structure] |
| III-4 | [chemical structure] |
| III-5 | [chemical structure] |
| III-6 | [chemical structure] |
| III-7 | [chemical structure] |
| III-8 | [chemical structure] |
| III-9 | [chemical structure] |
| III-10 | [chemical structure] |
| III-11 | [chemical structure] |
| III-12 | [chemical structure] |
| III-13 | [chemical structure] |
| III-14 | [chemical structure] |
| III-15 | [chemical structure] |
| III-16 | [chemical structure] |
| III-17 | [chemical structure] |
| III-18 | [chemical structure] |
| III-19 | [chemical structure] |
| III-20 | [chemical structure] |
| III-21 | [chemical structure] |
| III-22 | [chemical structure] |
| III-23 | [chemical structure] |
| III-24 | [chemical structure] |
| III-25 | [chemical structure] |
| III-26 | [chemical structure] |
| III-27 | [chemical structure] |
| III-28 | [chemical structure] |
| III-29 | [chemical structure] |
| III-30 | [chemical structure] |
| III-31 | [chemical structure] |
| III-32 | [chemical structure] |
| III-33 | [chemical structure] |
| III-34 | [chemical structure] |
| III-35 | [chemical structure] |
| III-36 | [chemical structure] |

[0528] In some embodiments, the LNPs comprise a lipid of formula (III), a coding RNA of the first aspect, and one or more excipient selected from neutral lipids, steroids and PEGylated lipids. In some embodiments the lipid of formula (III) is compound III-3. In some embodiments the lipid of formula (III) is compound III-7.

[0529] In preferred embodiments, the LNP comprises a cationic lipid selected from:

[chemical structure]

[0530] In particularly preferred embodiment of the second aspect, the coding RNA of the first aspect is complexed with one or more lipids thereby forming lipid nanoparticles (LNP), wherein the LNP comprises the following cationic lipid (lipid according to formula III-3 of Table 8):

[chemical structure]

[0531] In certain embodiments, the cationic lipid as defined herein, preferably as disclosed in Table 8, more preferably cationic lipid compound III-3, is present in the LNP in an amount from about 30 to about 95 mole percent, relative to the total lipid content of the LNP. If more than one cationic lipid is incorporated within the LNP, such percentages apply to the combined cationic lipids.

[0532] In one embodiment, the cationic lipid is present in the LNP in an amount from about 30 to about 70 mole percent. In one embodiment, the cationic lipid is present in the LNP in an amount from about 40 to about 60 mole percent, such as about 40, 41, 42, 43, 44, 45, 46, 47, 48, 49, 50, 51, 52, 53, 54, 55, 56, 57, 58, 59 or 60 mole percent, respectively. In embodiments, the cationic lipid is present in the LNP in an amount from about 47 to about 48 mole percent, such as about 47.0, 47.1, 47.2, 47.3, 47.4, 47.5, 47.6, 47.7, 47.8, 47.9, 50.0 mole percent, respectively, wherein 47.7 mole percent are particularly preferred.

[0533] In some embodiments, the cationic lipid is present in a ratio of from about 20 mol % to about 70 or 75 mol % or from about 45 to about 65 mol % or about 20, 25, 30, 35, 40, 45, 50, 55, 60, 65, or about 70 mol % of the total lipid present in the LNP. In further embodiments, the LNPs comprise from about 25% to about 75% on a molar basis of cationic lipid, e.g., from about 20 to about 70%, from about 35 to about 65%, from about 45 to about 65%, about 60%, about 57.5%, about 57.1%, about 50% or about 40% on a molar basis (based upon 100% total moles of lipid in the lipid nanoparticle). In some embodiments, the ratio of cationic lipid to the coding RNA of the first aspect is from about 3 to about 15, such as from about 5 to about 13 or from about 7 to about 11.

[0534] In some embodiments of the invention the LNP comprises a combination or mixture of any the lipids described above.

[0535] Other suitable (cationic or ionizable) lipids are disclosed in WO2009/086558, WO2009/127060, WO2010/048536, WO2010/054406, WO2010/088537, WO2010/129709, WO2011/153493, WO 2013/063468, US2011/0256175, US2012/0128760, US2012/0027803, U.S. Pat. No. 8,158,601, WO2016/118724, WO2016/118725, WO2017/070613, WO2017/070620, WO2017/099823, WO2012/040184, WO2011/153120, WO2011/149733, WO2011/090965, WO2011/043913, WO2011/022460, WO2012/061259, WO2012/054365, WO2012/044638, WO2010/080724, WO2010/21865, WO2008/103276, WO2013/086373, WO2013/086354, U.S. Pat. Nos. 7,893,302, 7,404,969, 8,283,333, 8,466,122 and 8,569,256 and US Patent Publication No. US2010/0036115, US2012/0202871, US2013/0064894, US2013/0129785, US2013/0150625, US2013/0178541, US2013/0225836, US2014/0039032 and WO2017/112865. In that context, the disclosures of WO2009/086558, WO2009/127060, WO2010/048536, WO2010/054406, WO2010/088537, WO2010/129709, WO2011/153493, WO2013/063468, U52011/0256175, US2012/0128760, US2012/0027803, U.S. Pat. No. 8,158,601, WO2016/118724, WO2016/118725, WO2017/070613, WO2017/070620, WO2017/099823, WO2012/040184, WO2011/153120, WO2011/149733, WO2011/090965, WO2011/043913, WO2011/022460, WO2012/061259, WO2012/054365, WO2012/044638, WO2010/080724, WO2010/21865, WO2008/103276, WO2013/086373, WO2013/086354, U.S. Pat. Nos. 7,893,302, 7,404,969, 8,283,333, 8,466,122 and 8,569,256 and US Patent Publication No. US2010/0036115, US2012/0202871, US2013/0064894, US2013/0129785, US2013/0150625, US2013/0178541, US2013/0225836 and US2014/0039032 and WO2017/112865 specifically relating to (cationic) lipids suitable for LNPs are incorporated herewith by reference.

[0536] In some embodiments, the lipid is selected from the group consisting of 98N12-5, C12-200, and ckk-E12.

[0537] In some embodiments, amino or cationic lipids as defined herein have at least one protonatable or deprotonatable group, such that the lipid is positively charged at a pH at or below physiological pH (e.g. pH 7.4), and neutral at a second pH, preferably at or above physiological pH. It will, of course, be understood that the addition or removal of protons as a function of pH is an equilibrium process, and that the reference to a charged or a neutral lipid refers to the nature of the predominant species and does not require that all of lipids have to be present in the charged or neutral form. Lipids having more than one protonatable or deprotonatable group, or which are zwitterionic, are not excluded and may likewise suitable in the context of the present invention.

[0538] In some embodiments, the protonatable lipids have a pKa of the protonatable group in the range of about 4 to about 11, e.g., a pKa of about 5 to about 7.

[0539] LNPs can comprise two or more (different) cationic lipids. The cationic lipids may be selected to contribute different advantageous properties. For example, cationic lipids that differ in properties such as amine pKa, chemical stability, half-life in circulation, half-life in tissue, net accumulation in tissue, or toxicity can be used in the LNP. In particular, the cationic lipids can be chosen so that the properties of the mixed-LNP are more desirable than the properties of a single-LNP of individual lipids.

[0540] The amount of the permanently cationic lipid or lipidoid may be selected taking the amount of the RNA cargo into account. In one embodiment, these amounts are selected such as to result in an N/P ratio of the nanoparticle(s) or of the composition in the range from about 0.1 to about 20. In this context, the N/P ratio is defined as the mole ratio of the nitrogen atoms (“N”) of the basic nitrogen-containing groups of the lipid or lipidoid to the phosphate groups (“P”) of the RNA which is used as cargo. The N/P ratio may be calculated on the basis that, for example, 1 ug RNA typically contains about 3 nmol phosphate residues, provided that the RNA exhibits a statistical distribution of bases. The “N”-value of the lipid or lipidoid may be calculated on the basis of its molecular weight and the relative content of permanently cationic and—if present—cationisable groups.

[0541] LNP in vivo characteristics and behavior can be modified by addition of a hydrophilic polymer coating, e.g. polyethylene glycol (PEG), to the LNP surface to confer steric stabilization. Furthermore, LNPs can be used for specific targeting by attaching ligands (e.g. antibodies, peptides, and carbohydrates) to its surface or to the terminal end of the attached PEG chains (e.g. via PEGylated lipids).

[0542] In some embodiments, the LNPs comprise a polymer conjugated lipid. The term “polymer conjugated lipid” refers to a molecule comprising both a lipid portion and a polymer portion. An example of a polymer conjugated lipid is a PEGylated lipid. The term “PEGylated lipid” refers to a molecule comprising both a lipid portion and a polyethylene glycol portion. PEGylated lipids are known in the art and include 1-(monomethoxy-polyethyleneglycol)-2,3-dimyristoylglycerol (PEG-s-DMG) and the like.

[0543] In certain embodiments, the LNP comprises an additional, stabilizing-lipid which is a polyethylene glycol-lipid (PEGylated lipid). Suitable polyethylene glycol-lipids include PEG-modified phosphatidylethanolamine, PEG-modified phosphatidic acid, PEG-modified ceramides (e.g. PEG-CerC14 or PEG-CerC20), PEG-modified dialkylamines, PEG-modified diacylglycerols, PEG-modified dialkylglycerols. Representative polyethylene glycol-lipids include PEG-c-DOMG, PEG-c-DMA, and PEG-s-DMG. In one embodiment, the polyethylene glycol-lipid is N-[(methoxy poly(ethylene glycol)2000)carbamyl]-1,2-dimyristyloxlpropyl-3-amine (PEG-c-DMA). In a preferred embodiment, the polyethylene glycol-lipid is PEG-2000-DMG. In one embodiment, the polyethylene glycol-lipid is PEG-c-DOMG). In other embodiments, the LNPs comprise a PEGylated diacylglycerol (PEG-DAG) such as 1-(monomethoxy-polyethyleneglycol)-2,3-dimyristoylglycerol (PEG-DMG), a PEGylated phosphatidylethanoloamine (PEG-PE), a PEG succinate diacylglycerol (PEG-S-DAG) such as 4-O-(2′,3′-di(tetradecanoyloxy)propyl-1-O-(ω-methoxy(polyethoxy)ethyl)butanedioate (PEG-S-DMG), a PEGylated ceramide (PEG-cer), or a PEG dialkoxypropylcarbamate such as ω-methoxy(polyethoxy)ethyl-N-(2,3di(tetradecanoxy)propyl)carbamate or 2,3-di(tetradecanoxy)propyl-N-(ω-methoxy(polyethoxy)ethyl)carbamate.

[0544] In preferred embodiments of the second aspect, the coding RNA of the first aspect is complexed with one or more lipids thereby forming lipid nanoparticles (LNP), wherein the LNP additionally comprises a PEGylated lipid with the formula (IV):

[chemical structure]

or a pharmaceutically acceptable salt, tautomer or stereoisomer thereof, wherein R⁸ and R⁹ are each independently a straight or branched, saturated or unsaturated alkyl chain containing from 10 to 30 carbon atoms, wherein the alkyl chain is optionally interrupted by one or more ester bonds; and w has mean value ranging from 30 to 60.

[0545] In some of the foregoing embodiments of the PEGylated lipid according to formula (IV), R⁸ and R⁹ are not both n-octadecyl when w is 42. In some other embodiments, R⁸ and R⁹ are each independently a straight or branched, saturated or unsaturated alkyl chain containing from 10 to 18 carbon atoms. In some embodiments, R⁸ and R⁹ are each independently a straight or branched, saturated or unsaturated alkyl chain containing from 12 to 16 carbon atoms. In some embodiments, R⁸ and R⁹ are each independently a straight or branched, saturated or unsaturated alkyl chain containing 12 carbon atoms. In some embodiments, R⁸ and R⁹ are each independently a straight or branched, saturated or unsaturated alkyl chain containing 14 carbon atoms. In other embodiments, R⁸ and R⁹ are each independently a straight or branched, saturated or unsaturated alkyl chain containing 16 carbon atoms. In still more embodiments, R⁸ and R⁹ are each independently a straight or branched, saturated or unsaturated alkyl chain containing 18 carbon atoms. In still other embodiments, R⁸ is a straight or branched, saturated or unsaturated alkyl chain containing 12 carbon atoms and R⁹ is a straight or branched, saturated or unsaturated alkyl chain containing 14 carbon atoms.

[0546] In various embodiments, w spans a range that is selected such that the PEG portion of the PEGylated lipid according to formula (IV) has an average molecular weight of about 400 to about 6000 g/mol. In some embodiments, the average w is about 50.

[0547] In preferred embodiments of the second aspect, R⁸ and R⁹ of the PEGylated lipid according to formula (IV) are saturated alkyl chains.

[0548] In a particularly preferred embodiment of the second aspect, the coding RNA of the first aspect is complexed with one or more lipids thereby forming lipid nanoparticles (LNP), wherein the LNP additionally comprises a PEGylated lipid, wherein the PEG lipid is of formula (IVa)

[chemical structure]

wherein n has a mean value ranging from 30 to 60, such as about 28 to about 32, about 30 to about 34, 32 to about 36, about 34 to about 38, 36 to about 40, about 38 to about 42, 40 to about 44, about 42 to about 46, 44 to about 48, about 46 to about 50, 48 to about 52, about 50 to about 54, 52 to about 56, about 54 to about 58, 56 to about 60, about 58 to about 62. In preferred embodiments, n is about 45, 46, 47, 48, 49, 50, 51, 52, 53, 54. In a most preferred embodiment n has a mean value of 49.

[0549] In other embodiments, the PEGylated lipid has one of the following structures:

[chemical structure]

wherein n is an integer selected such that the average molecular weight of the PEGylated lipid is about 2500 g/mol, most preferably n is about 49.

[0550] Further examples of PEG-lipids suitable in that context are provided in US2015/0376115A1 and WO2015/199952, each of which is incorporated by reference in its entirety.

[0551] In some embodiments, LNPs include less than about 3, 2, or 1 mole percent of PEG or PEG-modified lipid, based on the total moles of lipid in the LNP. In further embodiments, LNPs comprise from about 0.1% to about 20% of the PEG-modified lipid on a molar basis, e.g., about 0.5 to about 10%, about 0.5 to about 5%, about 10%, about 5%, about 3.5%, about 3%, about 2.5%, about 2%, about 1.5%, about 1%, about 0.5%, or about 0.3% on a molar basis (based on 100% total moles of lipids in the LNP). In preferred embodiments, LNPs comprise from about 1.0% to about 2.0% of the PEG-modified lipid on a molar basis, e.g., about 1.2 to about 1.9%, about 1.2 to about 1.8%, about 1.3 to about 1.8%, about 1.4 to about 1.8%, about 1.5 to about 1.8%, about 1.6 to about 1.8%, in particular about 1.4%, about 1.5%, about 1.6%, about 1.7%, about 1.8%, about 1.9%, most preferably 1.7% (based on 100% total moles of lipids in the LNP). In various embodiments, the molar ratio of the cationic lipid to the PEGylated lipid ranges from about 100:1 to about 25:1.

[0552] In preferred embodiments, the LNP additionally comprises one or more additional lipids which stabilize the formation of particles during their formation (e.g. neutral lipid and/or one or more steroid or steroid analogue).

[0553] In preferred embodiments of the second aspect, the coding RNA of the first aspect is complexed with one or more lipids thereby forming lipid nanoparticles (LNP), wherein the LNP additionally comprises one or more neutral lipid and/or one or more steroid or steroid analogue.

[0554] Suitable stabilizing lipids include neutral lipids and anionic lipids. The term “neutral lipid” refers to any one of a number of lipid species that exist in either an uncharged or neutral zwitterionic form at physiological pH. Representative neutral lipids include diacylphosphatidylcholines, diacylphosphatidylethanolamines, ceramides, sphingomyelins, dihydro sphingomyelins, cephalins, and cerebrosides.

[0555] In embodiments of the second aspect, the LNP additionally comprises one or more neutral lipids, wherein the neutral lipid is selected from the group comprising distearoylphosphatidylcholine (DSPC), dioleoylphosphatidylcholine (DOPC), dipalmitoylphosphatidylcholine (DPPC), dioleoylphosphatidylglycerol (DOPG), dipalmitoylphosphatidylglycerol (DPPG), dioleoyl-phosphatidylethanolamine (DOPE), palmitoyloleoylphosphatidylcholine (POPC), palmitoyloleoyl-phosphatidylethanolamine (POPE) and dioleoyl-phosphatidylethanolamine 4-(N-maleimidomethyl)-cyclohexane-1carboxylate (DOPE-mal), dipalmitoyl phosphatidyl ethanolamine (DPPE), dimyristoylphosphoethanolamine (DMPE), distearoyl-phosphatidylethanolamine (DSPE), 16-O-monomethyl PE, 16-O-dimethyl PE, 18-1-trans PE, 1-stearioyl-2-oleoylphosphatidyethanol amine (SOPE), and 1,2-dielaidoyl-sn-glycero-3-phophoethanolamine (transDOPE), or mixtures thereof.

[0556] In some embodiments, the LNPs comprise a neutral lipid selected from DSPC, DPPC, DMPC, DOPC, POPC, DOPE and SM. In various embodiments, the molar ratio of the cationic lipid to the neutral lipid ranges from about 2:1 to about 8:1.

[0557] In preferred embodiments of the second aspect, the neutral lipid is 1,2-distearoyl-sn-glycero-3-phosphocholine (DSPC). The molar ratio of the cationic lipid to DSPC may be in the range from about 2:1 to 8:1.

[0558] In preferred embodiments of the second aspect, the steroid is cholesterol. The molar ratio of the cationic lipid to cholesterol may be in the range from about 2:1 to 1:1.

[0559] In some embodiments, the cholesterol may be PEGylated.

[0560] The sterol can be about 10 mol % to about 60 mol % or about 25 mol % to about 40 mol % of the lipid particle. In one embodiment, the sterol is about 10, 15, 20, 25, 30, 35, 40, 45, 50, 55, or about 60 mol % of the total lipid present in the lipid particle. In another embodiment, the LNPs include from about 5% to about 50% on a molar basis of the sterol, e.g., about 15% to about 45%, about 20% to about 40%, about 48%, about 40%, about 38.5%, about 35%, about 34.4%, about 31.5% or about 31% on a molar basis (based upon 100% total moles of lipid in the lipid nanoparticle).

[0561] Preferably, lipid nanoparticles (LNPs) comprise: (a) at least one coding RNA of the first aspect, (b) a cationic lipid, (c) an aggregation reducing agent (such as polyethylene glycol (PEG) lipid or PEG-modified lipid), (d) optionally a non-cationic lipid (such as a neutral lipid), and (e) optionally, a sterol.

[0562] In some embodiments, the cationic lipids (as defined above), non-cationic lipids (as defined above), cholesterol (as defined above), and/or PEG-modified lipids (as defined above) may be combined at various relative molar ratios. For example, the ratio of cationic lipid to non-cationic lipid to cholesterol-based lipid to PEGylated lipid may be between about 30-60:20-35:20-30:1-15, or at a ratio of about 40:30:25:5, 50:25:20:5, 50:27:20:3, 40:30:20:10, 40:32:20:8, 40:32:25:3 or 40:33:25:2, or at a ratio of about 50:25:20:5, 50:20:25:5, 50:27:20:3 40:30:20:10, 40:30:25:5 or 40:32:20:8, 40:32:25:3 or 40:33:25:2, respectively.

[0563] In some embodiments, the LNPs comprise a lipid of formula (111), at least one coding RNA as defined herein, a neutral lipid, a steroid and a PEGylated lipid. In preferred embodiments, the lipid of formula (111) is lipid compound 111-3, the neutral lipid is DSPC, the steroid is cholesterol, and the PEGylated lipid is the compound of formula (IVa).

[0564] In a preferred embodiment of the second aspect, the LNP consists essentially of (i) at least one cationic lipid; (ii) a neutral lipid; (iii) a sterol, e.g., cholesterol; and (iv) a PEG-lipid, e.g. PEG-DMG or PEG-cDMA, in a molar ratio of about 20-60% cationic lipid:5-25% neutral lipid:25-55% sterol; 0.5-15% PEG-lipid.

[0565] In particularly preferred embodiments of the second aspect, the coding RNA of the first aspect and is complexed with one or more lipids thereby forming lipid nanoparticles (LNP), wherein the LNP essentially consists of

(i) at least one cationic lipid as defined herein, preferably a lipid of formula (111), more preferably lipid 111-3;
(ii) a neutral lipid as defined herein, preferably 1,2-distearoyl-sn-glycero-3-phosphocholine (DSPC);
(iii) a steroid or steroid analogue as defined herein, preferably cholesterol; and
(iv) a PEG-lipid as defined herein, e.g. PEG-DMG or PEG-cDMA, preferably a PEGylated lipid of formula (IVa), wherein (i) to (iv) are in a molar ratio of about 20-60% cationic lipid: 5-25% neutral lipid: 25-55% sterol; 0.5-15% PEG-lipid.

[0566] In one preferred embodiment, the lipid nanoparticle comprises: a cationic lipid with formula (111) and/or PEG lipid with formula (IV), optionally a neutral lipid, preferably 1,2-distearoyl-sn-glycero-3-phosphocholine (DSPC) and optionally a steroid, preferably cholesterol, wherein the molar ratio of the cationic lipid to DSPC is optionally in the range from about 2:1 to 8:1, wherein the molar ratio of the cationic lipid to cholesterol is optionally in the range from about 2:1 to 1:1.

[0567] In a particular preferred embodiment, the composition of the second aspect comprising the coding RNA of the first aspect comprises lipid nanoparticles (LNPs, LNP-III-3), which have a molar ratio of approximately 50:10:38.5:1.5, preferably 47.5:10:40.8:1.7 or more preferably 47.4:10:40.9:1.7 (i.e. proportion (mol %) of cationic lipid (preferably lipid 111-3), DSPC, cholesterol and PEG-lipid ((preferably PEG-lipid of formula (IVa) with n=49); solubilized in ethanol).

[0568] The total amount of RNA in the lipid nanoparticles may vary and is defined depending on the e.g. RNA to total lipid w/w ratio. In one embodiment of the invention the coding RNA to total lipid ratio is less than 0.06 w/w, preferably between 0.03 w/w and 0.04 w/w.

[0569] In some embodiments, the composition of the second aspect comprising the RNA of the first aspect comprises lipid nanoparticles (LNPs), which are composed of only three lipid components, namely imidazole cholesterol ester (ICE), 1,2-dioleoyl-sn-glycero-3-phosphoethanolamine (DOPE), and 1,2-dimyristoyl-sn-glycerol, methoxypolyethylene glycol (DMG-PEG-2K)

[0570] In various embodiments, the LNP as defined herein have a mean diameter of from about 50 nm to about 200 nm, from about 60 nm to about 200 nm, from about 70 nm to about 200 nm, from about 80 nm to about 200 nm, from about 90 nm to about 200 nm, from about 90 nm to about 190 nm, from about 90 nm to about 180 nm, from about 90 nm to about 170 nm, from about 90 nm to about 160 nm, from about 90 nm to about 150 nm, from about 90 nm to about 140 nm, from about 90 nm to about 130 nm, from about 90 nm to about 120 nm, from about 90 nm to about 100 nm, from about 70 nm to about 90 nm, from about 80 nm to about 90 nm, from about 70 nm to about 80 nm, or about 30 nm, 35 nm, 40 nm, 45 nm, 50 nm, 55 nm, 60 nm, 65 nm, 70 nm, 75 nm, 80 nm, 85 nm, 90 nm, 95 nm, 100 nm, 105 nm, 110 nm, 115 nm, 120 nm, 125 nm, 130 nm, 135 nm, 140 nm, 145 nm, 150 nm, 160 nm, 170 nm, 180 nm, 190 nm, or 200 nm and are substantially non-toxic. As used herein, the mean diameter may be represented by the z-average as determined by dynamic light scattering as commonly known in the art.

[0571] The polydispersity index (PDI) of the nanoparticles is typically in the range of 0.1 to 0.5. In a particular embodiment, a PDI is below 0.2. Typically, the PDI is determined by dynamic light scattering.

[0572] In another preferred embodiment of the invention the lipid nanoparticles have a hydrodynamic diameter in the range from about 50 nm to about 300 nm, or from about 60 nm to about 250 nm, from about 60 nm to about 150 nm, or from about 60 nm to about 120 nm, respectively.

[0573] In another preferred embodiment of the invention the lipid nanoparticles have a hydrodynamic diameter in the range from about 50 nm to about 300 nm, or from about 60 nm to about 250 nm, from about 60 nm to about 150 nm, or from about 60 nm to about 120 nm, respectively.

[0574] In embodiments where more than one or a plurality, e.g. 2, 3, 4, 5, 6, 7, 8, 9, 10, 11, 12, 13, 14, 15 of the RNAs of the first aspect are comprised in the composition, said more than one or said plurality e.g. 2, 3, 4, 5, 6, 7, 8, 9, 10, 11, 12, 13, 14, 15 of the RNAs may be complexed within one or more lipids thereby forming LNPs comprising more than one or a plurality, e.g. 2, 3, 4, 5, 6, 7, 8, 9, 10, 11, 12, 13, 14, 15 of different RNAs.

[0575] In embodiments, the LNPs described herein may be lyophilized in order to improve storage stability of the formulation and/or the RNA. In embodiments, the LNPs described herein may be spray dried in order to improve storage stability of the formulation and/or RNA. Lyoprotectants for lyophilization and or spray driying may be selected from trehalose, sucrose, mannose, dextran and inulin.

[0576] In one embodiment, a lipid nanoparticle as used in the invention comprises a cationic lipid, a steroid; a neutral lipid; and a polymer conjugated lipid, preferably a pegylated lipid. Preferably, the polymer conjugated lipid is a pegylated lipid or PEG-lipid. In a specific embodiment, lipid nanoparticles comprise a cationic lipid resembled by the cationic lipid COATSOME® SS-EC (former name: SS-33/4PE-15; NOF Corporation, Tokyo, Japan), in accordance with the following formula

[chemical structure]

[0577] As described further below, those lipid nanoparticles are termed “GN01”.

[0578] Furthermore, in a specific embodiment, the GN01 lipid nanoparticles comprise a neutral lipid being resembled by the structure 1,2-diphytanoyl-sn-glycero-3-phosphoethanolamine (DPhyPE):

[chemical structure]

[0579] Furthermore, in a specific embodiment, the GN01 lipid nanoparticles comprise a polymer conjugated lipid, preferably a pegylated lipid, being 1,2-dimyristoyl-rac-glycero-3-methoxypolyethylene glycol 2000 (DMG-PEG 2000) having the following structure:

[chemical structure]

As used in the art, “DMG-PEG 2000” is considered a mixture of 1,2-DMG PEG2000 and 1,3-DMG PEG2000 in ˜97:3 ratio.

[0580] Accordingly, GN01 lipid nanoparticles (GN01-LNPs) according to one of the preferred embodiments comprise a SS-EC cationic lipid, neutral lipid DPhyPE, cholesterol, and the polymer conjugated lipid (pegylated lipid) 1,2-dimyristoyl-rac-glycero-3-methoxypolyethylene glycol (PEG-DMG).

[0581] In a preferred embodiment, the GN01 LNPs comprise:

(a) cationic lipid SS-EC (former name: SS-33/4PE-15; NOF Corporation, Tokyo, Japan) at an amount of 45-65 mol %;
(b) cholesterol at an amount of 25-45 mol %;
(c) DPhyPE at an amount of 8-12 mol %; and
(d) PEG-DMG 2000 at an amount of 1-3 mol %;
each amount being relative to the total molar amount of all lipidic excipients of the GN01 lipid nanoparticles.

[0582] In a further preferred embodiment, the GN01 lipid nanoparticles as described herein comprises 59 mol % cationic lipid, 10 mol % neutral lipid, 29.3 mol % steroid and 1.7 mol % polymer conjugated lipid, preferably pegylated lipid. In a most preferred embodiment, the GN01 lipid nanoparticles as described herein comprise 59 mol % cationic lipid SS-EC, 10 mol % DPhyPE, 29.3 mol % cholesterol and 1.7 mol % DMG-PEG 2000.

[0583] The amount of the cationic lipid relative to that of the mRNA compound in the GN01 lipid nanoparticle may also be expressed as a weight ratio (abbreviated f.e. “m/m”). For example, the GN01 lipid nanoparticles comprise the mRNA compound at an amount such as to achieve a lipid to mRNA weight ratio in the range of about 20 to about 60, or about 10 to about 50. In other embodiments, the ratio of cationic lipid to nucleic acid or mRNA is from about 3 to about 15, such as from about 5 to about 13, from about 4 to about 8 or from about 7 to about 11. In a very preferred embodiment of the present invention, the total lipid/mRNA mass ratio is about 40 or 40, i.e. about 40 or 40 times mass excess to ensure mRNA encapsulation. Another preferred RNA/lipid ratio is between about 1 and about 10, about 2 and about 5, about 2 and about 4, or preferably about 3.

[0584] Further, the amount of the cationic lipid may be selected taking the amount of the nucleic acid cargo such as the mRNA compound into account. In one embodiment, the N/P ratio can be in the range of about 1 to about 50. In another embodiment, the range is about 1 to about 20, about 1 to about 10, about 1 to about 5. In one preferred embodiment, these amounts are selected such as to result in an N/P ratio of the GN01 lipid nanoparticles or of the composition in the range from about 10 to about 20. In a further very preferred embodiment, the N/P is 14 (i.e. 14 times mol excess of positive charge to ensure mRNA encapsulation).

[0585] A particularly preferred embodiment for a GN01 lipid nanoparticle of the present invention is given when 59 mol % cationic lipid COATSOME® SS-EC (former name: SS-33/4PE-15 as apparent from the examples section; NOF Corporation, Tokyo, Japan), 29.3 mol % cholesterol as steroid, 10 mol % DPhyPE as neutral lipid/phospholipid and 1.7 mol % DMG-PEG 2000 as polymer conjugated lipid. Said LNP composition is called herein and in the working examples “GN01”. SS-EC has a positive charge at pH 4 and a neutral charge at pH 7, which is advantageous for the LNPs and formulations/compositions of the present invention. A further inventive advantage connected with the use of DPhyPE is the high capacity for fusogenicity due to its bulky tails, whereby it is able to fuse at a high level with endosomal lipids. For “GN01”, N/P (lipid to mRNA mol ratio) preferably is 14 and total lipid/mRNA mass ratio preferably is 40 (m/m).

### Adjuvants:

[0586] According to further embodiments, the composition of the second aspect may comprise at least one adjuvant. Suitably, the adjuvant is preferably added to enhance the immunostimulatory properties of the composition.

[0587] The term “adjuvant” as used herein will be recognized and understood by the person of ordinary skill in the art, and is for example intended to refer to a pharmacological and/or immunological agent that may modify, e.g. enhance, the effect of other agents (herein: the effect of the coding RNA) or that may be suitable to support administration and delivery of the composition. The term “adjuvant” refers to a broad spectrum of substances. Typically, these substances are able to increase the immunogenicity of antigens. For example, adjuvants may be recognized by the innate immune systems and, e.g., may elicit an innate immune response (that is, a non-specific immune response). “Adjuvants” typically do not elicit an adaptive immune response. In the context of the invention, adjuvants may enhance the effect of the antigenic peptide or protein provided by the coding RNA. In that context, the at least one adjuvant may be selected from any adjuvant known to a skilled person and suitable for the present case, i.e. supporting the induction of an immune response in a subject, e.g. in a human subject.

[0588] Accordingly, the composition of the second aspect may comprise at least one adjuvant, wherein the at least one adjuvant may be suitably selected from any adjuvant provided in WO2016/203025. Adjuvants disclosed in any of the claims 2 to 17 of WO2016/203025, preferably adjuvants disclosed in claim 17 of WO2016/203025 are particularly suitable, the specific content relating thereto herewith incorporated by reference.

[0589] The composition of the second aspect may comprise, besides the components specified herein, at least one further component which may be selected from the group consisting of further antigens (e.g. in the form of a peptide or protein) or further antigen-encoding nucleic acids; a further immunotherapeutic agent; one or more auxiliary substances (cytokines, such as monokines, lymphokines, interleukins or chemokines); or any further compound, which is known to be immune stimulating due to its binding affinity (as ligands) to human Toll-like receptors; and/or an adjuvant nucleic acid, preferably an immunostimulatory RNA (isRNA), e.g. CpG-RNA etc.

### Vaccine:

[0590] In a third aspect, the present invention provides a Malaria vaccine wherein the vaccine comprises the coding RNA of the first aspect, and, optionally, the composition of the second aspect.

[0591] Notably, embodiments relating to the composition of the second aspect may likewise be read on and be understood as suitable embodiments of the vaccine of the third aspect. Also, embodiments relating to the vaccine of the third aspect may likewise be read on and be understood as suitable embodiments of the composition of the second aspect (comprising the RNA of the first aspect).

[0592] The term “vaccine” will be recognized and understood by the person of ordinary skill in the art, and is for example intended to be a prophylactic or therapeutic material providing at least one epitope or antigen, preferably an immunogen. In the context of the invention the antigen or antigenic function is provided by the inventive coding RNA of the first aspect (said RNA comprising a coding sequence encoding a antigenic peptide or protein derived from CSP) or the composition of the second aspect (comprising the RNA of the first aspect).

[0593] In preferred embodiments of the third aspect, the vaccine comprising the RNA of the first aspect or the composition of the second aspect, elicits an adaptive immune response, preferably an adaptive immune response against a malaria parasite.

[0594] In preferred embodiments of the third aspect, the vaccine comprising the RNA of the first aspect or the composition of the second aspect induces strong humoral and cellular immune responses, preferably strong CD4+ and CD8+ T-cell responses.

[0595] According to a preferred embodiment of the third aspect, the vaccine as defined herein may further comprise a pharmaceutically acceptable carrier and optionally at least one adjuvant as specified in the context of the second aspect.

[0596] Suitable adjuvants in that context may be selected from adjuvants disclosed in claim 17 of WO2016/203025.

[0597] In a preferred embodiment, the vaccine is a monovalent vaccine.

[0598] In embodiments the vaccine is a polyvalent vaccine comprising a plurality or at least more than one of the coding RNA species as defined in the context of the first aspect. Embodiments relating to a polyvalent composition as disclosed in the context of the second aspect may likewise be read on and be understood as suitable embodiments of the polyvalent vaccine of the third aspect.

[0599] The vaccine of the third aspect typically comprises a safe and effective amount of the coding RNA of the first aspect. As used herein, “safe and effective amount” means an amount of the coding RNA that is sufficient to significantly induce a positive modification of a disease or disorder related to an infection with a malaria parasite. At the same time, a “safe and effective amount” is small enough to avoid serious side-effects. In relation to the vaccine or composition of the present invention, the expression “safe and effective amount” preferably means an amount of the coding RNA that is suitable for stimulating the adaptive immune system in such a manner that no excessive or damaging immune reactions are achieved but, preferably, also no such immune reactions below a measurable level.

[0600] A “safe and effective amount” of the coding RNA of the composition or vaccine as defined above will furthermore vary in connection with the particular condition to be treated and also with the age and physical condition of the patient to be treated, the severity of the condition, the duration of the treatment, the nature of the accompanying therapy, of the particular pharmaceutically acceptable carrier used, and similar factors, within the knowledge and experience of the accompanying medical doctor. Moreover, the “safe and effective amount” of the coding RNA, the composition, the vaccine may depend from application route (intradermal, intramuscular), application device (jet injection, needle injection, microneedle patch) and/or complexation (protamine complexation or LNP encapsulation). Moreover, the “safe and effective amount” of the coding RNA, the composition, the vaccine may depend from the condition of the treated subject (infant, pregnant women, immunocompromised human subject etc.). Accordingly, the suitable “safe and effective amount” has to be adapted accordingly and will be chosen and defined by the skilled person.

[0601] In some embodiments, the “safe and effective amount” is a dose equivalent to an at least 2-fold, at least 4-fold, at least 10-fold, at least 100-fold, at least 1000-fold reduction in the standard of care dose of a recombinant Malaria protein vaccine, wherein the anti-antigenic polypeptide antibody titer produced in the subject is equivalent to an anti-antigenic polypeptide antibody titer produced in a control subject administered the standard of care dose of a recombinant Malaria protein vaccine, a purified Malaria protein vaccine, a live attenuated Malaria vaccine, an inactivated Malaria vaccine or a Malaria VLP vaccine. In some embodiments, the control is an anti-antigenic polypeptide antibody titer produced in a subject who has been administered a virus-like particle (VLP) vaccine comprising structural proteins of Malaria.

[0602] The vaccine can be used according to the invention for human medical purposes and also for veterinary medical purposes (mammals, vertebrates, avian species), as a pharmaceutical composition, or as a vaccine.

[0603] Accordingly, the pharmaceutically acceptable carrier as used herein preferably includes the liquid or non-liquid basis of the inventive vaccine. If the inventive vaccine is provided in liquid form, the carrier will be water, typically pyrogen-free water; isotonic saline or buffered (aqueous) solutions, e.g. phosphate, citrate etc. buffered solutions. Preferably, Ringer-Lactate solution is used as a liquid basis for the vaccine or the composition according to the invention as described in WO2006/122828, the disclosure relating to suitable buffered solutions incorporated herewith by reference.

[0604] The choice of a pharmaceutically acceptable carrier as defined herein is determined, in principle, by the manner, in which the pharmaceutical composition(s) or vaccine according to the invention is administered. The vaccine is preferably administered locally. Routes for local administration in general include, for example, topical administration routes but also intradermal, transdermal, subcutaneous, or intramuscular injections or intralesional, intracranial, intrapulmonal, intracardial, intraarticular and sublingual injections. More preferably, composition or vaccines according to the present invention may be administered by an intradermal, subcutaneous, or intramuscular route, preferably by injection, which may be needle-free and/or needle injection. Compositions/vaccines are therefore preferably formulated in liquid or solid form. The suitable amount of the vaccine or composition according to the invention to be administered can be determined by routine experiments, e.g. by using animal models. Such models include, without implying any limitation, rabbit, sheep, mouse, rat, dog and non-human primate models. Preferred unit dose forms for injection include sterile solutions of water, physiological saline or mixtures thereof. The pH of such solutions should be adjusted to about 7.4. Suitable carriers for injection include hydrogels, devices for controlled or delayed release, polylactic acid and collagen matrices.

[0605] The inventive vaccine or composition as defined herein can additionally comprise one or more auxiliary substances as defined above in order to further increase the immunogenicity. A synergistic action of the coding RNA contained in the inventive composition/vaccine and of an auxiliary substance, which may be optionally be co-formulated (or separately formulated) with the inventive vaccine or composition as described above, is preferably achieved thereby. Such immunogenicity increasing agents or compounds may be provided separately (not co-formulated with the inventive vaccine or composition) and administered individually.

[0606] Further additives which may be included in the inventive vaccine or composition are emulsifiers, such as for example, Tween; wetting agents, such as, for example, sodium lauryl sulfate; colouring agents; taste-imparting agents, pharmaceutical carriers; tablet-forming agents; stabilizers; antioxidants; preservatives.

### Kit or Kit of Parts, Application, Medical Uses, Method of Treatment:

[0607] In a fourth aspect, the present invention provides a kit or kit of parts, wherein the kit or kit of parts comprises the coding RNA of the first aspect, the composition of the second aspect (comprising said RNA), and/or the vaccine of the third aspect. In addition, the kit or kit of parts of the fourth aspect may comprise a liquid vehicle for solubilising, and/or technical instructions providing information on administration and dosage of the components.

[0608] The kit may further comprise additional components as described in the context of the composition of the second aspect, and/or the vaccine of the third aspect.

[0609] The technical instructions of said kit may contain information about administration and dosage and patient groups. Such kits, preferably kits of parts, may be applied e.g. for any of the applications or uses mentioned herein, preferably for the use of the coding RNA of the first aspect, the composition of the second aspect, or the vaccine of the third aspect, for the treatment or prophylaxis of an infection or diseases caused by a Malaria parasite or disorders related thereto. Preferably, the coding RNA of the first aspect, the composition of the second aspect, or the vaccine of the third aspect is provided in a separate part of the kit, wherein the coding RNA of the first aspect, the composition of the second aspect, or the vaccine of the third aspect is preferably lyophilised. The kit may further contain as a part a vehicle (e.g. buffer solution) for solubilising the coding RNA of the first aspect, the composition of the second aspect, or the vaccine of the fifth aspect.

[0610] In preferred embodiments, the kit or kit of parts as defined herein comprises Ringer lactate solution.

[0611] Any of the above kits may be used in a treatment or prophylaxis as defined herein. More preferably, any of the above kits may be used as a vaccine, preferably a vaccine against infections caused by a Malaria parasite as defined herein.

### Medical Use:

[0612] In a further aspect, the present invention relates to the first medical use of the coding RNA of the first aspect, the composition of the second aspect, the vaccine of the third aspect, or the kit or kit of parts of the fourth aspect.

[0613] Accordingly, the RNA of the first aspect, the composition of the second aspect, the vaccine of the third aspect, or the kit or kit of parts of the fourth aspect is for use as a medicament.

[0614] The present invention furthermore provides several applications and uses of the coding RNA of the first aspect, the composition of the second aspect, the vaccine of the third aspect, or the kit or kit of parts of the fourth aspect.

[0615] In particular, said RNA, composition, vaccine, or the kit or kit of parts may be used for human medical purposes and also for veterinary medical purposes, preferably for human medical purposes.

[0616] In particular, said RNA, composition, vaccine, or the kit or kit of parts is for use as a medicament for human medical purposes, wherein said RNA, composition, vaccine, or the kit or kit of parts may be particularly suitable for young infants, newborns, immunocompromised recipients, as well as pregnant and breast-feeding women and elderly people.

[0617] In yet another aspect, the present invention relates to the second medical use of the coding RNA of the first aspect, the composition of the second aspect, the vaccine of the third aspect, or the kit or kit of parts of the fourth aspect.

[0618] In embodiments, the RNA of the first aspect, the composition of the second aspect, the vaccine of the third aspect, or the kit or kit of parts of the fourth aspect is for use in the treatment or prophylaxis of an infection with a pathogen (e.g. a protozoan parasite), in particular with a Malaria parasite, or a disorder related to such an infection.

[0619] In embodiments, the RNA of the first aspect, the composition of the second aspect, the vaccine of the third aspect, or the kit or kit of parts of the fourth aspect is for use in the treatment or prophylaxis of an infection with a Malaria parasite, in particular with Plasmodium falciparum (Pf), Plasmodium knowlesi (Pk), Plasmodium ovale (Po), Plasmodium simiovale (Ps), and Plasmodium vivax (Pv), Plasmodium malariae (Pm), Plasmodium ovale curtisi (Poc), Plasmodium ovale wallikeri (Pow), or Plasmodium berghei (Pb).

[0620] In preferred embodiments, the RNA of the first aspect, the composition of the second aspect, the vaccine of the third aspect, or the kit or kit of parts of the fourth aspect is for use in the treatment or prophylaxis of an infection with Plasmodium falciparum (Pf).

[0621] In particular, the RNA of the first aspect, the composition of the second aspect, the vaccine of the third aspect, or the kit or kit of parts of the fourth aspect may be used in the treatment or prophylaxis of an infection with a Malaria parasite, in particular with Plasmodium falciparum (Pf), Plasmodium knowlesi (Pk), Plasmodium ovale (Po), Plasmodium simiovale (Ps), and Plasmodium vivax (Pv), Plasmodium malariae (Pm), Plasmodium ovale curtisi (Poc), Plasmodium ovale wallikeri (Pow), or Plasmodium berghei (Pb), or a disorder related to such an infection, for human and also for veterinary medical purposes, preferably for human medical purposes.

[0622] As used herein, “a disorder related to a Malaria infection” may preferably comprise a typical symptom or a complication of a Malaria infection.

[0623] Particularly, the coding RNA of the first aspect, the composition of the second aspect, the vaccine of the third aspect, or the kit or kit of parts of the fourth aspect may be used in a method of prophylactic (pre-exposure prophylaxis or post-exposure prophylaxis) and/or therapeutic treatment of infections caused by a Malaria parasite.

[0624] The composition or the vaccine as defined herein may preferably be administered locally. In particular, composition or vaccines may be administered by an intradermal, subcutaneous, intranasal, or intramuscular route. Inventive compositions or vaccines of the invention are therefore preferably formulated in liquid (or sometimes in solid) form. In embodiments, the inventive vaccine may be administered by conventional needle injection or needle-free jet injection. Preferred in that context is the RNA, the composition, the vaccine is administered by intramuscular needle injection.

[0625] The term “jet injection”, as used herein, refers to a needle-free injection method, wherein a fluid (vaccine, composition of the invention) containing e.g. at least one RNA of the first aspect is forced through an orifice, thus generating an ultra-fine liquid stream of high pressure that is capable of penetrating mammalian skin and, depending on the injection settings, subcutaneous tissue or muscle tissue. In principle, the liquid stream perforates the skin, through which the liquid stream is pushed into the target tissue. Preferably, jet injection is used for intradermal, subcutaneous or intramuscular injection of the RNA, the compositions, the vaccines disclosed herein.

[0626] In embodiments, the RNA as comprised in a composition or vaccine as defined herein is provided in an amount of about 100 ng to about 500 ug, in an amount of about 1 ug to about 200 ug, in an amount of about 1 ug to about 100 ug, in an amount of about 5 ug to about 100 ug, preferably in an amount of about bug to about 50 ug, specifically, in an amount of about 5 ug, 10ug, 15 ug, 20 ug, 25 ug, 30 ug, 35 ug, 40 ug, 45 ug, 50 ug, 55 ug, 60 ug, 65 ug, 70 ug, 75 ug, 80 ug, 85 ug, 90 ug, 95 ug or 100 ug.

[0627] In some embodiments, vaccine comprising the coding RNA is formulated in an effective amount to produce an antigen specific immune response in a subject. In some embodiments, the effective amount is a total dose of 1 ug to 200 ug, 1 ug to 100 ug, or 5 ug to 100 ug.

[0628] In some embodiments, the subject is about 5 years old or younger. For example, the subject may be between the ages of about 1 year and about 5 years (e.g., about 1, 2, 3, 4 or 5 years), or between the ages of about 6 months and about 1 year (e.g., about 6, 7, 8, 9, 10, 11 or 12 months). In some embodiments, the subject is about 12 months or younger (e.g., 12, 11, 10, 9, 8, 7, 6, 5, 4, 3, 2 months or 1 month). In some embodiments, the subject is about 6 months or younger.

[0629] In some embodiments, the subject is an adult between the ages of about 20 years and about 50 years (e.g., about 20, 25, 30, 35, 40, 45 or 50 years old). In some embodiments, the subject is an elderly subject about 60 years old, about 70 years old, or older (e.g., about 60, 65, 70, 75, 80, 85 or 90 years old).

[0630] In some embodiments, the subject has been exposed to Malaria

[0631] Depending from application route (intradermal, intramuscular, intranasal), application device (jet injection, needle injection, microneedle patch) and/or complexation (preferably LNP encapsulation) and the patient group, the suitable amount has to be adapted accordingly and will be chosen and defined by the skilled person.

[0632] In one embodiment, the immunization protocol for the treatment or prophylaxis of a subject against Malaria comprises one single doses of the composition or the vaccine.

[0633] In some embodiments, the effective amount is a dose of 5 ug administered to the subject in one vaccination. In some embodiments, the effective amount is a dose of bug administered to the subject in one vaccination. In some embodiments, the effective amount is a dose of 20 ug administered to the subject in one vaccination. In some embodiments, the effective amount is a dose of 30 ug administered to the subject in one vaccination. In some embodiments, the effective amount is a dose of 40 ug administered to the subject in one vaccination. In some embodiments, the effective amount is a dose of 50 ug administered to the subject in one vaccination. In some embodiments, the effective amount is a dose of 100 ug administered to the subject in one vaccination. In some embodiments, the effective amount is a dose of 200 ug administered to the subject in one vaccination.

[0634] In preferred embodiments, the immunization protocol for the treatment or prophylaxis of an infection as defined herein, i.e. the immunization of a subject against Malaria, typically comprises a series of single doses or dosages of the composition or the vaccine. A single dosage, as used herein, refers to the initial/first dose, a second dose or any further doses, respectively, which are preferably administered in order to “boost” the immune reaction.

[0635] In preferred embodiments, the immunization protocol for the treatment or prophylaxis of an infection as defined herein, i.e. the immunization of a subject against Malaria, comprises a prolonged injection interval between the first (prime) immunization and the second (boost) immunization.

[0636] The inventors could show that a prolonged interval between prime and boost vaccination may lead to increased humoral immune responses (see e.g. Example 12).

[0637] In further preferred embodiments, the immunization protocol for the treatment or prophylaxis of an infection as defined herein, comprises a prolonged injection interval between the first (prime) immunization at day 0 and the second (boost) immunization at day 56.

[0638] In some embodiments, the effective amount is a dose of 5 ug administered to the subject a total of two times. In some embodiments, the effective amount is a dose of 10 ug administered to the subject a total of two times. In some embodiments, the effective amount is a dose of 20 ug administered to the subject a total of two times. In some embodiments, the effective amount is a dose of 30 ug administered to the subject a total of two times. In some embodiments, the effective amount is a dose of 40 ug administered to the subject a total of two times. In some embodiments, the effective amount is a dose of 50 ug administered to the subject a total of two times. In some embodiments, the effective amount is a dose of 100 ug administered to the subject a total of two times. In some embodiments, the effective amount is a dose of 200 ug administered to the subject a total of two times.

[0639] In preferred embodiments, the vaccine/composition immunizes the subject against Malaria (e.g., P. falciparum, P. vivax, P. malariae and/or P. ovale) for more than 2 years, more than 3 years, more than 4 years, or for 5-10 years.

### Method of Treatment and Use, Diagnostic Method and Use:

[0640] In another aspect, the present invention relates to a method of treating or preventing a disorder.

[0641] In preferred embodiments, the present invention relates to a method of treating or preventing a disorder, wherein the method comprises applying or administering to a subject in need thereof the RNA of the first aspect, the composition of the second aspect, the vaccine of the third aspect, or the kit or kit of parts of the fourth aspect.

[0642] In preferred embodiments, the disorder is an infection with a Malaria parasite, in particular with Plasmodium falciparum (Pf), Plasmodium knowlesi (Pk), Plasmodium ovale (Po), Plasmodium simiovale (Ps), and Plasmodium vivax (Pv), Plasmodium malariae (Pm), Plasmodium ovale curtisi (Poc), Plasmodium ovale wallikeri (Pow), or Plasmodium berghei (Pb), or a disorder related to such infections.

[0643] In preferred embodiments, the present invention relates to a method of treating or preventing a disorder as defined above, wherein the method comprises applying or administering to a subject in need thereof the coding RNA of the first aspect, the composition of the second aspect, the vaccine of the third aspect, or the kit or kit of parts of the fourth aspect, wherein the subject in need is preferably a mammalian subject. In particularly preferred embodiments, the mammalian subject is a human subject, particularly an infant, a newborn, a pregnant women, a breast-feeding woman, an elderly, or an immunocompromised human subject.

[0644] In particular, such a method may preferably comprise the steps of:
[0645] a) providing the coding RNA of the first aspect, the composition of the second aspect, the vaccine of the third aspect, or the kit or kit of parts of the fourth aspect;
[0646] b) applying or administering said RNA of the first aspect, composition of the second aspect, vaccine of the third aspect, or kit or kit of parts of the fourth aspect to a tissue or an organism;
[0647] c) optionally, administering immunoglobulin (IgGs) against a Malaria parasite;
[0648] d) optionally, administering a further substance (adjuvant, auxiliary substance, further antigen, vaccine).

[0649] According to a further aspect, the present invention also provides a method for expression of at least one polypeptide comprising at least one peptide or protein derived from a Malaria parasite, or a fragment or variant thereof, wherein the method preferably comprises the following steps:
[0650] a) providing the coding RNA of the first aspect or the composition of the second aspect; and
[0651] b) applying or administering said coding RNA or composition to an expression system (cells), a tissue, an organism.

[0652] The method may be applied for laboratory, for research, for diagnostic, for commercial production of peptides or proteins and/or for therapeutic purposes. The method may furthermore be carried out in the context of the treatment of a specific disease, particularly in the treatment of infectious diseases, particularly Malaria infections.

[0653] Likewise, according to another aspect, the present invention also provides the use of the coding RNA of the first aspect, the composition of the second aspect, the vaccine of the third aspect, or the kit or kit of parts of the fourth aspect preferably for diagnostic or therapeutic purposes, e.g. for expression of an encoded Malaria antigenic peptide or protein, e.g. by applying or administering said coding RNA, composition comprising said coding RNA, vaccine comprising said coding RNA, e.g. to a cell-free expression system, a cell (e.g. an expression host cell or a somatic cell), a tissue or an organism. In specific embodiments, applying or administering said coding RNA, composition comprising said coding RNA, vaccine comprising said coding

[0654] RNA to a tissue or an organism is followed by e.g. a step of obtaining induced Malaria antibodies e.g. Malaria specific (monoclonal) antibodies.

[0655] The use may be applied for a (diagnostic) laboratory, for research, for diagnostics, for commercial production of peptides, proteins, or Malaria antibodies and/or for therapeutic purposes. The use may be carried out in vitro, in vivo or ex vivo. The use may furthermore be carried out in the context of the treatment of a specific disease, particularly in the treatment of a Malaria infection or a related disorder.

### List of Preferred Embodiments/Items

[0656] In the following, particularly preferred embodiments (items 1-58) of the invention are provided.

### Items

[0657] 1. A coding RNA for a vaccine comprising
   [0658] a) at least one heterologous 5′ untranslated region (5′-UTR) and/or at least one heterologous 3′ untranslated region (3′-UTR); and
   [0659] b) at least one coding sequence operably linked to said 3′-UTR and/or 5′-UTR encoding at least one antigenic protein derived from circumsporozoite protein (CSP) of a Malaria parasite, or an immunogenic fragment or immunogenic variant thereof:
[0660] 2. Coding RNA of items 1, wherein the Malaria parasite is selected from Plasmodium falciparum (Pf), Plasmodium knowlesi (Pk), Plasmodium ovale (Po), Plasmodium simiovale (Ps), or Plasmodium vivax (Pv).
[0661] 3. Coding RNA of items 1 or 2, wherein the Malaria parasite is Plasmodium falciparum (Pf), preferably Plasmodium falciparum 3D7.
[0662] 4. Coding RNA of any one of items 1 to 3, wherein the coding sequence encodes at least one antigenic protein from CSP of a Malaria parasite being identical or at least 70%, 80%, 85%, 86%, 87%, 88%, 89%, 90%, 91%, 92%, 93%, 94%, 95%, 96%, 97%, 98%, or 99% identical to any one of SEQ ID NOs: 1-36, 2081-2120, 2481-2886, 8742-8753, 10080-10085, or of an immunogenic fragment or immunogenic variant thereof.
[0663] 5. Coding RNA of any one of items 1 to 4, wherein the coding sequence encodes at least a more full-length CSP or an immunogenic fragment or immunogenic variant thereof.
[0664] 6. Coding RNA of any one of items 1 to 5, wherein the coding sequence additionally encodes at least one heterologous peptide or protein element selected from a heterologous signal peptide, a linker, a helper epitope, an antigen clustering domain, or a transmembrane domain.
[0665] 7. Coding RNA of item 6, wherein the heterologous signal peptide is derived from SPARC according to SEQ ID NO: 6208, Hslns-iso1 according to SEQ ID NO: 6207, HsALB according to SEQ ID NO: 6205, or IgE according to SEQ ID NO: 6206, or fragment or variant of any of these, wherein HsALB is particularly preferred.
[0666] 8. Coding RNA of item 6, wherein the linker element is element (L) is selected from SEQ ID NOs: 6241-6244, 10141, 10147.
[0667] 9. Coding RNA of item 8, wherein the at least one linker element combines at least CSP-derived T-cell epitope preferably selected from sequences according to SEQ ID NOs: 2100, 2101, 2102, 2113, 10083, 10084 with a fragment of CSP and/or wherein the fragment of CSP is preferably combined with a C-terminus according to _Linker(AAY)_Pf-CSP(310-327)_Linker(AAY)_Pf-CSP(346-375), Linker(AAY)_Pf-CSP(346-365)_Linker(AAY)_PADRE, _Linker(AAY)_Pf-CS P(310-327)_Linker(AAY)_Pf-CSP(346-375), _Linker(G4S)_Pf-CSP(310-327)_Pf-CSP(346-375), _Linker(G4S)_Pf-CSP(310-327)_Linker(G4S)_Pf-CSP(346-375).
[0668] 10. Coding RNA of item 6, wherein the helper epitope is derived from P2 helper peptide according to SEQ ID NO: 6272, PADRE helper epitope according to SEQ ID NO: 6273, HBsAg according to SEQ ID NO: 6274, or fragment or variant of any of these.
[0669] 11. Coding RNA of item 6, wherein the antigen clustering domain is derived from from ferritin according to SEQ ID NO: 10162, lumazine-synthase (LS) according to SEQ ID NO: 10153, surface antigen of hepatitis B virus (HBsAg) according to SEQ ID NO: 6274, or fragment or variant of any of these.
[0670] 12. Coding RNA of item 6, wherein the transmembrane domain is derived from a transmembrane domain of HA according to SEQ ID NOs: 6302, or fragment or variant thereof.
[0671] 13. Coding RNA of any one of the preceding items, wherein the at least one antigenic protein comprises, preferably in N-terminal to C-terminal direction:
   [0672] a) optionally, one heterologous secretory signal sequence selected from SEQ ID NOs: 6205-6208;
   [0673] b) at least one protein derived from CSP of a Malaria parasite, or fragments or variants thereof;
   [0674] c) optionally, at least one heterologous helper epitope selected from SEQ ID NOs: 6272, 6273, or 6274or fragments or variants thereof;
   [0675] d) optionally, at least one heterologous antigen clustering domain selected from SEQ ID NOs: 6274, 10153, 10162, or fragments or variants thereof, and
   [0676] e) optionally, at least one heterologous transmembrane domain selected from SEQ ID NOs: 6302 or fragments or variants thereof,
   [0677] wherein a), b), c), d) and/or e) may be connected preferably via at least one peptide linker element selected from SEQ ID NOs: 6241-6244, 10141, 10147.
[0678] 14. Coding RNA of any one of the preceding items, wherein the at least one antigenic protein derived from circumsporozoite protein (CSP) of a Malaria parasite, or an immunogenic fragment or immunogenic variant thereof, is mutated to delete at least one predicted or potential glycosylation site.
[0679] 15. Coding RNA of any one of the preceding items, wherein the at least one coding sequence encodes at least one of the amino acid sequences being identical or at least 70%, 80%, 85%, 86%, 87%, 88%, 89%, 90%, 91%, 92%, 93%, 94%, 95%, 96%, 97%, 98%, or 99% identical to any one of SEQ ID NOs: 1-36, 2081-2120, 2481-2886, 8742-8753, 10080, or an immunogenic fragment or immunogenic variant of any of these.
[0680] 16. Coding RNA of any one of the preceding items, wherein the at least one coding sequence comprises at least one nucleic acid sequence being identical or at least 70%, 80%, 85%, 86%, 87%, 88%, 89%, 90%, 91%, 92%, 93%, 94%, 95%, 96%, 97%, 98%, or 99% identical to any one of SEQ ID NOs: 37-328, 2121-2480, 2887-6134, 8754-8855, 10086-10139 or a fragment or variant of any of these sequences.
[0681] 17. Coding RNA of any one of the preceding items, wherein the least one coding sequence comprises at least one chemical modification or at least one modified nucleotide, preferably selected from pseudouridine (ψ), N1-methylpseudouridine (m1ψ), 5-methylcytosine, and 5-methoxyuridine.
[0682] 18. Coding RNA of any one of the preceding items, wherein the at least one coding sequence is a codon modified coding sequence, wherein the amino acid sequence encoded by the at least one codon modified coding sequence is preferably not being modified compared to the amino acid sequence encoded by the corresponding wild type coding sequence.
[0683] 19. Coding RNA according to item 18, wherein the at least one codon modified coding sequence is selected from C maximized coding sequence, CAI maximized coding sequence, human codon usage adapted coding sequence, G/C content modified coding sequence, and G/C optimized coding sequence, or any combination thereof.
[0684] 20. Coding RNA of items 18 or 19, wherein the at least one coding sequence comprises a codon modified coding sequence comprising a nucleic acid sequence being identical or at least 70%, 80%, 85%, 86%, 87%, 88%, 89%, 90%, 91%, 92%, 93%, 94%, 95%, 96%, 97%, 98%, or 99% identical to any one SEQ ID NOs: 41-328, 2161-2480, 3293-6134, 8754-8855, 10092-10139 or a fragment or variant of any of these sequences.
[0685] 21. Coding RNA of any one of items 18 to 20, wherein the at least one coding sequence comprises a codon modified coding sequence comprising a nucleic acid sequence being identical or at least 70%, 80%, 85%, 86%, 87%, 88%, 89%, 90%, 91%, 92%, 93%, 94%, 95%, 96%, 97%, 98%, or 99% identical to any one of SEQ ID NOs: 41-328, 8754-8855 or a fragment or variant of any of these sequences.
[0686] 22. Coding RNA of any one of items 18 to 121, wherein the at least one coding sequence comprises a G/C optimized coding sequence comprising a nucleic acid sequence being identical or at least 70%, 80%, 85%, 86%, 87%, 88%, 89%, 90%, 91%, 92%, 93%, 94%, 95%, 96%, 97%, 98%, or 99% identical to any one of SEQ ID NOs: 41-112, 2161-2240, 3293-3698, 8754-8783, 10092-10103 or a fragment or variant of any of these sequences.
[0687] 23. Coding RNA of any one of the preceding items, wherein the coding RNA is an mRNA, a self-replicating RNA, a circular RNA, or a replicon RNA.
[0688] 24. Coding RNA of any one of the preceding items, wherein the coding RNA is an mRNA.
[0689] 25. Coding RNA of any one of the preceding items, wherein the coding RNA comprises a 5′-cap structure, preferably m7G, cap0, cap1, cap2, a modified cap0 or a modified cap1 structure, wherein cap1 is preferred.
[0690] 26. Coding RNA of any one of the preceding items, wherein the RNA comprises at least one poly(A) sequence, preferably comprising 30 to 150 adenosine nucleotides and/or at least one poly(C) sequence, preferably comprising 10 to 40 cytosine nucleotides, wherein a poly(A) sequences with about 64 adenosine nucleotides (A64) or about 100 adenosine nucleotides (A100) are preferred.
[0691] 27. Coding RNA of any one of the preceding items, wherein the RNA comprises at least one poly(A) sequence located (exactly) at the 3′ terminus of the coding RNA.
[0692] 28. Coding RNA of any one of the preceding items, wherein the RNA comprises at least one histone stem-loop, wherein the histone stem-loop preferably comprises a nucleic acid sequence according to SEQ ID NOs: 6173 or 6174 or a fragment or variant thereof.
[0693] 29. Coding RNA of any one of the preceding items, wherein the at least one heterologous 3′-UTR comprises a nucleic acid sequence derived from a 3′-UTR of a gene selected from PSMB3, ALB7, alpha-globin, CASP1, COX6B1, GNAS, NDUFA1 and RPS9, or from a homolog, a fragment or a variant of any one of these genes.
[0694] 30. Coding RNA of any one of the preceding items, wherein the at least one heterologous 5′-UTR comprises a nucleic acid sequence derived from a 5′-UTR of a gene selected from HSD17B4, RPL32, ASAH1, ATP5A1, MP68, NDUFA4, NOSIP, RPL31, SLC7A3, TUBB4B and UBQLN2, or from a homolog, a fragment or variant of any one of these genes.
[0695] 31. Coding RNA of any one of the preceding items, comprising
   [0696] a-1. at least one 5′-UTR derived from a 5′-UTR of a HSD17B4 gene, or from a corresponding RNA sequence, homolog, fragment or variant thereof and at least one 3′-UTR derived from a 3′-UTR of a PSMB3 gene, or from a corresponding RNA sequence, homolog, fragment or variant thereof; or
   [0697] a-3. at least one 5′-UTR derived from a 5′-UTR of a SLC7A3 gene, or from a corresponding RNA sequence, homolog, fragment or variant thereof and at least one 3′-UTR derived from a 3′-UTR of a PSMB3 gene, or from a corresponding RNA sequence, homolog, fragment or variant thereof; or
   [0698] i-2. at least one 5′-UTR derived from a 5′-UTR of a RPL32 gene, or from a corresponding RNA sequence, homolog, fragment or variant thereof and at least one 3′-UTR derived from a 3′-UTR of a ALB7 gene, or from a corresponding RNA sequence, homolog, fragment or variant thereof; or
   [0699] i-3. at least one 3′-UTR derived from a 3′-UTR of a alpha-globin gene gene, or from a corresponding RNA sequence, homolog, fragment or variant thereof.
[0700] 32. Coding RNA of any one of the preceding items, wherein the coding RNA comprises the following elements preferably in 5′- to 3′-direction:
   [0701] A) 5′-cap structure selected from m7G(5′), m7G(5′)ppp(5′)(2′OMeA), or m7G(5′)ppp(5′)(2′OMeG);
   [0702] B) 5′-terminal start element selected from SEQ ID NOs: 6177 or 6178 or fragments or variants thereof;
   [0703] C) optionally, a cleavage site for a catalytic nucleic acid molecule, preferably as specified herein;
   [0704] D) optionally, 5′-UTR selected from SEQ ID NOs: 6135-6156 or fragments or variants thereof;
   [0705] F) a ribosome binding site selected from SEQ ID NOs: 6175, 6176 or fragments or variants thereof;
   [0706] E) at least one coding sequence selected from SEQ ID NOs: 37-328, 2121-2480, 2887-6134, 8754-8855, 10086-10139 or fragments or variants thereof;
   [0707] F) 3′-UTR selected from SEQ ID NOs: 6157 to 6172;
   [0708] G) optionally, poly(A) sequence comprising about 50 to about 500 adenosines;
   [0709] H) optionally, poly(C) sequence comprising about 10 to about 100 cytosines;
   [0710] I) optionally, histone stem-loop selected from SEQ ID NOs: 6173 or 6174;
   [0711] J) optionally, 3″-terminal sequence element SEQ ID NOs: 6179-6200, 10173-10196.
[0712] 33. Coding RNA of any one of the preceding items, wherein the coding RNA comprises the following elements preferably in 5′- to 3′-direction:
   [0713] A) 5′-cap structure selected from m7G(5′), m7G(5′)ppp(5′)(2′OMeA), or m7G(5′)ppp(5′)(2′OMeG);
   [0714] B) 5′-terminal start element selected from SEQ ID NOs: 6177 or 6178 or fragments or variants thereof;
   [0715] C) 3′-UTR and/or 5′-UTR element according to a-1, a-2, a-3, a-4, a-5, b-1, b-2, b-3, b-4, b-5, c-1, c-2, c-3, c-4, c-5, d-1, d-2, d-3, d-4, d-5, e-1, e-2, e-3, e-4, e-5, e-6, f-1, f-2, f-3, f-4, f-5, g-1, g- 2, g-3, g-4, g-5, h-1, h-2, h-3, h-4, h-5, i-1, i-2, or i-3, as specified herein, wherein a-1, a-3, i-2, i-3 are preferred;
   [0716] D) a ribosome binding site selected from SEQ ID NOs: 6175, 6176 or fragments or variants thereof;
   [0717] E) at least one coding sequence selected from SEQ ID NOs: 37-328, 8754-8855 or fragments or variants thereof;
   [0718] G) poly(A) sequence comprising about 50 to about 500 adenosines, preferably about 64 or 100 adenosines;
   [0719] H) optionally, poly(C) sequence comprising about 10 to about 100 cytosines, preferably about 30 cytosines;
   [0720] I) optionally, histone stem-loop selected from SEQ ID NOs: 6173 or 6174.
[0721] 34. Coding RNA of any one of the preceding items, wherein the coding RNA comprises the following elements preferably in 5′- to 3′-direction:
   [0722] A) 5′-cap structure selected from m7G(5′), m7G(5′)ppp(5′)(2′OMeA), or m7G(5′)ppp(5′)(2′OMeG);
   [0723] B) 5′-terminal start element selected from SEQ ID NOs: 6177 or 6178 or fragments or variants thereof;
   [0724] C) 3′-UTR and/or 5′-UTR element according to a-1, a-3, i-2, i-3;
   [0725] D) a ribosome binding site selected from SEQ ID NOs: 6175, 6176 or fragments or variants thereof; E) at least one coding sequence selected from SEQ ID NOs: 44, 80, 116, 152, 188, 224, 260, 296, 8755 (HsALB_Pf-CSP(19-397)) or fragments or variants thereof;
   [0726] G) poly(A) sequence comprising about 50 to about 500 adenosines, preferably about 64 or 100 adenosines;
   [0727] H) optionally, poly(C) sequence comprising about 10 to about 100 cytosines, preferably about 30 cytosines;
   [0728] I) optionally, histone stem-loop selected from SEQ ID NOs: 6173 or 6174.
[0729] 35. Coding RNA of any one of the preceding items, wherein the coding RNA comprises or consists of an RNA sequence which is identical or at least 70%, 80%, 85%, 86%, 87%, 88%, 89%, 90%, 91%, 92%, 93%, 94%, 95%, 96%, 97%, 98%, or 99% identical to a nucleic acid sequence selected from the group consisting of SEQ ID NOs: 329-2080, 6312-8741, 8856-10079, or a fragment or variant of any of these sequences.
[0730] 36. A composition comprising at least one coding RNA as defined in any one of items 1 to 35, wherein the composition optionally comprises at least one pharmaceutically acceptable carrier.
[0731] 37. Composition of item 36, wherein the at least one coding RNA is complexed or associated with or at least partially complexed or partially associated with one or more cationic or polycationic compound, preferably cationic or polycationic polymer, cationic or polycationic polysaccharide, cationic or polycationic lipid, cationic or polycationic protein, cationic or polycationic peptide, or any combinations thereof.
[0732] 38. Composition of item 37, wherein the at least one coding RNA is complexed or associated with one or more lipids, thereby forming liposomes, lipid nanoparticles, lipoplexes, and/or nanoliposomes.
[0733] 39. Composition of item 38, wherein the at least one coding RNA is complexed with one or more lipids thereby forming lipid nanoparticles (LNP).
[0734] 40. Composition of item 39, wherein the LNP essentially consists of
   [0735] (i) at least one cationic lipid;
   [0736] (ii) at least one neutral lipid;
   [0737] (iii) at least one steroid or steroid analogue; and
   [0738] (iv) at least one a PEG-lipid,
   [0739] wherein (i) to (iv) are in a molar ratio of about 20-60% cationic lipid, 5-25% neutral lipid, 25-55% sterol, and 0.5-15% PEG-lipid.
[0740] 41. Composition of item 40, wherein the LNP comprises a cationic lipid according to formula III-3:

[chemical structure]

[0741] 42. Composition of any one of items 40 to 41, wherein the LNP comprises a PEG lipid, wherein the PEG-lipid is of formula (IVa):

[chemical structure]

[0742] wherein n has a mean value ranging from 30 to 60, preferably wherein n has a mean value of about 45, 46, 47, 48, 49, 50, 51, 52, 53, 54, most preferably wherein n has a mean value of 49.
[0743] 44. Composition of any one of items 40 to 43, wherein the LNP comprises one or more neutral lipids and/or one or more steroid or steroid analogues.
[0744] 45. Composition of item 44, wherein the neutral lipid is 1,2-distearoyl-sn-glycero-3-phosphocholine (DSPC), preferably wherein the molar ratio of the cationic lipid to DSPC is in the range from about 2:1 to about 8:1.
[0745] 46. Composition of item 44, wherein the steroid is cholesterol, preferably wherein the molar ratio of the cationic lipid to cholesterol is in the range from about 2:1 to about 1:1
[0746] 47. Composition of item 40, wherein the LNP comprises COATSOME® SS-EC.
[0747] 48. Composition of any one of items 40 and 47, wherein the LNP comprises a PEG lipid, wherein the PEG-lipid is DMG-PEG 2000.
[0748] 49. Composition of any one of items 40 and 47 to 48, wherein the LNP further comprises 1,2-diphytanoyl-sn-glycero-3-phosphoethanolamine (DPhyPE) and cholesterol.
[0749] 50. Composition of items 40 to 49, wherein the LNPs are preferably selected from LNP-GN01 or LNP-III-3.
[0750] 51. A vaccine comprising the coding RNA as defined in any one of items 1 to 35, or the composition as defined in any one of items 36 to 50.
[0751] 52. Vaccine of item 51, wherein the vaccine elicits an adaptive immune response.
[0752] 53. A Kit or kit of parts, comprising the coding RNA as defined in any one of items 1 to 35, the composition as defined in any one of items 36 to 50, and/or the vaccine as defined in any one of items 51 to 52, optionally comprising a liquid vehicle for solubilising, and, optionally, technical instructions providing information on administration and dosage of the components.
[0753] 54. Coding RNA as defined in any one of items 1 to 35, the composition as defined in any one of items 36 to 50, the vaccine as defined in any one of items 51 to 52, or the kit or kit of parts as defined in item 53, for use as a medicament.
[0754] 55. Coding RNA as defined in any one of items 1 to 35, the composition as defined in any one of items 36 to 50, the vaccine as defined in any one of items 51 to 52, or the kit or kit of parts as defined in item 53, for use in the treatment or prophylaxis of Malaria, or of a disorder related to such an infection.
[0755] 56. A method of treating or preventing a disorder, wherein the method comprises applying or administering to a subject in need thereof the coding RNA as defined in any one of items 1 to 35, the composition as defined in any one of items 36 to 50, the vaccine as defined in any one of items 51 to 52, or the kit or kit of parts as defined in items 53.
[0756] 57. Method of item 56, wherein the disorder is an infection with Malaria, or a disorder related to such an infection.
[0757] 58. Method of items 56 to 57, wherein the subject in need is a mammalian subject, preferably a human subject.

### Brief Description of Lists and Tables

[0758] List 1: Malaria parasites/Plasmodium species and subspecies with respective NCBI Taxonomy IDs
List 2: NCBI Protein Accession numbers of suitable Malaria antigens
Table 1: Preferred CSP antigen designs
Table 2: Human codon usage table with frequencies indicated for each amino acid
Table A: CSP antigens and respective coding sequences
Table 3: CSP fragments and respective coding sequences
Table 4: Heterologous elements and respective coding sequences
Table 5: Preferred coding sequences of the invention
Table 6A: Preferred mRNA constructs encoding CSP
Table 6B: Preferred mRNA constructs encoding CSP
Table 7: Lipidoids suitable for the invention
Table 8: Representative lipid compounds derived from formula (III)
Table 9: mRNA constructs encoding CPS used in the present examples (see Examples section)
Table B: Overview of lipid nanoparticle composition of GN01-LNPs formulation
Table 10: Vaccination scheme of Example 2 (see Examples section)
Table C: CSP peptide mix for ICS
Table 11: Vaccination scheme of Example 3 (see Examples section)
Table 12: RNA constructs used for western blot analysis of Example 4 (see Examples section)
Table 13A: Vaccination scheme of Example 6
Table 13B: Vaccination scheme of Example 7
Table 14: Vaccination scheme of Example 8
Table 15: Vaccination scheme of Example 9
Table 16: Vaccination scheme of Example 10
Table 17: Vaccination scheme of Example 11
Table 18: Vaccination scheme of Example 12
Table 19: Vaccination scheme of Example 13
Table 20: RNA constructs used for western blot analysis
Table 21: Overview of mRNA constructs used in Example 15
Table 22: Overview of passive transfer analysis according Example 16.1.
Table 23: Vaccination scheme of Example 16.2.
Table 24: Example of Animal groups and vaccination schedule of Example 17

### BRIEF DESCRIPTION OF THE DRAWINGS

[0759] FIG. 1 shows that formulated mRNA encoding CSP induces humoral immune responses in mice, using an ELISA assay. FIG. 1A: IgG1 and IgG2a endpoint titers at day 21 post vaccination; FIG. 1B: IgG1 and IgG2a endpoint titers at day 42 post vaccination; FIG. 1C: IgG1 and IgG2a endpoint titers at 56 days post vaccination. Groups 1 and 2: LNP formulated vaccine; Group 3: NaCl 0.9%; Group 4: Protamine formulated vaccine. Vaccination scheme see Table 10. Further details provided in Example 2.

[0760] FIG. 2 shows that formulated mRNA encoding CSP induces binding CSP-specific antibody responses in mice, using a FACS based antibody detection assay. FIG. 2A: Positive cells at day 21 post vaccination; FIG. 2B: Positive cells at day 42 post vaccination; FIG. 2C: Positive cells at day 56 post vaccination. Groups 1 and 2: LNP formulated vaccine; Group 3: NaCl 0.9%; Group 4: Protamine formulated vaccine. Vaccination scheme see Table 10. Further details provided in Example 2.

[0761] FIG. 3 shows that formulated mRNA encoding CSP induces cellular immune responses in mice (CD8+ and/or CD4+ T-cell responses), using an intracellular cytokine staining assay (day 56 post vaccination). Groups 1 and 2: LNP formulated vaccine; Group 3: NaCl 0.9%; Group 4: Protamine formulated vaccine. Vaccination scheme see Table 10. Further details provided in Example 2.

[0762] FIG. 4 shows that LNP formulated mRNA encoding CSP induces humoral immune responses in mice, using an ELISA assay. IgG1 and IgG2 endpoint titers at day 21 post vaccination are shown. Groups A-C LNP formulated CSP mRNA; Group D LNP formulated RTS,S mRNA; Group E: negative control. Vaccination scheme see Table 11. Further details provided in Example 3.

[0763] FIG. 5 shows that LNP formulated mRNA encoding CSP induces humoral immune responses in mice, using an ELISA assay. IgG1 and IgG2 endpoint titers at day 35 post vaccination are shown. Groups A-C LNP formulated CSP mRNA; Group D LNP formulated RTS,S mRNA, Group E: negative control. Vaccination scheme see Table 11. Further details provided in Example 3.

[0764] FIG. 6 shows that LNP formulated mRNA encoding CSP induces cellular immune responses in mice (CD8+ and/or CD4+ T-cell responses), using an intracellular cytokine staining assay (day 35 post vaccination). Groups A-C LNP formulated CSP mRNA; Group D LNP formulated RTS,S mRNA, Group E: negative control. Vaccination scheme see Table 11. Further details provided in Example 3.

[0765] FIG. 7 shows that mRNA constructs encoding different CSP construct designs are expressed and secreted in mammalian cells using western blot analysis. A: R7111, B: R7641, C: R7642, D: R7643, E: R7647, F: R7649 and G: R7650; M=size ladder (see Table 12). Further details provided in Example 4.

[0766] FIG. 8 shows that formulated mRNA encoding CSP variants induces humoral immune responses in mice, using an ELISA assay. FIG. 8A: coating: [NANP]7 peptide; IgG1 and IgG2a endpoint titers at day 21 post vaccination; FIG. 8B: coating: [NANP]7 peptide; IgG1 and IgG2a endpoint titers at day 35 post vaccination; groups 1 and 2: LNP formulated CSP vaccine; group 3: NaCl buffer. Vaccination scheme see Table 13A. Further details provided in Example 6.

[0767] FIG. 9 shows that formulated mRNA encoding different CSP variants induces cellular immune responses in mice (CD8+ and/or CD4+ T-cell responses), using an intracellular cytokine staining assay. Groups 1 and 2: LNP formulated CSP vaccine; Group 3: NaCl buffer. Vaccination scheme see Table 13A. Further details provided in Example 6.

[0768] FIG. 10 shows that formulated mRNA encoding different CSP variants induces humoral immune responses in mice, using an ELISA assay. FIG. 10A: coating: [NANP]₇ peptide; IgG1 and IgG2a endpoint titers at day 21 post vaccination; FIG. 10B: coating: [NANP]₇ peptide; IgG1 and IgG2a endpoint titers at day 35 post vaccination; FIG. 10C: coating C-term peptide; IgG1 and IgG2a endpoint titers at 21 days post vaccination; FIG. 10D: coating C-term peptide; IgG1 and IgG2a endpoint titers at 35 days post vaccination; FIG. 10E: coating N-term peptide; IgG1 and IgG2a endpoint titers at 21 days post vaccination; FIG. 10F: coating N-term peptide; IgG1 and IgG2a endpoint titers at 35 days post vaccination. Groups 1 to 3: LNP formulated CSP vaccine; Group 4: LNP with irrelevant Poly: C RNA. Vaccination scheme see Table 13B. Further details provided in Example 7.

[0769] FIG. 11 shows that formulated mRNA encoding different CSP variants induces cellular immune responses in mice (CD8+ and/or CD4+ T-cell responses), using an intracellular cytokine staining assay (day 35 post vaccination). Groups 1 to 3: LNP formulated CSP vaccine; Group 4: LNP with irrelevant Poly: C RNA. Vaccination scheme see Table 13B. Further details provided in Example 7.

[0770] FIG. 12 shows that formulated mRNA encoding CSP with shortened C-terminus induces humoral immune responses in mice, using an ELISA assay. FIG. 12A: coating: [NANP]₇ peptide; IgG1 and IgG2a endpoint titers at day 21 post vaccination; FIG. 12B: coating: [NANP]₇ peptide; IgG1 and IgG2a endpoint titers at day 35 post vaccination; FIG. 12C: coating C-term peptide; IgG1 and IgG2a endpoint titers at 21 days post vaccination; FIG. 12D: coating C-term peptide; IgG1 and IgG2a endpoint titers at 35 days post vaccination. Groups 1 to 6: LNP formulated CSP vaccine (shortened at C-terminus); Group 7: LNP with Poly: C RNA. Vaccination scheme see Table 14. Further details provided in Example 8.

[0771] FIG. 13 shows that formulated mRNA encoding CSP with shortened C-terminus induces cellular immune responses in mice (CD8+ and/or CD4+ T-cell responses), using an intracellular cytokine staining assay (day 35 post vaccination). FIG. 13A: all groups. FIG. 13B: only groups 5-7 to show comparison of group 5 and 6. Groups 1 to 6: LNP formulated CSP vaccine (shortened at C-terminus); Group 7: LNP with Poly: C RNA. Vaccination scheme see Table 14. Further details provided in Example 8.

[0772] FIG. 14 shows that LNP formulated mRNA encoding CSP with different C-terminus induces humoral immune responses in mice, using an ELISA assay. FIG. 14A: coating: [NANP]₇ peptide; IgG1 and IgG2a endpoint titers at day 21 post vaccination; FIG. 14B: coating: [NANP]₇ peptide; IgG1 and IgG2a endpoint titers at day 35 post vaccination; FIG. 14C: coating C-term peptide; IgG1 and IgG2a endpoint titers at 35 days post vaccination; FIG. 14D: coating N-term peptide; IgG1 and IgG2a endpoint titers at 35 days post vaccination. Groups 1 to 8 LNP formulated CSP vaccine (different C-terminus); Group 9: LNP formulated irrelevant RNA. Vaccination scheme see Table 15. Further details provided in Example 9.

[0773] FIG. 15 shows that LNO formulated mRNA encoding CSP with different C-terminus induces cellular immune responses in mice (CD8+ and/or CD4+ T-cell responses), using an intracellular cytokine staining assay (day 35 post vaccination). Groups 1 to 8: LNP formulated CSP vaccine (different C-terminus); Group 9: LNP formulated irrelevant RNA. Vaccination scheme see Table 15. Further details provided in Example 9.

[0774] FIG. 16 shows that LNP formulated mRNA encoding CSP vaccine (shortened at N-terminus or NANP repeat region at the C-terminus) induces humoral immune responses in mice, using an ELISA assay. FIG. 16A: coating: [NANP]7 peptide; IgG1 and IgG2a endpoint titers at day 21 post vaccination; FIG. 16B: coating: [NANP]7 peptide; IgG1 and IgG2a endpoint titers at day 35 post vaccination; FIG. 16C: coating C-term peptide; IgG1 and IgG2a endpoint titers at 35 days post vaccination; FIG. 16D: coating N-term peptide; IgG1 and IgG2a endpoint titers at 35 days post vaccination. Groups 1 to 8: LNP formulated CSP vaccine (shortened at N-terminus or NANP repeat region at the C-terminus); Group 9: LNP formulated irrelevant RNA. Vaccination scheme see Table 16. Further details provided in Example 10.

[0775] FIG. 17 shows that LNP formulated mRNA encoding CSP vaccine (shortened at N-terminus or NANP repeat region at the C-terminus) induces cellular immune responses in mice (CD8+ and/or CD4+ T-cell responses), using an intracellular cytokine staining assay (day 35 post vaccination). Groups 1 to 8: LNP formulated CSP vaccine (shortened at N-terminus or NANP repeat region at the C-terminus); Group 9: LNP formulated irrelevant RNA. Vaccination scheme see Table 16. Further details provided in Example 10.

[0776] FIG. 18 shows that LNP formulated mRNA differently capped encoding CSP vaccine induces humoral immune responses in mice, using an ELISA assay. FIG. 18A: coating: [NANP]₇ peptide; IgG1 and IgG2a endpoint titers at day 21 post vaccination; FIG. 18B: coating: [NANP]7 peptide or C-term peptide or N-term peptide; IgG1 endpoint titers at day 35 post vaccination; FIG. 18C: coating: [NANP]7 peptide or C-term peptide or N-term peptide; IgG2a endpoint titers at day 35 post vaccination. Groups 1 and 2: LNP formulated differently capped mRNA CSP vaccine; Group 3: LNP formulated irrelevant RNA. Vaccination scheme see Table 17. Further details provided in Example 11.

[0777] FIG. 19 shows that LNP formulated mRNA differently capped encoding CSP vaccine induces cellular immune responses in mice (CD8+ and/or CD4+ T-cell responses), using an intracellular cytokine staining assay (day 35 post vaccination). Groups 1 and 2: LNP formulated differently capped mRNA CSP vaccine; Group 3: LNP with irrelevant RNA. Vaccination scheme see Table 17. Further details provided in Example 11.

[0778] FIG. 20 shows that LNP formulated mRNA (differently capped) encoding CSP vaccine induces humoral immune responses in mice, using an ELISA assay. A prolonged injection interval between prime and boost enhances the humoral immune response. FIG. 20: coating: [NANP]₇ peptide; IgG1 and IgG2a endpoint titers at different days as indicated; Groups 1, 2, 4 and 5: LNP with differently capped CSP vaccine; Group 3 and 6: NaCl buffer. Vaccination scheme see Table 18. Further details provided in Example 12.

[0779] FIG. 21 shows that formulated differently capped mRNA encoding CSP vaccine induces cellular immune responses in mice (CD8+ and/or CD4+ T-cell responses), using an intracellular cytokine staining assay. Groups 1, 2, 4 and 5: LNP with differently capped CSP vaccine; Group 3 and 6: NaCl buffer. Vaccination scheme see Table 18. Further details provided in Example 12.

[0780] FIG. 22 shows that independently which 3′-end is used mRNA encoding CSP vaccine induces humoral immune responses in mice, using an ELISA assay. FIG. 22A: coating: [NANP]₇ peptide; IgG1 and IgG2a endpoint titers at day 21 post first vaccination; FIG. 22B: coating: [NANP]₇ peptide; IgG1 and IgG2a endpoint titers at day 35 post vaccination; Groups 1-6: mRNA with different 3′-end and unmodified or modified uracil encoding CSP vaccine; Group 7: NaCl buffer. Vaccination scheme see Table 19. Further details provided in Example 13.

[0781] FIG. 23 shows that independently which 3′-end is used mRNA encoding CSP vaccine induces cellular immune responses in mice (CD8+ and/or CD4+ T-cell responses), using an intracellular cytokine staining assay. Groups 1-6: mRNA with different 3′-end and unmodified or modified uracil encoding CSP vaccine; Group 7: NaCl buffer. Vaccination scheme see Table 19. Further details provided in Example 13.

[0782] FIG. 24 shows that expression is comparable independently which 3′-end is used. The constructs with shortened N-terminus of CSP (group G and H) showed slightly higher expression. The experiment was performed as described in Example 14. For further details see Table 20.

[0783] FIG. 25 shows that all mRNA constructs encoding Malaria CSP antigens led to a detectable protein expression using a rabbit reticulocyte lysate system. Further details provided in Example 15 and Table 21.

[0784] FIG. 26 shows schematic drawings of preferred CSP constructs/protein designs; CSP: circumsporozoite protein of Plasmodium (fragments are indicated by amino acid positions); SP: heterologous signal peptide; L: Linker; HA-TM: transmembrane domain of Influenza HA; HBsAg: Hepatitis B surface antigen; Tetanus: P2 T cell helper epitope from tetanus toxin; PADRE: pan HLA DR-binding epitope; Ferritin: Iron storage protein ferritin; Lumazine: Lumazine synthase. Further information can be found in Table 1.

### EXAMPLES

[0785] In the following, particular examples illustrating various embodiments and aspects of the invention are presented. However, the present invention shall not to be limited in scope by the specific embodiments described herein. The following preparations and examples are given to enable those skilled in the art to more clearly understand and to practice the present invention. The present invention, however, is not limited in scope by the exemplified embodiments, which are intended as illustrations of single aspects of the invention only, and methods which are functionally equivalent are within the scope of the invention. Indeed, various modifications of the invention in addition to those described herein will become readily apparent to those skilled in the art from the foregoing description, accompanying figures and the examples below. All such modifications fall within the scope of the appended claims.

### Example 1: Preparation of RNA Constructs, Compositions, and Vaccines

[0786] The present Example provides methods of obtaining the coding RNA of the invention, as well as methods of generating a composition or a vaccine of the invention.

1.1. Preparation of DNA and mRNA Constructs:

[0787] DNA sequences encoding different CSP proteins were prepared and used for subsequent RNA in vitro transcription reactions. Said DNA sequences were prepared by modifying the wild type encoding DNA sequences by introducing a G/C optimized coding sequence (e.g., “cds opt1”) for stabilization and expression optimization. Sequences were introduced into a pUC derived DNA vector to comprise stabilizing 3′-UTR sequences and 5′-UTR sequences, additionally comprising a stretch of adenosines (e.g. 64A or A100), and optionally a histone-stem-loop (hSL) structure, and a stretch of 30 cytosines (e.g. C30) (see Table 9, a (for a schematic overview of CSP construct designs see FIG. 26).

[0788] The obtained plasmid DNA constructs were transformed and propagated in bacteria using common protocols known in the art. Eventually, the plasmid DNA constructs were extracted, purified, and used for subsequent RNA in vitro transcription (see section 1.2).

[0789] Alternatively, DNA plasmids are used as template for PCR-amplification (see section 1.3).

1.2. RNA In Vitro Transcription from Plasmid DNA Templates:

[0790] DNA plasmids prepared according to paragraph 1.1 were linearized using a restriction enzyme and used for DNA dependent RNA in vitro transcription using T7 RNA polymerase in the presence of a nucleotide mixture (ATP/GTP/CTP/UTP) and cap analog (e.g. m7GpppG) under suitable buffer conditions. m7G(5′)ppp(5′)(2′OMeA)pG cap analog was used for preparation of some RNA constructs to generate a cap1 structure (e.g. R8143, R8229, R8233, R8232, R8230, R8231, R8238). Obtained RNA constructs were purified using RP-HPLC (PureMessenger®, CureVac AG, Tubingen, Germany; WO2008/077592) and used for in vitro and in vivo experiments. The generated RNA sequences/constructs are provided in Table 9, with the encoded CSP constructs and the respective UTR elements indicated therein (mRNA design a-1 (HSD17B4/PSMB3), mRNA design a-3 (SLC7A3/PSMB3), mRNA design i-3 (−/muag) and mRNA design i-2 (RPL32/ALB7)). CSP proteins and fragments were derived from Plasmodium falciparum 3D7 (XP_001351122.1, XM_001351086.1; abbreviated herein as “Pf(3D7)”), or Plasmodium berghei ANKA (XP_022712148.1, XM_022858407.1; abbreviated herein as “Pb(ANKA”)).

[0791] In addition to the information provided in Table 9, further information relating to specific mRNA construct SEQ-ID NOs may be derived from the information provided under <223> identifier in the ST.25 sequence listing.

[0792] To obtain modified mRNA RNA in vitro transcription was performed in the presence of a modified nucleotide mixture (ATP, GTP, CTP, pseudouridine (ψ)) or N(1)-methylpseudouridine (m1ψ-)) and cap analogue (m7GpppG or m7G(5′)ppp(5′)(2′OMeA)pG) under suitable buffer conditions. The obtained ψ-modified mRNAs were purified using RP-HPLC (PureMessenger®, CureVac AG, Tubingen, Germany; WO2008/077592) and used for further experiments.

[0793] Some RNA constructs are in vitro transcribed in the absence of a cap analog. The cap-structure (cap1) is added enzymatically using Capping enzymes as commonly known in the art. In short, in vitro transcribed mRNA is capped using an m7G capping kit with 2′-O-methyltransferase to obtain cap1-capped RNA.

[0794] RNA for clinical development is produced under current good manufacturing practice e.g. according to WO2016/180430, implementing various quality control steps on DNA and RNA level.

1.3. RNA In Vitro Transcription from PCR Amplified DNA Templates:

[0795] Purified PCR amplified DNA templates prepared according to paragraph 1.1 are transcribed in vitro using DNA dependent T7 RNA polymerase in the presence of a nucleotide mixture (ATP/GTP/CTP/UTP) and cap analog (m7GpppG or m7G(5′)ppp(5′)(2′OMeA)pG) under suitable buffer conditions. Alternatively, PCR amplified DNA is transcribed in vitro using DNA dependent T7 RNA polymerase in the presence of a modified nucleotide mixture (ATP, GTP, CTP, N(1)-methylpseudouridine (m14ψ) or pseudouridine (ψ) and cap analog (m7GpppG or m7G(5′)ppp(5′)(2′OMeA)pG) under suitable buffer conditions. Some mRNA constructs are in vitro transcribed in the absence of a cap analog and the cap-structure (cap1) is added enzymatically using capping enzymes as commonly known in the art e.g. using an m7G capping kit with 2′-O-methyltransferase. The obtained mRNAs are purified e.g. using RP-HPLC (PureMessenger®, CureVac AG, Tubingen, Germany; WO2008/077592) and used for in vitro and in vivo experiments.

TABLE 9
mRNA constructs encoding CPS used in the present examples

| | | | | | | | SEQ |
|---|---|---|---|---|---|---|---|
| | | | | | | SEQ | ID |
| | | | | | SEQ | ID | NO: |
| mRNA | | UTR | | 5'-cap | ID NO: | NO: | CDS |
| ID | Protein | Design | 3′-end | structure | mRNA | Protein | opt1 |
| R7112/ | Pf-CSP | a-1 | A64-N5-C30- | cap0 | 333 | 1 | 41 |
| R7111 | | | hSL-N5 | | | | |
| R8143 | Pf-CSP | a-1 | A64-N5-C30- | cap1 | 625 | 1 | 41 |
| | | | hSL-N5 | | | | |
| R6876/ | Pf-CSP | i-2 | A64-N5-C30- | cap0 | 917 | 1 | 41 |
| R5752 | | | hSL-N5 | | | | |
| R8983 | Pf-CSP | a-3 | hSL-A100 | cap1 | 8259 | 1 | 41 |
| R8985 | Pf-CSP | a-3 | hSL-A100-N5 | cap1 | 7530 | 1 | 41 |
| R5980 | Pf-CSP_Linker(G4SG4)_TM domain HA | i-2 | A64-N5-C30- | cap0 | 924 | 8 | 48 |
| | | | hSL-N5 | | | | |
| R7271 | Pf-CSP(199-377)_Linker(PVTN)_HBsAg | a-1 | A64-N5-C30- | cap0 | 341 | 9 | 49 |
| | | | hSL-N5 | | | | |
| R8233 | Pf-CSP(199-377)_Linker(PVTN)_HBsAg | a-1 | A64-N5-C30- | cap1 | 633 | 9 | 49 |
| | | | hSL-N5 | | | | |
| R7216 | Pf-CSP(199-387)_Linker(PVTN)_HBsAg | a-1 | A64-N5-C30- | cap0 | 342 | 10 | 50 |
| | | | hSL-N5 | | | | |
| R8782 | LumSynt_Linker(GGS4-GGG)_Pf- | a-1 | A64-N5-C30- | cap1 | 8856 | 8742 | 8754 |
| | CSP(19-397) | | hSL-N5 | | | | |
| R8783 | LumSynt_Linker(GGS4-GGG)_Pf- | a-1 | hSL-A100 | cap1 | 9774 | 8742 | 8754 |
| | CSP(19-397) | | | | | | |
| R7268 | HsIns-iso1_Pf-CSP(19-397) | a-1 | A64-N5-C30- | cap0 | 337 | 5 | 45 |
| | | | hSL-N5 | | | | |
| R5974 | HsIns-isol_Pf-CSP(19-397) | i-2 | A64-N5-C30- | cap0 | 921 | 5 | 45 |
| | | | hSL-N5 | | | | |
| R7266 | HsSPARC_Pf-CSP(19-397) | a-1 | A64-N5-C30- | cap0 | 338 | 6 | 46 |
| | | | hSL-N5 | | | | |
| R5972 | HsSPARC_Pf-CSP(19-397) | i-2 | A64-N5-C30- | cap0 | 922 | 6 | 46 |
| | | | hSL-N5 | | | | |
| R7265 | IgE_Pf-CSP(19-397) | a-1 | A64-N5-C30- | cap0 | 339 | 7 | 47 |
| | | | hSL-N5 | | | | |
| R5971 | IgE_Pf-CSP(19-397) | i-2 | A64-N5-C30- | cap0 | 923 | 7 | 47 |
| | | | hSL-N5 | | | | |
| R7267 | HsALB_Pf-CSP(19-397) | a-1 | A64-N5-C30- | cap0 | 336 | 4 | 44 |
| | | | hSL-N5 | | | | |
| R8229 | HsALB_Pf-CSP(19-397) | a-1 | A64-N5-C30- | cap1 | 628 | 4 | 44 |
| | | | hSL-N5 | | | | |
| R8524 | HsALB_Pf-CSP(19-397) | a-1 | A64-N5-C30- | cap1 | 628 | 4 | 44 |
| | | | hSL-N5 | | | | |
| R5973 | HsALB_Pf-CSP(19-397) | i-2 | A64-N5-C30- | cap0 | 920 | 4 | 44 |
| | | | hSL-N5 | | | | |
| R8527 | HsALB_Pf-CSP(19-397) | i-3 | A64-N5-C30- | cap1 | 1796 | 4 | 44 |
| | | | hSL-N5 | | | | |
| R8530 | HsALB_Pf-CSP(19-397) | i-3 | A64-N5-C30- | cap1 | 1796 | 4 | 44 |
| | | | hSL-N5 | | | | |
| R8523 | HsALB_Pf-CSP(19-397) | a-1 | hSL-A64-N5 | cap1 | 6561 | 4 | 44 |
| R8525 | HsALB_Pf-CSP(19-397) | a-1 | hSL-A64-N5 | cap1 | 6561 | 4 | 44 |
| R8528 | HsALB_Pf-CSP(19-397) | i-3 | hSL-A64-N5 | cap1 | 7047 | 4 | 44 |
| R8531 | HsALB_Pf-CSP(19-397) | i-3 | hSL-A64-N5 | cap1 | 7047 | 4 | 44 |
| R8987 | HsALB_Pf-CSP(19-397) | a-1 | hSL-A100-N5 | cap1 | 7290 | 4 | 44 |
| R8986 | HsALB_Pf-CSP(19-397) | a-3 | hSL-A100-N5 | cap1 | 7533 | 4 | 44 |
| R8520 | HsALB_Pf-CSP(19-397) | a-1 | hSL-A100 | cap1 | 9775 | 4 | 8755 |
| R8526 | HsALB_Pf-CSP(19-397) | a-1 | hSL-A100 | cap1 | 9775 | 4 | 8755 |
| R8529 | HsALB_Pf-CSP(19-397) | i-3 | hSL-A100 | cap1 | 8505 | 4 | 8755 |
| R8532 | HsALB_Pf-CSP(19-397) | i-3 | hSL-A100 | cap1 | 8505 | 4 | 8755 |
| R8984 | HsALB_Pf-CSP(19-397) | a-3 | hSL-A100 | cap1 | 8262 | 4 | 8755 |
| R8091 | HsALB_Pf-CSP(19-152) | a-1 | A64-N5-C30- | cap0 | 343 | 11 | 51 |
| | | | hSL-N5 | | | | |
| R8090 | HsALB_Pf-CSP(19-192) | a-1 | A64-N5-C30- | cap0 | 344 | 12 | 52 |
| | | | hSL-N5 | | | | |
| R7647 | HsALB_Pf-CSP(19-272) | a-1 | A64-N5-C30- | cap0 | 345 | 13 | 53 |
| | | | hSL-N5 | | | | |
| R8232 | HsALB_Pf-CSP(19-272) | a-1 | A64-N5-C30- | cap1 | 637 | 13 | 53 |
| | | | hSL-N5 | | | | |
| R8567 | HsALB_Pf-CSP(19- | a-1 | A64-N5-C30- | cap1 | 8858 | 8743 | 8756 |
| | 272)_Linker(PVTN)_HBsAg | | hSL-N5 | | | | |
| R8104 | HsALB_Pf-CSP(19-272)_Linker(G4S)_Pf- | a-1 | A64-N5-C30- | cap0 | 350 | 18 | 58 |
| | CSP(310-327)_Pf-CSP(346-375) | | hSL-N5 | | | | |
| R8103 | HsALB_Pf-CSP(19-272)_Linker(G4S)_Pf- | a-1 | A64-N5-C30- | cap0 | 349 | 17 | 57 |
| | CSP(310-327)_Linker(G4S)_Pf-CSP(346- | | hSL-N5 | | | | |
| | 375) | | | | | | |
| R8100 | HsALB_Pf-CSP(19-272)_Linker(AAY)_Pf- | a-1 | A64-N5-C30- | cap0 | 346 | 14 | 54 |
| | CSP(310-327)_Linker(AAY)_Pf-CSP(346- | | hSL-N5 | | | | |
| | 375) | | | | | | |
| R8101 | HsALB_Pf-CSP(19-272)_Linker(AAY)_Pf- | a-1 | A64-N5-C30- | cap0 | 348 | 16 | 56 |
| | CSP(346-365)_Linker(AAY)_PADRE | | hSL-N5 | | | | |
| R8102 | HsALB_Pf-CSP(19-272)_Linker(AAY)_Pf- | a-1 | A64-N5-C30- | cap0 | 347 | 15 | 55 |
| | CSP(346-365)_Linker(AAY)_P2 | | hSL-N5 | | | | |
| R8571 | HsALB_Pf-CSP(19-272)_Linker(AAY)_Pf- | a-1 | A64-N5-C30- | cap1 | 8859 | 8744 | 8757 |
| | CSP(346- | | hSL-N5 | | | | |
| | 365)_Linker(AAY)_PADRE_Linker(PVTN)_ | | | | | | |
| | HBsAg | | | | | | |
| R8572 | HsALB_Pf-CSP(19-272)_Linker(AAY)_Pf- | a-1 | hSL-A100 | cap1 | 9778 | 8744 | 8758 |
| | CSP(346- | | | | | | |
| | 365)_Linker(AAY)_PADRE_Linker(PVTN)_ | | | | | | |
| | HBsAg | | | | | | |
| R7643 | HsALB_Pf-CSP(19-325) | a-1 | A64-N5-C30- | cap0 | 351 | 19 | 59 |
| | | | hSL-N5 | | | | |
| R7642 | HsALB_Pf-CSP(19-384) | a-1 | A64-N5-C30- | cap0 | 352 | 20 | 60 |
| | | | hSL-N5 | | | | |
| R8230 | HsALB_Pf-CSP(19-384) | a-1 | A64-N5-C30- | cap1 | 644 | 20 | 60 |
| | | | hSL-N5 | | | | |
| R7641 | HsALB_Pf-CSP(19-384)_TM domain HA | a-1 | A64-N5-C30- | cap0 | 353 | 21 | 61 |
| | | | hSL-N5 | | | | |
| R8231 | HsALB_Pf-CSP(19-384)_TM domain HA | a-1 | A64-N5-C30- | cap1 | 645 | 21 | 61 |
| | | | hSL-N5 | | | | |
| R8565 | HsALB_Pf-CSP(19- | a-1 | A64-N5-C30- | cap1 | 8861 | 8745 | 8759 |
| | 384)_Linker(PVTN)_HBsAg | | hSL-N5 | | | | |
| R8566 | HsALB_Pf-CSP(19- | a-1 | hSL-A100 | cap1 | 9780 | 8745 | 8760 |
| | 384)_Linker(PVTN)_HBsAg | | | | | | |
| R8780 | HsALB_Pf-CSP(19- | a-1 | A64-N5-C30- | cap1 | 8863 | 8746 | 8761 |
| | 384)_Linker(SGG)_Ferritin | | hSL-N5 | | | | |
| R8781 | HsALB_Pf-CSP(19- | a-1 | hSL-A100 | cap1 | 9782 | 8746 | 8762 |
| | 384)_Linker(SGG)_Ferritin | | | | | | |
| R8092 | HsALB_Pf-CSP(82-397) | a-1 | A64-N5-C30- | cap0 | 354 | 22 | 62 |
| | | | hSL-N5 | | | | |
| R7768 | HsALB_Pf-CSP(93-192) | a-1 | A64-N5-C30- | cap0 | 355 | 23 | 63 |
| | | | hSL-N5 | | | | |
| R7644 | HsALB_Pf-CSP(93-272) | a-1 | A64-N5-C30- | cap0 | 356 | 24 | 64 |
| | | | hSL-N5 | | | | |
| R8573 | HsALB_Pf-CSP(93- | a-1 | A64-N5-C30- | cap1 | 8865 | 8747 | 8763 |
| | 384)_Linker(PVTN)_HBsAg | | hSL-N5 | | | | |
| R8574 | HsALB_Pf-CSP(93- | a-1 | hSL-A100 | cap1 | 9784 | 8747 | 8764 |
| | 384)_Linker(PVTN)_HBsAg | | | | | | |
| R8089 | HsALB_Pf-CSP(93-397) | a-1 | A64-N5-C30- | cap0 | 357 | 25 | 65 |
| | | | hSL-N5 | | | | |
| R7646 | HsALB_Pf-CSP(98-192) | a-1 | A64-N5-C30- | cap0 | 358 | 26 | 66 |
| | | | hSL-N5 | | | | |
| R7645 | HsALB_Pf-CSP(98-272) | a-1 | A64-N5-C30- | cap0 | 359 | 27 | 67 |
| | | | hSL-N5 | | | | |
| R7650 | HsALB_Pf-CSP(98-374) | a-1 | A64-N5-C30- | cap0 | 360 | 28 | 68 |
| | | | hSL-N5 | | | | |
| R7649 | HsALB_Pf-CSP(98-397) | a-1 | A64-N5-C30- | cap0 | 361 | 29 | 69 |
| | | | hSL-N5 | | | | |
| R8031 | HsALB_Pf-CSP(199- | a-1 | A64-N5-C30- | cap0 | 362 | 30 | 70 |
| | 377)_Linker(PVTN)_HBsAg | | hSL-N5 | | | | |
| R8238 | HsALB_Pf-CSP(199- | a-1 | A64-N5-c30- | cap1 | 654 | 30 | 70 |
| | 377)_Linker(PVTN)_HBsAg | | hSL-N5 | | | | |
| R8564 | HsALB_Pf-CSP(199- | a-1 | hSL-A100 | cap1 | 9785 | 30 | 8765 |
| | 377)_Linker(PVTN)_HBsAg | | | | | | |
| R5969 | Pb-CSP | i-2 | A64-N5-C30- | cap0 | 947 | 31 | 71 |
| | | | hSL-N5 | | | | |
| R5975 | IgE_Pb-CSP(24-340) | i-2 | A64-N5-C30- | cap0 | 952 | 36 | 76 |
| | | | hSL-N5 | | | | |
| R5976 | HsSPARC_Pb-CSP(24-340) | i-2 | A64-N5-C30- | cap0 | 951 | 35 | 75 |
| | | | hSL-N5 | | | | |
| R5977 | HsALB_Pb-CSP(24-340) | i-2 | A64-N5-C30- | cap0 | 949 | 33 | 73 |
| | | | hSL-N5 | | | | |
| R5978 | HsIns-iso1_Pb-CSP(24-340) | i-2 | A64-N5-C30- | cap0 | 950 | 34 | 74 |
| | | | hSL-N5 | | | | |
| R5979 | Pb-CSP_Linker(G4SG4)_TM domain HA | i-2 | A64-N5-C30- | cap0 | 948 | 32 | 72 |
| | | | hSL-N5 | | | | |

1.4.1: Preparation of an LNP (LNP-III-3) Formulated mRNA Composition:

[0796] LNPs (LNP-III-3) were prepared using cationic lipids, structural lipids, a PEG-lipids, and cholesterol. Lipid solution (in ethanol) was mixed with RNA solution (aqueous buffer) using a microfluidic mixing device. Obtained LNPs were re-buffered in a carbohydrate buffer via dialysis, and up-concentrated to a target concentration using ultracentrifugation tubes. LNP-formulated mRNA was stored at −80° C. prior to use in in vitro or in vivo experiments.

[0797] Lipid nanoparticles (LNP), cationic lipids, and polymer conjugated lipids (PEG-lipid) were prepared and tested essentially according to the general procedures described in WO2015/199952, WO2017/004143 and WO2017/075531, the full disclosures of which are incorporated herein by reference. LNP formulated RNA was prepared using an ionizable amino lipid (cationic lipid), phospholipid, cholesterol and a PEGylated lipid. Briefly, cationic lipid compound of formula III-3, DSPC, cholesterol, and PEG-lipid of formula IVa were solubilized in ethanol at a molar ratio (%) of approximately 50:10:38.5:1.5 or 47.4:10:40.9:1.7. LNPs comprising cationic lipid compound of formula III-3 and PEG-lipid compound of formula IVa were prepared at a ratio of RNA to total Lipid of 0.03-0.04 w/w. The RNA was diluted to 0.05 mg/mL to 0.2 mg/mL in 10 mM to 50 mM citrate buffer, pH4. Syringe pumps were used to mix the ethanolic lipid solution with the RNA aqueous solution at a ratio of about 1:5 to 1:3 (vol/vol) with total flow rates above 15 ml/min. The ethanol was then removed and the external buffer replaced with a PBS buffer comprising Sucrose by dialysis. Finally, the lipid nanoparticles were filtered through a 0.2 um pore sterile filter and the LNP-formulated RNA composition was adjusted to about 1 mg/ml total RNA. Lipid nanoparticle particle diameter size was 60-90 nm as determined by quasi-elastic light scattering using a Malvern Zetasizer Nano (Malvern, UK). For other cationic lipid compounds mentioned in the present specification, the formulation process is essentially similar. The obtained LNP-formulated RNA composition (1 mg/ml total RNA) was diluted to the desired target concentration using Saline before in vivo application.

[0798] Lipid nanoparticle composition for LNP composition LNP-III-3 are detailed in Table B below.

### Example 1.4.2: Preparation of LNPs (GN01-LNPs) Using the NanoAssemblr™ Microfluidic System

[0799] GN01-LNPs were prepared using the NanoAssemblr™ microfluidic system (Precision NanoSystems Inc., Vancouver, BC) according to standard protocols. GN01-LNPs comprising the cationic lipid COATSOME® SS-EC (former name: SS-33/4PE-15; NOF Corporation, Tokyo, Japan).

[0800] In the present examples, COATSOME® SS-EC (NOF Corporation, Tokyo, Japan) was used for preparation of lipid nanoparticle compositions. Furthermore, cholesterol (Avanti Polar Lipids; Alabaster, Ala.), neutral lipid/phospholipid DPhyPE (Avanti Polar Lipids; Alabaster, Ala.) and DMG-PEG 2000 (NOF Corporation, Tokyo, Japan) were used.

[0801] The lipids were solubilized in alcoholic solution (ethanol) according to standard procedures. The corresponding lipid nanoparticle compositions are detailed in Table B below.

[0802] In detail, LNPs were prepared by mixing appropriate volumes of lipid stock solutions in ethanol buffer with an aqueous phase (25 mM sodium acetate, pH 4.0) containing appropriate amounts of mRNA as indicated herein; cholesterol, phospholipid and polymer conjugated lipid: 20 mg/ml in EtOH, cationic lipids, except for GN01: 20 mg/ml in EtOH, GN01-lipid: 30 mg/ml in tert-butanol.

[0803] Briefly, the mRNA was diluted to 0.05 to 0.2 mg/ml in 10 to 50 mM acetate buffer, pH 4. Syringe pumps were installed into inlet parts of the NanoAssemblr™ (Precision NanoSystems Inc., Vancouver, BC) and used to mix the ethanolic lipid solution with the mRNA aqueous solution at a ratio of about 1:5 to 1:3 (vol/vol) with total flow rates from about 14 ml/min to about 18 ml/min.

[0804] The ethanol was then removed and the external buffer replaced with PBS by dialysis (Slide-A-Lyzer™ Dialysis Cassettes, ThermoFisher). Finally, the lipid nanoparticles were filtered through a 0.2 μm pore sterile filter. Lipid nanoparticle particle diameter size was from about 90 nm to about 140 nm as determined by quasi-elastic light scattering using a Malvern Zetasizer Nano (Malvern Instruments Ltd.; Malvern, UK).

TABLE B
Overview of lipid nanoparticle composition of
GN01-LNPs and LNP III-3 formulation

| | | mol-percentages |
|---|---|---|
| | | for excipients |
| LNP | Excipients | [mol %] |
| formu- | [cationic lipid:steroid:neutral lipid:polymer | |
| lation | conjugated lipid] | |
| GN01 | COATSOME ® | 59:29.3:10:1.7 |
| | SS-EC:Chol:DPhyPE:DMG-PEG 2000 | |
| LNP | III-3:Chol:DSPC:formula (IVa) with | 47.4:40.9:10:1.7 |
| III-3 | n = 49 | |

1.5. Preparation of a Protamine Complexed mRNA Composition:

[0805] RNA constructs were complexed with protamine prior to use in in vivo immunization experiments. The RNA formulation consisted of a mixture of 50% free RNA and 50% RNA complexed with protamine at a weight ratio of 2:1. First, mRNA was complexed with protamine by addition of protamine-Ringer's lactate solution to mRNA. After incubation for 10 minutes, when the complexes were stably generated, free mRNA was added, and the final concentration was adjusted with Ringer's lactate solution.

1.6. Expression Analysis of Designed mRNA Constructs:

[0806] The mRNA constructs as shown in Table 9 were tested for their expression in cell culture using western blot or FACS as commonly known in the art. An example is described in Example 4.

### Example 2: Vaccination of Mice with Protamine-Formulated and LNP-Formulated mRNA Encoding CSP

[0807] The present example shows that Malaria mRNA vaccines encoding CSP induce humoral and cellular immune responses in Balb/c mice.

[0808] Malaria mRNA constructs encoding full length CSP were prepared according to Example 1. The mRNA was formulated in lipid nanoparticles (see Example 1.4.2) or with protamine (see Example 1.5). The different mRNA vaccine candidates were applied on days 0, 21, and 42 and administered with doses of RNA, formulations, and administration routes as shown in Table 10. One negative control group 3) received NaCl buffer. Serum samples were taken at day 21, day 42, and day 56 for determination of humoral immune responses.

TABLE 10
Vaccination scheme of Example 2

| | No. of | | | | | |
|---|---|---|---|---|---|---|
| Group | mice | Treatment | mRNA ID | Dose | Route | Volume |
| 1 | 9 | mRNA encoding | R7111 | 10 ug | i.m. | 1 × 25 uL |
| | | CSP LNP | | | | |
| | | formulation 1 | | | | |
| | | (GN01) | | | | |
| 2 | 9 | mRNA encoding | R7111 | 10 ug | i.m. | 1 × 25uL |
| | | CSP LNP | | | | |
| | | formulation 2 | | | | |
| | | (similar | | | | |
| | | composition to | | | | |
| | | GN01) | | | | |
| 3 | 9 | NaCl 0.9% | | | i.m. | 1 × 25 uL |
| 4 | 9 | mRNA encoding | R7112 | 80 ug | i.d. | 2 × 50 uL |
| | | CSP | | | | |
| | | Protamine | | | | |
| | | formulation | | | | |

### 2.1. Determination of Specific Humoral Immune Responses by ELISA:

[0809] ELISA was performed using malaria [NANP]7 peptide (according to SEQ ID NO: 10209) for coating. Coated plates were incubated using respective serum dilutions, and binding of specific antibodies to the respective malaria [NANP]₇ peptide were detected using biotinylated isotype specific anti-mouse antibodies followed by streptavidin-HRP (horse radish peroxidase) with Amplex as substrate. Endpoint titers of antibodies (IgG1, IgG2a) directed against the malaria [NANP]7 peptide were measured by ELISA on day 21, day 42, and 56 post vaccinations. Results are shown in FIGS. 1 A-C(A: day 21; B: day 42; C: day 56).

### 2.2. Detection of Binding CSP-Specific Immune Responses:

[0810] Hela cells were transfected with 2 ug of mRNA encoding CSP (R7111) using lipofectamine. The cells were harvested 20 h post transfection, and seeded at 1×10⁵ per well into a 96 well plate. The cells were incubated with serum samples of vaccinated mice (diluted 1:50) followed by aFITC-conjugated anti-mouse IgG antibody. Cells were acquired on BD FACS Canto II using DIVA software and analyzed by FlowJo. Results are shown in FIGS. 2 A-C (A: day 21; B: day 42; C: day 56).

### 2.3. Intracellular Cytokine Staining (ICS):

[0811] Splenocytes from vaccinated mice were isolated on day 56 according to a standard protocol known in the art. Briefly, isolated spleens were grinded through a cell strainer and washed in PBS/1% FBS followed by red blood cell lysis. After an extensive washing step with PBS/1% FBS, splenocytes were seeded into 96-well plates (2×10⁶ cells per well). Cells were stimulated with a mixture of CSP peptides (1 ug/ml) (see Table C) in the presence of 2.5 ug/ml of an anti-CD28 antibody (BD Biosciences) and a protein transport inhibitor for 6 h at 37° C. After stimulation, cells were washed and stained for intracellular cytokines using the Cytofix/Cytoperm reagent (BD Biosciences) according to the manufacturer's instructions. The following antibodies were used for staining: Thy1.2-FITC (1:100), CD8-PE-Cy7 (1:200), TNF-PE (1:100), IFNγ-APC (1:100) (eBioscience), CD4-BD Horizon V450 (1:200) (BD Biosciences) and incubated with Fcγ-block diluted 1:100. Aqua Dye was used to distinguish live/dead cells (Invitrogen). Cells were acquired using a BD FACS Canto II flow cytometer (Beckton Dickinson). Flow cytometry data was analyzed using FlowJo software (Tree Star, Inc.). Results are shown in FIG. 3.

TABLE C
CSP peptide mix for ICS

| | | | Pf(3D7)-CSP | |
|---|---|---|---|---|
| | SEQ | | Protein Amino | |
| Peptide | ID NO: | Location | Acid Position | Sequence |
| CSP_peptide_1 | 10197 | C-terminal | aa359-368 | DYANDIEKKI |
| CSP_peptide_2 | 10198 | C-terminal | aa377-385 | VFNVVNSSI |
| CSP_peptide_3 | 10199 | N-terminal | aa25-33 | CYGSSSNTR |
| CSP_peptide_4 | 10200 | N-terminal | aa26-34 | YGSSSNTRV |
| CSP_peptide_5 | 10201 | N-terminal | aa39-47 | NYDNAGTNL |
| CSP_peptide_6 | 10202 | N-terminal | aa6-14 | AILSVSSFL |
| CSP_peptide_7 | 10203 | N-terminal | aa30-38 | SNTRVLNEL |
| CSP_peptide_8 | 10204 | C-terminal | aa388-396 | IMVLSFLFL |
| CSP_peptide_9 | 10205 | C-terminal | aa387-395 | LIMVLSFLF |
| CSP_peptide_10 | 10206 | N-terminal | aa57-65 | GKQENWYSL |
| CSP_peptide_11 | 10207 | N-terminal | aa1-15 | MMRKLAILSVSSFLF |
| CSP_peptide_12 | 10208 | C-terminal | aa318-337 | EYLNKIQNSLSTEWSPCSVT |

### Results:

[0812] As shown in FIG. 1 and FIG. 2, the LNP formulated CSP mRNA vaccines induced strong, humoral immune responses in mice. Under the tested conditions, the LNP formulated vaccine applied to group 1 (1 ug dose) induced the strongest immune responses.

[0813] As shown in FIG. 3, the LNP formulated CSP mRNA vaccines induced cellular immune responses in mice (CD8+ and/or CD4+ T-cell responses). Notably, under the tested conditions, group 1 (1 ug dose) show strong and group 2 (1 ug dose) moderate CD8+ T-cell and CD4+ cell responses in comparison to the protamine formulated mRNA CSP vaccine (10 ug dose, group 4).

[0814] As CD8+ T cells may be a major protective immune mechanism against intracellular infections caused by Malaria parasites, an effective Malaria vaccine should induce strong CD8+ T cells responses. Accordingly, these findings highlight one of the advantageous features of the inventive mRNA-based malaria vaccine.

### Example 3: Vaccination of Mice with LNP-Formulated mRNA Encoding CSP

[0815] The present example shows that Malaria mRNA vaccines encoding CSP induce strong humoral and cellular immune responses in mice. Notably, the inventive mRNA-based Malaria vaccine induces strong CD8+-T cell responses.

[0816] Malaria mRNA vaccine candidates encoding full length CSP were prepared according to Example 1, and the mRNA constructs were formulated in lipid nanoparticles (see Example 1.4.2). The LNP formulations were applied on days 0 and 21 intramuscularly (i.m.; musculus tibialis, Balb/c mice) with doses of RNA, formulations, and control groups as shown in Table 11. One control group (D) received vaccinations with mRNA encoding RTS,S. A negative control group (E) received vaccinations with an irrelevant RNA, formulated in LNPs. Serum samples were taken at day 21 and day 35 for ELISA.

TABLE 11
Vaccination scheme of Example 3

| Group | No. of mice | Treatment | mRNA | Dose | Route | Volume |
|---|---|---|---|---|---|---|
| A | 9 | mRNA encoding CSP | R7111 | 1 ug | i.m. | 1 × 25 uL |
| | | LNP formulation 1 (GN01) | | | | |
| | | full length CSP | | | | |
| B | 9 | mRNA encoding CSP | R7111 | 1 ug | i.m. | 1 × 25 uL |
| | | LNP formulation 2 (similar | | | | |
| | | composition to GN01) | | | | |
| | | full length CSP | | | | |
| C | 9 | mRNA encoding CSP | R7111 | 1 ug | i.m. | 1 × 25 uL |
| | | LNP formulation 3 (similar | | | | |
| | | composition to GN01) | | | | |
| | | full length CSP | | | | |
| D | 9 | mRNA RTS, S | R7271 | 10 ug | i.m. | 1 × 25 uL |
| | | LNP formulation 1 (GN01) | | | | |
| | | Pf-CSP(199- | | | | |
| | | 377)_Linker(PVTN)_HBsAg | | | | |
| E | 5 | irrelevant RNA | Irrelevant RNA | 1 ug | i.m. | 1 × 25 uL |
| | | LNP formulation 1 (GN01) | | | | |

### 3.1. Determination of Specific Humoral Immune Responses by ELISA:

[0817] ELISA was performed using malaria peptide [NANP]7 for coating essentially as described in Example 3.1. The results are shown in FIG. 4 and FIG. 5.

### 3.2. Intracellular Cytokine Staining:

[0818] Intracellular cytokine staining was performed essentially as described in Example 3.2. The results are shown in FIG. 6.

### Results:

[0819] As shown in FIG. 4 and FIG. 5, the LNP formulated CSP mRNA vaccines induced strong, humoral immune responses in mice. Under the tested conditions, the LNP formulated vaccine applied to group A (1 ug dose) induced the strongest immune responses that were comparable to the RTS,S group (CSP fragment with HBsAg) (Group D; 10 ug dose).

[0820] As shown in FIG. 6, the LNP formulated CSP mRNA vaccines induced cellular immune responses in mice (CD8+ and/or CD4+ T-cell responses). Notably, under the tested conditions, group A (1 ug dose) and B (1 ug dose) showed strong CD8+ T-cell and CD4+ cell responses, whereas the RTS,S group (CSP fragment with HBsAg) (Group D; 10 ug dose) only showed CD4+ T-cell responses.

[0821] As CD8+ T cells are a major protective immune mechanism against intracellular infections caused by Malaria parasites, an effective Malaria vaccine should induce strong CD8+ T cells responses. Accordingly, these findings highlight one of the advantageous features of the inventive mRNA-based malaria vaccine.

### Example 4: Expression Analysis of Different mRNA Construct Encoding CSP in 293T Cells

[0822] The present example shows that RNA constructs encoding modified CSP constructs are expressed and secreted in mammalian cells.

[0823] To determine in vitro protein expression of some of the RNA constructs, 293T cells were transiently transfected with mRNA encoding CSP antigen. 24 h prior to transfection, 293T cells were seeded in a 6-well plate at a density of 500,000 cells/well in cell culture medium. Cells were transfected with 1 ug RNA using Lipofectamine 2000 (Invitrogen) as transfection agent. The following mRNA constructs were used in the experiment: R7111, R7641, R7642, R7643, R7647, R7649 and R7650 (see Table 12).

TABLE 12
RNA constructs used for western blot analysis, Example 4

| | | RNA | expected |
|---|---|---|---|
| Group | Construct | ID | protein size |
| A | Pf-CSP | R7111 | approx. 43 kDA |
| B | HsALB_Pf-CSP(19-384)_TM | R7641 | approx. 46 kDA |
| | domain HA | | |
| C | HsALB_Pf-CSP(19-384) | R7642 | approx. 41 kDA |
| D | HsALB_Pf-CSP(19-325) | R7643 | approx. 35 kDA |
| E | HsALB_Pf-CSP(19-272) | R7647 | approx. 29 kDA |
| F | HsALB_Pf-CSP(98-397) | R7649 | approx. 33 kDA |
| G | HsALB_Pf-CSP(98-374) | R7650 | approx. 31 kDA |

| | |
|---|---|
| M | Protein size marker |

[0824] Western Blot analysis was performed as commonly known in the art, using mouse anti-2A10 monoclonal antibody against the repeat region of CSP(1:5000 diluted) as primary antibody in combination with secondary anti-mouse antibody IgG IRDye 800CW (1:10000 diluted) (see FIG. 7A and FIG. 7B).

### Results:

[0825] For five of the tested RNA constructs (R7642; R7643; R7647; R7649 and R7650) the encoded CSP protein was detectable in the supernatants of transfected 293T cells (see FIG. 7A). Expression of all seven constructs was demonstrated in the corresponding cell lysates (see FIG. 7B).

### Example 5: Evaluation of the Functional Immunogenicity of mRNA Based Malaria Vaccines (Prophetic)

[0826] The aim of the present example is to evaluate the functional immunogenicity of the inventive mRNA based Malaria vaccine with an improved ELISA assay, a passive transfer model (Example 5.1), and a challenge model (Example 5.2).

5.1. Serum Analysis of Mice Vaccinated with Various CSP Based mRNA Vaccines:

[0827] Approximately 2 ml serum samples of mice vaccinated with LNP formulated CSP based vaccines are analyzed with an established ELISA model with recombinant CSP and sporozoites as positive controls.

[0828] Furthermore, 500 ul mouse sera are analyzed in a passive transfer model: CSP antibodies in serum samples are passively transferred to mice (n=4) that have been infected 2 h or 16 h following injection with Plasmodium berghei-Plasmodium falciparum CSP chimeric sporozoites or by 5 infectious mosquito bites. Mice are then evaluated for reduced parasite burden in the liver.

5.2. Challenge Study of Mice Vaccinated with Various CSP Based mRNA Vaccines:

[0829] LNP formulated mRNA-based Malaria vaccines are tested in a challenge model. Mice are vaccinated on days 0 and 21 and then challenged by 5 infectious mosquito bites with the transgenic Plasmodium berghei Malaria parasite (starting day 35 post vaccination). Mice are then evaluated for reduced parasite burden in the liver.

[0830] LNP-formulated mRNA vaccines encoding CSP are injected intramuscular on days 0 and 21. Starting on day 35 post vaccination, vaccinated mice are challenged by 5 infectious mosquito bites with the transgenic P. berghei parasite. The transgenic P. berghei parasite strain expresses the full-length P. falciparum CSP protein. These parasites generate highly infectious sporozoites in mice and mosquitoes.

### Example 6: Vaccination of Mice with LNP-Formulated mRNA Encoding CSP

[0831] The present example shows that Malaria mRNA vaccines encoding full length CSP induce strong humoral and cellular immune responses in mice.

[0832] Malaria mRNA constructs encoding full length CSP (Pf-CSP) or CSP(199-377) fragment with HBsAg (Pf-CSP(199-377)_Linker(PVTN)_HBsAg) were prepared according to Example 1. The mRNA was formulated in lipid nanoparticles GN01-LNPs (see Example 1.4.2). The different mRNA vaccine candidates were applied intramuscularly (i.m.; musculus tibialis, Balb/c mice) on days 0 and 21 and administered with doses of RNA, formulations, and administration routes as shown in Table 13A. One negative control group (3) received NaCl buffer. Serum samples were taken at day 21 and day 35 for determination of humoral immune responses. Splenocytes were taken at day 35 for determination of cellular immune responses.

TABLE 13A
Vaccination scheme of Example 6

| Group | No. of mice | Treatment | mRNA ID | Dose | Route | Volume |
|---|---|---|---|---|---|---|
| 1 | 6 | Pf-CSP | R7111 | 5 ug | i.m. | 1 × 25 uL |
| 2 | 6 | Pf-CSP(199-377)_Linker(PVTN)_HBsAg | R7271 | 5 ug | i.m. | 1 × 25 uL |
| 3 | 6 | NaCl buffer | | | i.m. | 1 × 25 uL |

### 6.1. Determination of Specific Humoral Immune Responses by ELISA:

[0833] ELISA was performed essentially as described in Example 2.1. Results are shown in FIG. 8.

### 6.2. Intracellular Cytokine Staining:

[0834] Splenocytes from vaccinated mice were isolated on day 35 according to a standard protocol known in the art. Briefly, isolated spleens were grinded through a cell strainer and washed in PBS/1% FBS followed by red blood cell lysis. After an extensive washing step with PBS/1% FBS, splenocytes were seeded into 96-well plates (2×10⁶ cells per well). Cells were stimulated with CSP peptide library (0.5 ug/ml, ThermoFisher) according to SEQ ID NO: 10212-10276 and one CSP peptide (0.5 ug/ml, CSP_peptide_12 according to SEQ ID NO: 10208, EMC Microcollections GmbH, see Table Cm) in the presence of 2.5 ug/ml of an anti-CD28 antibody (BD Biosciences) and a protein transport inhibitor for 6 h at 37° C. After stimulation, cells were washed and stained for intracellular cytokines using the Cytofix/Cytoperm reagent (BD Biosciences) according to the manufacturer's instructions. The following antibodies were used for staining: Thy1.2-FITC (1:100), CD8-PE-Cy7 (1:200), TNF-PE (1:100), IFNγ-APC (1:100) (eBioscience), CD4-BD Horizon V450 (1:200) (BD Biosciences) and incubated with Fcγ-block diluted 1:100. Aqua Dye was used to distinguish live/dead cells (Invitrogen). Cells were acquired using a BD FACS Canto II flow cytometer (Beckton Dickinson). Flow cytometry data was analyzed using FlowJo software (Tree Star, Inc.). Results are shown in FIG. 9.

### Results:

[0835] As shown in FIG. 8, the LNP formulated CSP mRNA vaccines induced strong humoral immune responses in mice. Under the tested conditions, the LNP formulated vaccine applied to group 1 (full length CSP) (5 ug dose) induced slightly increased immune responses in comparison to the LNP formulated mRNA vaccine comprising CSP(199-377) fragment with HBsAg (Group 2; Table 12).

[0836] As shown in FIG. 9, the LNP formulated CSP mRNA vaccines induced cellular immune responses in mice (CD8+ and/or CD4+ T-cell responses). Notably, under the tested conditions, group 1 (full length CSP) (5 ug dose) showed strong CD8+ T-cell and CD4+ cell responses, whereas the LNP formulated mRNA vaccine comprising CSP(199-377) fragment with HBsAg (Group 2; Table 12) only showed CD4+ T-cell responses.

[0837] As CD8+ T cells may be a major protective immune mechanism against intracellular infections caused by Malaria parasites, an effective Malaria vaccine should induce strong CD8+ T cells responses. Accordingly, these findings highlight one of the advantageous features of the inventive mRNA-based malaria vaccine. The more full-length CSP as an antigen induce broader humoral and especially cellular antibody responses compared to the truncated LNP formulated mRNA vaccine comprising CSP(199-377) fragment with HBsAg. The more full-length CSP may provide additional T cell epitopes, leading to increased cellular immunity, which could potentially enhance protection against Malaria.

### Example 7: Vaccination of Mice with LNP-Formulated mRNA Encoding CSP

[0838] The present example shows that the C-terminus of CSP is important for the mRNA Malaria vaccine to induce CD4+-T cell responses.

[0839] Malaria mRNA vaccine constructs encoding CSP variants (e.g. comprising a heterologous transmembrane domain (group 1), a deletion mutant of the GPI anchor (group 2), or a C-terminal shortened/deleted CSP variant (group 3)) were prepared according to Example 1. The mRNA was formulated in lipid nanoparticles GN01-LNPs (see Example 1.4.2). The different mRNA vaccine candidates were applied intramuscularly (i.m.; musculus tibialis, Balb/c mice) on days 0 and 21 and administered with doses of RNA, formulations, and administration routes as shown in Table 13B. One negative control group (4) received irrelevant RNA (polycytidylic acid (poly(C) RNA) (Sigma)). Serum samples were taken at day 21, and day 35 for determination of humoral immune responses. Splenocytes were taken at day 35 for determination of cellular immune responses.

TABLE 13B
Vaccination scheme of Example 7

| Group | No. of mice | Treatment | mRNA ID | Dose | Route | Volume |
|---|---|---|---|---|---|---|
| 1 | 8 | HsALB_Pf-CSP(19-384)_TM domain HA | R7641 | 1 ug | i.m. | 1 × 20 uL |
| 2 | 8 | HsALB_Pf-CSP(19-384) (without GPI- | R7642 | 1 ug | i.m. | 1 × 20 uL |
| | | anchor) | | | | |
| 3 | 8 | HsALB_Pf-CSP(19-272) | R7647 | 1 ug | i.m. | 1 × 20 uL |
| 4 | 5 | Poly: C | | 1 ug | i.m. | 1 × 20 uL |

### 7.1. Determination of Specific Humoral Immune Responses by ELISA:

[0840] ELISA was performed using malaria [NANP]₇, C-term or N-term peptide for coating (according to SEQ ID NOs: 10209, 10211, 10210 respectively). Coated plates were incubated using respective serum dilutions, and binding of specific antibodies to the malaria [NANP]₇, C-term or N-term peptide, respectively were detected using biotinylated isotype specific anti-mouse antibodies followed by streptavidin-HRP (horse radish peroxidase) with Amplex as substrate. Endpoint titers of antibodies (IgG1, IgG2a) directed against the malaria [NANP]₇, C-term or N-term peptide, respectively were measured by ELISA on day 21 and day 35 post vaccinations. Results are shown in FIGS. 10 A-F.

### 7.2. Intracellular Cytokine Staining:

[0841] Splenocytes from vaccinated mice were isolated on day 35 according to a standard protocol known in the art. Intracellular cytokine staining was performed essentially as described in Example 2.3. The results are shown in FIG. 11.

### Results:

[0842] As shown in FIG. 10, all LNP formulated CSP mRNA vaccines induced strong, humoral immune responses in mice. Under the tested conditions, the “more full length” mRNA vaccines applied to group 1 and 2 (Table 13) induced the strongest immune responses. Accordingly, these findings show that epitopes in C-terminus are important to induce humoral immune response in general, as well against epitopes in the immunodominant NANP-region (see e.g. FIGS. 10 A and 10 B: Elisa analysis with NANP-coating material).

[0843] As shown in FIG. 11, all LNP formulated CSP mRNA vaccines induced cellular immune responses in mice (CD8+ and/or CD4+ T-cell responses). Notably, under the tested conditions, the mRNA vaccine without the GPI anchor (group 2, Table 13) showed stronger CD8+ T-cell and CD4+ T-cell responses as group 1 with the transmembrane domain of HA and group 3 the C-terminal shortened CSP variant. These findings again show that epitopes in C-terminus are important to induce CD4+ T-cell responses, as the “more full length” mRNA (applied to group 2) in comparison to the mRNA vaccine encoding a shortened CSP variant (applied to group 3) leads to superior T-cell responses (CD4+ T-cells).

### Example 8: Vaccination of Mice with LNP-Formulated mRNA Encoding CSP

[0844] The present example shows that the C-terminus is important for the mRNA Malaria vaccine to induce CD4+-T cell responses.

[0845] Malaria mRNA constructs encoding CSP variants (comprising heterologous transmembrane domain (group 1), or a heterologous secretory signal peptide (group 1, 2, 3, 5), CSP constructs with a deletion of the GPI anchor (group 2), or shortened C-terminal CSP (group 3), CSP fragment with heterologous HBsAg (group 4)) were prepared according to Example 1. The mRNA was formulated in lipid nanoparticles (LNP-III-3) (see Example 1.4.1). The different mRNA vaccine candidates were applied intramuscularly (i.m.; musculus tibialis, Balb/c mice) on days 0 and 21 and administered with doses of RNA, formulations, and administration routes as shown in Table 14. One negative control group (7) received irrelevant RNA (polycytidylic acid (poly(C) RNA) (Sigma). Serum samples were taken at day 21, and day 35 for determination of humoral immune responses. Splenocytes were taken at day 35 for determination of cellular immune responses.

TABLE 14
Vaccination scheme of Example 8

| | No. of | | mRNA | | | |
|---|---|---|---|---|---|---|
| Group | mice | Treatment | ID | Dose | Route | Volume |
| 1 | 8 | HsALB_Pf-CSP(19-384)_TM domain HA | R7641 | 1 ug | i.m. | 1 × 20 uL |
| 2 | 8 | HsALB_Pf-CSP(19-384) (without GPI-anchor) | R7642 | 1 ug | i.m. | 1 × 20 uL |
| 3 | 8 | HsALB_Pf-CSP(19-272) | R7647 | 1 ug | i.m. | 1 × 20 uL |
| 4 | 8 | Pf-CSP(199-377)_Linker(PVTN)_HBsAg | R7271 | 1 ug | i.m. | 1 × 20 uL |
| 5 | 8 | HsALB_Pf-CSP(19-397) | R7267 | 1 ug | i.m. | 1 × 20 uL |
| 6 | 8 | Pf-CSP | R7111 | 1 ug | i.m. | 1 × 20 uL |
| 7 | 5 | Poly: C | | 1 ug | i.m. | 1 × 20 uL |

### 8.1. Determination of Specific Humoral Immune Responses by ELISA:

[0846] ELISA was performed essentially as described in Example 7.1. Results are shown in FIGS. 12 A-D.

### 8.2. Intracellular Cytokine Staining:

[0847] Splenocytes from vaccinated mice were isolated on day 35 according to a standard protocol known in the art.

[0848] Intracellular cytokine staining was performed essentially as described in Example 2.3. The results are shown in FIG. 13.

### Results:

[0849] As shown in FIG. 12, nearly all LNP formulated CSP mRNA vaccines induced strong, humoral immune responses in mice. Under the tested conditions, the more full length” mRNA vaccines applied to group 1, 2 and 5 with the heterologous secretory signal peptide compared to a shortened variant (applied to group 3) or the full length with the natural signal peptide (applied to group 6) (Table 14) induced stronger humoral immune responses. Accordingly, these findings show that epitopes in C-terminus are important to induce humoral immune responses against epitopes in the immunodominant NANP-region (see e.g. FIGS. 12A and 12B: ELISA analysis with [NANP]₇ coating).

[0850] As shown in FIG. 13 A, all LNP formulated CSP mRNA vaccines induced cellular immune responses in mice (CD8+ and/or CD4+ T-cell responses). Notably, under the tested conditions, the mRNA vaccine with a deletion of the GPI anchor (group 2, Table 14) showed strongest CD8+ T-cell responses. The mRNA vaccine with the shortest C-terminus (group 3, Table 14) showed low CD4+ T-cell response. These findings again show that epitopes in C-terminus are important to induce especially CD4+ T-cell response, as the “more full length” mRNA (applied to group 1, 2, 5 and 6) in comparison to the mRNA vaccine encoding a shortened CSP variant (applied to group 3) leads to superior CD4+ T-cell responses.

[0851] As shown in FIG. 13A, and for better visibility in FIG. 13B, under the tested conditions the mRNA Malaria vaccine encoding with a heterologous secretory signal peptide (human serum albumin signal peptide, group 5, Table 14) showed better CD8+ T-cell and slightly better CD4+ T-cell responses compared to the mRNA Malaria vaccine with the wild type signal peptide (group 6, Table 14).

### Example 9: Vaccination of Mice with LNP-Formulated mRNA Encoding CSP

[0852] The present example shows that mRNA vaccines comprising different T cell epitopes at the C-terminus of the CSP induces different pronounced humoral as well as cellular immune responses.

[0853] Malaria mRNA constructs encoding CSP with different C-terminus variants were prepared according to Example 1. The mRNA was formulated in lipid nanoparticles (LNP-III-3) (see Example 1.4.1). The different mRNA vaccine candidates were applied intramuscularly (i.m.; musculus tibialis, Balb/c mice) on days 0 and 21 and administered with doses of RNA, formulations, and administration routes as shown in Table 15. One negative control group (9) received irrelevant RNA. Serum samples were taken at day 21, and day 35 for determination of humoral immune responses. Splenocytes were taken at day 35 for determination of cellular immune responses.

TABLE 15
Vaccination scheme of Example 9

| | No. of | | mRNA | | | |
|---|---|---|---|---|---|---|
| Group | mice | Treatment | ID | Dose | Route | Volume |
| 1 | 8 | HsALB_Pf-CSP(19-384) | R7642 | 1 ug | i.m. | 1 × 20 uL |
| 2 | 8 | HsALB_Pf-CSP(19-272)_Linker(AAY)_Pf-CSP(310- | R8100 | 1 ug | i.m. | 1 × 20 uL |
| | | 327)_Linker(AAY)_Pf-CSP(346-375) | | | | |
| 3 | 8 | HsALB_Pf-CSP(19-272)_Linker(AAY)_Pf-CSP(346- | R8101 | 1 ug | i.m. | 1 × 20 uL |
| | | 365)_Linker(AAY)_PADRE | | | | |
| 4 | 8 | HsALB_Pf-CSP(19-272)_Linker(AAY)_Pf-CSP(346- | R8102 | 1 ug | i.m. | 1 × 20 uL |
| | | 365)_Linker(AAY)_P2 | | | | |
| 5 | 8 | HsALB_Pf-CSP(19-272)_Linker(G4S)_Pf-CSP(310- | R8103 | 1 ug | i.m. | 1 × 20 uL |
| | | 327)_Linker(G4S)_Pf-CSP(346-375) | | | | |
| 6 | 8 | HsALB_Pf-CSP(19-272)_Linker(G4S)_Pf-CSP(310- | R8104 | 1 ug | i.m. | 1 × 20 uL |
| | | 327)_Pf-CSP(346-375) | | | | |
| 7 | 8 | HsALB_Pf-CSP(199-377)_Linker(PVTN)_HBsAg | R8031 | 1 ug | i.m. | 1 × 20 uL |
| 8 | 8 | HsALB_Pf-CSP(19-397) | R7267 | 1 ug | i.m. | 1 × 20 uL |
| 9 | 5 | Irrelevant RNA | | 1 ug | i.m. | 1 × 20 uL |

### 9.1. Determination of Specific Humoral Immune Responses by ELISA:

[0854] ELISA was performed essentially as described in Example 7.1. Results are shown in FIGS. 14 A-D.

### 9.2. Intracellular Cytokine Staining:

[0855] Splenocytes from vaccinated mice were isolated on day 35 according to a standard protocol known in the art. Briefly, isolated spleens were grinded through a cell strainer and washed in PBS/1% FBS followed by red blood cell lysis. After an extensive washing step with PBS/1% FBS, splenocytes were seeded into 96-well plates (2×10⁶ cells per well). Cells were stimulated with a mixture of CSP peptides (1 ug/ml, EMC Microcollections GmbH) (see Table C) for CD4+ T-cell stimulation or with a CSP peptide library (0.5 ug/ml, ThermoFisher) according to SEQ ID NO: 10212-10276 for CD8+ T-cell stimulation in the presence of 2.5 ug/ml of an anti-CD28 antibody (BD Biosciences) and a protein transport inhibitor for 6 h at 37° C. After stimulation, cells were washed and stained for intracellular cytokines using the Cytofix/Cytoperm reagent (BD Biosciences) according to the manufacturer's instructions. The following antibodies were used for staining: Thy1.2-FITC (1:100), CD8-PE-Cy7 (1:200), TNF-PE (1:100), IFNγ-APC (1:100) (eBioscience), CD4-BD Horizon V450 (1:200) (BD Biosciences) and incubated with Fcγ-block diluted 1:100. Aqua Dye was used to distinguish live/dead cells (Invitrogen). Cells were acquired using a BD FACS Canto II flow cytometer (Beckton Dickinson). Flow cytometry data was analyzed using FlowJo software (Tree Star, Inc.). Results are shown in FIG. 15.

### Results:

[0856] As shown in FIGS. 14 and 15, nearly all LNP formulated CSP mRNA vaccines induced strong, humoral and/or cellular immune responses in mice.

[0857] Under the tested conditions the constructs with C-terminus _Linker(AAY)_Pf-CSP(310-327)_Linker(AAY)_Pf-CSP(346-375) and _Linker(AAY)_Pf-CSP(346-365)_Linker(AAY)_PADRE (R8100 and R8101, group 2 and 3, Table 15) showed strong humoral immune response. Construct with _Linker(AAY)_Pf-CSP(310-327)_Linker(AAY)_Pf-CSP(346-375) (R8100, group 2, Table 15) showed also strong CD8+ T-cell response as well as constructs with _Linker(G4S)_Pf-CSP(310-327)_Pf-CSP(346-375) (R8104, group 6, Table 15) which also showed strong CD8+ T-cell response. These two constructs (R8100 and R8104, group 2 and 6, Table 15) also showed best CD4+ T-cell response of the tested C-terminus constructs.

[0858] The relative location between the T-cell epitopes, e.g. reached by the introduction of heterologous linker elements also influenced the induction of humoral or cellular immune responses. The mRNA vaccine comprising e.g. the introduced AAY linker for example (R8100, group 2, Table 15) induced stronger humoral immune response compared to G4S linker and therefore a changed location of the T-cell epitopes (R8103, group 5).

[0859] The findings also showed that the direct linking of epitopes like in construct HsALB_Pf-CSP(19-272)_Linker(G4S)_Pf-CSP(310-327)_Pf-CSP(346-375) (R8104, group 6, Table 15) induced stronger CD8+ T-cell response than the separation with an additional linker HsALB_Pf-CSP(19-272)_Linker(G4S)_Pf-CSP(310-327)_Linker(G4S)_Pf-CSP(346-375) (R8103, group 5, Table 15).

[0860] Therefore it is very important to test different combinations of linkers and epitopes to induce the best humoral as well as cellular immune response. Each of the tested combination showed its power to induce immune response at different stages. A vaccine composition comprising different mRNAs encoding different CSP protein designs might be a powerful tool to reach balanced and powerful humoral and cellular immune responses.

### Example 10: Vaccination of Mice with LNP-Formulated mRNA Encoding CSP

[0861] The present example shows that different length of N-terminus as well as of NANP repeat regions at the C-terminus of the Malaria mRNA vaccine induces different humoral and cellular immune responses.

[0862] Malaria mRNA constructs encoding CSP with different NANP repeat region variants at the C-terminus and N-terminus variants were prepared according to Example 1. The mRNA was formulated in lipid nanoparticles (LNP-III-3) (see Example 1.4.1). The different mRNA vaccine candidates were applied intramuscularly (i.m.; musculus tibialis, Balb/c mice) on days 0 and 21 and administered with doses of RNA, formulations, and administration routes as shown in Table 16. One negative control group (9) received irrelevant RNA. Serum samples were taken at day 21, and day 35 for determination of humoral immune responses. Splenocytes were taken at day 35 for determination of cellular immune responses.

TABLE 16
Vaccination scheme of Example 10

| | No. of | | mRNA | | | |
|---|---|---|---|---|---|---|
| Group | mice | Treatment | ID | Dose | Route | Volume |
| 1 | 8 | HsALB_Pf-CSP(19-272) | R7647 | 1 ug | i.m. | 1 × 20 uL |
| 2 | 8 | HsALB_Pf-CSP(19-192) | R8090 | 1 ug | i.m. | 1 × 20 uL |
| 3 | 8 | HsALB_Pf-CSP(19-152) | R8091 | 1 ug | i.m. | 1 × 20 uL |
| 4 | 8 | HsALB_Pf-CSP(82-397) | R8092 | 1 ug | i.m. | 1 × 20 uL |
| 5 | 8 | HsALB_Pf-CSP(93-397) | R8089 | 1 ug | i.m. | 1 × 20 uL |
| 6 | 8 | HsALB_Pf-CSP(98-397) | R7649 | 1 ug | i.m. | 1 × 20 uL |
| 7 | 8 | HsALB_Pf-CSP(199-377)_Linker(PVTN)_HBsAg | R8031 | 1 ug | i.m. | 1 × 20 uL |
| 8 | 8 | HsALB_Pf-CSP(19-397) | R7267 | 1 ug | i.m. | 1 × 20 uL |
| 9 | 5 | Irrelevant RNA | | 1 ug | i.m. | 1 × 20 uL |

### 10.1. Determination of Specific Humoral Immune Responses by ELISA:

[0863] ELISA was performed essentially as described in Example 7.1. Results are shown in FIGS. 16 A-D.

### 10.2. Intracellular Cytokine Staining:

[0864] Splenocytes from vaccinated mice were isolated on day 35 according to a standard protocol known in the art. Intracellular cytokine staining was performed essentially as described in Example 9.2. The results are shown in FIG. 17.

### Results:

[0865] As shown in FIG. 16, nearly all LNP formulated CSP mRNA vaccines induced humoral immune responses in mice. Under the tested conditions, the mRNA vaccine with shortened NANP repeats at the C-terminus (groups 1-3, Table 16) showed less antibody response compared to mRNA vaccines shortened at the N-terminus (groups 4-6, Table 16). Accordingly, these findings show that epitopes in C-terminus and NANP repeat region are important to induce humoral immune responses.

[0866] As shown in FIG. 17, all LNP formulated CSP mRNA vaccines induced cellular immune responses in mice (CD8+ and/or CD4+ T-cell responses). Notably, under the tested conditions, the mRNA vaccine with shortened NANP repeats at the C-terminus (groups 1-3, Table 16) showed strongest CD8+ T-cell response but less CD4+ T-cell response and vice versa mRNA vaccines with shortened N-terminus (groups 4-6, Table 16) showed strongest CD4+ T-cell but less CD8+ T-cell response. Accordingly, these findings show that epitopes in N-terminus are important to induce a CD8+ T-cell response whereas epitopes in the C-terminus are important to induce a CD4+ T-cell immune response.

### Example 11: Vaccination of Mice with LNP-Formulated mRNA Encoding CSP

[0867] The present example shows that mRNA Malaria vaccines comprising differently capped mRNA (cap1 or cap0) induce different humoral as well as cellular immune responses.

[0868] Malaria mRNA constructs encoding CSP were capped differently and were prepared according to Example 1. The mRNA was formulated in lipid nanoparticles (LNP-III-3) (see Example 1.4.1). The different mRNA vaccine candidates were applied intramuscularly (i.m.; musculus tibialis, Balb/c mice) on days 0 and 21 and administered with doses of RNA, formulations, and administration routes as shown in Table 17. One negative control group (3) received irrelevant RNA. Serum samples were taken at day 21, and day 35 for determination of humoral immune responses. Splenocytes were taken at day 35 for determination of cellular immune responses.

TABLE 17
Vaccination scheme of Example 11

| Group | No. of mice | Treatment | Capping | mRNA ID | Dose | Route | Volume |
|---|---|---|---|---|---|---|---|
| 1 | 8 | HsALB_Pf-CSP(19-384) | cap0 | R7642 | 1 ug | i.m. | 1 × 20 uL |
| 2 | 8 | HsALB_Pf-CSP(19-384) | cap1 | R8230 | 1 ug | i.m. | 1 × 20 uL |
| 3 | 5 | Irrelevant RNA | | | 1 ug | i.m. | 1 × 20 uL |

### 11.1. Determination of Specific Humoral Immune Responses by ELISA:

[0869] ELISA was performed essentially as described in Example 7.1. Results are shown in FIG. 18.

### 11.2. Intracellular Cytokine Staining:

[0870] Splenocytes from vaccinated mice were isolated on day 35 according to a standard protocol known in the art. Intracellular cytokine staining was performed essentially as described in Example 9.2. The results are shown in FIG. 19.

### Results:

[0871] As shown in FIG. 18, independently which capping is used all LNP formulated CSP mRNA vaccines induced strong humoral immune responses in mice.

[0872] As shown in FIG. 19, all LNP formulated CSP mRNA vaccines induced cellular immune responses in mice (CD8+ and/or CD4+ T-cell responses). Notably, under the tested conditions, the mRNA vaccine with cap1 (group 2, Table 18) showed very strong CD8+ T-cell response and also strong CD4+ T-cell response.

### Example 12: Vaccination of Mice with LNP-Formulated mRNA Encoding CSP

[0873] The present example shows that differently capped mRNA Malaria vaccine induces different humoral as well as cellular immune response and that a longer interval between prime and boost vaccination can induce stronger immune responses.

[0874] Malaria mRNA constructs encoding CSP were capped differently and prepared according to Example 1. The mRNA was formulated in lipid nanoparticles (LNP-III-3) (see Example 1.4.1). The different mRNA vaccine candidates were applied intramuscularly (i.m.; musculus tibialis, Balb/c mice) on day 0 and 21 or 56 and administered with doses of RNA, formulations, and administration routes as shown in Table 18. Two negative control groups (3 and 6) received NaCl buffer. Serum samples were taken at day 21, day 35, day 49, day 70, and day 84 for determination of humoral immune responses. Splenocytes were taken at day 84 for determination of cellular immune responses.

TABLE 18
Vaccination scheme of Example 12

| | No. of | | | mRNA | | | | Vaccination |
|---|---|---|---|---|---|---|---|---|
| Group | mice | Treatment | Capping | ID | Dose | Route | Volume | at day |
| 1 | 6 | HsALB_Pf-CSP(19-397) | cap0 | R7267 | 5 ug | i.m. | 1 × 25 uL | 0 and 21 |
| 2 | 6 | HsALB_Pf-CSP(19-397) | cap1 | R8229 | 5 ug | i.m. | 1 × 25 uL | 0 and 21 |
| 3 | 6 | NaCl buffer | | | | i.m. | 1 × 25 uL | 0 and 21 |
| 4 | 6 | HsALB_Pf-CSP(19-397) | cap0 | R7267 | 5 ug | i.m. | 1 × 25 uL | 0 and 56 |
| 5 | 6 | HsALB_Pf-CSP(19-397) | cap1 | R8229 | 5 ug | i.m. | 1 × 25 uL | 0 and 56 |
| 6 | 6 | NaCl buffer | | | | i.m. | 1 × 25 uL | 0 and 56 |

### 12.1. Determination of Specific Humoral Immune Responses by ELISA:

[0875] ELISA was performed essentially as described in Example 7.1. Results are shown in FIG. 20.

### 12.2. Intracellular Cytokine Staining:

[0876] Splenocytes from vaccinated mice were isolated on day 84 according to a standard protocol known in the art. Intracellular cytokine staining was performed essentially as described in Example 6.2. The results are shown in FIG. 21.

### Results:

[0877] As shown in FIG. 20, all tested LNP formulated CSP mRNA vaccines induced very strong humoral immune responses in mice at a comparable level. The humoral immune response is enhanced with a later boost at day 56 instead of day 21 of LNP formulated CSP mRNA vaccine. A prolonged interval between prime and boost vaccination leads to increased humoral immune responses (shown for IgG1 and IgG2a endpoint titers (group 5 and 6, day 70 and 84). CSP vaccines comprising cap1 instead of cap0 show in general more pronounced immune responses, especially for the early time points.

[0878] As shown in FIG. 21, all LNP formulated CSP mRNA vaccines induced cellular immune responses in mice (CD8+ and/or CD4+ T-cell responses). Notably, under the tested conditions, the mRNA vaccine with cap1 showed very strong CD8+ T-cell response and also strong CD4+ T-cell response.

### Example 13: Vaccination of Mice with LNP-Formulated mRNA Encoding CSP

[0879] The present example shows that mRNA Malaria vaccines with mRNA comprising alternative forms of the 3′end (e.g. hSL-A64-N5 or hSL-A100), induce strong humoral as well as cellular immune response in mice. Furthermore, mRNA vaccine comprising mRNA with chemically modified nucleotides (e.g. pseudourinine ψ) induces immune responses.

[0880] Malaria mRNA vaccines comprising mRNA constructs with different 3′-ends encoding CSP were prepared according to Example 1. The mRNA was formulated in lipid nanoparticles (LNP-III-3) (see Example 1.4.1). The different mRNA vaccine candidates were applied intramuscularly (i.m.; musculus tibialis, Balb/c mice) on day 0 and day 21 and administered with doses of RNA, formulations, and administration routes as shown in Table 18. One negative control group (7) received NaCl buffer. Serum samples were taken at day 21 and day 35 for determination of humoral immune responses. Splenocytes were taken at day 84 for determination of cellular immune responses.

TABLE 19
Vaccination scheme of Example 13

| | No. of | | Modifi- | | mRNA | | | |
|---|---|---|---|---|---|---|---|---|
| Group | mice | Treatment | cation | 3′-end | ID | Dose | Route | Volume |
| 1 | 8 | HsALB_Pf-CSP(19-397) | non | hSL-A64-N5 | R8523 | 1 ug | i.m. | 1 × 25 uL |
| 2 | 8 | HsALB_Pf-CSP(19-397) | non | hSL-A100 | R8520 | 1 ug | i.m. | 1 × 25 uL |
| 3 | 8 | HsALB_Pf-CSP(19-397) | ψ | hSL-A64-N5 | R8525 | 1 ug | i.m. | 1 × 25 uL |
| 4 | 8 | HsALB_Pf-CSP(19-397) | ψ | hSL-A100 | R8526 | 1 ug | i.m. | 1 × 25 uL |
| 5 | 8 | HsALB_Pf-CSP(199- | non | hSL-A100 | R8564 | 1 ug | i.m. | 1 × 25 uL |
| | | 377)_Linker(PVTN)_HBsAg | | | | | | |
| 6 | 8 | HsALB_Pf-CSP(93- | non | hSL-A100 | R8574 | 1 ug | i.m. | 1 × 25 uL |
| | | 384)_Linker(PVTN)_HBsAg | | | | | | |
| 7 | 8 | NaCl buffer | | | | | | |

### 13.1. Determination of Specific Humoral Immune Responses by ELISA:

[0881] ELISA was performed essentially as described in Example 5.1. Results are shown in FIG. 22. 13.2. Intracellular Cytokine Staining:

[0882] Splenocytes from vaccinated mice were isolated on day 35 according to a standard protocol known in the art. Intracellular cytokine staining was performed essentially as described in Example 6.2. The results are shown in FIG. 23.

### Results:

[0883] As shown in FIG. 22, independently which 3′-end is used all LNP formulated CSP mRNA vaccines induced very strong humoral immune responses in mice. Furthermore, mRNA vaccine comprising mRNA with chemically modified nucleotides (e.g. pseudourinine ψ) induces humoral immune responses as well.

[0884] As shown in FIG. 23, independently which 3′-end is used all LNP formulated CSP mRNA vaccines induced strong cellular immune responses in mice (CD8+ and/or CD4+ T-cell responses). Notably, under the tested conditions, the mRNA vaccine comprising pseudouridine (ψ) modified nucleotides showed lower CD8+ T-cell and CD4+ T-cell response than mRNA vaccine comprising non-modified nucleotides. Independently which 3′-end is used strong humoral as well as cellular immune responses are generated.

### Example 14: Expression Analysis of Different mRNA Construct Encoding CSP in 293T Cells

[0885] The present example shows that mRNA constructs with alternative 3′-ends encoding different CSP constructs are expressed in mammalian cells.

[0886] To determine in vitro protein expression of some of the RNA constructs, 293T cells were transiently transfected with mRNA encoding CSP antigen. 24 h prior to transfection, 293T cells were seeded in a 6-well plate at a density of 500,000 cells/well in cell culture medium. Cells were transfected with 1 ug RNA using Lipofectamine 2000 (Invitrogen) as transfection agent. Cell lysates were subjected to SDS-PAGE and Western Blot analysis was performed as commonly known in the art, using rabbit anti-CSP falciparum serum (Alpha Diagnostics) against a part of the repeat region of CSP and the C-terminus (1:1000 diluted) or mouse anti-alpha-tubulin antibody (1:1000; Abcam) as primary antibodies in combination with secondary goat anti-rabbit antibody IgG IRDye 800CW (Li-Cor, 1:10000 diluted) or goat anti-mouse IgG IRDye® 680RD (Li-Cor, 1:100000 diluted) (see FIG. 24). Detection and quantification was performed using a Li-Cor detection system (Odyssey CLx image system) in combination with Image Studio Lite software. Table 19 contains mRNA constructs that were used in the experiment:

TABLE 20
RNA constructs used for western blot analysis

| Group | Treatment | 3′-end | mRNA ID |
|---|---|---|---|
| A | HsALB_Pf-CSP(19-384)_Linker(PVTN)_HBsAg | A64-N5-C30-hSL-N5 | R8565 |
| B | HsALB_Pf-CSP(19-384)_Linker(PVTN)_HBsAg | hSL-A100 | R8566 |
| C | HsALB_Pf-CSP(19-272)_Linker(PVTN)_HBsAg | A64-N5-C30-hSL-N5 | R8567 |
| D | HsALB_Pf-CSP(19-272)_Linker(PVTN)_HBsAg | hSL-A100 | R8568 |
| E | HsALB_Pf-CSP(19-272)_Linker(AAY)_Pf-CSP(346- | A64-N5-C30-hSL-N5 | R8571 |
| | 365)_Linker(AAY)_PADRE_Linker(PVTN)_HBsAg | | |
| F | HsALB_Pf-CSP(19-272)_Linker(AAY)_Pf-CSP(346- | hSL-A100 | R8572 |
| | 365)_Linker(AAY)_PADRE_Linker(PVTN)_HBsAg | | |
| G | HsALB_Pf-CSP(93-384)_Linker(PVTN)_HBsAg | A64-N5-C30-hSL-N5 | R8573 |
| H | HsALB_Pf-CSP(93-384)_Linker(PVTN)_HBsAg | hSL-A100 | R8574 |
| I | Water | | |
| M | Protein size marker | | |

### Results:

[0887] As shown in FIG. 24 all tested mRNA constructs expressed detectable CSP proteins, which is a prerequisite for an mRNA-based Malaria vaccine.

### Example 15: Expression Analysis of Different mRNA Construct Encoding CSP

[0888] To determine in vitro protein expression of the mRNA constructs, the constructs with different heterologous N-terminus (group A and B, Table 20) or with different heterologous signal peptides (group C and D, Table 20) were mixed with components of Promega Rabbit Reticulocyte Lysate System according to manufacture protocol. The lysate contains the cellular components necessary for protein synthesis (tRNA, ribosomes, amino acids, initiation, elongation and termination factors). As positive control Luciferase RNA from Lysate System Kit was used. The translation result was analyzed by SDS-Page and Western Blot analysis (IRDye 800CW streptavidin antibody (1:2000)). Table 20 summarizes the tested RNA constructs.

TABLE 21
Overview of mRNA constructs used in Example 15

| Group | Treatment | 3′-end | mRNA ID |
|---|---|---|---|
| A | HsALB_Pf-CSP(19-384)_Linker(SGG)_Ferritin | A64-N5-C30-hSL-N5 | R8780 |
| B | HsALB_Pf-CSP(19-384)_Linker(SGG)_Ferritin | hSL-A100 | R8781 |
| C | LumSynt_Linker(GGS4-GGG)_Pf-CSP(19-397) | A64-N5-C30-hSL-N5 | R8782 |
| D | LumSynt_Linker(GGS4-GGG)_Pf-CSP(19-397) | hSL-A100 | R8783 |
| E | control RNA from Lysate System Kit | | |
| F | RNAse free water | | |
| M | Protein size marker | | |

### Results:

[0889] As shown in FIG. 25 the used mRNA constructs led to a detectable protein expression, which is a prerequisite for an mRNA-based Malaria vaccine.

### Example 16: Functional Immunogenicity of Malaria mRNA Vaccine in a Challenge

[0890] The aim of the present example is to evaluate the functional immunogenicity of the inventive mRNA based Malaria vaccine with an improved ELISA assay, a passive transfer challenge model (Example 16.1), and an active challenge model (Example 16.2).

16.1. Serum Analysis of Mice Vaccinated with Various CSP Based mRNA Vaccines:

[0891] Serum samples of mice vaccinated with LNP formulated CSP based vaccines are analyzed with an established ELISA model with recombinant CSP and sporozoites as positive controls.

[0892] Furthermore, 400 ul mouse sera are analyzed in a passive transfer model: CSP antibodies in serum samples are passively transferred to mice (n=4) that have been infected 2 h following injection with Plasmodium berghei-Plasmodium falciparum CSP chimeric sporozoites (see Table 22). Mice are then evaluated for reduced parasite burden in the liver.

TABLE 22
Overview of passive transfer analysis
according Example 16.1.

| | No. of | | | | |
|---|---|---|---|---|---|
| Group | mice | Serum | Dose | Route | infection |
| 1 | 4 | mRNA CSP | 400 ul | i.v. | 2 h prior to |
| | | vaccine | | | challenge with |
| 2 | 4 | mAB311 or | 400 ul | i.v. | 2000 sporozites |
| | | 317 | | | |
| 3 | 4 | Na [symbol] ve | 400 ul | i.v. | |
| 4 | 4 | mRNA CSP | 400 ul | i.v. | 2 h prior to |
| | | vaccine | | | challenge with |
| 5 | 4 | mAB311 or | 400 ul | i.v. | 250 sporozites |
| | | 317 | | | |
| 6 | 4 | Na [symbol] ve | 400 ul | i.v. | |

16.2. Active Challenge Study of Mice Vaccinated with Various CSP Based mRNA Vaccines:

[0893] LNP formulated mRNA-based Malaria vaccines are tested in an active challenge model. Mice are then evaluated for reduced parasite burden in the liver.

[0894] LNP-formulated mRNA vaccines encoding CSP are injected intramuscular on days 0 and 21. Starting on day post vaccination, vaccinated mice are challenged with Plasmodium berghei-Plasmodium falciparum CSP chimeric sporozoites (see Table 23).

TABLE 23
Vaccination scheme of Example 16.2.

| Group | No. of mice | Treatment | Dose | Route | Volume | Challenge/dose |
|---|---|---|---|---|---|---|
| 1 | 5 | m RNA CSP vaccine | 1 ug | i.m. | 1 × 25 uL | On day 35 with 2000 |
| 2 | 5 | m RNA CSP vaccine | 5 ug | i.m. | 1 × 25 uL | sporozoites |
| 3 | 5 | m RNA CSP vaccine | 10 ug | i.m. | 1 × 25 uL | |
| 4 | 5 | m RNA irrelevant control | 10 ug | i.m. | 1 × 25 uL | |
| 5 | 5 | mAB311 or 317 | — | i.m. | 1 × 25 uL | |
| 6 | 5 | Naïve | — | i.m. | 1 × 25 uL | |

### Example 17: Analysis of Polyvalent Malaria mRNA Vaccine

[0895] The present example shows a mRNA vaccine composition comprising different CSP constructs according the invention comprising for example, but are not limited to:
[0896] at least one mRNA encoding a more full length CSP(I) and at least a second mRNA encoding a shortened CSP fragment with HBsAg (II), or
[0897] at least two different mRNA constructs comprising different heterologous or CSP-derived T-cell helper epitopes (I) and (II), or
[0898] at least one mRNA encoding a more full length CSP with a heterologous signal peptide (I) and at least a second mRNA encoding a shortened CSP fragment with HBsAg (II).

[0899] RNAs encoding different Malaria mRNA vaccine encoding CSP or a fragment or variant thereof (see Table 24) were generated according to Example 1 and formulated in LNPs according to Example 1.4.1 or 1.4.2. Balb/c mice (9 mice per group) are vaccinated on day 0 and day 21 intramuscularly (i.m). Serum is collected at day 21 and 28 to test humoral immune responses. Splenocytes are collected at day 28 to test cellular immune responses via an ICS as described above.

TABLE 24
Example of Animal groups and vaccination
schedule of Example 17

| Group | No. of mice | Vaccine composition |
|---|---|---|
| A | 9 | 0.9% NaCl buffer (negative control) |
| B | 9 | mRNA encoding for CSP (I) |
| C | 9 | mRNA encoding for CSP (II) |
| D | 9 | mRNA encoding for CSP (I) and |
| | | mRNA encoding for CSP (II) |

### Example 18: Safety, Reactogenicity and Immunogenicity of Malaria mRNA Vaccine in Healthy Adults

[0900] To demonstrate safety, reactogenicity and immunogenicity of Malaria mRNA vaccine, a phase I clinical trial is initiated.

[0901] For clinical development, RNA is used that has been produced under GMP conditions (e.g. using a procedure as described in WO2016/180430).

[0902] In this Malaria mRNA vaccine phase I trial different dosages of the candidate Malaria mRNA vaccine will be administered in a one or two-dose schedule to healthy adult subjects. The subjects will be enrolled sequentially into the different trial groups to receive one or two doses of Malaria mRNA vaccine. The subjects in the two-dose groups will be administered a second dose 28 days or preferred 56 days later. An additional group of control subjects will receive a single dose of saline on day 1. Safety information for solicited (days 1-7 post-vaccination) and unsolicited (days 1-28 post-vaccination) adverse events (AEs) will be collected using diary cards. Serious AEs, AEs leading to premature withdrawal from the trial or receipt of the second dose, AEof Special Interest and medically-attended AEs will be collected throughout the trial (Day 1 to Day 365 post last vaccine dose). Specified safety data will be reviewed by an internal safety review team and a DSMB on a pre-defined schedule.

The application's sequence listing, which the Patent Office published only in electronic form, follows.

SEQUENCE LISTING (10276 sequences)

SEQ ID NO: 1 - protein, 397 aa, Artificial Sequence
  derived and/or modified protein sequence (wt) from Pf(3D7)__XP_001351122.1__Pf-CSP
MMRKLAILSVSSFLFVEALFQEYQCYGSSSNTRVLNELNYDNAGTNLYNELEMNYYGKQENWYSLKKNSRSLGENDDGNNEDNEKLRKPKHKKLKQPADGNPDPNANPNVDPNANPNVDPNANPNVDPNANPNANPNANPNANPNANPNANPNANPNANPNANPNANPNANPNANPNANPNANPNANPNANPNANPNVDPNANPNANPNANPNANPNANPNANPNANPNANPNANPNANPNANPNANPNANPNANPNANPNANPNANPNANPNKNNQGNGQGHNMPNDPNRNVDENANANSAVKNNNNEEPSDKHIKEYLNKIQNSLSTEWSPCSVTCGNGIQVRIKPGSANKPKDELDYANDIEKKICKMEKCSSVFNVVNSSIGLIMVLSFLFLN

SEQ ID NO: 2 - protein, 374 aa, Artificial Sequence
  derived and/or modified protein sequence (wt) from Pf(3D7)__XP_001351122.1__Pf-CSP(1-374)
MMRKLAILSVSSFLFVEALFQEYQCYGSSSNTRVLNELNYDNAGTNLYNELEMNYYGKQENWYSLKKNSRSLGENDDGNNEDNEKLRKPKHKKLKQPADGNPDPNANPNVDPNANPNVDPNANPNVDPNANPNANPNANPNANPNANPNANPNANPNANPNANPNANPNANPNANPNANPNANPNANPNANPNANPNVDPNANPNANPNANPNANPNANPNANPNANPNANPNANPNANPNANPNANPNANPNANPNANPNANPNANPNANPNKNNQGNGQGHNMPNDPNRNVDENANANSAVKNNNNEEPSDKHIKEYLNKIQNSLSTEWSPCSVTCGNGIQVRIKPGSANKPKDELDYANDIEKKICKMEKC

SEQ ID NO: 3 - protein, 325 aa, Artificial Sequence
  derived and/or modified protein sequence (wt) from Pf(3D7)__XP_001351122.1__Pf-CSP(1-325)
MMRKLAILSVSSFLFVEALFQEYQCYGSSSNTRVLNELNYDNAGTNLYNELEMNYYGKQENWYSLKKNSRSLGENDDGNNEDNEKLRKPKHKKLKQPADGNPDPNANPNVDPNANPNVDPNANPNVDPNANPNANPNANPNANPNANPNANPNANPNANPNANPNANPNANPNANPNANPNANPNANPNANPNANPNVDPNANPNANPNANPNANPNANPNANPNANPNANPNANPNANPNANPNANPNANPNANPNANPNANPNANPNANPNKNNQGNGQGHNMPNDPNRNVDENANANSAVKNNNNEEPSDKHIKEYLNKIQN

SEQ ID NO: 4 - protein, 397 aa, Artificial Sequence
  derived and/or modified protein sequence (artificial) from Pf(3D7)__XP_001351122.1__HsALB_Pf-CSP(19-397)
MKWVTFISLLFLFSSAYSLFQEYQCYGSSSNTRVLNELNYDNAGTNLYNELEMNYYGKQENWYSLKKNSRSLGENDDGNNEDNEKLRKPKHKKLKQPADGNPDPNANPNVDPNANPNVDPNANPNVDPNANPNANPNANPNANPNANPNANPNANPNANPNANPNANPNANPNANPNANPNANPNANPNANPNANPNVDPNANPNANPNANPNANPNANPNANPNANPNANPNANPNANPNANPNANPNANPNANPNANPNANPNANPNANPNKNNQGNGQGHNMPNDPNRNVDENANANSAVKNNNNEEPSDKHIKEYLNKIQNSLSTEWSPCSVTCGNGIQVRIKPGSANKPKDELDYANDIEKKICKMEKCSSVFNVVNSSIGLIMVLSFLFLN

SEQ ID NO: 5 - protein, 403 aa, Artificial Sequence
  derived and/or modified protein sequence (artificial) from Pf(3D7)__XP_001351122.1__HsIns-iso1_Pf-CSP(19-397)
MALWMRLLPLLALLALWGPDPAAALFQEYQCYGSSSNTRVLNELNYDNAGTNLYNELEMNYYGKQENWYSLKKNSRSLGENDDGNNEDNEKLRKPKHKKLKQPADGNPDPNANPNVDPNANPNVDPNANPNVDPNANPNANPNANPNANPNANPNANPNANPNANPNANPNANPNANPNANPNANPNANPNANPNANPNANPNVDPNANPNANPNANPNANPNANPNANPNANPNANPNANPNANPNANPNANPNANPNANPNANPNANPNANPNANPNKNNQGNGQGHNMPNDPNRNVDENANANSAVKNNNNEEPSDKHIKEYLNKIQNSLSTEWSPCSVTCGNGIQVRIKPGSANKPKDELDYANDIEKKICKMEKCSSVFNVVNSSIGLIMVLSFLFLN

SEQ ID NO: 6 - protein, 396 aa, Artificial Sequence
  derived and/or modified protein sequence (artificial) from Pf(3D7)__XP_001351122.1__HsSPARC_Pf-CSP(19-397)
MRAWIFFLLCLAGRALALFQEYQCYGSSSNTRVLNELNYDNAGTNLYNELEMNYYGKQENWYSLKKNSRSLGENDDGNNEDNEKLRKPKHKKLKQPADGNPDPNANPNVDPNANPNVDPNANPNVDPNANPNANPNANPNANPNANPNANPNANPNANPNANPNANPNANPNANPNANPNANPNANPNANPNANPNVDPNANPNANPNANPNANPNANPNANPNANPNANPNANPNANPNANPNANPNANPNANPNANPNANPNANPNANPNKNNQGNGQGHNMPNDPNRNVDENANANSAVKNNNNEEPSDKHIKEYLNKIQNSLSTEWSPCSVTCGNGIQVRIKPGSANKPKDELDYANDIEKKICKMEKCSSVFNVVNSSIGLIMVLSFLFLN

SEQ ID NO: 7 - protein, 397 aa, Artificial Sequence
  derived and/or modified protein sequence (artificial) from Pf(3D7)__XP_001351122.1__IgE_Pf-CSP(19-397)
MDWTWILFLVAAATRVHSLFQEYQCYGSSSNTRVLNELNYDNAGTNLYNELEMNYYGKQENWYSLKKNSRSLGENDDGNNEDNEKLRKPKHKKLKQPADGNPDPNANPNVDPNANPNVDPNANPNVDPNANPNANPNANPNANPNANPNANPNANPNANPNANPNANPNANPNANPNANPNANPNANPNANPNANPNVDPNANPNANPNANPNANPNANPNANPNANPNANPNANPNANPNANPNANPNANPNANPNANPNANPNANPNANPNKNNQGNGQGHNMPNDPNRNVDENANANSAVKNNNNEEPSDKHIKEYLNKIQNSLSTEWSPCSVTCGNGIQVRIKPGSANKPKDELDYANDIEKKICKMEKCSSVFNVVNSSIGLIMVLSFLFLN

SEQ ID NO: 8 - protein, 452 aa, Artificial Sequence
  derived and/or modified protein sequence (artificial) from Pf(3D7)__XP_001351122.1__Pf-CSP_L(G4SG4)_TM domain HA
MMRKLAILSVSSFLFVEALFQEYQCYGSSSNTRVLNELNYDNAGTNLYNELEMNYYGKQENWYSLKKNSRSLGENDDGNNEDNEKLRKPKHKKLKQPADGNPDPNANPNVDPNANPNVDPNANPNVDPNANPNANPNANPNANPNANPNANPNANPNANPNANPNANPNANPNANPNANPNANPNANPNANPNANPNVDPNANPNANPNANPNANPNANPNANPNANPNANPNANPNANPNANPNANPNANPNANPNANPNANPNANPNANPNKNNQGNGQGHNMPNDPNRNVDENANANSAVKNNNNEEPSDKHIKEYLNKIQNSLSTEWSPCSVTCGNGIQVRIKPGSANKPKDELDYANDIEKKICKMEKCSSVFNVVNSSIGLIMVLSFLFLNGGGGSGGGGKLESTRIYQILAIYSTVASSLVLVVSLGAISFWMCSNGSLQCRICI

SEQ ID NO: 9 - protein, 410 aa, Artificial Sequence
  derived and/or modified protein sequence (artificial) from Pf(3D7)__XP_001351122.1__Pf-CSP(199-377)_L(PVTN)_HBsAg
MDPNANPNANPNANPNANPNANPNANPNANPNANPNANPNANPNANPNANPNANPNANPNANPNANPNANPNANPNKNNQGNGQGHNMPNDPNRNVDENANANSAVKNNNNEEPSDKHIKEYLNKIQNSLSTEWSPCSVTCGNGIQVRIKPGSANKPKDELDYANDIEKKICKMEKCSSVPVTNMENITSGFLGPLLVLQAGFFLLTRILTIPQSLDSWWTSLNFLGGSPVCLGQNSQSPTSNHSPTSCPPICPGYRWMCLRRFIIFLFILLLCLIFLLVLLDYQGMLPVCPLIPGSTTTNTGPCKTCTTPAQGNSMFPSCCCTKPTDGNCTCIPIPSSWAFAKYLWEWASVRFSWLSLLVPFVQWFVGLSPTVWLSAIWMMWYWGPSLYSIVSPFIPLLPIFFCLWVYI

SEQ ID NO: 10 - protein, 424 aa, Artificial Sequence
  derived and/or modified protein sequence (artificial) from Pf(3D7)__XP_001351122.1__Pf-CSP(199-387)_L(PVTN)_HBsAg
MMAPDPNANPNANPNANPNANPNANPNANPNANPNANPNANPNANPNANPNANPNANPNANPNANPNANPNANPNANPNKNNQGNGQGHNMPNDPNRNVDENANANSAVKNNNNEEPSDKHIKEYLNKIQNSLSTEWSPCSVTCGNGIQVRIKPGSANKPKDELDYANDIEKKICKMEKCSSVFNVVNSSIGLGPVTNMENITSGFLGPLLVLQAGFFLLTRILTIPQSLDSWWTSLNFLGGSPVCLGQNSQSPTSNHSPTSCPPICPGYRWMCLRRFIIFLFILLLCLIFLLVLLDYQGMLPVCPLIPGSTTTNTGPCKTCTTPAQGNSMFPSCCCTKPTDGNCTCIPIPSSWAFAKYLWEWASVRFSWLSLLVPFVQWFVGLSPTVWLSAIWMMWYWGPSLYSIVSPFIPLLPIFFCLWVYI

SEQ ID NO: 11 - protein, 152 aa, Artificial Sequence
  derived and/or modified protein sequence (artificial) from Pf(3D7)__XP_001351122.1__HsALB_Pf-CSP(19-152)
MKWVTFISLLFLFSSAYSLFQEYQCYGSSSNTRVLNELNYDNAGTNLYNELEMNYYGKQENWYSLKKNSRSLGENDDGNNEDNEKLRKPKHKKLKQPADGNPDPNANPNVDPNANPNVDPNANPNVDPNANPNANPNANPNANPNANPNANP

SEQ ID NO: 12 - protein, 192 aa, Artificial Sequence
  derived and/or modified protein sequence (artificial) from Pf(3D7)__XP_001351122.1__HsALB_Pf-CSP(19-192)
MKWVTFISLLFLFSSAYSLFQEYQCYGSSSNTRVLNELNYDNAGTNLYNELEMNYYGKQENWYSLKKNSRSLGENDDGNNEDNEKLRKPKHKKLKQPADGNPDPNANPNVDPNANPNVDPNANPNVDPNANPNANPNANPNANPNANPNANPNANPNANPNANPNANPNANPNANPNANPNANPNANPNANP

SEQ ID NO: 13 - protein, 272 aa, Artificial Sequence
  derived and/or modified protein sequence (artificial) from Pf(3D7)__XP_001351122.1__HsALB_Pf-CSP(19-272)
MKWVTFISLLFLFSSAYSLFQEYQCYGSSSNTRVLNELNYDNAGTNLYNELEMNYYGKQENWYSLKKNSRSLGENDDGNNEDNEKLRKPKHKKLKQPADGNPDPNANPNVDPNANPNVDPNANPNVDPNANPNANPNANPNANPNANPNANPNANPNANPNANPNANPNANPNANPNANPNANPNANPNANPNANPNVDPNANPNANPNANPNANPNANPNANPNANPNANPNANPNANPNANPNANPNANPNANPNANPNANPNANPNANP

SEQ ID NO: 14 - protein, 326 aa, Artificial Sequence
  derived and/or modified protein sequence (artificial) from Pf(3D7)__XP_001351122.1__HsALB_Pf-CSP(19-272)_L(AAY)_Pf-CSP(310-3 27)_L(AAY)_Pf-CSP(346-375)
MKWVTFISLLFLFSSAYSLFQEYQCYGSSSNTRVLNELNYDNAGTNLYNELEMNYYGKQENWYSLKKNSRSLGENDDGNNEDNEKLRKPKHKKLKQPADGNPDPNANPNVDPNANPNVDPNANPNVDPNANPNANPNANPNANPNANPNANPNANPNANPNANPNANPNANPNANPNANPNANPNANPNANPNANPNVDPNANPNANPNANPNANPNANPNANPNANPNANPNANPNANPNANPNANPNANPNANPNANPNANPNANPNANPAAYEPSDKHIKEYLNKIQNSLAAYIKPGSANKPKDELDYANDIEKKICKMEKCS

SEQ ID NO: 15 - protein, 313 aa, Artificial Sequence
  derived and/or modified protein sequence (artificial) from Pf(3D7)__XP_001351122.1__HsALB_Pf-CSP(19-272)_L(AAY)_Pf-CSP(346-3 65)_L(AAY)_P2
MKWVTFISLLFLFSSAYSLFQEYQCYGSSSNTRVLNELNYDNAGTNLYNELEMNYYGKQENWYSLKKNSRSLGENDDGNNEDNEKLRKPKHKKLKQPADGNPDPNANPNVDPNANPNVDPNANPNVDPNANPNANPNANPNANPNANPNANPNANPNANPNANPNANPNANPNANPNANPNANPNANPNANPNANPNVDPNANPNANPNANPNANPNANPNANPNANPNANPNANPNANPNANPNANPNANPNANPNANPNANPNANPNANPAAYIKPGSANKPKDELDYANDIEAAYQYIKANSKFIGITEL

SEQ ID NO: 16 - protein, 311 aa, Artificial Sequence
  derived and/or modified protein sequence (artificial) from Pf(3D7)__XP_001351122.1__HsALB_Pf-CSP(19-272)_L(AAY)_Pf-CSP(346-3 65)_L(AAY)_PADRE
MKWVTFISLLFLFSSAYSLFQEYQCYGSSSNTRVLNELNYDNAGTNLYNELEMNYYGKQENWYSLKKNSRSLGENDDGNNEDNEKLRKPKHKKLKQPADGNPDPNANPNVDPNANPNVDPNANPNVDPNANPNANPNANPNANPNANPNANPNANPNANPNANPNANPNANPNANPNANPNANPNANPNANPNANPNVDPNANPNANPNANPNANPNANPNANPNANPNANPNANPNANPNANPNANPNANPNANPNANPNANPNANPNANPAAYIKPGSANKPKDELDYANDIEAAYAKFVAAWTLKAAA

SEQ ID NO: 17 - protein, 330 aa, Artificial Sequence
  derived and/or modified protein sequence (artificial) from Pf(3D7)__XP_001351122.1__HsALB_Pf-CSP(19-272)_L(G4S)_Pf-CSP(310-3 27)_L(G4S)_Pf-CSP(346-375)
MKWVTFISLLFLFSSAYSLFQEYQCYGSSSNTRVLNELNYDNAGTNLYNELEMNYYGKQENWYSLKKNSRSLGENDDGNNEDNEKLRKPKHKKLKQPADGNPDPNANPNVDPNANPNVDPNANPNVDPNANPNANPNANPNANPNANPNANPNANPNANPNANPNANPNANPNANPNANPNANPNANPNANPNANPNVDPNANPNANPNANPNANPNANPNANPNANPNANPNANPNANPNANPNANPNANPNANPNANPNANPNANPNANPGGGGSEPSDKHIKEYLNKIQNSLGGGGSIKPGSANKPKDELDYANDIEKKICKMEKCS

SEQ ID NO: 18 - protein, 325 aa, Artificial Sequence
  derived and/or modified protein sequence (artificial) from Pf(3D7)__XP_001351122.1__HsALB_Pf-CSP(19-272)_L(G4S)_Pf-CSP(310-3 27)_Pf-CSP(346-375)
MKWVTFISLLFLFSSAYSLFQEYQCYGSSSNTRVLNELNYDNAGTNLYNELEMNYYGKQENWYSLKKNSRSLGENDDGNNEDNEKLRKPKHKKLKQPADGNPDPNANPNVDPNANPNVDPNANPNVDPNANPNANPNANPNANPNANPNANPNANPNANPNANPNANPNANPNANPNANPNANPNANPNANPNANPNVDPNANPNANPNANPNANPNANPNANPNANPNANPNANPNANPNANPNANPNANPNANPNANPNANPNANPNANPGGGGSEPSDKHIKEYLNKIQNSLIKPGSANKPKDELDYANDIEKKICKMEKCS

SEQ ID NO: 19 - protein, 325 aa, Artificial Sequence
  derived and/or modified protein sequence (artificial) from Pf(3D7)__XP_001351122.1__HsALB_Pf-CSP(19-325)
MKWVTFISLLFLFSSAYSLFQEYQCYGSSSNTRVLNELNYDNAGTNLYNELEMNYYGKQENWYSLKKNSRSLGENDDGNNEDNEKLRKPKHKKLKQPADGNPDPNANPNVDPNANPNVDPNANPNVDPNANPNANPNANPNANPNANPNANPNANPNANPNANPNANPNANPNANPNANPNANPNANPNANPNANPNVDPNANPNANPNANPNANPNANPNANPNANPNANPNANPNANPNANPNANPNANPNANPNANPNANPNANPNANPNKNNQGNGQGHNMPNDPNRNVDENANANSAVKNNNNEEPSDKHIKEYLNKIQN

SEQ ID NO: 20 - protein, 384 aa, Artificial Sequence
  derived and/or modified protein sequence (artificial) from Pf(3D7)__XP_001351122.1__HsALB_Pf-CSP(19-384)
MKWVTFISLLFLFSSAYSLFQEYQCYGSSSNTRVLNELNYDNAGTNLYNELEMNYYGKQENWYSLKKNSRSLGENDDGNNEDNEKLRKPKHKKLKQPADGNPDPNANPNVDPNANPNVDPNANPNVDPNANPNANPNANPNANPNANPNANPNANPNANPNANPNANPNANPNANPNANPNANPNANPNANPNANPNVDPNANPNANPNANPNANPNANPNANPNANPNANPNANPNANPNANPNANPNANPNANPNANPNANPNANPNANPNKNNQGNGQGHNMPNDPNRNVDENANANSAVKNNNNEEPSDKHIKEYLNKIQNSLSTEWSPCSVTCGNGIQVRIKPGSANKPKDELDYANDIEKKICKMEKCSSVFNVVNSS

SEQ ID NO: 21 - protein, 430 aa, Artificial Sequence
  derived and/or modified protein sequence (artificial) from Pf(3D7)__XP_001351122.1__HsALB_Pf-CSP(19-384)_TM domain HA
MKWVTFISLLFLFSSAYSLFQEYQCYGSSSNTRVLNELNYDNAGTNLYNELEMNYYGKQENWYSLKKNSRSLGENDDGNNEDNEKLRKPKHKKLKQPADGNPDPNANPNVDPNANPNVDPNANPNVDPNANPNANPNANPNANPNANPNANPNANPNANPNANPNANPNANPNANPNANPNANPNANPNANPNANPNVDPNANPNANPNANPNANPNANPNANPNANPNANPNANPNANPNANPNANPNANPNANPNANPNANPNANPNANPNKNNQGNGQGHNMPNDPNRNVDENANANSAVKNNNNEEPSDKHIKEYLNKIQNSLSTEWSPCSVTCGNGIQVRIKPGSANKPKDELDYANDIEKKICKMEKCSSVFNVVNSSKLESTRIYQILAIYSTVASSLVLVVSLGAISFWMCSNGSLQCRICI

SEQ ID NO: 22 - protein, 334 aa, Artificial Sequence
  derived and/or modified protein sequence (artificial) from Pf(3D7)__XP_001351122.1__HsALB_Pf-CSP(82-397)
MKWVTFISLLFLFSSAYSDNEKLRKPKHKKLKQPADGNPDPNANPNVDPNANPNVDPNANPNVDPNANPNANPNANPNANPNANPNANPNANPNANPNANPNANPNANPNANPNANPNANPNANPNANPNANPNVDPNANPNANPNANPNANPNANPNANPNANPNANPNANPNANPNANPNANPNANPNANPNANPNANPNANPNANPNKNNQGNGQGHNMPNDPNRNVDENANANSAVKNNNNEEPSDKHIKEYLNKIQNSLSTEWSPCSVTCGNGIQVRIKPGSANKPKDELDYANDIEKKICKMEKCSSVFNVVNSSIGLIMVLSFLFLN

SEQ ID NO: 23 - protein, 118 aa, Artificial Sequence
  derived and/or modified protein sequence (artificial) from Pf(3D7)__XP_001351122.1__HsALB_Pf-CSP(93-192)
MKWVTFISLLFLFSSAYSKLKQPADGNPDPNANPNVDPNANPNVDPNANPNVDPNANPNANPNANPNANPNANPNANPNANPNANPNANPNANPNANPNANPNANPNANPNANPNANP

SEQ ID NO: 24 - protein, 198 aa, Artificial Sequence
  derived and/or modified protein sequence (artificial) from Pf(3D7)__XP_001351122.1__HsALB_Pf-CSP(93-272)
MKWVTFISLLFLFSSAYSKLKQPADGNPDPNANPNVDPNANPNVDPNANPNVDPNANPNANPNANPNANPNANPNANPNANPNANPNANPNANPNANPNANPNANPNANPNANPNANPNANPNVDPNANPNANPNANPNANPNANPNANPNANPNANPNANPNANPNANPNANPNANPNANPNANPNANPNANPNANP

SEQ ID NO: 25 - protein, 323 aa, Artificial Sequence
  derived and/or modified protein sequence (artificial) from Pf(3D7)__XP_001351122.1__HsALB_Pf-CSP(93-397)
MKWVTFISLLFLFSSAYSKLKQPADGNPDPNANPNVDPNANPNVDPNANPNVDPNANPNANPNANPNANPNANPNANPNANPNANPNANPNANPNANPNANPNANPNANPNANPNANPNANPNVDPNANPNANPNANPNANPNANPNANPNANPNANPNANPNANPNANPNANPNANPNANPNANPNANPNANPNANPNKNNQGNGQGHNMPNDPNRNVDENANANSAVKNNNNEEPSDKHIKEYLNKIQNSLSTEWSPCSVTCGNGIQVRIKPGSANKPKDELDYANDIEKKICKMEKCSSVFNVVNSSIGLIMVLSFLFLN

SEQ ID NO: 26 - protein, 113 aa, Artificial Sequence
  derived and/or modified protein sequence (artificial) from Pf(3D7)__XP_001351122.1__HsALB_Pf-CSP(98-192)
MKWVTFISLLFLFSSAYSADGNPDPNANPNVDPNANPNVDPNANPNVDPNANPNANPNANPNANPNANPNANPNANPNANPNANPNANPNANPNANPNANPNANPNANPNANP

SEQ ID NO: 27 - protein, 193 aa, Artificial Sequence
  derived and/or modified protein sequence (artificial) from Pf(3D7)__XP_001351122.1__HsALB_Pf-CSP(98-272)
MKWVTFISLLFLFSSAYSADGNPDPNANPNVDPNANPNVDPNANPNVDPNANPNANPNANPNANPNANPNANPNANPNANPNANPNANPNANPNANPNANPNANPNANPNANPNANPNVDPNANPNANPNANPNANPNANPNANPNANPNANPNANPNANPNANPNANPNANPNANPNANPNANPNANPNANP

SEQ ID NO: 28 - protein, 295 aa, Artificial Sequence
  derived and/or modified protein sequence (artificial) from Pf(3D7)__XP_001351122.1__HsALB_Pf-CSP(98-374)
MKWVTFISLLFLFSSAYSADGNPDPNANPNVDPNANPNVDPNANPNVDPNANPNANPNANPNANPNANPNANPNANPNANPNANPNANPNANPNANPNANPNANPNANPNANPNANPNVDPNANPNANPNANPNANPNANPNANPNANPNANPNANPNANPNANPNANPNANPNANPNANPNANPNANPNANPNKNNQGNGQGHNMPNDPNRNVDENANANSAVKNNNNEEPSDKHIKEYLNKIQNSLSTEWSPCSVTCGNGIQVRIKPGSANKPKDELDYANDIEKKICKMEKC

SEQ ID NO: 29 - protein, 318 aa, Artificial Sequence
  derived and/or modified protein sequence (artificial) from Pf(3D7)__XP_001351122.1__HsALB_Pf-CSP(98-397)
MKWVTFISLLFLFSSAYSADGNPDPNANPNVDPNANPNVDPNANPNVDPNANPNANPNANPNANPNANPNANPNANPNANPNANPNANPNANPNANPNANPNANPNANPNANPNANPNVDPNANPNANPNANPNANPNANPNANPNANPNANPNANPNANPNANPNANPNANPNANPNANPNANPNANPNANPNKNNQGNGQGHNMPNDPNRNVDENANANSAVKNNNNEEPSDKHIKEYLNKIQNSLSTEWSPCSVTCGNGIQVRIKPGSANKPKDELDYANDIEKKICKMEKCSSVFNVVNSSIGLIMVLSFLFLN

SEQ ID NO: 30 - protein, 427 aa, Artificial Sequence
  derived and/or modified protein sequence (artificial) from Pf(3D7)__XP_001351122.1__HsALB_Pf-CSP(199-377)_L(PVTN)_HBsAg
MKWVTFISLLFLFSSAYSDPNANPNANPNANPNANPNANPNANPNANPNANPNANPNANPNANPNANPNANPNANPNANPNANPNANPNANPNKNNQGNGQGHNMPNDPNRNVDENANANSAVKNNNNEEPSDKHIKEYLNKIQNSLSTEWSPCSVTCGNGIQVRIKPGSANKPKDELDYANDIEKKICKMEKCSSVPVTNMENITSGFLGPLLVLQAGFFLLTRILTIPQSLDSWWTSLNFLGGSPVCLGQNSQSPTSNHSPTSCPPICPGYRWMCLRRFIIFLFILLLCLIFLLVLLDYQGMLPVCPLIPGSTTTNTGPCKTCTTPAQGNSMFPSCCCTKPTDGNCTCIPIPSSWAFAKYLWEWASVRFSWLSLLVPFVQWFVGLSPTVWLSAIWMMWYWGPSLYSIVSPFIPLLPIFFCLWVYI

SEQ ID NO: 31 - protein, 340 aa, Artificial Sequence
  derived and/or modified protein sequence (wt) from Pb(ANKA)__XP_022712148.1__Pb-CSP
MKKCTILVVASLLLVNSLLPGYGQNKSIQAQRNLNELCYNEGNDNKLYHVLNSKNGKIYNRNTVNRLLADAPEGKKNEKKNEKIERNNKLKQPPPPPNPNDPPPPNPNDPPPPNPNDPPPPNPNDPPPPNANDPPPPNANDPAPPNANDPAPPNANDPAPPNANDPAPPNANDPPPPNPNDPAPPNANDPPPPNPNDPAPPQGNNNPQPQPRPQPQPQPQPQPQPQPQPQPRPQPQPQPGGNNNNKNNNNDDSYIPSAEKILEFVKQIRDSITEEWSQCNVTCGSGIRVRKRKGSNKKAEDLTLEDIDTEICKMDKCSSIFNIVSNSLGFVILLVLVFFN

SEQ ID NO: 32 - protein, 395 aa, Artificial Sequence
  derived and/or modified protein sequence (artificial) from Pb(ANKA)__XP_022712148.1__Pb-CSP_L(G4SG4)_TM domain HA
MKKCTILVVASLLLVNSLLPGYGQNKSIQAQRNLNELCYNEGNDNKLYHVLNSKNGKIYNRNTVNRLLADAPEGKKNEKKNEKIERNNKLKQPPPPPNPNDPPPPNPNDPPPPNPNDPPPPNPNDPPPPNANDPPPPNANDPAPPNANDPAPPNANDPAPPNANDPAPPNANDPPPPNPNDPAPPNANDPPPPNPNDPAPPQGNNNPQPQPRPQPQPQPQPQPQPQPQPQPRPQPQPQPGGNNNNKNNNNDDSYIPSAEKILEFVKQIRDSITEEWSQCNVTCGSGIRVRKRKGSNKKAEDLTLEDIDTEICKMDKCSSIFNIVSNSLGFVILLVLVFFNGGGGSGGGGKLESTRIYQILAIYSTVASSLVLVVSLGAISFWMCSNGSLQCRICI

SEQ ID NO: 33 - protein, 335 aa, Artificial Sequence
  derived and/or modified protein sequence (artificial) from Pb(ANKA)__XP_022712148.1__HsALB_Pb-CSP(24-340)
MKWVTFISLLFLFSSAYSQNKSIQAQRNLNELCYNEGNDNKLYHVLNSKNGKIYNRNTVNRLLADAPEGKKNEKKNEKIERNNKLKQPPPPPNPNDPPPPNPNDPPPPNPNDPPPPNPNDPPPPNANDPPPPNANDPAPPNANDPAPPNANDPAPPNANDPAPPNANDPPPPNPNDPAPPNANDPPPPNPNDPAPPQGNNNPQPQPRPQPQPQPQPQPQPQPQPQPRPQPQPQPGGNNNNKNNNNDDSYIPSAEKILEFVKQIRDSITEEWSQCNVTCGSGIRVRKRKGSNKKAEDLTLEDIDTEICKMDKCSSIFNIVSNSLGFVILLVLVFFN

SEQ ID NO: 34 - protein, 341 aa, Artificial Sequence
  derived and/or modified protein sequence (artificial) from Pb(ANKA)__XP_022712148.1__HsIns-iso1_Pb-CSP(24-340)
MALWMRLLPLLALLALWGPDPAAAQNKSIQAQRNLNELCYNEGNDNKLYHVLNSKNGKIYNRNTVNRLLADAPEGKKNEKKNEKIERNNKLKQPPPPPNPNDPPPPNPNDPPPPNPNDPPPPNPNDPPPPNANDPPPPNANDPAPPNANDPAPPNANDPAPPNANDPAPPNANDPPPPNPNDPAPPNANDPPPPNPNDPAPPQGNNNPQPQPRPQPQPQPQPQPQPQPQPQPRPQPQPQPGGNNNNKNNNNDDSYIPSAEKILEFVKQIRDSITEEWSQCNVTCGSGIRVRKRKGSNKKAEDLTLEDIDTEICKMDKCSSIFNIVSNSLGFVILLVLVFFN

SEQ ID NO: 35 - protein, 334 aa, Artificial Sequence
  derived and/or modified protein sequence (artificial) from Pb(ANKA)__XP_022712148.1__HsSPARC_Pb-CSP(24-340)
MRAWIFFLLCLAGRALAQNKSIQAQRNLNELCYNEGNDNKLYHVLNSKNGKIYNRNTVNRLLADAPEGKKNEKKNEKIERNNKLKQPPPPPNPNDPPPPNPNDPPPPNPNDPPPPNPNDPPPPNANDPPPPNANDPAPPNANDPAPPNANDPAPPNANDPAPPNANDPPPPNPNDPAPPNANDPPPPNPNDPAPPQGNNNPQPQPRPQPQPQPQPQPQPQPQPQPRPQPQPQPGGNNNNKNNNNDDSYIPSAEKILEFVKQIRDSITEEWSQCNVTCGSGIRVRKRKGSNKKAEDLTLEDIDTEICKMDKCSSIFNIVSNSLGFVILLVLVFFN

SEQ ID NO: 36 - protein, 335 aa, Artificial Sequence
  derived and/or modified protein sequence (artificial) from Pb(ANKA)__XP_022712148.1__IgE_Pb-CSP(24-340)
MDWTWILFLVAAATRVHSQNKSIQAQRNLNELCYNEGNDNKLYHVLNSKNGKIYNRNTVNRLLADAPEGKKNEKKNEKIERNNKLKQPPPPPNPNDPPPPNPNDPPPPNPNDPPPPNPNDPPPPNANDPPPPNANDPAPPNANDPAPPNANDPAPPNANDPAPPNANDPPPPNPNDPAPPNANDPPPPNPNDPAPPQGNNNPQPQPRPQPQPQPQPQPQPQPQPQPRPQPQPQPGGNNNNKNNNNDDSYIPSAEKILEFVKQIRDSITEEWSQCNVTCGSGIRVRKRKGSNKKAEDLTLEDIDTEICKMDKCSSIFNIVSNSLGFVILLVLVFFN

SEQ ID NO: 37 - RNA, 1194 nt, Artificial Sequence
  derived and/or modified CDS sequence (wt) from Pf(3D7)__XP_001351122.1__Pf-CSP
augaugagaaaauuagcuauuuuaucuguuucuuccuuuuuauuuguugaggccuuauuccaggaauaccagugcuauggaaguucgucaaacacaaggguucuaaaugaauuaaauuaugauaaugcaggcacuaauuuauauaaugaauuagaaaugaauuauuaugggaaacaggaaaauugguauagucuuaaaaaaaauaguagaucacuuggagaaaaugaugauggaaauaacgaagacaacgagaaauuaaggaaaccaaaacauaaaaaauuaaagcaaccagcggaugguaauccugauccaaaugcaaacccaaauguagaucccaaugccaacccaaauguagauccaaaugcaaacccaaauguagauccaaaugcaaacccaaaugcaaacccaaaugcaaacccaaaugcaaacccaaaugcaaacccaaaugcaaacccaaaugcaaacccaaaugcaaacccaaaugcaaacccaaaugcaaacccaaaugcaaacccaaaugcaaacccaaaugcaaacccaaaugcaaaccccaaugcaaauccuaaugcaaacccaaaugcaaacccaaacguagauccuaaugcaaauccaaaugcaaacccaaacgcaaaccccaaugcaaauccuaaugcaaaccccaaugcaaauccuaaugcaaauccuaaugccaauccaaaugcaaauccaaaugcaaacccaaacgcaaaccccaaugcaaauccuaaugccaauccaaaugcaaauccaaaugcaaacccaaaugcaaacccaaaugcaaaccccaaugcaaauccuaauaaaaacaaucaagguaauggacaaggucacaauaugccaaaugacccaaaccgaaauguagaugaaaaugcuaaugccaacagugcuguaaaaaauaauaauaacgaagaaccaagugauaagcacauaaaagaauauuuaaacaaaauacaaaauucucuuucaacugaaugguccccauguaguguaacuuguggaaaugguauucaaguuagaauaaagccuggcucugcuaauaaaccuaaagacgaauuagauuaugcaaaugauauugaaaaaaaaauuuguaaaauggaaaaauguuccaguguguuuaaugucguaaauaguucaauaggauuaauaaugguauuauccuucuuguuccuuaauuag

SEQ ID NO: 38 - RNA, 1122 nt, Artificial Sequence
  derived and/or modified CDS sequence (wt) from Pf(3D7)__XP_001351122.1__Pf-CSP(1-374)
augaugagaaaauuagcuauuuuaucuguuucuuccuuuuuauuuguugaggccuuauuccaggaauaccagugcuauggaaguucgucaaacacaaggguucuaaaugaauuaaauuaugauaaugcaggcacuaauuuauauaaugaauuagaaaugaauuauuaugggaaacaggaaaauugguauagucuuaaaaaaaauaguagaucacuuggagaaaaugaugauggaaauaacgaagacaacgagaaauuaaggaaaccaaaacauaaaaaauuaaagcaaccagcggaugguaauccugauccaaaugcaaacccaaauguagaucccaaugccaacccaaauguagauccaaaugcaaacccaaauguagauccaaaugcaaacccaaaugcaaacccaaaugcaaacccaaaugcaaacccaaaugcaaacccaaaugcaaacccaaaugcaaacccaaaugcaaacccaaaugcaaacccaaaugcaaacccaaaugcaaacccaaaugcaaacccaaaugcaaacccaaaugcaaaccccaaugcaaauccuaaugcaaacccaaaugcaaacccaaacguagauccuaaugcaaauccaaaugcaaacccaaacgcaaaccccaaugcaaauccuaaugcaaaccccaaugcaaauccuaaugcaaauccuaaugccaauccaaaugcaaauccaaaugcaaacccaaacgcaaaccccaaugcaaauccuaaugccaauccaaaugcaaauccaaaugcaaacccaaaugcaaacccaaaugcaaaccccaaugcaaauccuaauaaaaacaaucaagguaauggacaaggucacaauaugccaaaugacccaaaccgaaauguagaugaaaaugcuaaugccaacagugcuguaaaaaauaauaauaacgaagaaccaagugauaagcacauaaaagaauauuuaaacaaaauacaaaauucucuuucaacugaaugguccccauguaguguaacuuguggaaaugguauucaaguuagaauaaagccuggcucugcuaauaaaccuaaagacgaauuagauuaugcaaaugauauugaaaaaaaaauuuguaaaauggaaaaaugu

SEQ ID NO: 39 - RNA, 975 nt, Artificial Sequence
  derived and/or modified CDS sequence (wt) from Pf(3D7)__XP_001351122.1__Pf-CSP(1-325)
augaugagaaaauuagcuauuuuaucuguuucuuccuuuuuauuuguugaggccuuauuccaggaauaccagugcuauggaaguucgucaaacacaaggguucuaaaugaauuaaauuaugauaaugcaggcacuaauuuauauaaugaauuagaaaugaauuauuaugggaaacaggaaaauugguauagucuuaaaaaaaauaguagaucacuuggagaaaaugaugauggaaauaacgaagacaacgagaaauuaaggaaaccaaaacauaaaaaauuaaagcaaccagcggaugguaauccugauccaaaugcaaacccaaauguagaucccaaugccaacccaaauguagauccaaaugcaaacccaaauguagauccaaaugcaaacccaaaugcaaacccaaaugcaaacccaaaugcaaacccaaaugcaaacccaaaugcaaacccaaaugcaaacccaaaugcaaacccaaaugcaaacccaaaugcaaacccaaaugcaaacccaaaugcaaacccaaaugcaaacccaaaugcaaaccccaaugcaaauccuaaugcaaacccaaaugcaaacccaaacguagauccuaaugcaaauccaaaugcaaacccaaacgcaaaccccaaugcaaauccuaaugcaaaccccaaugcaaauccuaaugcaaauccuaaugccaauccaaaugcaaauccaaaugcaaacccaaacgcaaaccccaaugcaaauccuaaugccaauccaaaugcaaauccaaaugcaaacccaaaugcaaacccaaaugcaaaccccaaugcaaauccuaauaaaaacaaucaagguaauggacaaggucacaauaugccaaaugacccaaaccgaaauguagaugaaaaugcuaaugccaacagugcuguaaaaaauaauaauaacgaagaaccaagugauaagcacauaaaagaauauuuaaacaaaauacaaaau

SEQ ID NO: 40 - RNA, 1023 nt, Artificial Sequence
  derived and/or modified CDS sequence (wt) from Pb(ANKA)__XP_022712148.1__Pb-CSP
augaagaaguguaccauuuuaguuguagcgucacuuuuauuaguuaauucucuacuuccaggauauggacaaaauaaaagcauccaagcccaaaggaacuuaaacgagcuauguuacaaugaaggaaaugauaauaaauuguaucacgugcuuaacucuaagaauggaaaaauauacaaucgaaauacagucaacagauuacuugccgaugcucccgaaggaaaaaaaaaugagaaaaaaaacgaaaaaauagagcguaauaauaaauugaaacaaccaccaccaccaccaaacccaaaugacccaccaccaccaaacccaaaugacccaccaccaccaaacccaaaugacccaccaccaccaaacccaaaugacccaccaccaccaaacgcaaaugacccaccaccaccaaacgcaaaugacccagcaccaccaaacgcaaaugacccagcaccaccaaacgcaaaugacccagcaccaccaaacgcaaaugacccagcaccaccaaacgcaaaugacccaccaccaccaaacccaaaugacccagcaccaccaaacgcaaaugacccaccaccaccaaacccaaaugacccagcaccaccacaaggaaauaacaauccacaaccacagccacggccgcagccacaaccacagccacagccacaaccacagccacagccacaaccacagccacgaccacagccacaaccacagccaggugguaauaacaauaacaaaaauaauaauaaugacgauucuuauaucccaagcgcggaaaaaauacuagaauuuguuaaacagaucagggauaguaucacagaggaauggucucaauguaacguaacaugugguucugguauaagaguuagaaaacgaaaagguucaaauaagaaagcagaagauuugaccuuagaagauauugauacugaaauuuguaaaauggauaaauguucaaguauauuuaauauuguaagcaauucauuaggauuuguaauauuauuaguauuaguauucuuuaauuaa

SEQ ID NO: 41 - RNA, 1194 nt, Artificial Sequence
  derived and/or modified CDS sequence (opt1) from Pf(3D7)__XP_001351122.1__Pf-CSP
augaugcgcaagcuggccauccucagcguguccagcuuccuguucgucgaggcccuguuccaggaguaccagugcuacggcuccagcuccaacacccgggugcucaacgagcugaacuacgacaacgcggggaccaaccuguacaacgagcucgagaugaacuacuacggcaagcaggagaacugguacagccugaagaagaacucccgcagccugggggagaacgacgacggcaacaacgaggacaacgagaagcuccggaagcccaagcacaagaagcugaagcagccggccgacgggaaccccgaccccaacgccaaccccaacguggacccgaacgccaaccccaacgucgaccccaacgccaaccccaacguggacccgaacgcgaaccccaacgccaaccccaacgccaaccccaacgccaacccgaacgcgaaccccaacgccaaccccaacgccaaccccaacgccaacccgaacgccaaccccaacgcgaaccccaacgccaaccccaacgccaacccgaacgccaaccccaacgccaaccccaacgcgaaccccaacgccaacccgaacgccaaccccaacguggaccccaacgccaaccccaacgccaacccgaacgcgaaccccaacgccaaccccaacgccaacccgaacgccaaccccaacgccaaccccaacgcgaaccccaacgccaacccgaacgccaaccccaacgccaaccccaacgcgaaccccaacgccaacccgaacgccaaccccaacgccaaccccaacgccaaccccaacgcgaacccgaacgccaaccccaacaagaacaaccagggcaacggccaggggcacaacaugcccaacgaccccaaccgcaacgucgacgagaacgccaacgccaacuccgccgugaagaacaacaacaacgaggagccgagcgacaagcacaucaaggaguaccugaacaagauccagaacucccucagcacggaguggucccccugcagcgugaccugcggcaacgggauccagguccggaucaagcccggcuccgcgaacaagcccaaggacgagcuggacuacgccaacgacaucgagaagaagaucugcaagauggagaagugcagcuccguguucaacguggucaacagcuccaucgggcugaucauggugcucagcuuccuguuccugaacuga

SEQ ID NO: 42 - RNA, 1122 nt, Artificial Sequence
  derived and/or modified CDS sequence (opt1) from Pf(3D7)__XP_001351122.1__Pf-CSP(1-374)
augaugcgcaagcuggccauccucagcguguccagcuuccuguucgucgaggcccuguuccaggaguaccagugcuacggcuccagcuccaacacccgggugcucaacgagcugaacuacgacaacgcggggaccaaccuguacaacgagcucgagaugaacuacuacggcaagcaggagaacugguacagccugaagaagaacucccgcagccugggggagaacgacgacggcaacaacgaggacaacgagaagcuccggaagcccaagcacaagaagcugaagcagccggccgacgggaaccccgaccccaacgccaaccccaacguggacccgaacgccaaccccaacgucgaccccaacgccaaccccaacguggacccgaacgcgaaccccaacgccaaccccaacgccaaccccaacgccaacccgaacgcgaaccccaacgccaaccccaacgccaaccccaacgccaacccgaacgccaaccccaacgcgaaccccaacgccaaccccaacgccaacccgaacgccaaccccaacgccaaccccaacgcgaaccccaacgccaacccgaacgccaaccccaacguggaccccaacgccaaccccaacgccaacccgaacgcgaaccccaacgccaaccccaacgccaacccgaacgccaaccccaacgccaaccccaacgcgaaccccaacgccaacccgaacgccaaccccaacgccaaccccaacgcgaaccccaacgccaacccgaacgccaaccccaacgccaaccccaacgccaaccccaacgcgaacccgaacgccaaccccaacaagaacaaccagggcaacggccaggggcacaacaugcccaacgaccccaaccgcaacgucgacgagaacgccaacgccaacuccgccgugaagaacaacaacaacgaggagccgagcgacaagcacaucaaggaguaccugaacaagauccagaacucccucagcacggaguggucccccugcagcgugaccugcggcaacgggauccagguccggaucaagcccggcuccgcgaacaagcccaaggacgagcuggacuacgccaacgacaucgagaagaagaucugcaagauggagaagugc

SEQ ID NO: 43 - RNA, 975 nt, Artificial Sequence
  derived and/or modified CDS sequence (opt1) from Pf(3D7)__XP_001351122.1__Pf-CSP(1-325)
augaugcgcaagcuggccauccucagcguguccagcuuccuguucgucgaggcccuguuccaggaguaccagugcuacggcuccagcuccaacacccgggugcucaacgagcugaacuacgacaacgcggggaccaaccuguacaacgagcucgagaugaacuacuacggcaagcaggagaacugguacagccugaagaagaacucccgcagccugggggagaacgacgacggcaacaacgaggacaacgagaagcuccggaagcccaagcacaagaagcugaagcagccggccgacgggaaccccgaccccaacgccaaccccaacguggacccgaacgccaaccccaacgucgaccccaacgccaaccccaacguggacccgaacgcgaaccccaacgccaaccccaacgccaaccccaacgccaacccgaacgcgaaccccaacgccaaccccaacgccaaccccaacgccaacccgaacgccaaccccaacgcgaaccccaacgccaaccccaacgccaacccgaacgccaaccccaacgccaaccccaacgcgaaccccaacgccaacccgaacgccaaccccaacguggaccccaacgccaaccccaacgccaacccgaacgcgaaccccaacgccaaccccaacgccaacccgaacgccaaccccaacgccaaccccaacgcgaaccccaacgccaacccgaacgccaaccccaacgccaaccccaacgcgaaccccaacgccaacccgaacgccaaccccaacgccaaccccaacgccaaccccaacgcgaacccgaacgccaaccccaacaagaacaaccagggcaacggccaggggcacaacaugcccaacgaccccaaccgcaacgucgacgagaacgccaacgccaacuccgccgugaagaacaacaacaacgaggagccgagcgacaagcacaucaaggaguaccugaacaagauccagaac

SEQ ID NO: 44 - RNA, 1194 nt, Artificial Sequence
  derived and/or modified CDS sequence (opt1) from Pf(3D7)__XP_001351122.1__HsALB_Pf-CSP(19-397)
augaagugggugaccuucaucagccugcucuuccuguucuccagcgccuacucccuguuccaggaguaccagugcuacggcuccagcuccaacacccgggugcucaacgagcugaacuacgacaacgcggggaccaaccuguacaacgagcucgagaugaacuacuacggcaagcaggagaacugguacagccugaagaagaacucccgcagccugggggagaacgacgacggcaacaacgaggacaacgagaagcuccggaagcccaagcacaagaagcugaagcagccggccgacgggaaccccgaccccaacgccaaccccaacguggacccgaacgccaaccccaacgucgaccccaacgccaaccccaacguggacccgaacgcgaaccccaacgccaaccccaacgccaaccccaacgccaacccgaacgcgaaccccaacgccaaccccaacgccaaccccaacgccaacccgaacgccaaccccaacgcgaaccccaacgccaaccccaacgccaacccgaacgccaaccccaacgccaaccccaacgcgaaccccaacgccaacccgaacgccaaccccaacguggaccccaacgccaaccccaacgccaacccgaacgcgaaccccaacgccaaccccaacgccaacccgaacgccaaccccaacgccaaccccaacgcgaaccccaacgccaacccgaacgccaaccccaacgccaaccccaacgcgaaccccaacgccaacccgaacgccaaccccaacgccaaccccaacgccaaccccaacgcgaacccgaacgccaaccccaacaagaacaaccagggcaacggccaggggcacaacaugcccaacgaccccaaccgcaacgucgacgagaacgccaacgccaacuccgccgugaagaacaacaacaacgaggagccgagcgacaagcacaucaaggaguaccugaacaagauccagaacucccucagcacggaguggucccccugcagcgugaccugcggcaacgggauccagguccggaucaagcccggcuccgcgaacaagcccaaggacgagcuggacuacgccaacgacaucgagaagaagaucugcaagauggagaagugcagcuccguguucaacguggucaacagcuccaucgggcugaucauggugcucagcuuccuguuccugaacuga

SEQ ID NO: 45 - RNA, 1212 nt, Artificial Sequence
  derived and/or modified CDS sequence (opt1) from Pf(3D7)__XP_001351122.1__HsIns-iso1_Pf-CSP(19-397)
auggcccuguggaugcgccuccugccccugcucgcccugcuggcgcucuggggcccggaccccgccgccgcccuguuccaggaguaccagugcuacggcuccagcuccaacacccgggugcucaacgagcugaacuacgacaacgcggggaccaaccuguacaacgagcucgagaugaacuacuacggcaagcaggagaacugguacagccugaagaagaacucccgcagccugggggagaacgacgacggcaacaacgaggacaacgagaagcuccggaagcccaagcacaagaagcugaagcagccggccgacgggaaccccgaccccaacgccaaccccaacguggacccgaacgccaaccccaacgucgaccccaacgccaaccccaacguggacccgaacgcgaaccccaacgccaaccccaacgccaaccccaacgccaacccgaacgcgaaccccaacgccaaccccaacgccaaccccaacgccaacccgaacgccaaccccaacgcgaaccccaacgccaaccccaacgccaacccgaacgccaaccccaacgccaaccccaacgcgaaccccaacgccaacccgaacgccaaccccaacguggaccccaacgccaaccccaacgccaacccgaacgcgaaccccaacgccaaccccaacgccaacccgaacgccaaccccaacgccaaccccaacgcgaaccccaacgccaacccgaacgccaaccccaacgccaaccccaacgcgaaccccaacgccaacccgaacgccaaccccaacgccaaccccaacgccaaccccaacgcgaacccgaacgccaaccccaacaagaacaaccagggcaacggccaggggcacaacaugcccaacgaccccaaccgcaacgucgacgagaacgccaacgccaacuccgccgugaagaacaacaacaacgaggagccgagcgacaagcacaucaaggaguaccugaacaagauccagaacucccucagcacggaguggucccccugcagcgugaccugcggcaacgggauccagguccggaucaagcccggcuccgcgaacaagcccaaggacgagcuggacuacgccaacgacaucgagaagaagaucugcaagauggagaagugcagcuccguguucaacguggucaacagcuccaucgggcugaucauggugcucagcuuccuguuccugaacuga

SEQ ID NO: 46 - RNA, 1191 nt, Artificial Sequence
  derived and/or modified CDS sequence (opt1) from Pf(3D7)__XP_001351122.1__HsSPARC_Pf-CSP(19-397)
augcgcgccuggaucuucuuccugcucugccuggccggccgggcccuggcccuguuccaggaguaccagugcuacggcuccagcuccaacacccgggugcucaacgagcugaacuacgacaacgcggggaccaaccuguacaacgagcucgagaugaacuacuacggcaagcaggagaacugguacagccugaagaagaacucccgcagccugggggagaacgacgacggcaacaacgaggacaacgagaagcuccggaagcccaagcacaagaagcugaagcagccggccgacgggaaccccgaccccaacgccaaccccaacguggacccgaacgccaaccccaacgucgaccccaacgccaaccccaacguggacccgaacgcgaaccccaacgccaaccccaacgccaaccccaacgccaacccgaacgcgaaccccaacgccaaccccaacgccaaccccaacgccaacccgaacgccaaccccaacgcgaaccccaacgccaaccccaacgccaacccgaacgccaaccccaacgccaaccccaacgcgaaccccaacgccaacccgaacgccaaccccaacguggaccccaacgccaaccccaacgccaacccgaacgcgaaccccaacgccaaccccaacgccaacccgaacgccaaccccaacgccaaccccaacgcgaaccccaacgccaacccgaacgccaaccccaacgccaaccccaacgcgaaccccaacgccaacccgaacgccaaccccaacgccaaccccaacgccaaccccaacgcgaacccgaacgccaaccccaacaagaacaaccagggcaacggccaggggcacaacaugcccaacgaccccaaccgcaacgucgacgagaacgccaacgccaacuccgccgugaagaacaacaacaacgaggagccgagcgacaagcacaucaaggaguaccugaacaagauccagaacucccucagcacggaguggucccccugcagcgugaccugcggcaacgggauccagguccggaucaagcccggcuccgcgaacaagcccaaggacgagcuggacuacgccaacgacaucgagaagaagaucugcaagauggagaagugcagcuccguguucaacguggucaacagcuccaucgggcugaucauggugcucagcuuccuguuccugaacuga

SEQ ID NO: 47 - RNA, 1194 nt, Artificial Sequence
  derived and/or modified CDS sequence (opt1) from Pf(3D7)__XP_001351122.1__IgE_Pf-CSP(19-397)
auggacuggaccuggauccuguuccucguggccgccgcgacccgcguccacagccuguuccaggaguaccagugcuacggcuccagcuccaacacccgggugcucaacgagcugaacuacgacaacgcggggaccaaccuguacaacgagcucgagaugaacuacuacggcaagcaggagaacugguacagccugaagaagaacucccgcagccugggggagaacgacgacggcaacaacgaggacaacgagaagcuccggaagcccaagcacaagaagcugaagcagccggccgacgggaaccccgaccccaacgccaaccccaacguggacccgaacgccaaccccaacgucgaccccaacgccaaccccaacguggacccgaacgcgaaccccaacgccaaccccaacgccaaccccaacgccaacccgaacgcgaaccccaacgccaaccccaacgccaaccccaacgccaacccgaacgccaaccccaacgcgaaccccaacgccaaccccaacgccaacccgaacgccaaccccaacgccaaccccaacgcgaaccccaacgccaacccgaacgccaaccccaacguggaccccaacgccaaccccaacgccaacccgaacgcgaaccccaacgccaaccccaacgccaacccgaacgccaaccccaacgccaaccccaacgcgaaccccaacgccaacccgaacgccaaccccaacgccaaccccaacgcgaaccccaacgccaacccgaacgccaaccccaacgccaaccccaacgccaaccccaacgcgaacccgaacgccaaccccaacaagaacaaccagggcaacggccaggggcacaacaugcccaacgaccccaaccgcaacgucgacgagaacgccaacgccaacuccgccgugaagaacaacaacaacgaggagccgagcgacaagcacaucaaggaguaccugaacaagauccagaacucccucagcacggaguggucccccugcagcgugaccugcggcaacgggauccagguccggaucaagcccggcuccgcgaacaagcccaaggacgagcuggacuacgccaacgacaucgagaagaagaucugcaagauggagaagugcagcuccguguucaacguggucaacagcuccaucgggcugaucauggugcucagcuuccuguuccugaacuga

SEQ ID NO: 48 - RNA, 1359 nt, Artificial Sequence
  derived and/or modified CDS sequence (opt1) from Pf(3D7)__XP_001351122.1__Pf-CSP_L(G4SG4)_TM domain HA
augaugcgcaagcuggccauccucagcguguccagcuuccuguucgucgaggcccuguuccaggaguaccagugcuacggcuccagcuccaacacccgggugcucaacgagcugaacuacgacaacgcggggaccaaccuguacaacgagcucgagaugaacuacuacggcaagcaggagaacugguacagccugaagaagaacucccgcagccugggggagaacgacgacggcaacaacgaggacaacgagaagcuccggaagcccaagcacaagaagcugaagcagccggccgacgggaaccccgaccccaacgccaaccccaacguggacccgaacgccaaccccaacgucgaccccaacgccaaccccaacguggacccgaacgcgaaccccaacgccaaccccaacgccaaccccaacgccaacccgaacgcgaaccccaacgccaaccccaacgccaaccccaacgccaacccgaacgccaaccccaacgcgaaccccaacgccaaccccaacgccaacccgaacgccaaccccaacgccaaccccaacgcgaaccccaacgccaacccgaacgccaaccccaacguggaccccaacgccaaccccaacgccaacccgaacgcgaaccccaacgccaaccccaacgccaacccgaacgccaaccccaacgccaaccccaacgcgaaccccaacgccaacccgaacgccaaccccaacgccaaccccaacgcgaaccccaacgccaacccgaacgccaaccccaacgccaaccccaacgccaaccccaacgcgaacccgaacgccaaccccaacaagaacaaccagggcaacggccaggggcacaacaugcccaacgaccccaaccgcaacgucgacgagaacgccaacgccaacuccgccgugaagaacaacaacaacgaggagccgagcgacaagcacaucaaggaguaccugaacaagauccagaacucccucagcacggaguggucccccugcagcgugaccugcggcaacgggauccagguccggaucaagcccggcuccgcgaacaagcccaaggacgagcuggacuacgccaacgacaucgagaagaagaucugcaagauggagaagugcagcuccguguucaacguggucaacagcuccaucgggcugaucauggugcucagcuuccuguuccugaacggcgggggcgggagcggcgggggcggcaagcucgaguccacgcggaucuaccagauccuggcgaucuacagcaccgucgccagcucccuggugcucguggucagccugggggccaucuccuucuggaugugcagcaacggcucccugcagugccgcaucugcaucuga

SEQ ID NO: 49 - RNA, 1233 nt, Artificial Sequence
  derived and/or modified CDS sequence (opt1) from Pf(3D7)__XP_001351122.1__Pf-CSP(199-377)_L(PVTN)_HBsAg
auggaccccaacgccaaccccaacgccaacccgaacgcgaaccccaacgccaaccccaacgccaacccgaacgccaaccccaacgccaaccccaacgcgaaccccaacgccaacccgaacgccaaccccaacgccaaccccaacgcgaaccccaacgccaacccgaacgccaaccccaacgccaaccccaacgccaaccccaacgcgaacccgaacgccaaccccaacaagaacaaccagggcaacggccaggggcacaacaugcccaacgaccccaaccgcaacgucgacgagaacgccaacgccaacuccgccgugaagaacaacaacaacgaggagccgagcgacaagcacaucaaggaguaccugaacaagauccagaacucccucagcacggaguggucccccugcagcgugaccugcggcaacgggauccagguccggaucaagcccggcuccgcgaacaagcccaaggacgagcuggacuacgccaacgacaucgagaagaagaucugcaagauggagaagugcagcuccgugccggugacgaacauggagaacaucaccagcggcuuccuggggccccuccuggugcugcaggccggcuucuuccuccugacccgcauccugaccaucccgcagucccucgacagcugguggaccucccugaacuuccucgggggcagccccgucugccuggggcagaacucccagagccccaccuccaaccacagccccaccuccugcccgcccaucugccccggcuaccgguggaugugccugcgccgguucaucaucuuccuguucauccuccugcugugccucaucuuccugcuggugcuccuggacuaccagggcaugcugcccgugugcccgcucauccccgggagcacgaccaccaacaccggccccugcaagacgugcaccacccccgcccaggggaacuccauguucccgagcugcugcugcaccaagcccacggacggcaacugcacgugcauccccauccccuccagcugggcguucgccaaguaccugugggagugggccuccguccgcuucagcuggcugucccuccuggugccguucgugcagugguucgucgggcugagccccaccguguggcucuccgccaucuggaugaugugguacuggggccccagccuguacagcaucgugucccccuucaucccgcugcuccccaucuucuucugccugugggucuacaucuga

SEQ ID NO: 50 - RNA, 1275 nt, Artificial Sequence
  derived and/or modified CDS sequence (opt1) from Pf(3D7)__XP_001351122.1__Pf-CSP(199-387)_L(PVTN)_HBsAg
augauggccccggaccccaacgccaaccccaacgccaacccgaacgcgaaccccaacgccaaccccaacgccaacccgaacgccaaccccaacgccaaccccaacgcgaaccccaacgccaacccgaacgccaaccccaacgccaaccccaacgcgaaccccaacgccaacccgaacgccaaccccaacgccaaccccaacgccaaccccaacgcgaacccgaacgccaaccccaacaagaacaaccagggcaacggccaggggcacaacaugcccaacgaccccaaccgcaacgucgacgagaacgccaacgccaacuccgccgugaagaacaacaacaacgaggagccgagcgacaagcacaucaaggaguaccugaacaagauccagaacucccucagcacggaguggucccccugcagcgugaccugcggcaacgggauccagguccggaucaagcccggcuccgcgaacaagcccaaggacgagcuggacuacgccaacgacaucgagaagaagaucugcaagauggagaagugcagcuccguguucaacguggucaacagcuccaucgggcuggggccggugacgaacauggagaacaucaccagcggcuuccuggggccccuccuggugcugcaggccggcuucuuccuccugacccgcauccugaccaucccgcagucccucgacagcugguggaccucccugaacuuccucgggggcagccccgucugccuggggcagaacucccagagccccaccuccaaccacagccccaccuccugcccgcccaucugccccggcuaccgguggaugugccugcgccgguucaucaucuuccuguucauccuccugcugugccucaucuuccugcuggugcuccuggacuaccagggcaugcugcccgugugcccgcucauccccgggagcacgaccaccaacaccggccccugcaagacgugcaccacccccgcccaggggaacuccauguucccgagcugcugcugcaccaagcccacggacggcaacugcacgugcauccccauccccuccagcugggcguucgccaaguaccugugggagugggccuccguccgcuucagcuggcugucccuccuggugccguucgugcagugguucgucgggcugagccccaccguguggcucuccgccaucuggaugaugugguacuggggccccagccuguacagcaucgugucccccuucaucccgcugcuccccaucuucuucugccugugggucuacaucuga

SEQ ID NO: 51 - RNA, 459 nt, Artificial Sequence
  derived and/or modified CDS sequence (opt1) from Pf(3D7)__XP_001351122.1__HsALB_Pf-CSP(19-152)
augaagugggugaccuucaucagccugcucuuccuguucuccagcgccuacucccuguuccaggaguaccagugcuacggcuccagcuccaacacccgggugcucaacgagcugaacuacgacaacgcggggaccaaccuguacaacgagcucgagaugaacuacuacggcaagcaggagaacugguacagccugaagaagaacucccgcagccugggggagaacgacgacggcaacaacgaggacaacgagaagcuccggaagcccaagcacaagaagcugaagcagccggccgacgggaaccccgaccccaacgccaaccccaacguggacccgaacgccaaccccaacgucgaccccaacgccaaccccaacguggacccgaacgcgaaccccaacgccaaccccaacgccaaccccaacgccaacccgaacgcgaaccccaacgccaaccccuga

SEQ ID NO: 52 - RNA, 579 nt, Artificial Sequence
  derived and/or modified CDS sequence (opt1) from Pf(3D7)__XP_001351122.1__HsALB_Pf-CSP(19-192)
augaagugggugaccuucaucagccugcucuuccuguucuccagcgccuacucccuguuccaggaguaccagugcuacggcuccagcuccaacacccgggugcucaacgagcugaacuacgacaacgcggggaccaaccuguacaacgagcucgagaugaacuacuacggcaagcaggagaacugguacagccugaagaagaacucccgcagccugggggagaacgacgacggcaacaacgaggacaacgagaagcuccggaagcccaagcacaagaagcugaagcagccggccgacgggaaccccgaccccaacgccaaccccaacguggacccgaacgccaaccccaacgucgaccccaacgccaaccccaacguggacccgaacgcgaaccccaacgccaaccccaacgccaaccccaacgccaacccgaacgcgaaccccaacgccaaccccaacgccaaccccaacgccaacccgaacgccaaccccaacgcgaaccccaacgccaaccccaacgccaacccgaacgccaaccccaacgccaaccccaacgcgaaccccaacgccaacccguga

SEQ ID NO: 53 - RNA, 819 nt, Artificial Sequence
  derived and/or modified CDS sequence (opt1) from Pf(3D7)__XP_001351122.1__HsALB_Pf-CSP(19-272)
augaagugggugaccuucaucagccugcucuuccuguucuccagcgccuacucccuguuccaggaguaccagugcuacggcuccagcuccaacacccgggugcucaacgagcugaacuacgacaacgcggggaccaaccuguacaacgagcucgagaugaacuacuacggcaagcaggagaacugguacagccugaagaagaacucccgcagccugggggagaacgacgacggcaacaacgaggacaacgagaagcuccggaagcccaagcacaagaagcugaagcagccggccgacgggaaccccgaccccaacgccaaccccaacguggacccgaacgccaaccccaacgucgaccccaacgccaaccccaacguggacccgaacgcgaaccccaacgccaaccccaacgccaaccccaacgccaacccgaacgcgaaccccaacgccaaccccaacgccaaccccaacgccaacccgaacgccaaccccaacgcgaaccccaacgccaaccccaacgccaacccgaacgccaaccccaacgccaaccccaacgcgaaccccaacgccaacccgaacgccaaccccaacguggaccccaacgccaaccccaacgccaacccgaacgcgaaccccaacgccaaccccaacgccaacccgaacgccaaccccaacgccaaccccaacgcgaaccccaacgccaacccgaacgccaaccccaacgccaaccccaacgcgaaccccaacgccaacccgaacgccaaccccaacgccaaccccaacgccaaccccaacgcgaacccgaacgccaaccccuga

SEQ ID NO: 54 - RNA, 981 nt, Artificial Sequence
  derived and/or modified CDS sequence (opt1) from Pf(3D7)__XP_001351122.1__HsALB_Pf-CSP(19-272)_L(AAY)_Pf-CSP(310-3 27)_L(AAY)_Pf-CSP(346-375)
augaagugggugaccuucaucagccugcucuuccuguucuccagcgccuacucccuguuccaggaguaccagugcuacggcuccagcuccaacacccgggugcucaacgagcugaacuacgacaacgcggggaccaaccuguacaacgagcucgagaugaacuacuacggcaagcaggagaacugguacagccugaagaagaacucccgcagccugggggagaacgacgacggcaacaacgaggacaacgagaagcuccggaagcccaagcacaagaagcugaagcagccggccgacgggaaccccgaccccaacgccaaccccaacguggacccgaacgccaaccccaacgucgaccccaacgccaaccccaacguggacccgaacgcgaaccccaacgccaaccccaacgccaaccccaacgccaacccgaacgcgaaccccaacgccaaccccaacgccaaccccaacgccaacccgaacgccaaccccaacgcgaaccccaacgccaaccccaacgccaacccgaacgccaaccccaacgccaaccccaacgcgaaccccaacgccaacccgaacgccaaccccaacguggaccccaacgccaaccccaacgccaacccgaacgcgaaccccaacgccaaccccaacgccaacccgaacgccaaccccaacgccaaccccaacgcgaaccccaacgccaacccgaacgccaaccccaacgccaaccccaacgcgaaccccaacgccaacccgaacgccaaccccaacgccaaccccaacgccaaccccaacgcgaacccgaacgccaaccccgccgcguaugagccgagcgacaagcacaucaaggaguaccugaacaagauccagaacucccucgcggccuacaucaagcccggcuccgcgaacaagcccaaggacgagcuggacuacgccaacgacaucgagaagaagaucugcaagauggagaagugcagcuga

SEQ ID NO: 55 - RNA, 942 nt, Artificial Sequence
  derived and/or modified CDS sequence (opt1) from Pf(3D7)__XP_001351122.1__HsALB_Pf-CSP(19-272)_L(AAY)_Pf-CSP(346-3 65)_L(AAY)_P2
augaagugggugaccuucaucagccugcucuuccuguucuccagcgccuacucccuguuccaggaguaccagugcuacggcuccagcuccaacacccgggugcucaacgagcugaacuacgacaacgcggggaccaaccuguacaacgagcucgagaugaacuacuacggcaagcaggagaacugguacagccugaagaagaacucccgcagccugggggagaacgacgacggcaacaacgaggacaacgagaagcuccggaagcccaagcacaagaagcugaagcagccggccgacgggaaccccgaccccaacgccaaccccaacguggacccgaacgccaaccccaacgucgaccccaacgccaaccccaacguggacccgaacgcgaaccccaacgccaaccccaacgccaaccccaacgccaacccgaacgcgaaccccaacgccaaccccaacgccaaccccaacgccaacccgaacgccaaccccaacgcgaaccccaacgccaaccccaacgccaacccgaacgccaaccccaacgccaaccccaacgcgaaccccaacgccaacccgaacgccaaccccaacguggaccccaacgccaaccccaacgccaacccgaacgcgaaccccaacgccaaccccaacgccaacccgaacgccaaccccaacgccaaccccaacgcgaaccccaacgccaacccgaacgccaaccccaacgccaaccccaacgcgaaccccaacgccaacccgaacgccaaccccaacgccaaccccaacgccaaccccaacgcgaacccgaacgccaaccccgccgcguauaucaagcccggcuccgcgaacaagcccaaggacgagcuggacuacgccaacgacaucgaggcggccuaccaguacaucaaggccaacagcaaguucaucggcaucaccgagcuguga

SEQ ID NO: 56 - RNA, 936 nt, Artificial Sequence
  derived and/or modified CDS sequence (opt1) from Pf(3D7)__XP_001351122.1__HsALB_Pf-CSP(19-272)_L(AAY)_Pf-CSP(346-3 65)_L(AAY)_PADRE
augaagugggugaccuucaucagccugcucuuccuguucuccagcgccuacucccuguuccaggaguaccagugcuacggcuccagcuccaacacccgggugcucaacgagcugaacuacgacaacgcggggaccaaccuguacaacgagcucgagaugaacuacuacggcaagcaggagaacugguacagccugaagaagaacucccgcagccugggggagaacgacgacggcaacaacgaggacaacgagaagcuccggaagcccaagcacaagaagcugaagcagccggccgacgggaaccccgaccccaacgccaaccccaacguggacccgaacgccaaccccaacgucgaccccaacgccaaccccaacguggacccgaacgcgaaccccaacgccaaccccaacgccaaccccaacgccaacccgaacgcgaaccccaacgccaaccccaacgccaaccccaacgccaacccgaacgccaaccccaacgcgaaccccaacgccaaccccaacgccaacccgaacgccaaccccaacgccaaccccaacgcgaaccccaacgccaacccgaacgccaaccccaacguggaccccaacgccaaccccaacgccaacccgaacgcgaaccccaacgccaaccccaacgccaacccgaacgccaaccccaacgccaaccccaacgcgaaccccaacgccaacccgaacgccaaccccaacgccaaccccaacgcgaaccccaacgccaacccgaacgccaaccccaacgccaaccccaacgccaaccccaacgcgaacccgaacgccaaccccgccgcguauaucaagcccggcuccgcgaacaagcccaaggacgagcuggacuacgccaacgacaucgaggcggccuacgccaaguucguggccgccuggacccugaaggcggccgccuga

SEQ ID NO: 57 - RNA, 993 nt, Artificial Sequence
  derived and/or modified CDS sequence (opt1) from Pf(3D7)__XP_001351122.1__HsALB_Pf-CSP(19-272)_L(G4S)_Pf-CSP(310-3 27)_L(G4S)_Pf-CSP(346-375)
augaagugggugaccuucaucagccugcucuuccuguucuccagcgccuacucccuguuccaggaguaccagugcuacggcuccagcuccaacacccgggugcucaacgagcugaacuacgacaacgcggggaccaaccuguacaacgagcucgagaugaacuacuacggcaagcaggagaacugguacagccugaagaagaacucccgcagccugggggagaacgacgacggcaacaacgaggacaacgagaagcuccggaagcccaagcacaagaagcugaagcagccggccgacgggaaccccgaccccaacgccaaccccaacguggacccgaacgccaaccccaacgucgaccccaacgccaaccccaacguggacccgaacgcgaaccccaacgccaaccccaacgccaaccccaacgccaacccgaacgcgaaccccaacgccaaccccaacgccaaccccaacgccaacccgaacgccaaccccaacgcgaaccccaacgccaaccccaacgccaacccgaacgccaaccccaacgccaaccccaacgcgaaccccaacgccaacccgaacgccaaccccaacguggaccccaacgccaaccccaacgccaacccgaacgcgaaccccaacgccaaccccaacgccaacccgaacgccaaccccaacgccaaccccaacgcgaaccccaacgccaacccgaacgccaaccccaacgccaaccccaacgcgaaccccaacgccaacccgaacgccaaccccaacgccaaccccaacgccaaccccaacgcgaacccgaacgccaaccccggaggcggaggaucugagccgagcgacaagcacaucaaggaguaccugaacaagauccagaacucccucggcggagguggaaguaucaagcccggcuccgcgaacaagcccaaggacgagcuggacuacgccaacgacaucgagaagaagaucugcaagauggagaagugcagcuga

SEQ ID NO: 58 - RNA, 978 nt, Artificial Sequence
  derived and/or modified CDS sequence (opt1) from Pf(3D7)__XP_001351122.1__HsALB_Pf-CSP(19-272)_L(G4S)_Pf-CSP(310-3 27)_Pf-CSP(346-375)
augaagugggugaccuucaucagccugcucuuccuguucuccagcgccuacucccuguuccaggaguaccagugcuacggcuccagcuccaacacccgggugcucaacgagcugaacuacgacaacgcggggaccaaccuguacaacgagcucgagaugaacuacuacggcaagcaggagaacugguacagccugaagaagaacucccgcagccugggggagaacgacgacggcaacaacgaggacaacgagaagcuccggaagcccaagcacaagaagcugaagcagccggccgacgggaaccccgaccccaacgccaaccccaacguggacccgaacgccaaccccaacgucgaccccaacgccaaccccaacguggacccgaacgcgaaccccaacgccaaccccaacgccaaccccaacgccaacccgaacgcgaaccccaacgccaaccccaacgccaaccccaacgccaacccgaacgccaaccccaacgcgaaccccaacgccaaccccaacgccaacccgaacgccaaccccaacgccaaccccaacgcgaaccccaacgccaacccgaacgccaaccccaacguggaccccaacgccaaccccaacgccaacccgaacgcgaaccccaacgccaaccccaacgccaacccgaacgccaaccccaacgccaaccccaacgcgaaccccaacgccaacccgaacgccaaccccaacgccaaccccaacgcgaaccccaacgccaacccgaacgccaaccccaacgccaaccccaacgccaaccccaacgcgaacccgaacgccaaccccggaggcggaggaucugagccgagcgacaagcacaucaaggaguaccugaacaagauccagaacucccucaucaagcccggcuccgcgaacaagcccaaggacgagcuggacuacgccaacgacaucgagaagaagaucugcaagauggagaagugcagcuga

SEQ ID NO: 59 - RNA, 978 nt, Artificial Sequence
  derived and/or modified CDS sequence (opt1) from Pf(3D7)__XP_001351122.1__HsALB_Pf-CSP(19-325)
augaagugggugaccuucaucagccugcucuuccuguucuccagcgccuacucccuguuccaggaguaccagugcuacggcuccagcuccaacacccgggugcucaacgagcugaacuacgacaacgcggggaccaaccuguacaacgagcucgagaugaacuacuacggcaagcaggagaacugguacagccugaagaagaacucccgcagccugggggagaacgacgacggcaacaacgaggacaacgagaagcuccggaagcccaagcacaagaagcugaagcagccggccgacgggaaccccgaccccaacgccaaccccaacguggacccgaacgccaaccccaacgucgaccccaacgccaaccccaacguggacccgaacgcgaaccccaacgccaaccccaacgccaaccccaacgccaacccgaacgcgaaccccaacgccaaccccaacgccaaccccaacgccaacccgaacgccaaccccaacgcgaaccccaacgccaaccccaacgccaacccgaacgccaaccccaacgccaaccccaacgcgaaccccaacgccaacccgaacgccaaccccaacguggaccccaacgccaaccccaacgccaacccgaacgcgaaccccaacgccaaccccaacgccaacccgaacgccaaccccaacgccaaccccaacgcgaaccccaacgccaacccgaacgccaaccccaacgccaaccccaacgcgaaccccaacgccaacccgaacgccaaccccaacgccaaccccaacgccaaccccaacgcgaacccgaacgccaaccccaacaagaacaaccagggcaacggccaggggcacaacaugcccaacgaccccaaccgcaacgucgacgagaacgccaacgccaacuccgccgugaagaacaacaacaacgaggagccgagcgacaagcacaucaaggaguaccugaacaagauccagaacuga

SEQ ID NO: 60 - RNA, 1155 nt, Artificial Sequence
  derived and/or modified CDS sequence (opt1) from Pf(3D7)__XP_001351122.1__HsALB_Pf-CSP(19-384)
augaagugggugaccuucaucagccugcucuuccuguucuccagcgccuacucccuguuccaggaguaccagugcuacggcuccagcuccaacacccgggugcucaacgagcugaacuacgacaacgcggggaccaaccuguacaacgagcucgagaugaacuacuacggcaagcaggagaacugguacagccugaagaagaacucccgcagccugggggagaacgacgacggcaacaacgaggacaacgagaagcuccggaagcccaagcacaagaagcugaagcagccggccgacgggaaccccgaccccaacgccaaccccaacguggacccgaacgccaaccccaacgucgaccccaacgccaaccccaacguggacccgaacgcgaaccccaacgccaaccccaacgccaaccccaacgccaacccgaacgcgaaccccaacgccaaccccaacgccaaccccaacgccaacccgaacgccaaccccaacgcgaaccccaacgccaaccccaacgccaacccgaacgccaaccccaacgccaaccccaacgcgaaccccaacgccaacccgaacgccaaccccaacguggaccccaacgccaaccccaacgccaacccgaacgcgaaccccaacgccaaccccaacgccaacccgaacgccaaccccaacgccaaccccaacgcgaaccccaacgccaacccgaacgccaaccccaacgccaaccccaacgcgaaccccaacgccaacccgaacgccaaccccaacgccaaccccaacgccaaccccaacgcgaacccgaacgccaaccccaacaagaacaaccagggcaacggccaggggcacaacaugcccaacgaccccaaccgcaacgucgacgagaacgccaacgccaacuccgccgugaagaacaacaacaacgaggagccgagcgacaagcacaucaaggaguaccugaacaagauccagaacucccucagcacggaguggucccccugcagcgugaccugcggcaacgggauccagguccggaucaagcccggcuccgcgaacaagcccaaggacgagcuggacuacgccaacgacaucgagaagaagaucugcaagauggagaagugcagcuccguguucaacguggucaacagcuccuga

SEQ ID NO: 61 - RNA, 1293 nt, Artificial Sequence
  derived and/or modified CDS sequence (opt1) from Pf(3D7)__XP_001351122.1__HsALB_Pf-CSP(19-384)_TM domain HA
augaagugggugaccuucaucagccugcucuuccuguucuccagcgccuacucccuguuccaggaguaccagugcuacggcuccagcuccaacacccgggugcucaacgagcugaacuacgacaacgcggggaccaaccuguacaacgagcucgagaugaacuacuacggcaagcaggagaacugguacagccugaagaagaacucccgcagccugggggagaacgacgacggcaacaacgaggacaacgagaagcuccggaagcccaagcacaagaagcugaagcagccggccgacgggaaccccgaccccaacgccaaccccaacguggacccgaacgccaaccccaacgucgaccccaacgccaaccccaacguggacccgaacgcgaaccccaacgccaaccccaacgccaaccccaacgccaacccgaacgcgaaccccaacgccaaccccaacgccaaccccaacgccaacccgaacgccaaccccaacgcgaaccccaacgccaaccccaacgccaacccgaacgccaaccccaacgccaaccccaacgcgaaccccaacgccaacccgaacgccaaccccaacguggaccccaacgccaaccccaacgccaacccgaacgcgaaccccaacgccaaccccaacgccaacccgaacgccaaccccaacgccaaccccaacgcgaaccccaacgccaacccgaacgccaaccccaacgccaaccccaacgcgaaccccaacgccaacccgaacgccaaccccaacgccaaccccaacgccaaccccaacgcgaacccgaacgccaaccccaacaagaacaaccagggcaacggccaggggcacaacaugcccaacgaccccaaccgcaacgucgacgagaacgccaacgccaacuccgccgugaagaacaacaacaacgaggagccgagcgacaagcacaucaaggaguaccugaacaagauccagaacucccucagcacggaguggucccccugcagcgugaccugcggcaacgggauccagguccggaucaagcccggcuccgcgaacaagcccaaggacgagcuggacuacgccaacgacaucgagaagaagaucugcaagauggagaagugcagcuccguguucaacguggucaacagcuccaagcucgaguccacgcggaucuaccagauccuggcgaucuacagcaccgucgccagcucccuggugcucguggucagccugggggccaucuccuucuggaugugcagcaacggcucccugcagugccgcaucugcaucuga

SEQ ID NO: 62 - RNA, 1005 nt, Artificial Sequence
  derived and/or modified CDS sequence (opt1) from Pf(3D7)__XP_001351122.1__HsALB_Pf-CSP(82-397)
augaagugggugaccuucaucagccugcucuuccuguucuccagcgccuacuccgacaacgagaagcuccggaagcccaagcacaagaagcugaagcagccggccgacgggaaccccgaccccaacgccaaccccaacguggacccgaacgccaaccccaacgucgaccccaacgccaaccccaacguggacccgaacgcgaaccccaacgccaaccccaacgccaaccccaacgccaacccgaacgcgaaccccaacgccaaccccaacgccaaccccaacgccaacccgaacgccaaccccaacgcgaaccccaacgccaaccccaacgccaacccgaacgccaaccccaacgccaaccccaacgcgaaccccaacgccaacccgaacgccaaccccaacguggaccccaacgccaaccccaacgccaacccgaacgcgaaccccaacgccaaccccaacgccaacccgaacgccaaccccaacgccaaccccaacgcgaaccccaacgccaacccgaacgccaaccccaacgccaaccccaacgcgaaccccaacgccaacccgaacgccaaccccaacgccaaccccaacgccaaccccaacgcgaacccgaacgccaaccccaacaagaacaaccagggcaacggccaggggcacaacaugcccaacgaccccaaccgcaacgucgacgagaacgccaacgccaacuccgccgugaagaacaacaacaacgaggagccgagcgacaagcacaucaaggaguaccugaacaagauccagaacucccucagcacggaguggucccccugcagcgugaccugcggcaacgggauccagguccggaucaagcccggcuccgcgaacaagcccaaggacgagcuggacuacgccaacgacaucgagaagaagaucugcaagauggagaagugcagcuccguguucaacguggucaacagcuccaucgggcugaucauggugcucagcuuccuguuccugaacuga

SEQ ID NO: 63 - RNA, 357 nt, Artificial Sequence
  derived and/or modified CDS sequence (opt1) from Pf(3D7)__XP_001351122.1__HsALB_Pf-CSP(93-192)
augaagugggugaccuucaucagccugcucuuccuguucuccagcgccuacuccaagcugaagcagccggccgacgggaaccccgaccccaacgccaaccccaacguggacccgaacgccaaccccaacgucgaccccaacgccaaccccaacguggacccgaacgcgaaccccaacgccaaccccaacgccaaccccaacgccaacccgaacgcgaaccccaacgccaaccccaacgccaaccccaacgccaacccgaacgccaaccccaacgcgaaccccaacgccaaccccaacgccaacccgaacgccaaccccaacgccaaccccaacgcgaaccccaacgccaacccguga

SEQ ID NO: 64 - RNA, 597 nt, Artificial Sequence
  derived and/or modified CDS sequence (opt1) from Pf(3D7)__XP_001351122.1__HsALB_Pf-CSP(93-272)
augaagugggugaccuucaucagccugcucuuccuguucuccagcgccuacuccaagcugaagcagccggccgacgggaaccccgaccccaacgccaaccccaacguggacccgaacgccaaccccaacgucgaccccaacgccaaccccaacguggacccgaacgcgaaccccaacgccaaccccaacgccaaccccaacgccaacccgaacgcgaaccccaacgccaaccccaacgccaaccccaacgccaacccgaacgccaaccccaacgcgaaccccaacgccaaccccaacgccaacccgaacgccaaccccaacgccaaccccaacgcgaaccccaacgccaacccgaacgccaaccccaacguggaccccaacgccaaccccaacgccaacccgaacgcgaaccccaacgccaaccccaacgccaacccgaacgccaaccccaacgccaaccccaacgcgaaccccaacgccaacccgaacgccaaccccaacgccaaccccaacgcgaaccccaacgccaacccgaacgccaaccccaacgccaaccccaacgccaaccccaacgcgaacccgaacgccaaccccuga

SEQ ID NO: 65 - RNA, 972 nt, Artificial Sequence
  derived and/or modified CDS sequence (opt1) from Pf(3D7)__XP_001351122.1__HsALB_Pf-CSP(93-397)
augaagugggugaccuucaucagccugcucuuccuguucuccagcgccuacuccaagcugaagcagccggccgacgggaaccccgaccccaacgccaaccccaacguggacccgaacgccaaccccaacgucgaccccaacgccaaccccaacguggacccgaacgcgaaccccaacgccaaccccaacgccaaccccaacgccaacccgaacgcgaaccccaacgccaaccccaacgccaaccccaacgccaacccgaacgccaaccccaacgcgaaccccaacgccaaccccaacgccaacccgaacgccaaccccaacgccaaccccaacgcgaaccccaacgccaacccgaacgccaaccccaacguggaccccaacgccaaccccaacgccaacccgaacgcgaaccccaacgccaaccccaacgccaacccgaacgccaaccccaacgccaaccccaacgcgaaccccaacgccaacccgaacgccaaccccaacgccaaccccaacgcgaaccccaacgccaacccgaacgccaaccccaacgccaaccccaacgccaaccccaacgcgaacccgaacgccaaccccaacaagaacaaccagggcaacggccaggggcacaacaugcccaacgaccccaaccgcaacgucgacgagaacgccaacgccaacuccgccgugaagaacaacaacaacgaggagccgagcgacaagcacaucaaggaguaccugaacaagauccagaacucccucagcacggaguggucccccugcagcgugaccugcggcaacgggauccagguccggaucaagcccggcuccgcgaacaagcccaaggacgagcuggacuacgccaacgacaucgagaagaagaucugcaagauggagaagugcagcuccguguucaacguggucaacagcuccaucgggcugaucauggugcucagcuuccuguuccugaacuga

SEQ ID NO: 66 - RNA, 342 nt, Artificial Sequence
  derived and/or modified CDS sequence (opt1) from Pf(3D7)__XP_001351122.1__HsALB_Pf-CSP(98-192)
augaagugggugaccuucaucagccugcucuuccuguucuccagcgccuacuccgccgacgggaaccccgaccccaacgccaaccccaacguggacccgaacgccaaccccaacgucgaccccaacgccaaccccaacguggacccgaacgcgaaccccaacgccaaccccaacgccaaccccaacgccaacccgaacgcgaaccccaacgccaaccccaacgccaaccccaacgccaacccgaacgccaaccccaacgcgaaccccaacgccaaccccaacgccaacccgaacgccaaccccaacgccaaccccaacgcgaaccccaacgccaacccguga

SEQ ID NO: 67 - RNA, 582 nt, Artificial Sequence
  derived and/or modified CDS sequence (opt1) from Pf(3D7)__XP_001351122.1__HsALB_Pf-CSP(98-272)
augaagugggugaccuucaucagccugcucuuccuguucuccagcgccuacuccgccgacgggaaccccgaccccaacgccaaccccaacguggacccgaacgccaaccccaacgucgaccccaacgccaaccccaacguggacccgaacgcgaaccccaacgccaaccccaacgccaaccccaacgccaacccgaacgcgaaccccaacgccaaccccaacgccaaccccaacgccaacccgaacgccaaccccaacgcgaaccccaacgccaaccccaacgccaacccgaacgccaaccccaacgccaaccccaacgcgaaccccaacgccaacccgaacgccaaccccaacguggaccccaacgccaaccccaacgccaacccgaacgcgaaccccaacgccaaccccaacgccaacccgaacgccaaccccaacgccaaccccaacgcgaaccccaacgccaacccgaacgccaaccccaacgccaaccccaacgcgaaccccaacgccaacccgaacgccaaccccaacgccaaccccaacgccaaccccaacgcgaacccgaacgccaaccccuga

SEQ ID NO: 68 - RNA, 888 nt, Artificial Sequence
  derived and/or modified CDS sequence (opt1) from Pf(3D7)__XP_001351122.1__HsALB_Pf-CSP(98-374)
augaagugggugaccuucaucagccugcucuuccuguucuccagcgccuacuccgccgacgggaaccccgaccccaacgccaaccccaacguggacccgaacgccaaccccaacgucgaccccaacgccaaccccaacguggacccgaacgcgaaccccaacgccaaccccaacgccaaccccaacgccaacccgaacgcgaaccccaacgccaaccccaacgccaaccccaacgccaacccgaacgccaaccccaacgcgaaccccaacgccaaccccaacgccaacccgaacgccaaccccaacgccaaccccaacgcgaaccccaacgccaacccgaacgccaaccccaacguggaccccaacgccaaccccaacgccaacccgaacgcgaaccccaacgccaaccccaacgccaacccgaacgccaaccccaacgccaaccccaacgcgaaccccaacgccaacccgaacgccaaccccaacgccaaccccaacgcgaaccccaacgccaacccgaacgccaaccccaacgccaaccccaacgccaaccccaacgcgaacccgaacgccaaccccaacaagaacaaccagggcaacggccaggggcacaacaugcccaacgaccccaaccgcaacgucgacgagaacgccaacgccaacuccgccgugaagaacaacaacaacgaggagccgagcgacaagcacaucaaggaguaccugaacaagauccagaacucccucagcacggaguggucccccugcagcgugaccugcggcaacgggauccagguccggaucaagcccggcuccgcgaacaagcccaaggacgagcuggacuacgccaacgacaucgagaagaagaucugcaagauggagaagugcuga

SEQ ID NO: 69 - RNA, 957 nt, Artificial Sequence
  derived and/or modified CDS sequence (opt1) from Pf(3D7)__XP_001351122.1__HsALB_Pf-CSP(98-397)
augaagugggugaccuucaucagccugcucuuccuguucuccagcgccuacuccgccgacgggaaccccgaccccaacgccaaccccaacguggacccgaacgccaaccccaacgucgaccccaacgccaaccccaacguggacccgaacgcgaaccccaacgccaaccccaacgccaaccccaacgccaacccgaacgcgaaccccaacgccaaccccaacgccaaccccaacgccaacccgaacgccaaccccaacgcgaaccccaacgccaaccccaacgccaacccgaacgccaaccccaacgccaaccccaacgcgaaccccaacgccaacccgaacgccaaccccaacguggaccccaacgccaaccccaacgccaacccgaacgcgaaccccaacgccaaccccaacgccaacccgaacgccaaccccaacgccaaccccaacgcgaaccccaacgccaacccgaacgccaaccccaacgccaaccccaacgcgaaccccaacgccaacccgaacgccaaccccaacgccaaccccaacgccaaccccaacgcgaacccgaacgccaaccccaacaagaacaaccagggcaacggccaggggcacaacaugcccaacgaccccaaccgcaacgucgacgagaacgccaacgccaacuccgccgugaagaacaacaacaacgaggagccgagcgacaagcacaucaaggaguaccugaacaagauccagaacucccucagcacggaguggucccccugcagcgugaccugcggcaacgggauccagguccggaucaagcccggcuccgcgaacaagcccaaggacgagcuggacuacgccaacgacaucgagaagaagaucugcaagauggagaagugcagcuccguguucaacguggucaacagcuccaucgggcugaucauggugcucagcuuccuguuccugaacuga

SEQ ID NO: 70 - RNA, 1284 nt, Artificial Sequence
  derived and/or modified CDS sequence (opt1) from Pf(3D7)__XP_001351122.1__HsALB_Pf-CSP(199-377)_L(PVTN)_HBsAg
augaaguggguaaccuuuauuucccuucuuuuucucuuuagcucggcuuauuccgaccccaacgccaaccccaacgccaacccgaacgcgaaccccaacgccaaccccaacgccaacccgaacgccaaccccaacgccaaccccaacgcgaaccccaacgccaacccgaacgccaaccccaacgccaaccccaacgcgaaccccaacgccaacccgaacgccaaccccaacgccaaccccaacgccaaccccaacgcgaacccgaacgccaaccccaacaagaacaaccagggcaacggccaggggcacaacaugcccaacgaccccaaccgcaacgucgacgagaacgccaacgccaacuccgccgugaagaacaacaacaacgaggagccgagcgacaagcacaucaaggaguaccugaacaagauccagaacucccucagcacggaguggucccccugcagcgugaccugcggcaacgggauccagguccggaucaagcccggcuccgcgaacaagcccaaggacgagcuggacuacgccaacgacaucgagaagaagaucugcaagauggagaagugcagcuccgugccggugacgaacauggagaacaucaccagcggcuuccuggggccccuccuggugcugcaggccggcuucuuccuccugacccgcauccugaccaucccgcagucccucgacagcugguggaccucccugaacuuccucgggggcagccccgucugccuggggcagaacucccagagccccaccuccaaccacagccccaccuccugcccgcccaucugccccggcuaccgguggaugugccugcgccgguucaucaucuuccuguucauccuccugcugugccucaucuuccugcuggugcuccuggacuaccagggcaugcugcccgugugcccgcucauccccgggagcacgaccaccaacaccggccccugcaagacgugcaccacccccgcccaggggaacuccauguucccgagcugcugcugcaccaagcccacggacggcaacugcacgugcauccccauccccuccagcugggcguucgccaaguaccugugggagugggccuccguccgcuucagcuggcugucccuccuggugccguucgugcagugguucgucgggcugagccccaccguguggcucuccgccaucuggaugaugugguacuggggccccagccuguacagcaucgugucccccuucaucccgcugcuccccaucuucuucugccugugggucuacaucuga

SEQ ID NO: 71 - RNA, 1023 nt, Artificial Sequence
  derived and/or modified CDS sequence (opt1) from Pb(ANKA)__XP_022712148.1__Pb-CSP
augaagaagugcaccauccugguggucgccagccuccugcuggugaacucccuccugcccggcuacgggcagaacaagagcauccaggcccagcgcaaccugaacgagcucugcuacaacgagggcaacgacaacaagcuguaccacgugcugaacuccaagaacgggaagaucuacaaccggaacaccgucaaccgccuccuggcggacgccccggagggcaagaagaacgagaagaagaacgagaagaucgagcggaacaacaagcugaagcagccgcccccgccgcccaaccccaacgacccgccgccgcccaaccccaacgacccgcccccgcccaacccgaacgacccgcccccgccgaaccccaacgacccgcccccgcccaacgccaacgacccgcccccgcccaacgccaacgaccccgccccgcccaacgcgaacgaccccgccccgccgaacgccaacgaccccgccccgcccaacgcgaacgacccggccccgcccaacgccaacgacccgccgccgcccaaccccaacgacccggccccgcccaacgccaacgacccgccgcccccgaaccccaacgacccggcgccgccccaggggaacaacaacccgcagccccagccccgcccccagccgcagccccagccccagccccagccgcagccccagccccagccccagccgcggccccagccccagccccagccgggcggcaacaacaacaacaagaacaacaacaacgacgacagcuacauccccuccgccgagaagauccucgaguucgugaagcagauccgcgacagcaucacggaggaguggucccagugcaacgugaccugcgggagcggcauccggguccgcaagcggaagggguccaacaagaaggccgaggaccugacccuggaggacaucgacaccgagaucugcaagauggacaagugcagcuccaucuucaacaucgugagcaacucccucggcuucgugauccugcugguccucguguucuucaacuga

SEQ ID NO: 72 - RNA, 1188 nt, Artificial Sequence
  derived and/or modified CDS sequence (opt1) from Pb(ANKA)__XP_022712148.1__Pb-CSP_L(G4SG4)_TM domain HA
augaagaagugcaccauccugguggucgccagccuccugcuggugaacucccuccugcccggcuacgggcagaacaagagcauccaggcccagcgcaaccugaacgagcucugcuacaacgagggcaacgacaacaagcuguaccacgugcugaacuccaagaacgggaagaucuacaaccggaacaccgucaaccgccuccuggcggacgccccggagggcaagaagaacgagaagaagaacgagaagaucgagcggaacaacaagcugaagcagccgcccccgccgcccaaccccaacgacccgccgccgcccaaccccaacgacccgcccccgcccaacccgaacgacccgcccccgccgaaccccaacgacccgcccccgcccaacgccaacgacccgcccccgcccaacgccaacgaccccgccccgcccaacgcgaacgaccccgccccgccgaacgccaacgaccccgccccgcccaacgcgaacgacccggccccgcccaacgccaacgacccgccgccgcccaaccccaacgacccggccccgcccaacgccaacgacccgccgcccccgaaccccaacgacccggcgccgccccaggggaacaacaacccgcagccccagccccgcccccagccgcagccccagccccagccccagccgcagccccagccccagccccagccgcggccccagccccagccccagccgggcggcaacaacaacaacaagaacaacaacaacgacgacagcuacauccccuccgccgagaagauccucgaguucgugaagcagauccgcgacagcaucacggaggaguggucccagugcaacgugaccugcgggagcggcauccggguccgcaagcggaagggguccaacaagaaggccgaggaccugacccuggaggacaucgacaccgagaucugcaagauggacaagugcagcuccaucuucaacaucgugagcaacucccucggcuucgugauccugcugguccucguguucuucaacggcgggggcgggagcggcgggggcggcaagcucgaguccacgcggaucuaccagauccuggcgaucuacagcaccgucgccagcucccuggugcucguggucagccugggggccaucuccuucuggaugugcagcaacggcucccugcagugccgcaucugcaucuga

SEQ ID NO: 73 - RNA, 1008 nt, Artificial Sequence
  derived and/or modified CDS sequence (opt1) from Pb(ANKA)__XP_022712148.1__HsALB_Pb-CSP(24-340)
augaagugggugaccuucaucagccugcucuuccuguucuccagcgccuacucccagaacaagagcauccaggcccagcgcaaccugaacgagcucugcuacaacgagggcaacgacaacaagcuguaccacgugcugaacuccaagaacgggaagaucuacaaccggaacaccgucaaccgccuccuggcggacgccccggagggcaagaagaacgagaagaagaacgagaagaucgagcggaacaacaagcugaagcagccgcccccgccgcccaaccccaacgacccgccgccgcccaaccccaacgacccgcccccgcccaacccgaacgacccgcccccgccgaaccccaacgacccgcccccgcccaacgccaacgacccgcccccgcccaacgccaacgaccccgccccgcccaacgcgaacgaccccgccccgccgaacgccaacgaccccgccccgcccaacgcgaacgacccggccccgcccaacgccaacgacccgccgccgcccaaccccaacgacccggccccgcccaacgccaacgacccgccgcccccgaaccccaacgacccggcgccgccccaggggaacaacaacccgcagccccagccccgcccccagccgcagccccagccccagccccagccgcagccccagccccagccccagccgcggccccagccccagccccagccgggcggcaacaacaacaacaagaacaacaacaacgacgacagcuacauccccuccgccgagaagauccucgaguucgugaagcagauccgcgacagcaucacggaggaguggucccagugcaacgugaccugcgggagcggcauccggguccgcaagcggaagggguccaacaagaaggccgaggaccugacccuggaggacaucgacaccgagaucugcaagauggacaagugcagcuccaucuucaacaucgugagcaacucccucggcuucgugauccugcugguccucguguucuucaacuga

SEQ ID NO: 74 - RNA, 1026 nt, Artificial Sequence
  derived and/or modified CDS sequence (opt1) from Pb(ANKA)__XP_022712148.1__HsIns-iso1_Pb-CSP(24-340)
auggcccuguggaugcgccuccugccccugcucgcccugcuggcgcucuggggcccggaccccgccgccgcccagaacaagagcauccaggcccagcgcaaccugaacgagcucugcuacaacgagggcaacgacaacaagcuguaccacgugcugaacuccaagaacgggaagaucuacaaccggaacaccgucaaccgccuccuggcggacgccccggagggcaagaagaacgagaagaagaacgagaagaucgagcggaacaacaagcugaagcagccgcccccgccgcccaaccccaacgacccgccgccgcccaaccccaacgacccgcccccgcccaacccgaacgacccgcccccgccgaaccccaacgacccgcccccgcccaacgccaacgacccgcccccgcccaacgccaacgaccccgccccgcccaacgcgaacgaccccgccccgccgaacgccaacgaccccgccccgcccaacgcgaacgacccggccccgcccaacgccaacgacccgccgccgcccaaccccaacgacccggccccgcccaacgccaacgacccgccgcccccgaaccccaacgacccggcgccgccccaggggaacaacaacccgcagccccagccccgcccccagccgcagccccagccccagccccagccgcagccccagccccagccccagccgcggccccagccccagccccagccgggcggcaacaacaacaacaagaacaacaacaacgacgacagcuacauccccuccgccgagaagauccucgaguucgugaagcagauccgcgacagcaucacggaggaguggucccagugcaacgugaccugcgggagcggcauccggguccgcaagcggaagggguccaacaagaaggccgaggaccugacccuggaggacaucgacaccgagaucugcaagauggacaagugcagcuccaucuucaacaucgugagcaacucccucggcuucgugauccugcugguccucguguucuucaacuga

SEQ ID NO: 75 - RNA, 1005 nt, Artificial Sequence
  derived and/or modified CDS sequence (opt1) from Pb(ANKA)__XP_022712148.1__HsSPARC_Pb-CSP(24-340)
augcgcgccuggaucuucuuccugcucugccuggccggccgggcccuggcccagaacaagagcauccaggcccagcgcaaccugaacgagcucugcuacaacgagggcaacgacaacaagcuguaccacgugcugaacuccaagaacgggaagaucuacaaccggaacaccgucaaccgccuccuggcggacgccccggagggcaagaagaacgagaagaagaacgagaagaucgagcggaacaacaagcugaagcagccgcccccgccgcccaaccccaacgacccgccgccgcccaaccccaacgacccgcccccgcccaacccgaacgacccgcccccgccgaaccccaacgacccgcccccgcccaacgccaacgacccgcccccgcccaacgccaacgaccccgccccgcccaacgcgaacgaccccgccccgccgaacgccaacgaccccgccccgcccaacgcgaacgacccggccccgcccaacgccaacgacccgccgccgcccaaccccaacgacccggccccgcccaacgccaacgacccgccgcccccgaaccccaacgacccggcgccgccccaggggaacaacaacccgcagccccagccccgcccccagccgcagccccagccccagccccagccgcagccccagccccagccccagccgcggccccagccccagccccagccgggcggcaacaacaacaacaagaacaacaacaacgacgacagcuacauccccuccgccgagaagauccucgaguucgugaagcagauccgcgacagcaucacggaggaguggucccagugcaacgugaccugcgggagcggcauccggguccgcaagcggaagggguccaacaagaaggccgaggaccugacccuggaggacaucgacaccgagaucugcaagauggacaagugcagcuccaucuucaacaucgugagcaacucccucggcuucgugauccugcugguccucguguucuucaacuga

SEQ ID NO: 76 - RNA, 1008 nt, Artificial Sequence
  derived and/or modified CDS sequence (opt1) from Pb(ANKA)__XP_022712148.1__IgE_Pb-CSP(24-340)
auggacuggaccuggauccuguuccucguggccgccgcgacccgcguccacagccagaacaagagcauccaggcccagcgcaaccugaacgagcucugcuacaacgagggcaacgacaacaagcuguaccacgugcugaacuccaagaacgggaagaucuacaaccggaacaccgucaaccgccuccuggcggacgccccggagggcaagaagaacgagaagaagaacgagaagaucgagcggaacaacaagcugaagcagccgcccccgccgcccaaccccaacgacccgccgccgcccaaccccaacgacccgcccccgcccaacccgaacgacccgcccccgccgaaccccaacgacccgcccccgcccaacgccaacgacccgcccccgcccaacgccaacgaccccgccccgcccaacgcgaacgaccccgccccgccgaacgccaacgaccccgccccgcccaacgcgaacgacccggccccgcccaacgccaacgacccgccgccgcccaaccccaacgacccggccccgcccaacgccaacgacccgccgcccccgaaccccaacgacccggcgccgccccaggggaacaacaacccgcagccccagccccgcccccagccgcagccccagccccagccccagccgcagccccagccccagccccagccgcggccccagccccagccccagccgggcggcaacaacaacaacaagaacaacaacaacgacgacagcuacauccccuccgccgagaagauccucgaguucgugaagcagauccgcgacagcaucacggaggaguggucccagugcaacgugaccugcgggagcggcauccggguccgcaagcggaagggguccaacaagaaggccgaggaccugacccuggaggacaucgacaccgagaucugcaagauggacaagugcagcuccaucuucaacaucgugagcaacucccucggcuucgugauccugcugguccucguguucuucaacuga

SEQ ID NO: 77 - RNA, 1194 nt, Artificial Sequence; identical to SEQ ID NO: 41
  derived and/or modified CDS sequence (opt1) from Pf(3D7)__XP_001351122.1__Pf-CSP

SEQ ID NO: 78 - RNA, 1122 nt, Artificial Sequence; identical to SEQ ID NO: 42
  derived and/or modified CDS sequence (opt1) from Pf(3D7)__XP_001351122.1__Pf-CSP(1-374)

SEQ ID NO: 79 - RNA, 975 nt, Artificial Sequence; identical to SEQ ID NO: 43
  derived and/or modified CDS sequence (opt1) from Pf(3D7)__XP_001351122.1__Pf-CSP(1-325)

SEQ ID NO: 80 - RNA, 1194 nt, Artificial Sequence
  derived and/or modified CDS sequence (opt1) from Pf(3D7)__XP_001351122.1__HsALB_Pf-CSP(19-397)
augaagugggugaccuucaucagccuccuguuccuguucuccagcgccuacucccuguuccaggaguaccagugcuacggcagcuccagcaacacccgcguccucaacgagcugaacuacgacaacgccgggacgaaccuguacaacgagcucgagaugaacuacuacggcaagcaggagaacugguacucccugaagaagaacagccggucccugggggagaacgacgacggcaacaacgaggacaacgagaagcuccgcaagcccaagcacaagaagcugaagcagccggcggacgggaaccccgaccccaacgccaaccccaacguggacccgaacgccaaccccaacguggaccccaacgccaaccccaacgucgacccgaacgccaaccccaacgcgaaccccaacgccaaccccaacgccaacccgaacgccaaccccaacgcgaaccccaacgccaaccccaacgccaacccgaacgccaaccccaacgccaaccccaacgcgaaccccaacgccaacccgaacgccaaccccaacgccaaccccaacgccaaccccaacgcgaacccgaacgccaaccccaacguggaccccaacgccaaccccaacgccaacccgaacgccaaccccaacgcgaaccccaacgccaacccgaacgccaaccccaacgccaaccccaacgccaaccccaacgcgaacccgaacgccaaccccaacgccaaccccaacgccaaccccaacgcgaacccgaacgccaaccccaacgccaaccccaacgccaaccccaacgccaacccgaacgcgaaccccaacaagaacaaccagggcaacggccaggggcacaacaugcccaacgaccccaaccggaacguggacgagaacgccaacgccaacagcgccgucaagaacaacaacaacgaggagccguccgacaagcacaucaaggaguaccugaacaagauccagaacagccucuccaccgaguggagccccugcuccgugaccugcggcaacgggauccaggugcgcaucaagcccggcagcgccaacaagcccaaggacgagcuggacuacgcgaacgacaucgagaagaagaucugcaagauggagaagugcuccagcgucuucaacguggugaacuccagcaucgggcugaucaugguccucagcuuccuguuccugaacuga

SEQ ID NO: 81 - RNA, 1212 nt, Artificial Sequence
  derived and/or modified CDS sequence (opt1) from Pf(3D7)__XP_001351122.1__HsIns-iso1_Pf-CSP(19-397)
auggcccuguggaugcgccuccugccccugcucgcccugcuggcgcucuggggcccggaccccgccgccgcccuguuccaggaguaccagugcuacgggagcuccagcaacacccgggugcugaacgagcucaacuacgacaacgccggcaccaaccuguacaacgagcuggagaugaacuacuacgggaagcaggagaacugguacucccucaagaagaacagccgcucccugggcgagaacgacgacgggaacaacgaggacaacgagaagcugcggaagcccaagcacaagaagcucaagcagcccgcggacggcaacccggaccccaacgccaaccccaacgucgaccccaacgccaacccgaacguggaccccaacgccaaccccaacguggaccccaacgcgaacccgaacgccaaccccaacgccaaccccaacgccaaccccaacgccaacccgaacgcgaaccccaacgccaaccccaacgccaaccccaacgccaacccgaacgccaaccccaacgcgaaccccaacgccaaccccaacgccaacccgaacgccaaccccaacgccaaccccaacgcgaaccccaacgccaacccgaacgucgaccccaacgccaaccccaacgccaacccgaacgccaaccccaacgcgaaccccaacgccaaccccaacgccaacccgaacgccaaccccaacgcgaaccccaacgccaaccccaacgccaacccgaacgccaaccccaacgccaaccccaacgcgaaccccaacgccaacccgaacgccaaccccaacgccaaccccaacgccaaccccaacgcgaacccgaacaagaacaaccagggcaacgggcagggccacaacaugcccaacgaccccaaccgcaacguggacgagaacgccaacgccaacagcgccgugaagaacaacaacaacgaggagcccuccgacaagcacaucaaggaguaccugaacaagauccagaacagccuguccacggaguggagcccgugcuccgugaccugcgggaacggcauccagguccggaucaagcccgggagcgccaacaagcccaaggacgagcucgacuacgcgaacgacaucgagaagaagaucugcaagauggagaagugcuccagcguguucaacgucgugaacuccagcaucggccugaucauggugcuguccuuccucuuccugaacuga

SEQ ID NO: 82 - RNA, 1191 nt, Artificial Sequence
  derived and/or modified CDS sequence (opt1) from Pf(3D7)__XP_001351122.1__HsSPARC_Pf-CSP(19-397)
augcgcgccuggaucuucuuccugcucugccuggccggccgggcgcuggcccucuuccaggaguaccagugcuacgggagcuccagcaacacccgcgugcugaacgagcugaacuacgacaacgccggcaccaaccucuacaacgagcuggagaugaacuacuacgggaagcaggagaacugguacucccugaagaagaacagccggucccucggcgagaacgacgacgggaacaacgaggacaacgagaagcugcgcaagcccaagcacaagaagcugaagcagccggccgacggcaaccccgaccccaacgccaaccccaacgucgacccgaacgcgaaccccaacguggaccccaacgccaaccccaacguggacccgaacgccaaccccaacgccaaccccaacgcgaaccccaacgccaacccgaacgccaaccccaacgccaaccccaacgccaaccccaacgcgaacccgaacgccaaccccaacgccaaccccaacgccaaccccaacgccaacccgaacgcgaaccccaacgccaaccccaacgccaaccccaacgccaacccgaacgccaaccccaacgucgaccccaacgcgaaccccaacgccaacccgaacgccaaccccaacgccaaccccaacgccaacccgaacgcgaaccccaacgccaaccccaacgccaaccccaacgccaacccgaacgcgaaccccaacgccaaccccaacgccaaccccaacgccaacccgaacgccaaccccaacgcgaaccccaacgccaaccccaacgccaacccgaacgccaaccccaacaagaacaaccagggcaacgggcagggccacaacaugcccaacgaccccaaccggaacguggacgagaacgccaacgcgaacagcgccgugaagaacaacaacaacgaggagccguccgacaagcacaucaaggaguaccucaacaagauccagaacagccuguccacggaguggagccccugcuccgugaccugcgggaacggcauccagguccgcaucaagcccgggagcgccaacaagcccaaggacgagcuggacuacgccaacgacaucgagaagaagaucugcaagauggagaagugcuccagcguguucaacgucgugaacuccagcaucggccucaucauggugcuguccuuccuguuccucaacuga

SEQ ID NO: 83 - RNA, 1194 nt, Artificial Sequence
  derived and/or modified CDS sequence (opt1) from Pf(3D7)__XP_001351122.1__IgE_Pf-CSP(19-397)
auggacuggaccuggauccuguuccucguggccgccgcgacccgcguccacagccuguuccaggaguaccagugcuacggcuccagcuccaacacgcgggugcugaacgagcucaacuacgacaacgccgggaccaaccuguacaacgagcuggagaugaacuacuacggcaagcaggagaacugguacagccucaagaagaacucccgcagccugggggagaacgacgacggcaacaacgaggacaacgagaagcugcggaagcccaagcacaagaagcucaagcagccggccgacgggaaccccgaccccaacgccaaccccaacguggacccgaacgccaaccccaacgucgaccccaacgcgaaccccaacguggacccgaacgccaaccccaacgccaaccccaacgccaaccccaacgcgaacccgaacgccaaccccaacgccaaccccaacgccaaccccaacgccaacccgaacgcgaaccccaacgccaaccccaacgccaaccccaacgccaacccgaacgccaaccccaacgcgaaccccaacgccaaccccaacgccaacccgaacgccaaccccaacguggaccccaacgccaaccccaacgcgaacccgaacgccaaccccaacgccaaccccaacgccaacccgaacgccaaccccaacgcgaaccccaacgccaaccccaacgccaacccgaacgccaaccccaacgcgaaccccaacgccaaccccaacgccaacccgaacgccaaccccaacgccaaccccaacgcgaaccccaacgccaacccgaacgccaaccccaacaagaacaaccagggcaacggccaggggcacaacaugcccaacgaccccaaccgcaacgucgacgagaacgccaacgccaacuccgcggugaagaacaacaacaacgaggagccgagcgacaagcacaucaaggaguaccugaacaagauccagaacucccugagcaccgaguggucccccugcagcgugaccugcggcaacgggauccagguccggaucaagcccggcuccgccaacaagcccaaggacgagcucgacuacgccaacgacaucgagaagaagaucugcaagauggagaagugcagcuccguguucaacguggucaacagcuccaucgggcugaucauggugcugagcuuccucuuccugaacuga

SEQ ID NO: 84 - RNA, 1359 nt, Artificial Sequence
  derived and/or modified CDS sequence (opt1) from Pf(3D7)__XP_001351122.1__Pf-CSP_L(G4SG4)_TM domain HA
augaugcgcaagcuggccauccucagcguguccagcuuccuguucgucgaggcccuguuccaggaguaccagugcuacggcuccagcuccaacacccgggugcucaacgagcugaacuacgacaacgcggggaccaaccuguacaacgagcucgagaugaacuacuacggcaagcaggagaacugguacagccugaagaagaacucccgcagccugggggagaacgacgacggcaacaacgaggacaacgagaagcuccggaagcccaagcacaagaagcugaagcagccggccgacgggaaccccgaccccaacgccaaccccaacguggacccgaacgccaaccccaacgucgaccccaacgccaaccccaacguggacccgaacgcgaaccccaacgccaaccccaacgccaaccccaacgccaacccgaacgcgaaccccaacgccaaccccaacgccaaccccaacgccaacccgaacgccaaccccaacgcgaaccccaacgccaaccccaacgccaacccgaacgccaaccccaacgccaaccccaacgcgaaccccaacgccaacccgaacgccaaccccaacguggaccccaacgccaaccccaacgccaacccgaacgcgaaccccaacgccaaccccaacgccaacccgaacgccaaccccaacgccaaccccaacgcgaaccccaacgccaacccgaacgccaaccccaacgccaaccccaacgcgaaccccaacgccaacccgaacgccaaccccaacgccaaccccaacgccaaccccaacgcgaacccgaacgccaaccccaacaagaacaaccagggcaacggccaggggcacaacaugcccaacgaccccaaccgcaacgucgacgagaacgccaacgccaacuccgccgugaagaacaacaacaacgaggagccgagcgacaagcacaucaaggaguaccugaacaagauccagaacucccucagcacggaguggucccccugcagcgugaccugcggcaacgggauccagguccggaucaagcccggcuccgcgaacaagcccaaggacgagcuggacuacgccaacgacaucgagaagaagaucugcaagauggagaagugcagcuccguguucaacguggucaacagcuccaucgggcugaucauggugcucagcuuccuguuccugaacggcggcgggggcagcgggggcggcgggaagcucgaguccacccgcaucuaccagauccuggccaucuacagcaccguggccuccagccugguccucguggugucccugggcgccaucagcuucuggaugugcuccaacgggagccugcagugccggaucugcaucuga

SEQ ID NO: 85 - RNA, 1233 nt, Artificial Sequence
  derived and/or modified CDS sequence (opt1) from Pf(3D7)__XP_001351122.1__Pf-CSP(199-377)_L(PVTN)_HBsAg
auggaccccaacgccaacccgaacgccaaccccaacgcgaaccccaacgccaaccccaacgccaacccgaacgccaaccccaacgccaaccccaacgcgaaccccaacgccaacccgaacgccaaccccaacgccaaccccaacgcgaaccccaacgccaacccgaacgccaaccccaacgccaaccccaacgccaaccccaacgcgaacccgaacgccaaccccaacaagaacaaccagggcaacgggcagggccacaacaugcccaacgaccccaaccgcaacguggacgagaacgccaacgccaacagcgccgucaagaacaacaacaacgaggagccguccgacaagcacaucaaggaguaccugaacaagauccagaacagccucuccaccgaguggagccccugcuccgugaccugcgggaacggcauccaggugcggaucaagcccgggagcgcgaacaagcccaaggacgagcuggacuacgccaacgacaucgagaagaagaucugcaagauggagaagugcuccagcgucccggugacgaacauggagaacaucaccuccggcuuccugggcccccuccuggugcugcaggccggguucuuccuccugacccgcauccugaccaucccccagagccucgacuccugguggacgagccugaacuuccugggcgggucccccgucugccucggccagaacagccaguccccgaccagcaaccacucccccaccagcugcccgcccaucugccccggguaccgguggaugugccugcgccgguucaucaucuuccuguucauccuccugcugugccucaucuuccugcuggugcuccuggacuaccagggcaugcugcccgugugcccccucaucccgggcuccaccacgaccaacaccgggcccugcaagaccugcacgacccccgcccagggcaacagcauguuccccagcugcugcugcaccaagccgaccgacgggaacugcacgugcauccccauccccuccagcugggccuucgcgaaguaccugugggagugggccuccguccgcuucagcuggcugucccuccuggugcccuucgugcagugguucgucggccugagcccgaccguguggcucuccgccaucuggaugaugugguacuggggccccagccuguacuccaucgugagccccuucaucccccugcucccgaucuucuucugccugugggucuacaucuga

SEQ ID NO: 86 - RNA, 1275 nt, Artificial Sequence
  derived and/or modified CDS sequence (opt1) from Pf(3D7)__XP_001351122.1__Pf-CSP(199-387)_L(PVTN)_HBsAg
augauggcccccgacccgaacgccaaccccaacgcgaaccccaacgccaaccccaacgccaacccgaacgccaaccccaacgccaaccccaacgcgaaccccaacgccaacccgaacgccaaccccaacgccaaccccaacgcgaaccccaacgccaacccgaacgccaaccccaacgccaaccccaacgccaaccccaacgcgaacccgaacgccaaccccaacgccaaccccaacaagaacaaccagggcaacgggcagggccacaacaugcccaacgacccgaaccgcaacguggacgagaacgccaacgccaacagcgcggucaagaacaacaacaacgaggagcccuccgacaagcacaucaaggaguaccugaacaagauccagaacagccucuccaccgaguggagccccugcuccgugaccugcgggaacggcauccaggugcggaucaagcccgggagcgccaacaagccgaaggacgagcuggacuacgccaacgacaucgagaagaagaucugcaagauggagaagugcuccagcgucuucaacguggugaacuccagcaucggccugggccccgucacgaacauggagaacaucaccuccggguuccucggcccccugcuggugcuccaggccggguucuuccugcugacccgcauccucaccaucccccagagccuggacuccugguggacgagccugaacuuccucggcggguccccggugugccugggccagaacagccagucccccaccagcaaccacucccccaccagcugcccgcccaucugccccggcuaccgguggaugugccugcgccgguucaucaucuuccucuucauccugcugcucugccugaucuuccugcucguccugcuggacuaccaggggaugcuccccgugugcccgcugauccccggcagcaccacgaccaacaccgggcccugcaagaccugcacgacccccgcccagggcaacuccauguucccgagcugcugcugcaccaagcccaccgacggcaacugcacgugcauccccauccccuccagcugggcguucgccaaguaccugugggagugggccuccgugcgcuucagcuggcucucccugcuggucccguucgugcagugguucguggggcucagccccaccgucuggcuguccgccaucuggaugaugugguacuggggccccagccuguacuccaucgugagccccuucaucccgcuccugcccaucuucuucugccuguggguguacaucuga

SEQ ID NO: 87 - RNA, 459 nt, Artificial Sequence
  derived and/or modified CDS sequence (opt1) from Pf(3D7)__XP_001351122.1__HsALB_Pf-CSP(19-152)
augaagugggugaccuucaucagccuccuguuccuguucuccagcgccuacucccuguuccaggaguaccagugcuacggcagcuccagcaacacccgcguccucaacgagcugaacuacgacaacgccgggacgaaccuguacaacgagcucgagaugaacuacuacggcaagcaggagaacugguacucccugaagaagaacagccggucccugggggagaacgacgacggcaacaacgaggacaacgagaagcuccgcaagcccaagcacaagaagcugaagcagccggcggacgggaaccccgaccccaacgccaaccccaacguggacccgaacgccaaccccaacguggaccccaacgccaaccccaacgucgacccgaacgccaaccccaacgcgaaccccaacgccaaccccaacgccaacccgaacgccaaccccaacgcgaaccccuga

SEQ ID NO: 88 - RNA, 579 nt, Artificial Sequence
  derived and/or modified CDS sequence (opt1) from Pf(3D7)__XP_001351122.1__HsALB_Pf-CSP(19-192)
augaagugggugaccuucaucagccuccuguuccuguucuccagcgccuacucccuguuccaggaguaccagugcuacggcagcuccagcaacacccgcguccucaacgagcugaacuacgacaacgccgggacgaaccuguacaacgagcucgagaugaacuacuacggcaagcaggagaacugguacucccugaagaagaacagccggucccugggggagaacgacgacggcaacaacgaggacaacgagaagcuccgcaagcccaagcacaagaagcugaagcagccggcggacgggaaccccgaccccaacgccaaccccaacguggacccgaacgccaaccccaacguggaccccaacgccaaccccaacgucgacccgaacgccaaccccaacgcgaaccccaacgccaaccccaacgccaacccgaacgccaaccccaacgcgaaccccaacgccaaccccaacgccaacccgaacgccaaccccaacgccaaccccaacgcgaaccccaacgccaacccgaacgccaaccccaacgccaaccccaacgccaaccccaacgcgaacccguga

SEQ ID NO: 89 - RNA, 819 nt, Artificial Sequence
  derived and/or modified CDS sequence (opt1) from Pf(3D7)__XP_001351122.1__HsALB_Pf-CSP(19-272)
augaagugggugaccuucaucagccuccuguuccuguucuccagcgccuacucccuguuccaggaguaccagugcuacggcagcuccagcaacacccgcguccucaacgagcugaacuacgacaacgccgggacgaaccuguacaacgagcucgagaugaacuacuacggcaagcaggagaacugguacucccugaagaagaacagccggucccugggggagaacgacgacggcaacaacgaggacaacgagaagcuccgcaagcccaagcacaagaagcugaagcagccggcggacgggaaccccgaccccaacgccaaccccaacguggacccgaacgccaaccccaacguggaccccaacgccaaccccaacgucgacccgaacgccaaccccaacgcgaaccccaacgccaaccccaacgccaacccgaacgccaaccccaacgcgaaccccaacgccaaccccaacgccaacccgaacgccaaccccaacgccaaccccaacgcgaaccccaacgccaacccgaacgccaaccccaacgccaaccccaacgccaaccccaacgcgaacccgaacgccaaccccaacguggaccccaacgccaaccccaacgccaacccgaacgccaaccccaacgcgaaccccaacgccaacccgaacgccaaccccaacgccaaccccaacgccaaccccaacgcgaacccgaacgccaaccccaacgccaaccccaacgccaaccccaacgcgaacccgaacgccaaccccaacgccaaccccaacgccaaccccaacgccaacccgaacgcgaaccccuga

SEQ ID NO: 90 - RNA, 981 nt, Artificial Sequence
  derived and/or modified CDS sequence (opt1) from Pf(3D7)__XP_001351122.1__HsALB_Pf-CSP(19-272)_L(AAY)_Pf-CSP(310-3 27)_L(AAY)_Pf-CSP(346-375)
augaagugggugaccuucaucagccuccuguuccuguucuccagcgccuacucccuguuccaggaguaccagugcuacggcagcuccagcaacacccgcguccucaacgagcugaacuacgacaacgccgggacgaaccuguacaacgagcucgagaugaacuacuacggcaagcaggagaacugguacucccugaagaagaacagccggucccugggggagaacgacgacggcaacaacgaggacaacgagaagcuccgcaagcccaagcacaagaagcugaagcagccggcggacgggaaccccgaccccaacgccaaccccaacguggacccgaacgccaaccccaacguggaccccaacgccaaccccaacgucgacccgaacgccaaccccaacgcgaaccccaacgccaaccccaacgccaacccgaacgccaaccccaacgcgaaccccaacgccaaccccaacgccaacccgaacgccaaccccaacgccaaccccaacgcgaaccccaacgccaacccgaacgccaaccccaacgccaaccccaacgccaaccccaacgcgaacccgaacgccaaccccaacguggaccccaacgccaaccccaacgccaacccgaacgccaaccccaacgcgaaccccaacgccaacccgaacgccaaccccaacgccaaccccaacgccaaccccaacgcgaacccgaacgccaaccccaacgccaaccccaacgccaaccccaacgcgaacccgaacgccaaccccaacgccaaccccaacgccaaccccaacgccaacccgaacgcgaaccccgccgccuacgagcccagcgacaagcacaucaaggaguaccugaacaagauccagaacucccucgccgccuacaucaagcccggcagcgcgaacaagccgaaggacgagcuggacuacgccaacgacaucgagaagaagaucugcaagauggagaagugcuccuga

SEQ ID NO: 91 - RNA, 942 nt, Artificial Sequence
  derived and/or modified CDS sequence (opt1) from Pf(3D7)__XP_001351122.1__HsALB_Pf-CSP(19-272)_L(AAY)_Pf-CSP(346-3 65)_L(AAY)_P2
augaagugggugaccuucaucagccuccuguuccuguucuccagcgccuacucccuguuccaggaguaccagugcuacggcagcuccagcaacacccgcguccucaacgagcugaacuacgacaacgccgggacgaaccuguacaacgagcucgagaugaacuacuacggcaagcaggagaacugguacucccugaagaagaacagccggucccugggggagaacgacgacggcaacaacgaggacaacgagaagcuccgcaagcccaagcacaagaagcugaagcagccggcggacgggaaccccgaccccaacgccaaccccaacguggacccgaacgccaaccccaacguggaccccaacgccaaccccaacgucgacccgaacgccaaccccaacgcgaaccccaacgccaaccccaacgccaacccgaacgccaaccccaacgcgaaccccaacgccaaccccaacgccaacccgaacgccaaccccaacgccaaccccaacgcgaaccccaacgccaacccgaacgccaaccccaacgccaaccccaacgccaaccccaacgcgaacccgaacgccaaccccaacguggaccccaacgccaaccccaacgccaacccgaacgccaaccccaacgcgaaccccaacgccaacccgaacgccaaccccaacgccaaccccaacgccaaccccaacgcgaacccgaacgccaaccccaacgccaaccccaacgccaaccccaacgcgaacccgaacgccaaccccaacgccaaccccaacgccaaccccaacgccaacccgaacgcgaaccccgccgccuacaucaagcccggcagcgccaacaagcccaaggacgagcuggacuacgccaacgacaucgaggcggccuaccaguacaucaaggccaacuccaaguucaucggcaucaccgagcucuga

SEQ ID NO: 92 - RNA, 936 nt, Artificial Sequence
  derived and/or modified CDS sequence (opt1) from Pf(3D7)__XP_001351122.1__HsALB_Pf-CSP(19-272)_L(AAY)_Pf-CSP(346-3 65)_L(AAY)_PADRE
augaagugggugaccuucaucagccuccuguuccuguucuccagcgccuacucccuguuccaggaguaccagugcuacggcagcuccagcaacacccgcguccucaacgagcugaacuacgacaacgccgggacgaaccuguacaacgagcucgagaugaacuacuacggcaagcaggagaacugguacucccugaagaagaacagccggucccugggggagaacgacgacggcaacaacgaggacaacgagaagcuccgcaagcccaagcacaagaagcugaagcagccggcggacgggaaccccgaccccaacgccaaccccaacguggacccgaacgccaaccccaacguggaccccaacgccaaccccaacgucgacccgaacgccaaccccaacgcgaaccccaacgccaaccccaacgccaacccgaacgccaaccccaacgcgaaccccaacgccaaccccaacgccaacccgaacgccaaccccaacgccaaccccaacgcgaaccccaacgccaacccgaacgccaaccccaacgccaaccccaacgccaaccccaacgcgaacccgaacgccaaccccaacguggaccccaacgccaaccccaacgccaacccgaacgccaaccccaacgcgaaccccaacgccaacccgaacgccaaccccaacgccaaccccaacgccaaccccaacgcgaacccgaacgccaaccccaacgccaaccccaacgccaaccccaacgcgaacccgaacgccaaccccaacgccaaccccaacgccaaccccaacgccaacccgaacgcgaaccccgccgccuacaucaagcccggcagcgccaacaagcccaaggacgagcuggacuacgccaacgacaucgaggcggccuacgccaaguucguggccgccuggacccucaaggcggccgccuga

SEQ ID NO: 93 - RNA, 993 nt, Artificial Sequence
  derived and/or modified CDS sequence (opt1) from Pf(3D7)__XP_001351122.1__HsALB_Pf-CSP(19-272)_L(G4S)_Pf-CSP(310-3 27)_L(G4S)_Pf-CSP(346-375)
augaagugggugaccuucaucagccuccuguuccuguucuccagcgccuacucccuguuccaggaguaccagugcuacggcagcuccagcaacacccgcguccucaacgagcugaacuacgacaacgccgggacgaaccuguacaacgagcucgagaugaacuacuacggcaagcaggagaacugguacucccugaagaagaacagccggucccugggggagaacgacgacggcaacaacgaggacaacgagaagcuccgcaagcccaagcacaagaagcugaagcagccggcggacgggaaccccgaccccaacgccaaccccaacguggacccgaacgccaaccccaacguggaccccaacgccaaccccaacgucgacccgaacgccaaccccaacgcgaaccccaacgccaaccccaacgccaacccgaacgccaaccccaacgcgaaccccaacgccaaccccaacgccaacccgaacgccaaccccaacgccaaccccaacgcgaaccccaacgccaacccgaacgccaaccccaacgccaaccccaacgccaaccccaacgcgaacccgaacgccaaccccaacguggaccccaacgccaaccccaacgccaacccgaacgccaaccccaacgcgaaccccaacgccaacccgaacgccaaccccaacgccaaccccaacgccaaccccaacgcgaacccgaacgccaaccccaacgccaaccccaacgccaaccccaacgcgaacccgaacgccaaccccaacgccaaccccaacgccaaccccaacgccaacccgaacgcgaaccccggcggcgggggcagcgagcccuccgacaagcacaucaaggaguaccugaacaagauccagaacagccucgggggcgggggcuccaucaagcccggcagcgccaacaagccgaaggacgagcuggacuacgccaacgacaucgagaagaagaucugcaagauggagaagugcuccuga

SEQ ID NO: 94 - RNA, 978 nt, Artificial Sequence
  derived and/or modified CDS sequence (opt1) from Pf(3D7)__XP_001351122.1__HsALB_Pf-CSP(19-272)_L(G4S)_Pf-CSP(310-3 27)_Pf-CSP(346-375)
augaagugggugaccuucaucagccuccuguuccuguucuccagcgccuacucccuguuccaggaguaccagugcuacggcagcuccagcaacacccgcguccucaacgagcugaacuacgacaacgccgggacgaaccuguacaacgagcucgagaugaacuacuacggcaagcaggagaacugguacucccugaagaagaacagccggucccugggggagaacgacgacggcaacaacgaggacaacgagaagcuccgcaagcccaagcacaagaagcugaagcagccggcggacgggaaccccgaccccaacgccaaccccaacguggacccgaacgccaaccccaacguggaccccaacgccaaccccaacgucgacccgaacgccaaccccaacgcgaaccccaacgccaaccccaacgccaacccgaacgccaaccccaacgcgaaccccaacgccaaccccaacgccaacccgaacgccaaccccaacgccaaccccaacgcgaaccccaacgccaacccgaacgccaaccccaacgccaaccccaacgccaaccccaacgcgaacccgaacgccaaccccaacguggaccccaacgccaaccccaacgccaacccgaacgccaaccccaacgcgaaccccaacgccaacccgaacgccaaccccaacgccaaccccaacgccaaccccaacgcgaacccgaacgccaaccccaacgccaaccccaacgccaaccccaacgcgaacccgaacgccaaccccaacgccaaccccaacgccaaccccaacgccaacccgaacgcgaaccccggcggcgggggcagcgagcccuccgacaagcacaucaaggaguaccugaacaagauccagaacagccucaucaagcccggguccgccaacaagccgaaggacgagcuggacuacgccaacgacaucgagaagaagaucugcaagauggagaagugcagcuga

SEQ ID NO: 95 - RNA, 978 nt, Artificial Sequence
  derived and/or modified CDS sequence (opt1) from Pf(3D7)__XP_001351122.1__HsALB_Pf-CSP(19-325)
augaagugggugaccuucaucagccuccuguuccuguucuccagcgccuacucccuguuccaggaguaccagugcuacggcagcuccagcaacacccgcguccucaacgagcugaacuacgacaacgccgggacgaaccuguacaacgagcucgagaugaacuacuacggcaagcaggagaacugguacucccugaagaagaacagccggucccugggggagaacgacgacggcaacaacgaggacaacgagaagcuccgcaagcccaagcacaagaagcugaagcagccggcggacgggaaccccgaccccaacgccaaccccaacguggacccgaacgccaaccccaacguggaccccaacgccaaccccaacgucgacccgaacgccaaccccaacgcgaaccccaacgccaaccccaacgccaacccgaacgccaaccccaacgcgaaccccaacgccaaccccaacgccaacccgaacgccaaccccaacgccaaccccaacgcgaaccccaacgccaacccgaacgccaaccccaacgccaaccccaacgccaaccccaacgcgaacccgaacgccaaccccaacguggaccccaacgccaaccccaacgccaacccgaacgccaaccccaacgcgaaccccaacgccaacccgaacgccaaccccaacgccaaccccaacgccaaccccaacgcgaacccgaacgccaaccccaacgccaaccccaacgccaaccccaacgcgaacccgaacgccaaccccaacgccaaccccaacgccaaccccaacgccaacccgaacgcgaaccccaacaagaacaaccagggcaacggccaggggcacaacaugcccaacgaccccaaccggaacguggacgagaacgccaacgccaacagcgccgucaagaacaacaacaacgaggagccguccgacaagcacaucaaggaguaccugaacaagauccagaacuga

SEQ ID NO: 96 - RNA, 1155 nt, Artificial Sequence
  derived and/or modified CDS sequence (opt1) from Pf(3D7)__XP_001351122.1__HsALB_Pf-CSP(19-384)
augaagugggugaccuucaucagccuccuguuccuguucuccagcgccuacucccuguuccaggaguaccagugcuacggcagcuccagcaacacccgcguccucaacgagcugaacuacgacaacgccgggacgaaccuguacaacgagcucgagaugaacuacuacggcaagcaggagaacugguacucccugaagaagaacagccggucccugggggagaacgacgacggcaacaacgaggacaacgagaagcuccgcaagcccaagcacaagaagcugaagcagccggcggacgggaaccccgaccccaacgccaaccccaacguggacccgaacgccaaccccaacguggaccccaacgccaaccccaacgucgacccgaacgccaaccccaacgcgaaccccaacgccaaccccaacgccaacccgaacgccaaccccaacgcgaaccccaacgccaaccccaacgccaacccgaacgccaaccccaacgccaaccccaacgcgaaccccaacgccaacccgaacgccaaccccaacgccaaccccaacgccaaccccaacgcgaacccgaacgccaaccccaacguggaccccaacgccaaccccaacgccaacccgaacgccaaccccaacgcgaaccccaacgccaacccgaacgccaaccccaacgccaaccccaacgccaaccccaacgcgaacccgaacgccaaccccaacgccaaccccaacgccaaccccaacgcgaacccgaacgccaaccccaacgccaaccccaacgccaaccccaacgccaacccgaacgcgaaccccaacaagaacaaccagggcaacggccaggggcacaacaugcccaacgaccccaaccggaacguggacgagaacgccaacgccaacagcgccgucaagaacaacaacaacgaggagccguccgacaagcacaucaaggaguaccugaacaagauccagaacagccucuccaccgaguggagccccugcuccgugaccugcggcaacgggauccaggugcgcaucaagcccggcagcgccaacaagcccaaggacgagcuggacuacgcgaacgacaucgagaagaagaucugcaagauggagaagugcuccagcgucuucaacguggugaacuccagcuga

SEQ ID NO: 97 - RNA, 1293 nt, Artificial Sequence
  derived and/or modified CDS sequence (opt1) from Pf(3D7)__XP_001351122.1__HsALB_Pf-CSP(19-384)_TM domain HA
augaagugggugaccuucaucagccuccuguuccuguucuccagcgccuacucccuguuccaggaguaccagugcuacggcagcuccagcaacacccgcguccucaacgagcugaacuacgacaacgccgggacgaaccuguacaacgagcucgagaugaacuacuacggcaagcaggagaacugguacucccugaagaagaacagccggucccugggggagaacgacgacggcaacaacgaggacaacgagaagcuccgcaagcccaagcacaagaagcugaagcagccggcggacgggaaccccgaccccaacgccaaccccaacguggacccgaacgccaaccccaacguggaccccaacgccaaccccaacgucgacccgaacgccaaccccaacgcgaaccccaacgccaaccccaacgccaacccgaacgccaaccccaacgcgaaccccaacgccaaccccaacgccaacccgaacgccaaccccaacgccaaccccaacgcgaaccccaacgccaacccgaacgccaaccccaacgccaaccccaacgccaaccccaacgcgaacccgaacgccaaccccaacguggaccccaacgccaaccccaacgccaacccgaacgccaaccccaacgcgaaccccaacgccaacccgaacgccaaccccaacgccaaccccaacgccaaccccaacgcgaacccgaacgccaaccccaacgccaaccccaacgccaaccccaacgcgaacccgaacgccaaccccaacgccaaccccaacgccaaccccaacgccaacccgaacgcgaaccccaacaagaacaaccagggcaacggccaggggcacaacaugcccaacgaccccaaccggaacguggacgagaacgccaacgccaacagcgccgucaagaacaacaacaacgaggagccguccgacaagcacaucaaggaguaccugaacaagauccagaacagccucuccaccgaguggagccccugcuccgugaccugcggcaacgggauccaggugcgcaucaagcccggcagcgccaacaagcccaaggacgagcuggacuacgcgaacgacaucgagaagaagaucugcaagauggagaagugcuccagcgucuucaacguggugaacuccagcaagcuggagagcacccggaucuaccagauccucgccaucuacuccacggucgccagcucccuggugcugguggucagccucggggccaucuccuucuggaugugcagcaacggcucccugcagugccgcaucugcaucuga

SEQ ID NO: 98 - RNA, 1005 nt, Artificial Sequence
  derived and/or modified CDS sequence (opt1) from Pf(3D7)__XP_001351122.1__HsALB_Pf-CSP(82-397)
augaagugggugaccuucaucagccuccuguuccuguucuccagcgccuacuccgacaacgagaagcugcgcaagcccaagcacaagaagcucaagcagccggccgacggcaaccccgaccccaacgcgaaccccaacgucgacccgaacgccaaccccaacguggaccccaacgccaaccccaacguggacccgaacgccaaccccaacgccaaccccaacgcgaaccccaacgccaacccgaacgccaaccccaacgccaaccccaacgcgaaccccaacgccaacccgaacgccaaccccaacgccaaccccaacgccaaccccaacgcgaacccgaacgccaaccccaacgccaaccccaacgccaaccccaacgccaacccgaacgcgaaccccaacgucgaccccaacgccaaccccaacgccaacccgaacgccaaccccaacgccaaccccaacgcgaacccgaacgccaaccccaacgccaaccccaacgccaaccccaacgccaacccgaacgcgaaccccaacgccaaccccaacgccaaccccaacgccaacccgaacgcgaaccccaacgccaaccccaacgccaaccccaacgccaacccgaacgccaaccccaacaagaacaaccaggggaacggccaggggcacaacaugcccaacgaccccaaccggaacguggacgagaacgcgaacgccaacagcgccgugaagaacaacaacaacgaggagccguccgacaagcacaucaaggaguaccugaacaagauccagaacagccuguccaccgaguggagccccugcuccgucacgugcggcaacgggauccaggugcgcaucaagcccggcagcgccaacaagcccaaggacgagcucgacuacgccaacgacaucgagaagaagaucugcaagauggagaagugcuccagcguguucaacgucgugaacuccagcaucggccugaucauggugcuguccuuccucuuccugaacuga

SEQ ID NO: 99 - RNA, 357 nt, Artificial Sequence
  derived and/or modified CDS sequence (opt1) from Pf(3D7)__XP_001351122.1__HsALB_Pf-CSP(93-192)
augaagugggugaccuucaucagccuccuguuccuguucuccagcgccuacuccaagcugaagcagcccgccgacggcaacccggaccccaacgcgaaccccaacgucgaccccaacgccaacccgaacguggaccccaacgccaaccccaacguggaccccaacgccaacccgaacgccaaccccaacgcgaaccccaacgccaaccccaacgccaacccgaacgccaaccccaacgcgaaccccaacgccaaccccaacgccaacccgaacgccaaccccaacgccaaccccaacgcgaaccccaacgccaacccgaacgccaaccccaacgccaaccccaacgccaaccccuga

SEQ ID NO: 100 - RNA, 597 nt, Artificial Sequence
  derived and/or modified CDS sequence (opt1) from Pf(3D7)__XP_001351122.1__HsALB_Pf-CSP(93-272)
augaagugggugaccuucaucagccuccuguuccuguucuccagcgccuacuccaagcugaagcagcccgccgacggcaacccggaccccaacgcgaaccccaacgucgaccccaacgccaacccgaacguggaccccaacgccaaccccaacguggaccccaacgccaacccgaacgccaaccccaacgcgaaccccaacgccaaccccaacgccaacccgaacgccaaccccaacgcgaaccccaacgccaaccccaacgccaacccgaacgccaaccccaacgccaaccccaacgcgaaccccaacgccaacccgaacgccaaccccaacgccaaccccaacgccaaccccaacgcgaacccgaacgucgaccccaacgccaaccccaacgccaaccccaacgccaacccgaacgccaaccccaacgcgaaccccaacgccaacccgaacgccaaccccaacgccaaccccaacgccaaccccaacgcgaacccgaacgccaaccccaacgccaaccccaacgccaaccccaacgcgaacccgaacgccaaccccaacgccaaccccaacgccaaccccaacgccaacccguga

SEQ ID NO: 101 - RNA, 972 nt, Artificial Sequence
  derived and/or modified CDS sequence (opt1) from Pf(3D7)__XP_001351122.1__HsALB_Pf-CSP(93-397)
augaagugggugaccuucaucagccuccuguuccuguucuccagcgccuacuccaagcugaagcagcccgccgacggcaacccggaccccaacgcgaaccccaacgucgaccccaacgccaacccgaacguggaccccaacgccaaccccaacguggaccccaacgccaacccgaacgccaaccccaacgcgaaccccaacgccaaccccaacgccaacccgaacgccaaccccaacgcgaaccccaacgccaaccccaacgccaacccgaacgccaaccccaacgccaaccccaacgcgaaccccaacgccaacccgaacgccaaccccaacgccaaccccaacgccaaccccaacgcgaacccgaacgucgaccccaacgccaaccccaacgccaaccccaacgccaacccgaacgccaaccccaacgcgaaccccaacgccaacccgaacgccaaccccaacgccaaccccaacgccaaccccaacgcgaacccgaacgccaaccccaacgccaaccccaacgccaaccccaacgcgaacccgaacgccaaccccaacgccaaccccaacgccaaccccaacgccaacccgaacaagaacaaccaggggaacggccaggggcacaacaugcccaacgaccccaaccgcaacguggacgagaacgcgaacgccaacagcgccgugaagaacaacaacaacgaggagcccuccgacaagcacaucaaggaguaccucaacaagauccagaacagccuguccaccgaguggagcccgugcuccgucacgugcggcaacgggauccaggugcggaucaagcccggcagcgccaacaagcccaaggacgagcuggacuacgccaacgacaucgagaagaagaucugcaagauggagaagugcuccagcguguucaacgucgugaacuccagcaucggccucaucauggugcuguccuuccuguuccucaacuga

SEQ ID NO: 102 - RNA, 342 nt, Artificial Sequence
  derived and/or modified CDS sequence (opt1) from Pf(3D7)__XP_001351122.1__HsALB_Pf-CSP(98-192)
augaagugggugaccuucaucagccuccuguuccuguucuccagcgccuacuccgccgacggcaaccccgacccgaacgcgaaccccaacgucgaccccaacgccaaccccaacguggacccgaacgccaaccccaacguggaccccaacgccaaccccaacgccaacccgaacgcgaaccccaacgccaaccccaacgccaaccccaacgccaacccgaacgcgaaccccaacgccaaccccaacgccaaccccaacgccaacccgaacgccaaccccaacgcgaaccccaacgccaaccccaacgccaacccgaacgccaaccccaacgccaaccccuga

SEQ ID NO: 103 - RNA, 582 nt, Artificial Sequence
  derived and/or modified CDS sequence (opt1) from Pf(3D7)__XP_001351122.1__HsALB_Pf-CSP(98-272)
augaagugggugaccuucaucagccuccuguuccuguucuccagcgccuacuccgccgacggcaaccccgacccgaacgcgaaccccaacgucgaccccaacgccaaccccaacguggacccgaacgccaaccccaacguggaccccaacgccaaccccaacgccaacccgaacgcgaaccccaacgccaaccccaacgccaaccccaacgccaacccgaacgcgaaccccaacgccaaccccaacgccaaccccaacgccaacccgaacgccaaccccaacgcgaaccccaacgccaaccccaacgccaacccgaacgccaaccccaacgccaaccccaacgcgaaccccaacgucgacccgaacgccaaccccaacgccaaccccaacgccaaccccaacgccaacccgaacgcgaaccccaacgccaaccccaacgccaacccgaacgccaaccccaacgccaaccccaacgcgaaccccaacgccaacccgaacgccaaccccaacgccaaccccaacgcgaaccccaacgccaacccgaacgccaaccccaacgccaaccccaacgccaaccccuga

SEQ ID NO: 104 - RNA, 888 nt, Artificial Sequence
  derived and/or modified CDS sequence (opt1) from Pf(3D7)__XP_001351122.1__HsALB_Pf-CSP(98-374)
augaagugggugaccuucaucagccuccuguuccuguucuccagcgccuacuccgccgacggcaaccccgacccgaacgcgaaccccaacgucgaccccaacgccaaccccaacguggacccgaacgccaaccccaacguggaccccaacgccaaccccaacgccaacccgaacgcgaaccccaacgccaaccccaacgccaaccccaacgccaacccgaacgcgaaccccaacgccaaccccaacgccaaccccaacgccaacccgaacgccaaccccaacgcgaaccccaacgccaaccccaacgccaacccgaacgccaaccccaacgccaaccccaacgcgaaccccaacgucgacccgaacgccaaccccaacgccaaccccaacgccaaccccaacgccaacccgaacgcgaaccccaacgccaaccccaacgccaacccgaacgccaaccccaacgccaaccccaacgcgaaccccaacgccaacccgaacgccaaccccaacgccaaccccaacgcgaaccccaacgccaacccgaacgccaaccccaacgccaaccccaacgccaaccccaacaagaacaaccaggggaacggccaggggcacaacaugccgaacgaccccaaccgcaacguggacgagaacgcgaacgccaacagcgccgugaagaacaacaacaacgaggagcccuccgacaagcacaucaaggaguaccugaacaagauccagaacagccucuccaccgaguggagccccugcuccgucacgugcggcaacgggauccaggugcggaucaagccgggcagcgccaacaagcccaaggacgagcuggacuacgccaacgacaucgagaagaagaucugcaagauggagaagugcuga

SEQ ID NO: 105 - RNA, 957 nt, Artificial Sequence
  derived and/or modified CDS sequence (opt1) from Pf(3D7)__XP_001351122.1__HsALB_Pf-CSP(98-397)
augaagugggugaccuucaucagccuccuguuccuguucuccagcgccuacuccgccgacggcaaccccgacccgaacgcgaaccccaacgucgaccccaacgccaaccccaacguggacccgaacgccaaccccaacguggaccccaacgccaaccccaacgccaacccgaacgcgaaccccaacgccaaccccaacgccaaccccaacgccaacccgaacgcgaaccccaacgccaaccccaacgccaaccccaacgccaacccgaacgccaaccccaacgcgaaccccaacgccaaccccaacgccaacccgaacgccaaccccaacgccaaccccaacgcgaaccccaacgucgacccgaacgccaaccccaacgccaaccccaacgccaaccccaacgccaacccgaacgcgaaccccaacgccaaccccaacgccaacccgaacgccaaccccaacgccaaccccaacgcgaaccccaacgccaacccgaacgccaaccccaacgccaaccccaacgcgaaccccaacgccaacccgaacgccaaccccaacgccaaccccaacgccaaccccaacaagaacaaccaggggaacggccaggggcacaacaugccgaacgaccccaaccgcaacguggacgagaacgcgaacgccaacagcgccgugaagaacaacaacaacgaggagcccuccgacaagcacaucaaggaguaccugaacaagauccagaacagccucuccaccgaguggagccccugcuccgucacgugcggcaacgggauccaggugcggaucaagccgggcagcgccaacaagcccaaggacgagcuggacuacgccaacgacaucgagaagaagaucugcaagauggagaagugcuccagcguguucaacgucgugaacuccagcaucggccugaucauggugcucuccuuccuguuccugaacuga

SEQ ID NO: 106 - RNA, 1284 nt, Artificial Sequence
  derived and/or modified CDS sequence (opt1) from Pf(3D7)__XP_001351122.1__HsALB_Pf-CSP(199-377)_L(PVTN)_HBsAg
augaagugggugaccuucaucagccuccuguuccuguucuccagcgccuacuccgaccccaacgccaacccgaacgcgaaccccaacgccaaccccaacgccaaccccaacgccaacccgaacgccaaccccaacgcgaaccccaacgccaaccccaacgccaacccgaacgccaaccccaacgcgaaccccaacgccaaccccaacgccaacccgaacgccaaccccaacgccaaccccaacgcgaaccccaacgccaacccgaacgccaaccccaacaagaacaaccagggcaacgggcagggccacaacaugcccaacgaccccaaccgcaacgucgacgagaacgccaacgccaacagcgcggugaagaacaacaacaacgaggagccguccgacaagcacaucaaggaguaccugaacaagauccagaacagccucuccaccgaguggagccccugcuccgugaccugcgggaacggcauccagguccggaucaagcccgggagcgccaacaagcccaaggacgagcuggacuacgccaacgacaucgagaagaagaucugcaagauggagaagugcuccagcgugccggugaccaacauggagaacaucaccuccggcuuccugggcccccuccugguccugcaggccggguucuuccuccugacccgcauccugacgaucccccagagccucgacuccugguggaccagccugaacuuccugggcgggucccccgugugccucggccagaacagccaguccccgaccagcaaccacagccccaccuccugcccgcccaucugccccggguaccgguggaugugccugcgccgguucaucaucuuccuguucauccuccugcugugccucaucuuccugcuggugcuccuggacuaccagggcaugcugcccgucugcccccucaucccgggcagcacgaccaccaacaccgggcccugcaagacgugcaccacccccgcccagggcaacuccauguuccccagcugcugcugcaccaagccgacggacgggaacugcacgugcauccccauccccuccagcugggcguucgccaaguaccugugggagugggccuccgugcgcuucagcuggcugucccuccuggugcccuucguccagugguucgugggccugagcccgaccguguggcucuccgccaucuggaugaugugguacuggggccccagccuguacuccaucgucagccccuucaucccccugcucccgaucuucuucugccuguggguguacaucuga

SEQ ID NO: 107 - RNA, 1023 nt, Artificial Sequence
  derived and/or modified CDS sequence (opt1) from Pb(ANKA)__XP_022712148.1__Pb-CSP
augaagaagugcaccauccugguggucgccagccuccugcuggugaacucccuccugcccggcuacgggcagaacaagagcauccaggcccagcgcaaccugaacgagcucugcuacaacgagggcaacgacaacaagcuguaccacgugcugaacuccaagaacgggaagaucuacaaccggaacaccgucaaccgccuccuggcggacgccccggagggcaagaagaacgagaagaagaacgagaagaucgagcggaacaacaagcugaagcagcccccccccccgcccaaccccaacgaccccccgccccccaaccccaacgacccgcccccccccaacccgaacgaccccccccccccgaaccccaacgacccccccccgcccaacgccaacgacccccccccgcccaacgccaacgaccccgccccgcccaacgcgaacgaccccgcccccccgaacgccaacgaccccgccccccccaacgcgaacgacccggccccccccaacgccaacgaccccccgccccccaaccccaacgacccggccccccccaacgccaacgaccccccgccccccaaccccaacgacccggcgcccccccaggggaacaacaacccgcagccccagccccgcccccagccgcagccccagccccagccccagccgcagccccagccccagccccagccgcggccccagccccagccccagccgggcggcaacaacaacaacaagaacaacaacaacgacgacagcuacauccccuccgccgagaagauccucgaguucgugaagcagauccgcgacagcaucacggaggaguggucccagugcaacgugaccugcgggagcggcauccggguccgcaagcggaagggguccaacaagaaggccgaggaccugacccuggaggacaucgacaccgagaucugcaagauggacaagugcagcuccaucuucaacaucgugagcaacucccucggcuucgugauccugcugguccucguguucuucaacuga

SEQ ID NO: 108 - RNA, 1188 nt, Artificial Sequence
  derived and/or modified CDS sequence (opt1) from Pb(ANKA)__XP_022712148.1__Pb-CSP_L(G4SG4)_TM domain HA
augaagaagugcaccauccugguggucgccagccuccugcuggugaacucccuccugcccggcuacgggcagaacaagagcauccaggcccagcgcaaccugaacgagcucugcuacaacgagggcaacgacaacaagcuguaccacgugcugaacuccaagaacgggaagaucuacaaccggaacaccgucaaccgccuccuggcggacgccccggagggcaagaagaacgagaagaagaacgagaagaucgagcggaacaacaagcugaagcagcccccccccccgcccaaccccaacgaccccccgccccccaaccccaacgacccgcccccccccaacccgaacgaccccccccccccgaaccccaacgacccccccccgcccaacgccaacgacccccccccgcccaacgccaacgaccccgccccgcccaacgcgaacgaccccgcccccccgaacgccaacgaccccgccccccccaacgcgaacgacccggccccccccaacgccaacgaccccccgccccccaaccccaacgacccggccccccccaacgccaacgaccccccgccccccaaccccaacgacccggcgcccccccaggggaacaacaacccgcagccccagccccgcccccagccgcagccccagccccagccccagccgcagccccagccccagccccagccgcggccccagccccagccccagccgggcggcaacaacaacaacaagaacaacaacaacgacgacagcuacauccccuccgccgagaagauccucgaguucgugaagcagauccgcgacagcaucacggaggaguggucccagugcaacgugaccugcgggagcggcauccggguccgcaagcggaagggguccaacaagaaggccgaggaccugacccuggaggacaucgacaccgagaucugcaagauggacaagugcagcuccaucuucaacaucgugagcaacucccucggcuucgugauccugcugguccucguguucuucaacgggggcggcgggagcggcgggggcggcaagcuggaguccacgcgcaucuaccagauccuggccaucuacagcaccguggccuccagccucguccugguggugucccugggggcgaucagcuucuggaugugcagcaacggcucccuccagugccggaucugcaucuga

SEQ ID NO: 109 - RNA, 1008 nt, Artificial Sequence
  derived and/or modified CDS sequence (opt1) from Pb(ANKA)__XP_022712148.1__HsALB_Pb-CSP(24-340)
augaagugggugaccuucaucagccugcucuuccuguucuccagcgccuacucccagaacaagagcauccaggcccagcgcaaccugaacgagcucugcuacaacgagggcaacgacaacaagcuguaccacguccugaacuccaagaacgggaagaucuacaaccggaacaccgugaaccgccuccuggcggacgcccccgagggcaagaagaacgagaagaagaacgagaagaucgagcggaacaacaagcugaagcagccgcccccccccccgaaccccaacgacccccccccgcccaaccccaacgaccccccgccccccaaccccaacgacccgcccccccccaacccgaacgaccccccccccccgaacgccaacgaccccccccccccgaacgccaacgaccccgcccccccgaacgcgaacgaccccgccccccccaacgccaacgacccggccccccccaacgcgaacgaccccgccccgcccaacgccaacgacccccccccgcccaaccccaacgaccccgccccgcccaacgccaacgacccccccccgcccaaccccaacgaccccgcgccgccccaggggaacaacaacccccagccgcagccccgcccccagccccagccgcagccccagccccagccccagccgcagccccagccccagccccggccgcagccccagccccagcccggcgggaacaacaacaacaagaacaacaacaacgacgacagcuacaucccguccgccgagaagauccucgaguucgugaagcagauccgcgacagcaucacggaggaguggucccagugcaacgucaccugcggcagcggcauccgggugcgcaagcggaagggguccaacaagaaggccgaggaccugacccuggaggacaucgacaccgagaucugcaagauggacaagugcagcuccaucuucaacaucgugagcaacucccucggcuucgucauccugcuggugcucguguucuucaacuga

SEQ ID NO: 110 - RNA, 1026 nt, Artificial Sequence
  derived and/or modified CDS sequence (opt1) from Pb(ANKA)__XP_022712148.1__HsIns-iso1_Pb-CSP(24-340)
auggcccuguggaugcgccuccugccccugcucgcccugcuggcgcucuggggcccggaccccgccgccgcccagaacaagagcauccaggcccagcggaaccugaacgagcugugcuacaacgaggggaacgacaacaagcucuaccacgugcugaacuccaagaacggcaagaucuacaaccgcaacaccgucaaccggcugcucgcggacgcccccgaggggaagaagaacgagaagaagaacgagaagaucgagcgcaacaacaagcugaagcagcccccgcccccccccaacccgaacgaccccccccccccgaaccccaacgacccccccccgcccaaccccaacgaccccccgccccccaaccccaacgacccgcccccccccaacgccaacgacccgccccccccgaacgccaacgaccccgcgccccccaacgccaacgacccggccccccccaacgccaacgaccccgccccgcccaacgcgaacgaccccgcccccccgaacgccaacgaccccccccccccgaaccccaacgaccccgcccccccgaacgccaacgaccccccccccccgaaccccaacgaccccgcgccgccccagggcaacaacaacccccagccccagccgcggccccagccccagccccagccgcagccccagccccagccccagccgcagccccagccccgcccccagccgcagccccagcccgggggcaacaacaacaacaagaacaacaacaacgacgacagcuacauccccuccgccgagaagauccuggaguucgugaagcagauccgggacagcaucaccgaggaguggucccagugcaacgugacgugcggcagcgggauccgcguccggaagcgcaagggcuccaacaagaaggccgaggaccucacccuggaggacaucgacaccgagaucugcaagauggacaagugcagcuccaucuucaacaucgugagcaacucccugggguucgugauccuccugguccugguguucuucaacuga

SEQ ID NO: 111 - RNA, 1005 nt, Artificial Sequence
  derived and/or modified CDS sequence (opt1) from Pb(ANKA)__XP_022712148.1__HsSPARC_Pb-CSP(24-340)
augcgcgccuggaucuucuuccugcucugccuggccggccgggcgcuggcccagaacaagagcauccaggcccagcgcaaccucaacgagcugugcuacaacgaggggaacgacaacaagcuguaccacgugcucaacuccaagaacggcaagaucuacaaccggaacaccgucaaccgccugcuggccgacgcccccgaggggaagaagaacgagaagaagaacgagaagaucgagcggaacaacaagcucaagcagccgcccccccccccgaaccccaacgacccccccccgcccaaccccaacgaccccccgccccccaaccccaacgacccgcccccccccaacccgaacgaccccccccccccgaacgcgaacgaccccccccccccgaacgccaacgaccccgcccccccgaacgccaacgaccccgcgccccccaacgccaacgacccggccccccccaacgccaacgaccccgccccgcccaacgcgaacgacccccccccgcccaaccccaacgaccccgccccgcccaacgccaacgacccccccccgcccaaccccaacgaccccgccccgccccagggcaacaacaacccccagccgcagccccgcccccagccccagccgcagccccagccccagccccagccgcagccccagccccagccccggccgcagccccagccccagcccgggggcaacaacaacaacaagaacaacaacaacgacgacagcuacaucccguccgccgagaagauccuggaguucgugaagcagauccgcgacagcaucaccgaggaguggucccagugcaacgugacgugcggcagcgggauccggguccgcaagcggaagggcuccaacaagaaggcggaggaccugacccucgaggacaucgacaccgagaucugcaagauggacaagugcagcuccaucuucaacaucgugagcaacucccugggguucgugauccugcucguccugguguucuucaacuga

SEQ ID NO: 112 - RNA, 1008 nt, Artificial Sequence
  derived and/or modified CDS sequence (opt1) from Pb(ANKA)__XP_022712148.1__IgE_Pb-CSP(24-340)
auggacuggaccuggauccuguuccucguggccgccgcgacccgcguccacagccagaacaaguccauccaggcccagcggaaccugaacgagcugugcuacaacgagggcaacgacaacaagcucuaccacgugcugaacagcaagaacgggaagaucuacaaccgcaacacggugaaccggcugcucgccgacgcccccgagggcaagaagaacgagaagaagaacgagaagaucgagcgcaacaacaagcugaagcagccgcccccccccccgaaccccaacgacccccccccgcccaaccccaacgaccccccgccccccaaccccaacgacccgcccccccccaacccgaacgaccccccccccccgaacgccaacgaccccccccccccgaacgcgaacgaccccgcccccccgaacgccaacgaccccgccccccccaacgcgaacgacccggccccccccaacgccaacgaccccgccccgcccaacgccaacgacccccccccgcccaaccccaacgaccccgcgccgcccaacgccaacgacccccccccgcccaaccccaacgaccccgccccgccccaggggaacaacaacccccagccgcagccccggccccagccccagccgcagccccagccccagccccagccgcagccccagccccagccccgcccgcagccccagccccagcccggcgggaacaacaacaacaagaacaacaacaacgacgacuccuacaucccgagcgccgagaagauccuggaguucgucaagcagauccgggacuccaucaccgaggaguggagccagugcaacgugaccugcggcuccggcauccgcgugcggaagcgcaaggggagcaacaagaaggccgaggaccucacccuggaggacaucgacacggagaucugcaagauggacaagugcuccagcaucuucaacaucgucuccaacagccugggcuucgugauccuccuggugcuggucuucuucaacuga

SEQ ID NO: 113 - RNA, 1194 nt, Artificial Sequence
  derived and/or modified CDS sequence (opt2) from Pf(3D7)__XP_001351122.1__Pf-CSP
augaugcgcaagcucgccauccucuccgucuccuccuuccucuucgucgaggcccucuuccaggaguaccagugcuacggcuccuccuccaacacccgcguccucaacgagcucaacuacgacaacgccggcaccaaccucuacaacgagcucgagaugaacuacuacggcaagcaggagaacugguacucccucaagaagaacucccgcucccucggcgagaacgacgacggcaacaacgaggacaacgagaagcuccgcaagcccaagcacaagaagcucaagcagcccgccgacggcaaccccgaccccaacgccaaccccaacgucgaccccaacgccaaccccaacgucgaccccaacgccaaccccaacgucgaccccaacgccaaccccaacgccaaccccaacgccaaccccaacgccaaccccaacgccaaccccaacgccaaccccaacgccaaccccaacgccaaccccaacgccaaccccaacgccaaccccaacgccaaccccaacgccaaccccaacgccaaccccaacgccaaccccaacgccaaccccaacgccaaccccaacgccaaccccaacgucgaccccaacgccaaccccaacgccaaccccaacgccaaccccaacgccaaccccaacgccaaccccaacgccaaccccaacgccaaccccaacgccaaccccaacgccaaccccaacgccaaccccaacgccaaccccaacgccaaccccaacgccaaccccaacgccaaccccaacgccaaccccaacgccaaccccaacgccaaccccaacgccaaccccaacaagaacaaccagggcaacggccagggccacaacaugcccaacgaccccaaccgcaacgucgacgagaacgccaacgccaacuccgccgucaagaacaacaacaacgaggagcccuccgacaagcacaucaaggaguaccucaacaagauccagaacucccucuccaccgaguggucccccugcuccgucaccugcggcaacggcauccagguccgcaucaagcccggcuccgccaacaagcccaaggacgagcucgacuacgccaacgacaucgagaagaagaucugcaagauggagaagugcuccuccgucuucaacgucgucaacuccuccaucggccucaucaugguccucuccuuccucuuccucaacuga

SEQ ID NO: 114 - RNA, 1122 nt, Artificial Sequence
  derived and/or modified CDS sequence (opt2) from Pf(3D7)__XP_001351122.1__Pf-CSP(1-374)
augaugcgcaagcucgccauccucuccgucuccuccuuccucuucgucgaggcccucuuccaggaguaccagugcuacggcuccuccuccaacacccgcguccucaacgagcucaacuacgacaacgccggcaccaaccucuacaacgagcucgagaugaacuacuacggcaagcaggagaacugguacucccucaagaagaacucccgcucccucggcgagaacgacgacggcaacaacgaggacaacgagaagcuccgcaagcccaagcacaagaagcucaagcagcccgccgacggcaaccccgaccccaacgccaaccccaacgucgaccccaacgccaaccccaacgucgaccccaacgccaaccccaacgucgaccccaacgccaaccccaacgccaaccccaacgccaaccccaacgccaaccccaacgccaaccccaacgccaaccccaacgccaaccccaacgccaaccccaacgccaaccccaacgccaaccccaacgccaaccccaacgccaaccccaacgccaaccccaacgccaaccccaacgccaaccccaacgccaaccccaacgccaaccccaacgucgaccccaacgccaaccccaacgccaaccccaacgccaaccccaacgccaaccccaacgccaaccccaacgccaaccccaacgccaaccccaacgccaaccccaacgccaaccccaacgccaaccccaacgccaaccccaacgccaaccccaacgccaaccccaacgccaaccccaacgccaaccccaacgccaaccccaacgccaaccccaacgccaaccccaacaagaacaaccagggcaacggccagggccacaacaugcccaacgaccccaaccgcaacgucgacgagaacgccaacgccaacuccgccgucaagaacaacaacaacgaggagcccuccgacaagcacaucaaggaguaccucaacaagauccagaacucccucuccaccgaguggucccccugcuccgucaccugcggcaacggcauccagguccgcaucaagcccggcuccgccaacaagcccaaggacgagcucgacuacgccaacgacaucgagaagaagaucugcaagauggagaagugc

SEQ ID NO: 115 - RNA, 975 nt, Artificial Sequence
  derived and/or modified CDS sequence (opt2) from Pf(3D7)__XP_001351122.1__Pf-CSP(1-325)
augaugcgcaagcucgccauccucuccgucuccuccuuccucuucgucgaggcccucuuccaggaguaccagugcuacggcuccuccuccaacacccgcguccucaacgagcucaacuacgacaacgccggcaccaaccucuacaacgagcucgagaugaacuacuacggcaagcaggagaacugguacucccucaagaagaacucccgcucccucggcgagaacgacgacggcaacaacgaggacaacgagaagcuccgcaagcccaagcacaagaagcucaagcagcccgccgacggcaaccccgaccccaacgccaaccccaacgucgaccccaacgccaaccccaacgucgaccccaacgccaaccccaacgucgaccccaacgccaaccccaacgccaaccccaacgccaaccccaacgccaaccccaacgccaaccccaacgccaaccccaacgccaaccccaacgccaaccccaacgccaaccccaacgccaaccccaacgccaaccccaacgccaaccccaacgccaaccccaacgccaaccccaacgccaaccccaacgccaaccccaacgccaaccccaacgucgaccccaacgccaaccccaacgccaaccccaacgccaaccccaacgccaaccccaacgccaaccccaacgccaaccccaacgccaaccccaacgccaaccccaacgccaaccccaacgccaaccccaacgccaaccccaacgccaaccccaacgccaaccccaacgccaaccccaacgccaaccccaacgccaaccccaacgccaaccccaacgccaaccccaacaagaacaaccagggcaacggccagggccacaacaugcccaacgaccccaaccgcaacgucgacgagaacgccaacgccaacuccgccgucaagaacaacaacaacgaggagcccuccgacaagcacaucaaggaguaccucaacaagauccagaac

SEQ ID NO: 116 - RNA, 1194 nt, Artificial Sequence
  derived and/or modified CDS sequence (opt2) from Pf(3D7)__XP_001351122.1__HsALB_Pf-CSP(19-397)
augaagugggucaccuucaucucccuccucuuccucuucuccuccgccuacucccucuuccaggaguaccagugcuacggcuccuccuccaacacccgcguccucaacgagcucaacuacgacaacgccggcaccaaccucuacaacgagcucgagaugaacuacuacggcaagcaggagaacugguacucccucaagaagaacucccgcucccucggcgagaacgacgacggcaacaacgaggacaacgagaagcuccgcaagcccaagcacaagaagcucaagcagcccgccgacggcaaccccgaccccaacgccaaccccaacgucgaccccaacgccaaccccaacgucgaccccaacgccaaccccaacgucgaccccaacgccaaccccaacgccaaccccaacgccaaccccaacgccaaccccaacgccaaccccaacgccaaccccaacgccaaccccaacgccaaccccaacgccaaccccaacgccaaccccaacgccaaccccaacgccaaccccaacgccaaccccaacgccaaccccaacgccaaccccaacgccaaccccaacgccaaccccaacgucgaccccaacgccaaccccaacgccaaccccaacgccaaccccaacgccaaccccaacgccaaccccaacgccaaccccaacgccaaccccaacgccaaccccaacgccaaccccaacgccaaccccaacgccaaccccaacgccaaccccaacgccaaccccaacgccaaccccaacgccaaccccaacgccaaccccaacgccaaccccaacgccaaccccaacaagaacaaccagggcaacggccagggccacaacaugcccaacgaccccaaccgcaacgucgacgagaacgccaacgccaacuccgccgucaagaacaacaacaacgaggagcccuccgacaagcacaucaaggaguaccucaacaagauccagaacucccucuccaccgaguggucccccugcuccgucaccugcggcaacggcauccagguccgcaucaagcccggcuccgccaacaagcccaaggacgagcucgacuacgccaacgacaucgagaagaagaucugcaagauggagaagugcuccuccgucuucaacgucgucaacuccuccaucggccucaucaugguccucuccuuccucuuccucaacuga

SEQ ID NO: 117 - RNA, 1212 nt, Artificial Sequence
  derived and/or modified CDS sequence (opt2) from Pf(3D7)__XP_001351122.1__HsIns-iso1_Pf-CSP(19-397)
auggcccucuggaugcgccuccucccccuccucgcccuccucgcccucuggggccccgaccccgccgccgcccucuuccaggaguaccagugcuacggcuccuccuccaacacccgcguccucaacgagcucaacuacgacaacgccggcaccaaccucuacaacgagcucgagaugaacuacuacggcaagcaggagaacugguacucccucaagaagaacucccgcucccucggcgagaacgacgacggcaacaacgaggacaacgagaagcuccgcaagcccaagcacaagaagcucaagcagcccgccgacggcaaccccgaccccaacgccaaccccaacgucgaccccaacgccaaccccaacgucgaccccaacgccaaccccaacgucgaccccaacgccaaccccaacgccaaccccaacgccaaccccaacgccaaccccaacgccaaccccaacgccaaccccaacgccaaccccaacgccaaccccaacgccaaccccaacgccaaccccaacgccaaccccaacgccaaccccaacgccaaccccaacgccaaccccaacgccaaccccaacgccaaccccaacgccaaccccaacgucgaccccaacgccaaccccaacgccaaccccaacgccaaccccaacgccaaccccaacgccaaccccaacgccaaccccaacgccaaccccaacgccaaccccaacgccaaccccaacgccaaccccaacgccaaccccaacgccaaccccaacgccaaccccaacgccaaccccaacgccaaccccaacgccaaccccaacgccaaccccaacgccaaccccaacaagaacaaccagggcaacggccagggccacaacaugcccaacgaccccaaccgcaacgucgacgagaacgccaacgccaacuccgccgucaagaacaacaacaacgaggagcccuccgacaagcacaucaaggaguaccucaacaagauccagaacucccucuccaccgaguggucccccugcuccgucaccugcggcaacggcauccagguccgcaucaagcccggcuccgccaacaagcccaaggacgagcucgacuacgccaacgacaucgagaagaagaucugcaagauggagaagugcuccuccgucuucaacgucgucaacuccuccaucggccucaucaugguccucuccuuccucuuccucaacuga

SEQ ID NO: 118 - RNA, 1191 nt, Artificial Sequence
  derived and/or modified CDS sequence (opt2) from Pf(3D7)__XP_001351122.1__HsSPARC_Pf-CSP(19-397)
augcgcgccuggaucuucuuccuccucugccucgccggccgcgcccucgcccucuuccaggaguaccagugcuacggcuccuccuccaacacccgcguccucaacgagcucaacuacgacaacgccggcaccaaccucuacaacgagcucgagaugaacuacuacggcaagcaggagaacugguacucccucaagaagaacucccgcucccucggcgagaacgacgacggcaacaacgaggacaacgagaagcuccgcaagcccaagcacaagaagcucaagcagcccgccgacggcaaccccgaccccaacgccaaccccaacgucgaccccaacgccaaccccaacgucgaccccaacgccaaccccaacgucgaccccaacgccaaccccaacgccaaccccaacgccaaccccaacgccaaccccaacgccaaccccaacgccaaccccaacgccaaccccaacgccaaccccaacgccaaccccaacgccaaccccaacgccaaccccaacgccaaccccaacgccaaccccaacgccaaccccaacgccaaccccaacgccaaccccaacgccaaccccaacgucgaccccaacgccaaccccaacgccaaccccaacgccaaccccaacgccaaccccaacgccaaccccaacgccaaccccaacgccaaccccaacgccaaccccaacgccaaccccaacgccaaccccaacgccaaccccaacgccaaccccaacgccaaccccaacgccaaccccaacgccaaccccaacgccaaccccaacgccaaccccaacgccaaccccaacaagaacaaccagggcaacggccagggccacaacaugcccaacgaccccaaccgcaacgucgacgagaacgccaacgccaacuccgccgucaagaacaacaacaacgaggagcccuccgacaagcacaucaaggaguaccucaacaagauccagaacucccucuccaccgaguggucccccugcuccgucaccugcggcaacggcauccagguccgcaucaagcccggcuccgccaacaagcccaaggacgagcucgacuacgccaacgacaucgagaagaagaucugcaagauggagaagugcuccuccgucuucaacgucgucaacuccuccaucggccucaucaugguccucuccuuccucuuccucaacuga

SEQ ID NO: 119 - RNA, 1194 nt, Artificial Sequence
  derived and/or modified CDS sequence (opt2) from Pf(3D7)__XP_001351122.1__IgE_Pf-CSP(19-397)
auggacuggaccuggauccucuuccucgucgccgccgccacccgcguccacucccucuuccaggaguaccagugcuacggcuccuccuccaacacccgcguccucaacgagcucaacuacgacaacgccggcaccaaccucuacaacgagcucgagaugaacuacuacggcaagcaggagaacugguacucccucaagaagaacucccgcucccucggcgagaacgacgacggcaacaacgaggacaacgagaagcuccgcaagcccaagcacaagaagcucaagcagcccgccgacggcaaccccgaccccaacgccaaccccaacgucgaccccaacgccaaccccaacgucgaccccaacgccaaccccaacgucgaccccaacgccaaccccaacgccaaccccaacgccaaccccaacgccaaccccaacgccaaccccaacgccaaccccaacgccaaccccaacgccaaccccaacgccaaccccaacgccaaccccaacgccaaccccaacgccaaccccaacgccaaccccaacgccaaccccaacgccaaccccaacgccaaccccaacgccaaccccaacgucgaccccaacgccaaccccaacgccaaccccaacgccaaccccaacgccaaccccaacgccaaccccaacgccaaccccaacgccaaccccaacgccaaccccaacgccaaccccaacgccaaccccaacgccaaccccaacgccaaccccaacgccaaccccaacgccaaccccaacgccaaccccaacgccaaccccaacgccaaccccaacgccaaccccaacaagaacaaccagggcaacggccagggccacaacaugcccaacgaccccaaccgcaacgucgacgagaacgccaacgccaacuccgccgucaagaacaacaacaacgaggagcccuccgacaagcacaucaaggaguaccucaacaagauccagaacucccucuccaccgaguggucccccugcuccgucaccugcggcaacggcauccagguccgcaucaagcccggcuccgccaacaagcccaaggacgagcucgacuacgccaacgacaucgagaagaagaucugcaagauggagaagugcuccuccgucuucaacgucgucaacuccuccaucggccucaucaugguccucuccuuccucuuccucaacuga

SEQ ID NO: 120 - RNA, 1359 nt, Artificial Sequence
  derived and/or modified CDS sequence (opt2) from Pf(3D7)__XP_001351122.1__Pf-CSP_L(G4SG4)_TM domain HA
augaugcgcaagcucgccauccucuccgucuccuccuuccucuucgucgaggcccucuuccaggaguaccagugcuacggcuccuccuccaacacccgcguccucaacgagcucaacuacgacaacgccggcaccaaccucuacaacgagcucgagaugaacuacuacggcaagcaggagaacugguacucccucaagaagaacucccgcucccucggcgagaacgacgacggcaacaacgaggacaacgagaagcuccgcaagcccaagcacaagaagcucaagcagcccgccgacggcaaccccgaccccaacgccaaccccaacgucgaccccaacgccaaccccaacgucgaccccaacgccaaccccaacgucgaccccaacgccaaccccaacgccaaccccaacgccaaccccaacgccaaccccaacgccaaccccaacgccaaccccaacgccaaccccaacgccaaccccaacgccaaccccaacgccaaccccaacgccaaccccaacgccaaccccaacgccaaccccaacgccaaccccaacgccaaccccaacgccaaccccaacgccaaccccaacgucgaccccaacgccaaccccaacgccaaccccaacgccaaccccaacgccaaccccaacgccaaccccaacgccaaccccaacgccaaccccaacgccaaccccaacgccaaccccaacgccaaccccaacgccaaccccaacgccaaccccaacgccaaccccaacgccaaccccaacgccaaccccaacgccaaccccaacgccaaccccaacgccaaccccaacaagaacaaccagggcaacggccagggccacaacaugcccaacgaccccaaccgcaacgucgacgagaacgccaacgccaacuccgccgucaagaacaacaacaacgaggagcccuccgacaagcacaucaaggaguaccucaacaagauccagaacucccucuccaccgaguggucccccugcuccgucaccugcggcaacggcauccagguccgcaucaagcccggcuccgccaacaagcccaaggacgagcucgacuacgccaacgacaucgagaagaagaucugcaagauggagaagugcuccuccgucuucaacgucgucaacuccuccaucggccucaucaugguccucuccuuccucuuccucaacggcggcggcggcuccggcggcggcggcaagcucgaguccacccgcaucuaccagauccucgccaucuacuccaccgucgccuccucccucguccucgucgucucccucggcgccaucuccuucuggaugugcuccaacggcucccuccagugccgcaucugcaucuga

SEQ ID NO: 121 - RNA, 1233 nt, Artificial Sequence
  derived and/or modified CDS sequence (opt2) from Pf(3D7)__XP_001351122.1__Pf-CSP(199-377)_L(PVTN)_HBsAg
auggaccccaacgccaaccccaacgccaaccccaacgccaaccccaacgccaaccccaacgccaaccccaacgccaaccccaacgccaaccccaacgccaaccccaacgccaaccccaacgccaaccccaacgccaaccccaacgccaaccccaacgccaaccccaacgccaaccccaacgccaaccccaacgccaaccccaacgccaaccccaacgccaaccccaacaagaacaaccagggcaacggccagggccacaacaugcccaacgaccccaaccgcaacgucgacgagaacgccaacgccaacuccgccgucaagaacaacaacaacgaggagcccuccgacaagcacaucaaggaguaccucaacaagauccagaacucccucuccaccgaguggucccccugcuccgucaccugcggcaacggcauccagguccgcaucaagcccggcuccgccaacaagcccaaggacgagcucgacuacgccaacgacaucgagaagaagaucugcaagauggagaagugcuccuccguccccgucaccaacauggagaacaucaccuccggcuuccucggcccccuccucguccuccaggccggcuucuuccuccucacccgcauccucaccaucccccagucccucgacuccugguggaccucccucaacuuccucggcggcucccccgucugccucggccagaacucccagucccccaccuccaaccacucccccaccuccugcccccccaucugccccggcuaccgcuggaugugccuccgccgcuucaucaucuuccucuucauccuccuccucugccucaucuuccuccucguccuccucgacuaccagggcaugcuccccgucugcccccucauccccggcuccaccaccaccaacaccggccccugcaagaccugcaccacccccgcccagggcaacuccauguuccccuccugcugcugcaccaagcccaccgacggcaacugcaccugcauccccauccccuccuccugggccuucgccaaguaccucugggagugggccuccguccgcuucuccuggcucucccuccucguccccuucguccagugguucgucggccucucccccaccgucuggcucuccgccaucuggaugaugugguacuggggccccucccucuacuccaucgucucccccuucaucccccuccuccccaucuucuucugccucugggucuacaucuga

SEQ ID NO: 122 - RNA, 1275 nt, Artificial Sequence
  derived and/or modified CDS sequence (opt2) from Pf(3D7)__XP_001351122.1__Pf-CSP(199-387)_L(PVTN)_HBsAg
augauggcccccgaccccaacgccaaccccaacgccaaccccaacgccaaccccaacgccaaccccaacgccaaccccaacgccaaccccaacgccaaccccaacgccaaccccaacgccaaccccaacgccaaccccaacgccaaccccaacgccaaccccaacgccaaccccaacgccaaccccaacgccaaccccaacgccaaccccaacgccaaccccaacgccaaccccaacaagaacaaccagggcaacggccagggccacaacaugcccaacgaccccaaccgcaacgucgacgagaacgccaacgccaacuccgccgucaagaacaacaacaacgaggagcccuccgacaagcacaucaaggaguaccucaacaagauccagaacucccucuccaccgaguggucccccugcuccgucaccugcggcaacggcauccagguccgcaucaagcccggcuccgccaacaagcccaaggacgagcucgacuacgccaacgacaucgagaagaagaucugcaagauggagaagugcuccuccgucuucaacgucgucaacuccuccaucggccucggccccgucaccaacauggagaacaucaccuccggcuuccucggcccccuccucguccuccaggccggcuucuuccuccucacccgcauccucaccaucccccagucccucgacuccugguggaccucccucaacuuccucggcggcucccccgucugccucggccagaacucccagucccccaccuccaaccacucccccaccuccugcccccccaucugccccggcuaccgcuggaugugccuccgccgcuucaucaucuuccucuucauccuccuccucugccucaucuuccuccucguccuccucgacuaccagggcaugcuccccgucugcccccucauccccggcuccaccaccaccaacaccggccccugcaagaccugcaccacccccgcccagggcaacuccauguuccccuccugcugcugcaccaagcccaccgacggcaacugcaccugcauccccauccccuccuccugggccuucgccaaguaccucugggagugggccuccguccgcuucuccuggcucucccuccucguccccuucguccagugguucgucggccucucccccaccgucuggcucuccgccaucuggaugaugugguacuggggccccucccucuacuccaucgucucccccuucaucccccuccuccccaucuucuucugccucugggucuacaucuga

SEQ ID NO: 123 - RNA, 459 nt, Artificial Sequence
  derived and/or modified CDS sequence (opt2) from Pf(3D7)__XP_001351122.1__HsALB_Pf-CSP(19-152)
augaagugggucaccuucaucucccuccucuuccucuucuccuccgccuacucccucuuccaggaguaccagugcuacggcuccuccuccaacacccgcguccucaacgagcucaacuacgacaacgccggcaccaaccucuacaacgagcucgagaugaacuacuacggcaagcaggagaacugguacucccucaagaagaacucccgcucccucggcgagaacgacgacggcaacaacgaggacaacgagaagcuccgcaagcccaagcacaagaagcucaagcagcccgccgacggcaaccccgaccccaacgccaaccccaacgucgaccccaacgccaaccccaacgucgaccccaacgccaaccccaacgucgaccccaacgccaaccccaacgccaaccccaacgccaaccccaacgccaaccccaacgccaaccccaacgccaaccccuga

SEQ ID NO: 124 - RNA, 579 nt, Artificial Sequence
  derived and/or modified CDS sequence (opt2) from Pf(3D7)__XP_001351122.1__HsALB_Pf-CSP(19-192)
augaagugggucaccuucaucucccuccucuuccucuucuccuccgccuacucccucuuccaggaguaccagugcuacggcuccuccuccaacacccgcguccucaacgagcucaacuacgacaacgccggcaccaaccucuacaacgagcucgagaugaacuacuacggcaagcaggagaacugguacucccucaagaagaacucccgcucccucggcgagaacgacgacggcaacaacgaggacaacgagaagcuccgcaagcccaagcacaagaagcucaagcagcccgccgacggcaaccccgaccccaacgccaaccccaacgucgaccccaacgccaaccccaacgucgaccccaacgccaaccccaacgucgaccccaacgccaaccccaacgccaaccccaacgccaaccccaacgccaaccccaacgccaaccccaacgccaaccccaacgccaaccccaacgccaaccccaacgccaaccccaacgccaaccccaacgccaaccccaacgccaaccccaacgccaaccccaacgccaaccccaacgccaaccccaacgccaaccccuga

SEQ ID NO: 125 - RNA, 819 nt, Artificial Sequence
  derived and/or modified CDS sequence (opt2) from Pf(3D7)__XP_001351122.1__HsALB_Pf-CSP(19-272)
augaagugggucaccuucaucucccuccucuuccucuucuccuccgccuacucccucuuccaggaguaccagugcuacggcuccuccuccaacacccgcguccucaacgagcucaacuacgacaacgccggcaccaaccucuacaacgagcucgagaugaacuacuacggcaagcaggagaacugguacucccucaagaagaacucccgcucccucggcgagaacgacgacggcaacaacgaggacaacgagaagcuccgcaagcccaagcacaagaagcucaagcagcccgccgacggcaaccccgaccccaacgccaaccccaacgucgaccccaacgccaaccccaacgucgaccccaacgccaaccccaacgucgaccccaacgccaaccccaacgccaaccccaacgccaaccccaacgccaaccccaacgccaaccccaacgccaaccccaacgccaaccccaacgccaaccccaacgccaaccccaacgccaaccccaacgccaaccccaacgccaaccccaacgccaaccccaacgccaaccccaacgccaaccccaacgccaaccccaacgccaaccccaacgucgaccccaacgccaaccccaacgccaaccccaacgccaaccccaacgccaaccccaacgccaaccccaacgccaaccccaacgccaaccccaacgccaaccccaacgccaaccccaacgccaaccccaacgccaaccccaacgccaaccccaacgccaaccccaacgccaaccccaacgccaaccccaacgccaaccccaacgccaaccccaacgccaaccccuga

SEQ ID NO: 126 - RNA, 981 nt, Artificial Sequence
  derived and/or modified CDS sequence (opt2) from Pf(3D7)__XP_001351122.1__HsALB_Pf-CSP(19-272)_L(AAY)_Pf-CSP(310-3 27)_L(AAY)_Pf-CSP(346-375)
augaagugggucaccuucaucucccuccucuuccucuucuccuccgccuacucccucuuccaggaguaccagugcuacggcuccuccuccaacacccgcguccucaacgagcucaacuacgacaacgccggcaccaaccucuacaacgagcucgagaugaacuacuacggcaagcaggagaacugguacucccucaagaagaacucccgcucccucggcgagaacgacgacggcaacaacgaggacaacgagaagcuccgcaagcccaagcacaagaagcucaagcagcccgccgacggcaaccccgaccccaacgccaaccccaacgucgaccccaacgccaaccccaacgucgaccccaacgccaaccccaacgucgaccccaacgccaaccccaacgccaaccccaacgccaaccccaacgccaaccccaacgccaaccccaacgccaaccccaacgccaaccccaacgccaaccccaacgccaaccccaacgccaaccccaacgccaaccccaacgccaaccccaacgccaaccccaacgccaaccccaacgccaaccccaacgccaaccccaacgccaaccccaacgucgaccccaacgccaaccccaacgccaaccccaacgccaaccccaacgccaaccccaacgccaaccccaacgccaaccccaacgccaaccccaacgccaaccccaacgccaaccccaacgccaaccccaacgccaaccccaacgccaaccccaacgccaaccccaacgccaaccccaacgccaaccccaacgccaaccccaacgccaaccccaacgccaaccccgccgccuacgagcccuccgacaagcacaucaaggaguaccucaacaagauccagaacucccucgccgccuacaucaagcccggcuccgccaacaagcccaaggacgagcucgacuacgccaacgacaucgagaagaagaucugcaagauggagaagugcuccuga

SEQ ID NO: 127 - RNA, 942 nt, Artificial Sequence
  derived and/or modified CDS sequence (opt2) from Pf(3D7)__XP_001351122.1__HsALB_Pf-CSP(19-272)_L(AAY)_Pf-CSP(346-3 65)_L(AAY)_P2
augaagugggucaccuucaucucccuccucuuccucuucuccuccgccuacucccucuuccaggaguaccagugcuacggcuccuccuccaacacccgcguccucaacgagcucaacuacgacaacgccggcaccaaccucuacaacgagcucgagaugaacuacuacggcaagcaggagaacugguacucccucaagaagaacucccgcucccucggcgagaacgacgacggcaacaacgaggacaacgagaagcuccgcaagcccaagcacaagaagcucaagcagcccgccgacggcaaccccgaccccaacgccaaccccaacgucgaccccaacgccaaccccaacgucgaccccaacgccaaccccaacgucgaccccaacgccaaccccaacgccaaccccaacgccaaccccaacgccaaccccaacgccaaccccaacgccaaccccaacgccaaccccaacgccaaccccaacgccaaccccaacgccaaccccaacgccaaccccaacgccaaccccaacgccaaccccaacgccaaccccaacgccaaccccaacgccaaccccaacgccaaccccaacgucgaccccaacgccaaccccaacgccaaccccaacgccaaccccaacgccaaccccaacgccaaccccaacgccaaccccaacgccaaccccaacgccaaccccaacgccaaccccaacgccaaccccaacgccaaccccaacgccaaccccaacgccaaccccaacgccaaccccaacgccaaccccaacgccaaccccaacgccaaccccaacgccaaccccgccgccuacaucaagcccggcuccgccaacaagcccaaggacgagcucgacuacgccaacgacaucgaggccgccuaccaguacaucaaggccaacuccaaguucaucggcaucaccgagcucuga

SEQ ID NO: 128 - RNA, 936 nt, Artificial Sequence
  derived and/or modified CDS sequence (opt2) from Pf(3D7)__XP_001351122.1__HsALB_Pf-CSP(19-272)_L(AAY)_Pf-CSP(346-3 65)_L(AAY)_PADRE
augaagugggucaccuucaucucccuccucuuccucuucuccuccgccuacucccucuuccaggaguaccagugcuacggcuccuccuccaacacccgcguccucaacgagcucaacuacgacaacgccggcaccaaccucuacaacgagcucgagaugaacuacuacggcaagcaggagaacugguacucccucaagaagaacucccgcucccucggcgagaacgacgacggcaacaacgaggacaacgagaagcuccgcaagcccaagcacaagaagcucaagcagcccgccgacggcaaccccgaccccaacgccaaccccaacgucgaccccaacgccaaccccaacgucgaccccaacgccaaccccaacgucgaccccaacgccaaccccaacgccaaccccaacgccaaccccaacgccaaccccaacgccaaccccaacgccaaccccaacgccaaccccaacgccaaccccaacgccaaccccaacgccaaccccaacgccaaccccaacgccaaccccaacgccaaccccaacgccaaccccaacgccaaccccaacgccaaccccaacgccaaccccaacgucgaccccaacgccaaccccaacgccaaccccaacgccaaccccaacgccaaccccaacgccaaccccaacgccaaccccaacgccaaccccaacgccaaccccaacgccaaccccaacgccaaccccaacgccaaccccaacgccaaccccaacgccaaccccaacgccaaccccaacgccaaccccaacgccaaccccaacgccaaccccaacgccaaccccgccgccuacaucaagcccggcuccgccaacaagcccaaggacgagcucgacuacgccaacgacaucgaggccgccuacgccaaguucgucgccgccuggacccucaaggccgccgccuga

SEQ ID NO: 129 - RNA, 993 nt, Artificial Sequence
  derived and/or modified CDS sequence (opt2) from Pf(3D7)__XP_001351122.1__HsALB_Pf-CSP(19-272)_L(G4S)_Pf-CSP(310-3 27)_L(G4S)_Pf-CSP(346-375)
augaagugggucaccuucaucucccuccucuuccucuucuccuccgccuacucccucuuccaggaguaccagugcuacggcuccuccuccaacacccgcguccucaacgagcucaacuacgacaacgccggcaccaaccucuacaacgagcucgagaugaacuacuacggcaagcaggagaacugguacucccucaagaagaacucccgcucccucggcgagaacgacgacggcaacaacgaggacaacgagaagcuccgcaagcccaagcacaagaagcucaagcagcccgccgacggcaaccccgaccccaacgccaaccccaacgucgaccccaacgccaaccccaacgucgaccccaacgccaaccccaacgucgaccccaacgccaaccccaacgccaaccccaacgccaaccccaacgccaaccccaacgccaaccccaacgccaaccccaacgccaaccccaacgccaaccccaacgccaaccccaacgccaaccccaacgccaaccccaacgccaaccccaacgccaaccccaacgccaaccccaacgccaaccccaacgccaaccccaacgccaaccccaacgucgaccccaacgccaaccccaacgccaaccccaacgccaaccccaacgccaaccccaacgccaaccccaacgccaaccccaacgccaaccccaacgccaaccccaacgccaaccccaacgccaaccccaacgccaaccccaacgccaaccccaacgccaaccccaacgccaaccccaacgccaaccccaacgccaaccccaacgccaaccccaacgccaaccccggcggcggcggcuccgagcccuccgacaagcacaucaaggaguaccucaacaagauccagaacucccucggcggcggcggcuccaucaagcccggcuccgccaacaagcccaaggacgagcucgacuacgccaacgacaucgagaagaagaucugcaagauggagaagugcuccuga

SEQ ID NO: 130 - RNA, 978 nt, Artificial Sequence
  derived and/or modified CDS sequence (opt2) from Pf(3D7)__XP_001351122.1__HsALB_Pf-CSP(19-272)_L(G4S)_Pf-CSP(310-3 27)_Pf-CSP(346-375)
augaagugggucaccuucaucucccuccucuuccucuucuccuccgccuacucccucuuccaggaguaccagugcuacggcuccuccuccaacacccgcguccucaacgagcucaacuacgacaacgccggcaccaaccucuacaacgagcucgagaugaacuacuacggcaagcaggagaacugguacucccucaagaagaacucccgcucccucggcgagaacgacgacggcaacaacgaggacaacgagaagcuccgcaagcccaagcacaagaagcucaagcagcccgccgacggcaaccccgaccccaacgccaaccccaacgucgaccccaacgccaaccccaacgucgaccccaacgccaaccccaacgucgaccccaacgccaaccccaacgccaaccccaacgccaaccccaacgccaaccccaacgccaaccccaacgccaaccccaacgccaaccccaacgccaaccccaacgccaaccccaacgccaaccccaacgccaaccccaacgccaaccccaacgccaaccccaacgccaaccccaacgccaaccccaacgccaaccccaacgccaaccccaacgucgaccccaacgccaaccccaacgccaaccccaacgccaaccccaacgccaaccccaacgccaaccccaacgccaaccccaacgccaaccccaacgccaaccccaacgccaaccccaacgccaaccccaacgccaaccccaacgccaaccccaacgccaaccccaacgccaaccccaacgccaaccccaacgccaaccccaacgccaaccccaacgccaaccccggcggcggcggcuccgagcccuccgacaagcacaucaaggaguaccucaacaagauccagaacucccucaucaagcccggcuccgccaacaagcccaaggacgagcucgacuacgccaacgacaucgagaagaagaucugcaagauggagaagugcuccuga

SEQ ID NO: 131 - RNA, 978 nt, Artificial Sequence
  derived and/or modified CDS sequence (opt2) from Pf(3D7)__XP_001351122.1__HsALB_Pf-CSP(19-325)
augaagugggucaccuucaucucccuccucuuccucuucuccuccgccuacucccucuuccaggaguaccagugcuacggcuccuccuccaacacccgcguccucaacgagcucaacuacgacaacgccggcaccaaccucuacaacgagcucgagaugaacuacuacggcaagcaggagaacugguacucccucaagaagaacucccgcucccucggcgagaacgacgacggcaacaacgaggacaacgagaagcuccgcaagcccaagcacaagaagcucaagcagcccgccgacggcaaccccgaccccaacgccaaccccaacgucgaccccaacgccaaccccaacgucgaccccaacgccaaccccaacgucgaccccaacgccaaccccaacgccaaccccaacgccaaccccaacgccaaccccaacgccaaccccaacgccaaccccaacgccaaccccaacgccaaccccaacgccaaccccaacgccaaccccaacgccaaccccaacgccaaccccaacgccaaccccaacgccaaccccaacgccaaccccaacgccaaccccaacgccaaccccaacgucgaccccaacgccaaccccaacgccaaccccaacgccaaccccaacgccaaccccaacgccaaccccaacgccaaccccaacgccaaccccaacgccaaccccaacgccaaccccaacgccaaccccaacgccaaccccaacgccaaccccaacgccaaccccaacgccaaccccaacgccaaccccaacgccaaccccaacgccaaccccaacgccaaccccaacaagaacaaccagggcaacggccagggccacaacaugcccaacgaccccaaccgcaacgucgacgagaacgccaacgccaacuccgccgucaagaacaacaacaacgaggagcccuccgacaagcacaucaaggaguaccucaacaagauccagaacuga

SEQ ID NO: 132 - RNA, 1155 nt, Artificial Sequence
  derived and/or modified CDS sequence (opt2) from Pf(3D7)__XP_001351122.1__HsALB_Pf-CSP(19-384)
augaagugggucaccuucaucucccuccucuuccucuucuccuccgccuacucccucuuccaggaguaccagugcuacggcuccuccuccaacacccgcguccucaacgagcucaacuacgacaacgccggcaccaaccucuacaacgagcucgagaugaacuacuacggcaagcaggagaacugguacucccucaagaagaacucccgcucccucggcgagaacgacgacggcaacaacgaggacaacgagaagcuccgcaagcccaagcacaagaagcucaagcagcccgccgacggcaaccccgaccccaacgccaaccccaacgucgaccccaacgccaaccccaacgucgaccccaacgccaaccccaacgucgaccccaacgccaaccccaacgccaaccccaacgccaaccccaacgccaaccccaacgccaaccccaacgccaaccccaacgccaaccccaacgccaaccccaacgccaaccccaacgccaaccccaacgccaaccccaacgccaaccccaacgccaaccccaacgccaaccccaacgccaaccccaacgccaaccccaacgccaaccccaacgucgaccccaacgccaaccccaacgccaaccccaacgccaaccccaacgccaaccccaacgccaaccccaacgccaaccccaacgccaaccccaacgccaaccccaacgccaaccccaacgccaaccccaacgccaaccccaacgccaaccccaacgccaaccccaacgccaaccccaacgccaaccccaacgccaaccccaacgccaaccccaacgccaaccccaacaagaacaaccagggcaacggccagggccacaacaugcccaacgaccccaaccgcaacgucgacgagaacgccaacgccaacuccgccgucaagaacaacaacaacgaggagcccuccgacaagcacaucaaggaguaccucaacaagauccagaacucccucuccaccgaguggucccccugcuccgucaccugcggcaacggcauccagguccgcaucaagcccggcuccgccaacaagcccaaggacgagcucgacuacgccaacgacaucgagaagaagaucugcaagauggagaagugcuccuccgucuucaacgucgucaacuccuccuga

SEQ ID NO: 133 - RNA, 1293 nt, Artificial Sequence
  derived and/or modified CDS sequence (opt2) from Pf(3D7)__XP_001351122.1__HsALB_Pf-CSP(19-384)_TM domain HA
augaagugggucaccuucaucucccuccucuuccucuucuccuccgccuacucccucuuccaggaguaccagugcuacggcuccuccuccaacacccgcguccucaacgagcucaacuacgacaacgccggcaccaaccucuacaacgagcucgagaugaacuacuacggcaagcaggagaacugguacucccucaagaagaacucccgcucccucggcgagaacgacgacggcaacaacgaggacaacgagaagcuccgcaagcccaagcacaagaagcucaagcagcccgccgacggcaaccccgaccccaacgccaaccccaacgucgaccccaacgccaaccccaacgucgaccccaacgccaaccccaacgucgaccccaacgccaaccccaacgccaaccccaacgccaaccccaacgccaaccccaacgccaaccccaacgccaaccccaacgccaaccccaacgccaaccccaacgccaaccccaacgccaaccccaacgccaaccccaacgccaaccccaacgccaaccccaacgccaaccccaacgccaaccccaacgccaaccccaacgccaaccccaacgucgaccccaacgccaaccccaacgccaaccccaacgccaaccccaacgccaaccccaacgccaaccccaacgccaaccccaacgccaaccccaacgccaaccccaacgccaaccccaacgccaaccccaacgccaaccccaacgccaaccccaacgccaaccccaacgccaaccccaacgccaaccccaacgccaaccccaacgccaaccccaacgccaaccccaacaagaacaaccagggcaacggccagggccacaacaugcccaacgaccccaaccgcaacgucgacgagaacgccaacgccaacuccgccgucaagaacaacaacaacgaggagcccuccgacaagcacaucaaggaguaccucaacaagauccagaacucccucuccaccgaguggucccccugcuccgucaccugcggcaacggcauccagguccgcaucaagcccggcuccgccaacaagcccaaggacgagcucgacuacgccaacgacaucgagaagaagaucugcaagauggagaagugcuccuccgucuucaacgucgucaacuccuccaagcucgaguccacccgcaucuaccagauccucgccaucuacuccaccgucgccuccucccucguccucgucgucucccucggcgccaucuccuucuggaugugcuccaacggcucccuccagugccgcaucugcaucuga

SEQ ID NO: 134 - RNA, 1005 nt, Artificial Sequence
  derived and/or modified CDS sequence (opt2) from Pf(3D7)__XP_001351122.1__HsALB_Pf-CSP(82-397)
augaagugggucaccuucaucucccuccucuuccucuucuccuccgccuacuccgacaacgagaagcuccgcaagcccaagcacaagaagcucaagcagcccgccgacggcaaccccgaccccaacgccaaccccaacgucgaccccaacgccaaccccaacgucgaccccaacgccaaccccaacgucgaccccaacgccaaccccaacgccaaccccaacgccaaccccaacgccaaccccaacgccaaccccaacgccaaccccaacgccaaccccaacgccaaccccaacgccaaccccaacgccaaccccaacgccaaccccaacgccaaccccaacgccaaccccaacgccaaccccaacgccaaccccaacgccaaccccaacgccaaccccaacgucgaccccaacgccaaccccaacgccaaccccaacgccaaccccaacgccaaccccaacgccaaccccaacgccaaccccaacgccaaccccaacgccaaccccaacgccaaccccaacgccaaccccaacgccaaccccaacgccaaccccaacgccaaccccaacgccaaccccaacgccaaccccaacgccaaccccaacgccaaccccaacgccaaccccaacaagaacaaccagggcaacggccagggccacaacaugcccaacgaccccaaccgcaacgucgacgagaacgccaacgccaacuccgccgucaagaacaacaacaacgaggagcccuccgacaagcacaucaaggaguaccucaacaagauccagaacucccucuccaccgaguggucccccugcuccgucaccugcggcaacggcauccagguccgcaucaagcccggcuccgccaacaagcccaaggacgagcucgacuacgccaacgacaucgagaagaagaucugcaagauggagaagugcuccuccgucuucaacgucgucaacuccuccaucggccucaucaugguccucuccuuccucuuccucaacuga

SEQ ID NO: 135 - RNA, 357 nt, Artificial Sequence
  derived and/or modified CDS sequence (opt2) from Pf(3D7)__XP_001351122.1__HsALB_Pf-CSP(93-192)
augaagugggucaccuucaucucccuccucuuccucuucuccuccgccuacuccaagcucaagcagcccgccgacggcaaccccgaccccaacgccaaccccaacgucgaccccaacgccaaccccaacgucgaccccaacgccaaccccaacgucgaccccaacgccaaccccaacgccaaccccaacgccaaccccaacgccaaccccaacgccaaccccaacgccaaccccaacgccaaccccaacgccaaccccaacgccaaccccaacgccaaccccaacgccaaccccaacgccaaccccaacgccaaccccaacgccaaccccaacgccaaccccaacgccaaccccuga

SEQ ID NO: 136 - RNA, 597 nt, Artificial Sequence
  derived and/or modified CDS sequence (opt2) from Pf(3D7)__XP_001351122.1__HsALB_Pf-CSP(93-272)
augaagugggucaccuucaucucccuccucuuccucuucuccuccgccuacuccaagcucaagcagcccgccgacggcaaccccgaccccaacgccaaccccaacgucgaccccaacgccaaccccaacgucgaccccaacgccaaccccaacgucgaccccaacgccaaccccaacgccaaccccaacgccaaccccaacgccaaccccaacgccaaccccaacgccaaccccaacgccaaccccaacgccaaccccaacgccaaccccaacgccaaccccaacgccaaccccaacgccaaccccaacgccaaccccaacgccaaccccaacgccaaccccaacgccaaccccaacgccaaccccaacgucgaccccaacgccaaccccaacgccaaccccaacgccaaccccaacgccaaccccaacgccaaccccaacgccaaccccaacgccaaccccaacgccaaccccaacgccaaccccaacgccaaccccaacgccaaccccaacgccaaccccaacgccaaccccaacgccaaccccaacgccaaccccaacgccaaccccaacgccaaccccaacgccaaccccuga

SEQ ID NO: 137 - RNA, 972 nt, Artificial Sequence
  derived and/or modified CDS sequence (opt2) from Pf(3D7)__XP_001351122.1__HsALB_Pf-CSP(93-397)
augaagugggucaccuucaucucccuccucuuccucuucuccuccgccuacuccaagcucaagcagcccgccgacggcaaccccgaccccaacgccaaccccaacgucgaccccaacgccaaccccaacgucgaccccaacgccaaccccaacgucgaccccaacgccaaccccaacgccaaccccaacgccaaccccaacgccaaccccaacgccaaccccaacgccaaccccaacgccaaccccaacgccaaccccaacgccaaccccaacgccaaccccaacgccaaccccaacgccaaccccaacgccaaccccaacgccaaccccaacgccaaccccaacgccaaccccaacgccaaccccaacgucgaccccaacgccaaccccaacgccaaccccaacgccaaccccaacgccaaccccaacgccaaccccaacgccaaccccaacgccaaccccaacgccaaccccaacgccaaccccaacgccaaccccaacgccaaccccaacgccaaccccaacgccaaccccaacgccaaccccaacgccaaccccaacgccaaccccaacgccaaccccaacgccaaccccaacaagaacaaccagggcaacggccagggccacaacaugcccaacgaccccaaccgcaacgucgacgagaacgccaacgccaacuccgccgucaagaacaacaacaacgaggagcccuccgacaagcacaucaaggaguaccucaacaagauccagaacucccucuccaccgaguggucccccugcuccgucaccugcggcaacggcauccagguccgcaucaagcccggcuccgccaacaagcccaaggacgagcucgacuacgccaacgacaucgagaagaagaucugcaagauggagaagugcuccuccgucuucaacgucgucaacuccuccaucggccucaucaugguccucuccuuccucuuccucaacuga

SEQ ID NO: 138 - RNA, 342 nt, Artificial Sequence
  derived and/or modified CDS sequence (opt2) from Pf(3D7)__XP_001351122.1__HsALB_Pf-CSP(98-192)
augaagugggucaccuucaucucccuccucuuccucuucuccuccgccuacuccgccgacggcaaccccgaccccaacgccaaccccaacgucgaccccaacgccaaccccaacgucgaccccaacgccaaccccaacgucgaccccaacgccaaccccaacgccaaccccaacgccaaccccaacgccaaccccaacgccaaccccaacgccaaccccaacgccaaccccaacgccaaccccaacgccaaccccaacgccaaccccaacgccaaccccaacgccaaccccaacgccaaccccaacgccaaccccaacgccaaccccaacgccaaccccuga

SEQ ID NO: 139 - RNA, 582 nt, Artificial Sequence
  derived and/or modified CDS sequence (opt2) from Pf(3D7)__XP_001351122.1__HsALB_Pf-CSP(98-272)
augaagugggucaccuucaucucccuccucuuccucuucuccuccgccuacuccgccgacggcaaccccgaccccaacgccaaccccaacgucgaccccaacgccaaccccaacgucgaccccaacgccaaccccaacgucgaccccaacgccaaccccaacgccaaccccaacgccaaccccaacgccaaccccaacgccaaccccaacgccaaccccaacgccaaccccaacgccaaccccaacgccaaccccaacgccaaccccaacgccaaccccaacgccaaccccaacgccaaccccaacgccaaccccaacgccaaccccaacgccaaccccaacgccaaccccaacgucgaccccaacgccaaccccaacgccaaccccaacgccaaccccaacgccaaccccaacgccaaccccaacgccaaccccaacgccaaccccaacgccaaccccaacgccaaccccaacgccaaccccaacgccaaccccaacgccaaccccaacgccaaccccaacgccaaccccaacgccaaccccaacgccaaccccaacgccaaccccaacgccaaccccuga

SEQ ID NO: 140 - RNA, 888 nt, Artificial Sequence
  derived and/or modified CDS sequence (opt2) from Pf(3D7)__XP_001351122.1__HsALB_Pf-CSP(98-374)
augaagugggucaccuucaucucccuccucuuccucuucuccuccgccuacuccgccgacggcaaccccgaccccaacgccaaccccaacgucgaccccaacgccaaccccaacgucgaccccaacgccaaccccaacgucgaccccaacgccaaccccaacgccaaccccaacgccaaccccaacgccaaccccaacgccaaccccaacgccaaccccaacgccaaccccaacgccaaccccaacgccaaccccaacgccaaccccaacgccaaccccaacgccaaccccaacgccaaccccaacgccaaccccaacgccaaccccaacgccaaccccaacgccaaccccaacgucgaccccaacgccaaccccaacgccaaccccaacgccaaccccaacgccaaccccaacgccaaccccaacgccaaccccaacgccaaccccaacgccaaccccaacgccaaccccaacgccaaccccaacgccaaccccaacgccaaccccaacgccaaccccaacgccaaccccaacgccaaccccaacgccaaccccaacgccaaccccaacgccaaccccaacaagaacaaccagggcaacggccagggccacaacaugcccaacgaccccaaccgcaacgucgacgagaacgccaacgccaacuccgccgucaagaacaacaacaacgaggagcccuccgacaagcacaucaaggaguaccucaacaagauccagaacucccucuccaccgaguggucccccugcuccgucaccugcggcaacggcauccagguccgcaucaagcccggcuccgccaacaagcccaaggacgagcucgacuacgccaacgacaucgagaagaagaucugcaagauggagaagugcuga

SEQ ID NO: 141 - RNA, 957 nt, Artificial Sequence
  derived and/or modified CDS sequence (opt2) from Pf(3D7)__XP_001351122.1__HsALB_Pf-CSP(98-397)
augaagugggucaccuucaucucccuccucuuccucuucuccuccgccuacuccgccgacggcaaccccgaccccaacgccaaccccaacgucgaccccaacgccaaccccaacgucgaccccaacgccaaccccaacgucgaccccaacgccaaccccaacgccaaccccaacgccaaccccaacgccaaccccaacgccaaccccaacgccaaccccaacgccaaccccaacgccaaccccaacgccaaccccaacgccaaccccaacgccaaccccaacgccaaccccaacgccaaccccaacgccaaccccaacgccaaccccaacgccaaccccaacgccaaccccaacgucgaccccaacgccaaccccaacgccaaccccaacgccaaccccaacgccaaccccaacgccaaccccaacgccaaccccaacgccaaccccaacgccaaccccaacgccaaccccaacgccaaccccaacgccaaccccaacgccaaccccaacgccaaccccaacgccaaccccaacgccaaccccaacgccaaccccaacgccaaccccaacgccaaccccaacaagaacaaccagggcaacggccagggccacaacaugcccaacgaccccaaccgcaacgucgacgagaacgccaacgccaacuccgccgucaagaacaacaacaacgaggagcccuccgacaagcacaucaaggaguaccucaacaagauccagaacucccucuccaccgaguggucccccugcuccgucaccugcggcaacggcauccagguccgcaucaagcccggcuccgccaacaagcccaaggacgagcucgacuacgccaacgacaucgagaagaagaucugcaagauggagaagugcuccuccgucuucaacgucgucaacuccuccaucggccucaucaugguccucuccuuccucuuccucaacuga

SEQ ID NO: 142 - RNA, 1284 nt, Artificial Sequence
  derived and/or modified CDS sequence (opt2) from Pf(3D7)__XP_001351122.1__HsALB_Pf-CSP(199-377)_L(PVTN)_HBsAg
augaagugggucaccuucaucucccuccucuuccucuucuccuccgccuacuccgaccccaacgccaaccccaacgccaaccccaacgccaaccccaacgccaaccccaacgccaaccccaacgccaaccccaacgccaaccccaacgccaaccccaacgccaaccccaacgccaaccccaacgccaaccccaacgccaaccccaacgccaaccccaacgccaaccccaacgccaaccccaacgccaaccccaacgccaaccccaacgccaaccccaacaagaacaaccagggcaacggccagggccacaacaugcccaacgaccccaaccgcaacgucgacgagaacgccaacgccaacuccgccgucaagaacaacaacaacgaggagcccuccgacaagcacaucaaggaguaccucaacaagauccagaacucccucuccaccgaguggucccccugcuccgucaccugcggcaacggcauccagguccgcaucaagcccggcuccgccaacaagcccaaggacgagcucgacuacgccaacgacaucgagaagaagaucugcaagauggagaagugcuccuccguccccgucaccaacauggagaacaucaccuccggcuuccucggcccccuccucguccuccaggccggcuucuuccuccucacccgcauccucaccaucccccagucccucgacuccugguggaccucccucaacuuccucggcggcucccccgucugccucggccagaacucccagucccccaccuccaaccacucccccaccuccugcccccccaucugccccggcuaccgcuggaugugccuccgccgcuucaucaucuuccucuucauccuccuccucugccucaucuuccuccucguccuccucgacuaccagggcaugcuccccgucugcccccucauccccggcuccaccaccaccaacaccggccccugcaagaccugcaccacccccgcccagggcaacuccauguuccccuccugcugcugcaccaagcccaccgacggcaacugcaccugcauccccauccccuccuccugggccuucgccaaguaccucugggagugggccuccguccgcuucuccuggcucucccuccucguccccuucguccagugguucgucggccucucccccaccgucuggcucuccgccaucuggaugaugugguacuggggccccucccucuacuccaucgucucccccuucaucccccuccuccccaucuucuucugccucugggucuacaucuga

SEQ ID NO: 143 - RNA, 1023 nt, Artificial Sequence
  derived and/or modified CDS sequence (opt2) from Pb(ANKA)__XP_022712148.1__Pb-CSP
augaagaagugcaccauccucgucgucgccucccuccuccucgucaacucccuccuccccggcuacggccagaacaaguccauccaggcccagcgcaaccucaacgagcucugcuacaacgagggcaacgacaacaagcucuaccacguccucaacuccaagaacggcaagaucuacaaccgcaacaccgucaaccgccuccucgccgacgcccccgagggcaagaagaacgagaagaagaacgagaagaucgagcgcaacaacaagcucaagcagcccccccccccccccaaccccaacgacccccccccccccaaccccaacgacccccccccccccaaccccaacgacccccccccccccaaccccaacgacccccccccccccaacgccaacgacccccccccccccaacgccaacgaccccgccccccccaacgccaacgaccccgccccccccaacgccaacgaccccgccccccccaacgccaacgaccccgccccccccaacgccaacgacccccccccccccaaccccaacgaccccgccccccccaacgccaacgacccccccccccccaaccccaacgaccccgcccccccccagggcaacaacaacccccagccccagccccgcccccagccccagccccagccccagccccagccccagccccagccccagccccagccccgcccccagccccagccccagcccggcggcaacaacaacaacaagaacaacaacaacgacgacuccuacauccccuccgccgagaagauccucgaguucgucaagcagauccgcgacuccaucaccgaggaguggucccagugcaacgucaccugcggcuccggcauccgcguccgcaagcgcaagggcuccaacaagaaggccgaggaccucacccucgaggacaucgacaccgagaucugcaagauggacaagugcuccuccaucuucaacaucgucuccaacucccucggcuucgucauccuccucguccucgucuucuucaacuga

SEQ ID NO: 144 - RNA, 1188 nt, Artificial Sequence
  derived and/or modified CDS sequence (opt2) from Pb(ANKA)__XP_022712148.1__Pb-CSP_L(G4SG4)_TM domain HA
augaagaagugcaccauccucgucgucgccucccuccuccucgucaacucccuccuccccggcuacggccagaacaaguccauccaggcccagcgcaaccucaacgagcucugcuacaacgagggcaacgacaacaagcucuaccacguccucaacuccaagaacggcaagaucuacaaccgcaacaccgucaaccgccuccucgccgacgcccccgagggcaagaagaacgagaagaagaacgagaagaucgagcgcaacaacaagcucaagcagcccccccccccccccaaccccaacgacccccccccccccaaccccaacgacccccccccccccaaccccaacgacccccccccccccaaccccaacgacccccccccccccaacgccaacgacccccccccccccaacgccaacgaccccgccccccccaacgccaacgaccccgccccccccaacgccaacgaccccgccccccccaacgccaacgaccccgccccccccaacgccaacgacccccccccccccaaccccaacgaccccgccccccccaacgccaacgacccccccccccccaaccccaacgaccccgcccccccccagggcaacaacaacccccagccccagccccgcccccagccccagccccagccccagccccagccccagccccagccccagccccagccccgcccccagccccagccccagcccggcggcaacaacaacaacaagaacaacaacaacgacgacuccuacauccccuccgccgagaagauccucgaguucgucaagcagauccgcgacuccaucaccgaggaguggucccagugcaacgucaccugcggcuccggcauccgcguccgcaagcgcaagggcuccaacaagaaggccgaggaccucacccucgaggacaucgacaccgagaucugcaagauggacaagugcuccuccaucuucaacaucgucuccaacucccucggcuucgucauccuccucguccucgucuucuucaacggcggcggcggcuccggcggcggcggcaagcucgaguccacccgcaucuaccagauccucgccaucuacuccaccgucgccuccucccucguccucgucgucucccucggcgccaucuccuucuggaugugcuccaacggcucccuccagugccgcaucugcaucuga

SEQ ID NO: 145 - RNA, 1008 nt, Artificial Sequence
  derived and/or modified CDS sequence (opt2) from Pb(ANKA)__XP_022712148.1__HsALB_Pb-CSP(24-340)
augaagugggucaccuucaucucccuccucuuccucuucuccuccgccuacucccagaacaaguccauccaggcccagcgcaaccucaacgagcucugcuacaacgagggcaacgacaacaagcucuaccacguccucaacuccaagaacggcaagaucuacaaccgcaacaccgucaaccgccuccucgccgacgcccccgagggcaagaagaacgagaagaagaacgagaagaucgagcgcaacaacaagcucaagcagcccccccccccccccaaccccaacgacccccccccccccaaccccaacgacccccccccccccaaccccaacgacccccccccccccaaccccaacgacccccccccccccaacgccaacgacccccccccccccaacgccaacgaccccgccccccccaacgccaacgaccccgccccccccaacgccaacgaccccgccccccccaacgccaacgaccccgccccccccaacgccaacgacccccccccccccaaccccaacgaccccgccccccccaacgccaacgacccccccccccccaaccccaacgaccccgcccccccccagggcaacaacaacccccagccccagccccgcccccagccccagccccagccccagccccagccccagccccagccccagccccagccccgcccccagccccagccccagcccggcggcaacaacaacaacaagaacaacaacaacgacgacuccuacauccccuccgccgagaagauccucgaguucgucaagcagauccgcgacuccaucaccgaggaguggucccagugcaacgucaccugcggcuccggcauccgcguccgcaagcgcaagggcuccaacaagaaggccgaggaccucacccucgaggacaucgacaccgagaucugcaagauggacaagugcuccuccaucuucaacaucgucuccaacucccucggcuucgucauccuccucguccucgucuucuucaacuga

SEQ ID NO: 146 - RNA, 1026 nt, Artificial Sequence
  derived and/or modified CDS sequence (opt2) from Pb(ANKA)__XP_022712148.1__HsIns-iso1_Pb-CSP(24-340)
auggcccucuggaugcgccuccucccccuccucgcccuccucgcccucuggggccccgaccccgccgccgcccagaacaaguccauccaggcccagcgcaaccucaacgagcucugcuacaacgagggcaacgacaacaagcucuaccacguccucaacuccaagaacggcaagaucuacaaccgcaacaccgucaaccgccuccucgccgacgcccccgagggcaagaagaacgagaagaagaacgagaagaucgagcgcaacaacaagcucaagcagcccccccccccccccaaccccaacgacccccccccccccaaccccaacgacccccccccccccaaccccaacgacccccccccccccaaccccaacgacccccccccccccaacgccaacgacccccccccccccaacgccaacgaccccgccccccccaacgccaacgaccccgccccccccaacgccaacgaccccgccccccccaacgccaacgaccccgccccccccaacgccaacgacccccccccccccaaccccaacgaccccgccccccccaacgccaacgacccccccccccccaaccccaacgaccccgcccccccccagggcaacaacaacccccagccccagccccgcccccagccccagccccagccccagccccagccccagccccagccccagccccagccccgcccccagccccagccccagcccggcggcaacaacaacaacaagaacaacaacaacgacgacuccuacauccccuccgccgagaagauccucgaguucgucaagcagauccgcgacuccaucaccgaggaguggucccagugcaacgucaccugcggcuccggcauccgcguccgcaagcgcaagggcuccaacaagaaggccgaggaccucacccucgaggacaucgacaccgagaucugcaagauggacaagugcuccuccaucuucaacaucgucuccaacucccucggcuucgucauccuccucguccucgucuucuucaacuga

SEQ ID NO: 147 - RNA, 1005 nt, Artificial Sequence
  derived and/or modified CDS sequence (opt2) from Pb(ANKA)__XP_022712148.1__HsSPARC_Pb-CSP(24-340)
augcgcgccuggaucuucuuccuccucugccucgccggccgcgcccucgcccagaacaaguccauccaggcccagcgcaaccucaacgagcucugcuacaacgagggcaacgacaacaagcucuaccacguccucaacuccaagaacggcaagaucuacaaccgcaacaccgucaaccgccuccucgccgacgcccccgagggcaagaagaacgagaagaagaacgagaagaucgagcgcaacaacaagcucaagcagcccccccccccccccaaccccaacgacccccccccccccaaccccaacgacccccccccccccaaccccaacgacccccccccccccaaccccaacgacccccccccccccaacgccaacgacccccccccccccaacgccaacgaccccgccccccccaacgccaacgaccccgccccccccaacgccaacgaccccgccccccccaacgccaacgaccccgccccccccaacgccaacgacccccccccccccaaccccaacgaccccgccccccccaacgccaacgacccccccccccccaaccccaacgaccccgcccccccccagggcaacaacaacccccagccccagccccgcccccagccccagccccagccccagccccagccccagccccagccccagccccagccccgcccccagccccagccccagcccggcggcaacaacaacaacaagaacaacaacaacgacgacuccuacauccccuccgccgagaagauccucgaguucgucaagcagauccgcgacuccaucaccgaggaguggucccagugcaacgucaccugcggcuccggcauccgcguccgcaagcgcaagggcuccaacaagaaggccgaggaccucacccucgaggacaucgacaccgagaucugcaagauggacaagugcuccuccaucuucaacaucgucuccaacucccucggcuucgucauccuccucguccucgucuucuucaacuga

SEQ ID NO: 148 - RNA, 1008 nt, Artificial Sequence
  derived and/or modified CDS sequence (opt2) from Pb(ANKA)__XP_022712148.1__IgE_Pb-CSP(24-340)
auggacuggaccuggauccucuuccucgucgccgccgccacccgcguccacucccagaacaaguccauccaggcccagcgcaaccucaacgagcucugcuacaacgagggcaacgacaacaagcucuaccacguccucaacuccaagaacggcaagaucuacaaccgcaacaccgucaaccgccuccucgccgacgcccccgagggcaagaagaacgagaagaagaacgagaagaucgagcgcaacaacaagcucaagcagcccccccccccccccaaccccaacgacccccccccccccaaccccaacgacccccccccccccaaccccaacgacccccccccccccaaccccaacgacccccccccccccaacgccaacgacccccccccccccaacgccaacgaccccgccccccccaacgccaacgaccccgccccccccaacgccaacgaccccgccccccccaacgccaacgaccccgccccccccaacgccaacgacccccccccccccaaccccaacgaccccgccccccccaacgccaacgacccccccccccccaaccccaacgaccccgcccccccccagggcaacaacaacccccagccccagccccgcccccagccccagccccagccccagccccagccccagccccagccccagccccagccccgcccccagccccagccccagcccggcggcaacaacaacaacaagaacaacaacaacgacgacuccuacauccccuccgccgagaagauccucgaguucgucaagcagauccgcgacuccaucaccgaggaguggucccagugcaacgucaccugcggcuccggcauccgcguccgcaagcgcaagggcuccaacaagaaggccgaggaccucacccucgaggacaucgacaccgagaucugcaagauggacaagugcuccuccaucuucaacaucgucuccaacucccucggcuucgucauccuccucguccucgucuucuucaacuga

SEQ ID NO: 149 - RNA, 1194 nt, Artificial Sequence
  derived and/or modified CDS sequence (opt3) from Pf(3D7)__XP_001351122.1__Pf-CSP
augaugagaaagcuggccauccucagcguguccucuuuccuuuuugucgaggcucuguuccaggaauaccaaugcuauggcucaaguagcaacaccaggguuuugaaugaguuaaacuacgacaaugcagggacaaaccuguauaaugaacuagagaugaacuacuauggaaaacaggaaaauugguacucccucaagaaaaacucucggucgcugggugagaaugaugacggcaacaaugaggauaacgaaaaacuucgcaagcccaagcacaagaaacugaagcagccugccgacgggaauccagauccgaacgcgaaucccaacguggacccuaacgcuaauccaaacguagaucccaaugccaacccuaauguggacccaaacgcaaaucccaacgccaauccuaacgcuaauccaaacgcaaauccgaacgccaaucccaacgcuaacccuaaugccaacccaaaugcgaaccccaaugcaaacccuaaugccaacccaaaugcuaaccccaaugccaacccgaaugcaaacccuaaugcuaaccccaacgccaauccaaacgcgaauccuaacgccaaucccaacgucgauccaaaugcaaaccccaaugcuaacccuaaugccaacccaaaugcuaacccgaaugccaaccccaacgcaaauccuaacgccaauccaaacgcuaaucccaacgcgaauccuaacgcaaauccaaacgccaaucccaacgcuaauccgaacgccaauccuaacgcaaauccaaacgccaaccccaaugcuaacccuaaugccaaccccaaugcaaacccaaauaaaaacaaucagggaaacggccaaggucauaauaugccuaacgaccccaaucgaaacguggaugagaaugcgaacgcuaacucagccguuaagaauaacaauaacgaggaaccaagcgacaaacacauuaaggaguauuugaauaagauacagaacagucucuccacugaauggucuccguguagcgugacgugcgggaauggaauccagguccguauuaaaccuggcuccgcaaacaagcccaaagaugagcuggacuacgccaaugacaucgaaaagaaaauuuguaagauggagaaaugcucaaguguguuuaacguaguuaauagcucuaucggccugauaauggugcucuccuucuuauuucugaacuga

SEQ ID NO: 150 - RNA, 1122 nt, Artificial Sequence
  derived and/or modified CDS sequence (opt3) from Pf(3D7)__XP_001351122.1__Pf-CSP(1-374)
augaugagaaagcuggccauccucagcguguccucuuuccuuuuugucgaggcucuguuccaggaauaccaaugcuauggcucaaguagcaacaccaggguuuugaaugaguuaaacuacgacaaugcagggacaaaccuguauaaugaacuagagaugaacuacuauggaaaacaggaaaauugguacucccucaagaaaaacucucggucgcugggugagaaugaugacggcaacaaugaggauaacgaaaaacuucgcaagcccaagcacaagaaacugaagcagccugccgacgggaauccagauccgaacgcgaaucccaacguggacccuaacgcuaauccaaacguagaucccaaugccaacccuaauguggacccaaacgcaaaucccaacgccaauccuaacgcuaauccaaacgcaaauccgaacgccaaucccaacgcuaacccuaaugccaacccaaaugcgaaccccaaugcaaacccuaaugccaacccaaaugcuaaccccaaugccaacccgaaugcaaacccuaaugcuaaccccaacgccaauccaaacgcgaauccuaacgccaaucccaacgucgauccaaaugcaaaccccaaugcuaacccuaaugccaacccaaaugcuaacccgaaugccaaccccaacgcaaauccuaacgccaauccaaacgcuaaucccaacgcgaauccuaacgcaaauccaaacgccaaucccaacgcuaauccgaacgccaauccuaacgcaaauccaaacgccaaccccaaugcuaacccuaaugccaaccccaaugcaaacccaaauaaaaacaaucagggaaacggccaaggucauaauaugccuaacgaccccaaucgaaacguggaugagaaugcgaacgcuaacucagccguuaagaauaacaauaacgaggaaccaagcgacaaacacauuaaggaguauuugaauaagauacagaacagucucuccacugaauggucuccguguagcgugacgugcgggaauggaauccagguccguauuaaaccuggcuccgcaaacaagcccaaagaugagcuggacuacgccaaugacaucgaaaagaaaauuuguaagauggagaaaugc

SEQ ID NO: 151 - RNA, 975 nt, Artificial Sequence
  derived and/or modified CDS sequence (opt3) from Pf(3D7)__XP_001351122.1__Pf-CSP(1-325)
augaugagaaagcuggccauccucagcguguccucuuuccuuuuugucgaggcucuguuccaggaauaccaaugcuauggcucaaguagcaacaccaggguuuugaaugaguuaaacuacgacaaugcagggacaaaccuguauaaugaacuagagaugaacuacuauggaaaacaggaaaauugguacucccucaagaaaaacucucggucgcugggugagaaugaugacggcaacaaugaggauaacgaaaaacuucgcaagcccaagcacaagaaacugaagcagccugccgacgggaauccagauccgaacgcgaaucccaacguggacccuaacgcuaauccaaacguagaucccaaugccaacccuaauguggacccaaacgcaaaucccaacgccaauccuaacgcuaauccaaacgcaaauccgaacgccaaucccaacgcuaacccuaaugccaacccaaaugcgaaccccaaugcaaacccuaaugccaacccaaaugcuaaccccaaugccaacccgaaugcaaacccuaaugcuaaccccaacgccaauccaaacgcgaauccuaacgccaaucccaacgucgauccaaaugcaaaccccaaugcuaacccuaaugccaacccaaaugcuaacccgaaugccaaccccaacgcaaauccuaacgccaauccaaacgcuaaucccaacgcgaauccuaacgcaaauccaaacgccaaucccaacgcuaauccgaacgccaauccuaacgcaaauccaaacgccaaccccaaugcuaacccuaaugccaaccccaaugcaaacccaaauaaaaacaaucagggaaacggccaaggucauaauaugccuaacgaccccaaucgaaacguggaugagaaugcgaacgcuaacucagccguuaagaauaacaauaacgaggaaccaagcgacaaacacauuaaggaguauuugaauaagauacagaac

SEQ ID NO: 152 - RNA, 1194 nt, Artificial Sequence
  derived and/or modified CDS sequence (opt3) from Pf(3D7)__XP_001351122.1__HsALB_Pf-CSP(19-397)
augaagugggugaccuucaucagccugcucuuucuuuucuccucugccuacucacuguuucaggaguaucaaugcuacggcaguagcuccaacacaagagucuugaaugaauuaaacuaugacaaugcugggacuaaccuguacaaugagcuagaaaugaacuauuacggaaaacaggagaauugguauucucucaagaaaaacucgaggucacugggugaaaaugaugacggcaacaaugaggauaacgagaaacuucggaagcccaagcacaagaaacugaagcagccugcagacgggaauccagauccgaacgccaaucccaacguugacccuaacgcgaauccaaacguggaucccaaugcuaacccuaauguagacccaaacgccaaucccaacgcaaauccuaacgccaauccaaacgcuaauccgaacgcaaaucccaacgccaacccuaaugcuaacccaaaugccaaccccaaugcgaacccuaaugcaaacccaaaugccaaccccaaugcuaacccgaaugccaacccuaaugcaaaccccaacgcuaauccaaacgccaauccuaacgcgaaucccaacguggauccaaaugccaaccccaaugcaaacccuaaugcuaacccaaaugccaacccgaaugcuaaccccaacgccaauccuaacgcaaauccaaacgccaaucccaacgcuaauccuaacgcgaauccaaacgcaaaucccaacgccaauccgaacgcuaauccuaacgccaauccaaacgcaaaccccaaugccaacccuaaugcuaaccccaaugccaacccaaauaaaaacaaucagggaaacggccaaggucauaauaugccuaacgaccccaaucgcaacgucgaugaaaaugcaaacgcgaacagcgcugugaagaauaacaauaacgaggaaccaagugacaaacacauuaaggaguacuugaauaagauacagaacucccucucuacggaguggagcccguguuccguuaccugcgggaauggaauccaggugcgaauuaaaccuggcucagccaacaagcccaaagaugaacuggacuacgcaaaugacaucgagaagaaaauuuguaagauggaaaaaugcaguagcgucuucaacgugguaaauucuuccaucggccugauaaugguucucucauuuuuauuccugaacuga

SEQ ID NO: 153 - RNA, 1212 nt, Artificial Sequence
  derived and/or modified CDS sequence (opt3) from Pf(3D7)__XP_001351122.1__HsIns-iso1_Pf-CSP(19-397)
auggcccuguggaugagacuccuuccccuguuggcuuuacuggcacuauggggcccugacccagccgcggcucucuuccaggaguaccaaugcuaugggagcuccucuaacaccagggugcugaaugaacuuaacuacgauaaugccggaacaaaccuguauaaugaguuggaaaugaacuacuaugguaagcaggagaauugguacucacucaaaaagaacagucggagccugggcgaaaaugacgaugggaacaaugaggacaacgagaaacugcgcaagccgaaacacaagaagcucaaacagcccgcagauggaaauccugacccaaacgccaaucccaacgucgauccuaacgcuaauccaaacguugaccccaaugcaaacccuaauguggauccaaacgccaauccgaacgcuaaucccaacgccaauccuaacgcgaauccaaacgcaaaucccaacgccaacccuaaugcuaacccaaaugccaaccccaaugcaaacccgaaugcuaacccuaaugccaaccccaaugcgaacccaaaugccaacccuaaugcaaaccccaacgcuaauccaaacgccaaucccaacgcuaauccuaacguagacccaaaugccaacccgaaugcaaaccccaaugccaacccuaaugcuaacccaaaugcgaaccccaacgcaaauccuaacgccaauccaaacgcuaaucccaacgccaauccgaacgcaaauccuaacgccaauccaaacgcuaaucccaacgccaauccuaacgcaaaucccaacgcgaacccaaaugcuaacccuaaugccaaccccaaugcaaacccaaauaagaacaaucagggcaacggucaagggcauaauaugccgaacgauccuaaucgaaacguggacgaaaaugccaacgcuaacuccgccgucaaaaauaacaauaacgaggaacccucugauaagcacaucaaagaguauuuaaauaagauucagaacucgcugucaacugaguggagcccauguagugugacgugcggaaauggcauacagguucguaucaagcccggcuccgcaaacaaaccuaaggacgaacuugacuacgcuaaugauauugagaaaaagaucuguaaaauggaaaagugcucuagcguguuuaacgucguaaauuccucaauuggguugaucauggugcugaguuuccuauuucucaacuga

SEQ ID NO: 154 - RNA, 1191 nt, Artificial Sequence
  derived and/or modified CDS sequence (opt3) from Pf(3D7)__XP_001351122.1__HsSPARC_Pf-CSP(19-397)
augagagccuggaucuucuuucugcucugccuugcuggcagggcacuggccuuguuccaggaguaccaauguuaugggagcuccucuaacacccggguguuaaaugaacugaacuacgacaaugcgggaacaaaccuauauaaugagcucgaaaugaacuacuaugguaagcaggagaauugguacucacugaaaaagaacagucgcagccuuggcgaaaaugaugacgggaacaaugaggauaacgagaaacugcgaaagcccaaacacaagaaguugaaacagccugcugacggaaauccagauccgaacgccaaucccaacgucgacccuaacgcaaauccaaacguugaucccaaugccaacccuaauguggacccaaacgcuaaucccaacgcaaauccuaacgccaauccaaacgcuaauccgaacgccaaucccaacgcgaacccuaaugcaaacccaaaugccaaccccaaugcuaacccuaaugccaacccaaaugcaaaccccaaugcuaacccgaaugccaacccuaaugcgaaccccaacgccaauccaaacgcaaauccuaacgcuaaucccaacguagauccaaaugccaaccccaaugcuaacccuaaugccaacccaaaugcaaacccgaaugccaaccccaacgcuaauccuaacgcgaauccaaacgcaaaucccaacgccaauccuaacgcuaauccaaacgccaaucccaacgcaaauccgaacgccaauccuaacgcuaauccaaacgccaaccccaaugcaaacccuaaugcgaaccccaaugcuaacccaaauaagaacaaucagggcaacggucaagggcauaauaugccuaacgaccccaaucguaacguggaugaaaaugccaacgcaaacuccgccgucaaaaauaacaauaacgaggaaccaucugacaagcacauuaaagaguaucucaauaagauacagaacucgcugucaacugaguggagcccgugcagugugacguguggaaauggcauccagguuagaauuaagccuggcuccgcuaacaaacccaaggaugaacuggacuacgccaaugacaucgagaaaaagauuugcaaaauggaaaaguguucuagcguguuuaacgucguaaauuccucaaucgggcucauaaugguguuaaguuuccuguuucuuaacuga

SEQ ID NO: 155 - RNA, 1194 nt, Artificial Sequence
  derived and/or modified CDS sequence (opt3) from Pf(3D7)__XP_001351122.1__IgE_Pf-CSP(19-397)
auggacuggaccuggauccuguuccucguggccgcugcaacaagaguccacagccuuuuucaggaguaccaaugcuauggcuccucuucaaacacuaggguucugaaugaauugaacuacgauaaugccgggacgaacuuauauaaugagcuggaaaugaacuacuauggaaagcaggagaauugguacagucuaaagaagaacagccggucccucggugaaaaugacgauggcaacaaugaggacaacgagaaacugcgcaagcccaaacauaagaaacuuaaacagccugcggaugggaauccagacccgaacgcuaaucccaacguggauccuaacgccaauccaaacguagaccccaaugcaaacccuaauguggauccaaacgccaaucccaacgcuaauccuaacgcaaauccaaacgccaauccgaacgcuaaucccaacgccaacccuaaugcgaacccaaaugcaaaccccaaugccaacccuaaugcuaacccaaaugccaaccccaaugcaaacccgaaugcuaacccuaaugccaaccccaacgcgaauccaaacgccaauccuaacgcaaaucccaacgucgacccaaaugcuaaccccaaugccaacccuaaugcuaacccaaaugccaacccgaaugcaaaccccaacgccaauccuaacgcuaauccaaacgcgaaucccaacgcaaauccuaacgccaauccaaacgcuaaucccaacgccaauccgaacgcaaauccuaacgccaauccaaacgcuaaccccaaugccaacccuaaugcaaaccccaaugcgaacccaaauaagaacaaucagggaaacggccaaggucacaauaugccuaacgaucccaaucgaaacguggacgaaaaugcuaacgccaacucugcaguuaaaaauaacaauaacgaggaaccaucggauaagcauauuaaagaguaucugaauaagauacagaacucauugagcaccgaguggaguccguguuccgugacaugcgggaauggaauccagguccguauuaagccuggcucugccaacaaacccaaggacgaacucgacuacgcuaaugauaucgagaaaaagauuuguaaaauggaaaagugcagcuccguguucaacguaguuaauucaaguaucggccugauaauggugcugagcuuucucuucuuaaacuga

SEQ ID NO: 156 - RNA, 1359 nt, Artificial Sequence
  derived and/or modified CDS sequence (opt3) from Pf(3D7)__XP_001351122.1__Pf-CSP_L(G4SG4)_TM domain HA
augaugagaaagcuggccauccucagcguguccucuuuccuuuuugucgaggcucuguuccaggaauaccaaugcuauggcucaaguagcaacaccaggguuuugaaugaguuaaacuacgacaaugcagggacaaaccuguauaaugaacuagagaugaacuacuauggaaagcaggaaaauugguacucccucaagaaaaacucucggucgcugggugagaaugaugacggcaacaaugaggauaacgaaaaacuucgcaagcccaagcacaagaaacugaagcagccugccgacgggaauccagauccgaacgcgaaucccaacguggacccuaacgcuaauccaaacguagaucccaaugccaacccuaauguggacccaaacgcaaaucccaacgccaauccuaacgcuaauccaaacgcaaauccgaacgccaaucccaacgcuaacccuaaugccaacccaaaugcgaaccccaaugcaaacccuaaugccaacccaaaugcuaaccccaaugccaacccgaaugcaaacccuaaugcuaaccccaacgccaauccaaacgcgaauccuaacgccaaucccaacgucgauccaaaugcaaaccccaaugcuaacccuaaugccaacccaaaugcuaacccgaaugccaaccccaacgcaaauccuaacgccaauccaaacgcuaaucccaacgcgaauccuaacgcaaauccaaacgccaaucccaacgcuaauccgaacgccaauccuaacgcaaauccaaacgccaaccccaaugcuaacccuaaugccaaccccaaugcaaacccaaauaaaaacaaucagggaaacggccaaggucauaauaugccuaacgaccccaaucgaaacguggaugagaaugcgaacgcuaacucagccguuaagaauaacaauaacgaggaaccaagcgacaaacacauuaaggaguauuugaauaagauacagaacagucucuccacugaauggucuccguguagcgugacgugcgggaauggaauccagguccguauuaaaccuggcuccgcaaacaagcccaaagaugagcuggacuacgccaaugacaucgaaaagaaaauuuguaagauggagaaaugcucaaguguguuuaacguaguuaauagcucuaucggccugauaauggugcucuccuucuuauuucugaacgggggagguggcucagggggaggcgguaaacuugaaagcaccagaaucuaccagauuuuggcuaucuauaguacagucgccucuucccuggugcuaguggucagccucggggcaauuucguucuggauguguucuaauggaucccugcaaugcaggaucuguauauga

SEQ ID NO: 157 - RNA, 1233 nt, Artificial Sequence
  derived and/or modified CDS sequence (opt3) from Pf(3D7)__XP_001351122.1__Pf-CSP(199-377)_L(PVTN)_HBsAg
auggaccccaacgccaauccuaacgcuaauccaaacgcaaauccgaacgccaaucccaacgcgaauccuaacgcuaauccaaacgccaaucccaacgcaaauccuaacgccaacccaaaugcuaaccccaaugcaaacccuaaugccaacccaaaugcuaacccgaaugccaaccccaaugcgaacccuaaugcaaacccaaaugccaaccccaacgcuaauccuaacaagaauaaccagggcaaugggcaaggacacaacaugccaaaugaucccaacagaaauguggacgagaacgccaaugcaaacagcgcugucaaaaauaacaauaacgaggaaccguccgauaagcauaucaaagaauaccugaacaagauucaaaauucucucucaaccgaguggaguccuugcagcguuacaugugguaacggcauacaggugaggaucaaacccggguccgccaauaagccaaaggacgaacuugauuaugcgaacgacauugagaaaaagaucugcaaaauggagaaguguucuucgguaccugugacuaauauggaaaacauuacgucaggauuccugggccccuuguuaguccugcaggccggguuuuuccuacucacccggauccugacaauaccacagagccuugauaguugguggacuucccugaauuuucucgguggaucucccgugugcuugggccagaacagccaguccccuaccucaaaucacaguccaacaagcuguccgcccaucugcccuggcuaccgcuggaugugucugcgacguuucauuaucuuucuguucauucucuuacugugccuuaucuuuuugcugguucuacucgacuaucaggggaugcugccaguguguccccuuauaccuggaucuaccacuacaaacaccgguccaugcaaaacguguacuacccccgcacaaggcaauuccauguucccgucaugcugcuguacaaagccuacugaugggaacugcaccuguauuccaauccccagcaguugggcuuuugccaaguaccugugggagugggcuucugucagauucuccugguugagccuccuggugccuuuuguacagugguucguuggauuaucgcccacaguguggcugucugccauuuggaugaugugguauuggggcccaucccucuacucaaucgucaguccuuuuaucccccuucugccaauuuucuucugcuuguggguguauauauga

SEQ ID NO: 158 - RNA, 1275 nt, Artificial Sequence
  derived and/or modified CDS sequence (opt3) from Pf(3D7)__XP_001351122.1__Pf-CSP(199-387)_L(PVTN)_HBsAg
augauggcccccgacccuaacgcuaauccaaacgcaaauccgaacgccaaucccaacgcgaauccuaacgcuaauccaaacgccaaucccaacgcaaauccuaacgccaauccaaacgcuaaccccaaugcaaacccuaaugccaacccaaaugcuaacccgaaugccaaccccaaugcgaacccuaaugcaaacccaaaugccaaccccaaugcuaacccuaacgccaauccaaacaagaauaaccagggcaaugggcaaggacacaacaugcccaaugauccgaacagaaauguggacgagaacgcaaaugcuaacagcgccgucaaaaauaacaauaacgaggaaccuuccgauaagcauaucaaagaauaccugaacaagauucaaaauucucucucaaccgaguggagucccugcagcguuacaugugguaacggcauacaggugaggaucaaaccaggguccgcgaauaagccuaaggacgaacuugauuaugccaacgacauugagaaaaagaucugcaaaauggagaaguguucuucgguauucaauguggucaacucaagcauuggacugggccccgugacuaauauggaaaacaucacgaguggguuuuuggguccauuacugguucuacaggcaggauucuuucuccugacccggauacuuacaaucccccagucccuggauucuugguggacuagcuugaauuuccucggcggcuccccugugugccuggggcagaacucacagaguccaaccagcaaucacucuccgacauccugucccccuauuugcccaggauaccgcuggaugugucugcgacguuuuaucauuuuccucuuuaucuuacugcuuugcuugauauuccugcuaguccuccuggacuaucaggguaugcuucccguguguccucugauuccaggcucaaccacuacaaacaccgggcccugcaaaacguguacuaccccggcucaaggaaauagcauguuuccuaguugcugcuguacaaagccaacugauggcaacugcaccuguauccccauuccuucuuccugggccuucgcuaaguacuugugggagugggccagcguaagauuuucguggcucucucuguuaguucccuucgugcagugguuugucggucuguccccaacaguguggcucucagcaaucuggaugaugugguauugggggccuagucuuuacagcaucgugucccccuucauuccacuguugccgauauucuuuugccuaugggucuauaucuga

SEQ ID NO: 159 - RNA, 459 nt, Artificial Sequence
  derived and/or modified CDS sequence (opt3) from Pf(3D7)__XP_001351122.1__HsALB_Pf-CSP(19-152)
augaagugggugaccuucaucagccugcucuuucuuuucuccucugccuacucacuguuucaggaguaucaaugcuacggcaguagcuccaacacaagagucuugaaugaauuaaacuaugacaaugcugggacuaaccuguacaaugagcuagaaaugaacuauuacggaaaacaggagaauugguauucucucaagaaaaacucgaggucacugggugaaaaugaugacggcaacaaugaggauaacgagaaacuucggaagcccaagcacaagaaacugaagcagccugcagacgggaauccagauccgaacgccaaucccaacguugacccuaacgcgaauccaaacguggaucccaaugcuaacccuaauguagacccaaacgccaaucccaacgcaaauccuaacgccaauccaaacgcuaauccgaacgcaaaucccaacgccaacccuuga

SEQ ID NO: 160 - RNA, 579 nt, Artificial Sequence
  derived and/or modified CDS sequence (opt3) from Pf(3D7)__XP_001351122.1__HsALB_Pf-CSP(19-192)
augaagugggugaccuucaucagccugcucuuucuuuucuccucugccuacucacuguuucaggaguaucaaugcuacggcaguagcuccaacacaagagucuugaaugaauuaaacuaugacaaugcugggacuaaccuguacaaugagcuagaaaugaacuauuacggaaaacaggagaauugguauucucucaagaaaaacucgaggucacugggugaaaaugaugacggcaacaaugaggauaacgagaaacuucggaagcccaagcacaagaaacugaagcagccugcagacgggaauccagauccgaacgccaaucccaacguugacccuaacgcgaauccaaacguggaucccaaugcuaacccuaauguagacccaaacgccaaucccaacgcaaauccuaacgccaauccaaacgcuaauccgaacgcaaaucccaacgccaacccuaaugcuaacccaaaugccaaccccaaugcgaacccuaaugcaaacccaaaugccaaccccaaugcuaacccgaaugccaacccuaaugcaaaccccaacgcuaauccaaacgccaauccuuga

SEQ ID NO: 161 - RNA, 819 nt, Artificial Sequence
  derived and/or modified CDS sequence (opt3) from Pf(3D7)__XP_001351122.1__HsALB_Pf-CSP(19-272)
augaagugggugaccuucaucagccugcucuuucuuuucuccucugccuacucacuguuucaggaguaucaaugcuacggcaguagcuccaacacaagagucuugaaugaauuaaacuaugacaaugcugggacuaaccuguacaaugagcuagaaaugaacuauuacggaaaacaggagaauugguauucucucaagaaaaacucgaggucacugggugaaaaugaugacggcaacaaugaggauaacgagaaacuucggaagcccaagcacaagaaacugaagcagccugcagacgggaauccagauccgaacgccaaucccaacguugacccuaacgcgaauccaaacguggaucccaaugcuaacccuaauguagacccaaacgccaaucccaacgcaaauccuaacgccaauccaaacgcuaauccgaacgcaaaucccaacgccaacccuaaugcuaacccaaaugccaaccccaaugcgaacccuaaugcaaacccaaaugccaaccccaaugcuaacccgaaugccaacccuaaugcaaaccccaacgcuaauccaaacgccaauccuaacgcgaaucccaacguggauccaaaugccaaccccaaugcaaacccuaaugcuaacccaaaugccaacccgaaugcuaaccccaacgccaauccuaacgcaaauccaaacgccaaucccaacgcuaauccuaacgcgaauccaaacgcaaaucccaacgccaauccgaacgcuaauccuaacgccaauccaaacgcaaaccccaaugccaacccuaaugcuaaccccaaugccaacccauga

SEQ ID NO: 162 - RNA, 981 nt, Artificial Sequence
  derived and/or modified CDS sequence (opt3) from Pf(3D7)__XP_001351122.1__HsALB_Pf-CSP(19-272)_L(AAY)_Pf-CSP(310-3 27)_L(AAY)_Pf-CSP(346-375)
augaagugggugaccuucaucagccugcucuuucuuuucuccucugccuacucacuguuucaggaguaucaaugcuacggcaguagcuccaacacaagagucuugaaugaauuaaacuaugacaaugcugggacuaaccuguacaaugagcuagaaaugaacuauuacggaaaacaggagaauugguauucucucaagaaaaacucgaggucacugggugaaaaugaugacggcaacaaugaggauaacgagaaacuucggaagcccaagcacaagaaacugaagcagccugcagacgggaauccagauccgaacgccaaucccaacguugacccuaacgcgaauccaaacguggaucccaaugcuaacccuaauguagacccaaacgccaaucccaacgcaaauccuaacgccaauccaaacgcuaauccgaacgcaaaucccaacgccaacccuaaugcuaacccaaaugccaaccccaaugcgaacccuaaugcaaacccaaaugccaaccccaaugcuaacccgaaugccaacccuaaugcaaaccccaacgcuaauccaaacgccaauccuaacgcgaaucccaacguggauccaaaugccaaccccaaugcaaacccuaaugcuaacccaaaugccaacccgaaugcuaaccccaacgccaauccuaacgcaaauccaaacgccaaucccaacgcuaauccuaacgcgaauccaaacgcaaaucccaacgccaauccgaacgcuaauccuaacgccaauccaaacgcaaaccccaaugccaacccuaaugcuaaccccaaugccaacccagcagcguacgaaccuagcgacaaacauauuaaggaguacuugaauaaaauacagaacagucucgcugccuauaucaagcccggauccgcaaauaagccaaaagaugaacuggacuacgccaacgauauugagaagaaaaucuguaagauggagaaaugcucuuga

SEQ ID NO: 163 - RNA, 942 nt, Artificial Sequence
  derived and/or modified CDS sequence (opt3) from Pf(3D7)__XP_001351122.1__HsALB_Pf-CSP(19-272)_L(AAY)_Pf-CSP(346-3 65)_L(AAY)_P2
augaagugggugaccuucaucagccugcucuuucuuuucuccucugccuacucacuguuucaggaguaucaaugcuacggcaguagcuccaacacaagagucuugaaugaauuaaacuaugacaaugcugggacuaaccuguacaaugagcuagaaaugaacuauuacggaaaacaggagaauugguauucucucaagaaaaacucgaggucacugggugaaaaugaugacggcaacaaugaggauaacgagaaacuucggaagcccaagcacaagaaacugaagcagccugcagacgggaauccagauccgaacgccaaucccaacguugacccuaacgcgaauccaaacguggaucccaaugcuaacccuaauguagacccaaacgccaaucccaacgcaaauccuaacgccaauccaaacgcuaauccgaacgcaaaucccaacgccaacccuaaugcuaacccaaaugccaaccccaaugcgaacccuaaugcaaacccaaaugccaaccccaaugcuaacccgaaugccaacccuaaugcaaaccccaacgcuaauccaaacgccaauccuaacgcgaaucccaacguggauccaaaugccaaccccaaugcaaacccuaaugcuaacccaaaugccaacccgaaugcuaaccccaacgccaauccuaacgcaaauccaaacgccaaucccaacgcuaauccuaacgcgaauccaaacgcaaaucccaacgccaauccgaacgcuaauccuaacgccaauccaaacgcaaaccccaaugccaacccuaaugcuaaccccaaugccaacccagcagcguacauuaaaccuggaagcgcuaauaagcccaaagacgaauuggauuacgccaacgacauagaggcagccuaucaguacaucaaggcuaauaguaaguucauuggcaucacggaacucuga

SEQ ID NO: 164 - RNA, 936 nt, Artificial Sequence
  derived and/or modified CDS sequence (opt3) from Pf(3D7)__XP_001351122.1__HsALB_Pf-CSP(19-272)_L(AAY)_Pf-CSP(346-3 65)_L(AAY)_PADRE
augaagugggugaccuucaucagccugcucuuucuuuucuccucugccuacucacuguuucaggaguaucaaugcuacggcaguagcuccaacacaagagucuugaaugaauuaaacuaugacaaugcugggacuaaccuguacaaugagcuagaaaugaacuauuacggaaaacaggagaauugguauucucucaagaaaaacucgaggucacugggugaaaaugaugacggcaacaaugaggauaacgagaaacuucggaagcccaagcacaagaaacugaagcagccugcagacgggaauccagauccgaacgccaaucccaacguugacccuaacgcgaauccaaacguggaucccaaugcuaacccuaauguagacccaaacgccaaucccaacgcaaauccuaacgccaauccaaacgcuaauccgaacgcaaaucccaacgccaacccuaaugcuaacccaaaugccaaccccaaugcgaacccuaaugcaaacccaaaugccaaccccaaugcuaacccgaaugccaacccuaaugcaaaccccaacgcuaauccaaacgccaauccuaacgcgaaucccaacguggauccaaaugccaaccccaaugcaaacccuaaugcuaacccaaaugccaacccgaaugcuaaccccaacgccaauccuaacgcaaauccaaacgccaaucccaacgcuaauccuaacgcgaauccaaacgcaaaucccaacgccaauccgaacgcuaauccuaacgccaauccaaacgcaaaccccaaugccaacccuaaugcuaaccccaaugccaacccagcagcguacauuaaaccuggaagcgcuaauaagcccaaagacgaauuggauuacgccaacgacauagaggcagccuaugcuaaguucgucgccgcauggacgcucaaggcugccgcguga

SEQ ID NO: 165 - RNA, 993 nt, Artificial Sequence
  derived and/or modified CDS sequence (opt3) from Pf(3D7)__XP_001351122.1__HsALB_Pf-CSP(19-272)_L(G4S)_Pf-CSP(310-3 27)_L(G4S)_Pf-CSP(346-375)
augaagugggugaccuucaucagccugcucuuucuuuucuccucugccuacucacuguuucaggaguaucaaugcuacggcaguagcuccaacacaagagucuugaaugaauuaaacuaugacaaugcugggacuaaccuguacaaugagcuagaaaugaacuauuacggaaaacaggagaauugguauucucucaagaaaaacucgaggucacugggugaaaaugaugacggcaacaaugaggauaacgagaaacuucggaagcccaagcacaagaaacugaagcagccugcagacgggaauccagauccgaacgccaaucccaacguugacccuaacgcgaauccaaacguggaucccaaugcuaacccuaauguagacccaaacgccaaucccaacgcaaauccuaacgccaauccaaacgcuaauccgaacgcaaaucccaacgccaacccuaaugcuaacccaaaugccaaccccaaugcgaacccuaaugcaaacccaaaugccaaccccaaugcuaacccgaaugccaacccuaaugcaaaccccaacgcuaauccaaacgccaauccuaacgcgaaucccaacguggauccaaaugccaaccccaaugcaaacccuaaugcuaacccaaaugccaacccgaaugcuaaccccaacgccaauccuaacgcaaauccaaacgccaaucccaacgcuaauccuaacgcgaauccaaacgcaaaucccaacgccaauccgaacgcuaauccuaacgccaauccaaacgcaaaccccaaugccaacccuaaugcuaaccccaaugccaacccaggaggcggugggagcgaaccuagugacaaacauauuaaggaguacuugaauaaaauacagaacucccucggaggcggcgggucuaucaagcccggaagcgcaaauaagccaaaagaugaacuggacuacgcgaacgauauugagaagaaaaucuguaagauggagaaaugcuccuga

SEQ ID NO: 166 - RNA, 978 nt, Artificial Sequence
  derived and/or modified CDS sequence (opt3) from Pf(3D7)__XP_001351122.1__HsALB_Pf-CSP(19-272)_L(G4S)_Pf-CSP(310-3 27)_Pf-CSP(346-375)
augaagugggugaccuucaucagccugcucuuucuuuucuccucugccuacucacuguuucaggaguaucaaugcuacggcaguagcuccaacacaagagucuugaaugaauuaaacuaugacaaugcugggacuaaccuguacaaugagcuagaaaugaacuauuacggaaaacaggagaauugguauucucucaagaaaaacucgaggucacugggugaaaaugaugacggcaacaaugaggauaacgagaaacuucggaagcccaagcacaagaaacugaagcagccugcagacgggaauccagauccgaacgccaaucccaacguugacccuaacgcgaauccaaacguggaucccaaugcuaacccuaauguagacccaaacgccaaucccaacgcaaauccuaacgccaauccaaacgcuaauccgaacgcaaaucccaacgccaacccuaaugcuaacccaaaugccaaccccaaugcgaacccuaaugcaaacccaaaugccaaccccaaugcuaacccgaaugccaacccuaaugcaaaccccaacgcuaauccaaacgccaauccuaacgcgaaucccaacguggauccaaaugccaaccccaaugcaaacccuaaugcuaacccaaaugccaacccgaaugcuaaccccaacgccaauccuaacgcaaauccaaacgccaaucccaacgcuaauccuaacgcgaauccaaacgcaaaucccaacgccaauccgaacgcuaauccuaacgccaauccaaacgcaaaccccaaugccaacccuaaugcuaaccccaaugccaacccaggaggcggugggagcgaaccuagugacaaacauauuaaggaguacuugaauaaaauacagaacucccucaucaagcccggaucugcaaauaagccaaaagaugaacuggacuacgcgaacgauauugagaagaaaaucuguaagauggagaaaugcagcuga

SEQ ID NO: 167 - RNA, 978 nt, Artificial Sequence
  derived and/or modified CDS sequence (opt3) from Pf(3D7)__XP_001351122.1__HsALB_Pf-CSP(19-325)
augaagugggugaccuucaucagccugcucuuucuuuucuccucugccuacucacuguuucaggaguaucaaugcuacggcaguagcuccaacacaagagucuugaaugaauuaaacuaugacaaugcugggacuaaccuguacaaugagcuagaaaugaacuauuacggaaaacaggagaauugguauucucucaagaaaaacucgaggucacugggugaaaaugaugacggcaacaaugaggauaacgagaaacuucggaagcccaagcacaagaaacugaagcagccugcagacgggaauccagauccgaacgccaaucccaacguugacccuaacgcgaauccaaacguggaucccaaugcuaacccuaauguagacccaaacgccaaucccaacgcaaauccuaacgccaauccaaacgcuaauccgaacgcaaaucccaacgccaacccuaaugcuaacccaaaugccaaccccaaugcgaacccuaaugcaaacccaaaugccaaccccaaugcuaacccgaaugccaacccuaaugcaaaccccaacgcuaauccaaacgccaauccuaacgcgaaucccaacguggauccaaaugccaaccccaaugcaaacccuaaugcuaacccaaaugccaacccgaaugcuaaccccaacgccaauccuaacgcaaauccaaacgccaaucccaacgcuaauccuaacgcgaauccaaacgcaaaucccaacgccaauccgaacgcuaauccuaacgccaauccaaacgcaaaccccaaugccaacccuaaugcuaaccccaaugccaacccaaauaaaaacaaucagggaaacggccaaggucauaauaugccuaacgaccccaaucgcaacgucgaugaaaaugcaaacgcgaacagcgcugugaagaauaacaauaacgaggaaccaagugacaaacacauuaaggaguacuugaauaagauacagaacuga

SEQ ID NO: 168 - RNA, 1155 nt, Artificial Sequence
  derived and/or modified CDS sequence (opt3) from Pf(3D7)__XP_001351122.1__HsALB_Pf-CSP(19-384)
augaagugggugaccuucaucagccugcucuuucuuuucuccucugccuacucacuguuucaggaguaucaaugcuacggcaguagcuccaacacaagagucuugaaugaauuaaacuaugacaaugcugggacuaaccuguacaaugagcuagaaaugaacuauuacggaaaacaggagaauugguauucucucaagaaaaacucgaggucacugggugaaaaugaugacggcaacaaugaggauaacgagaaacuucggaagcccaagcacaagaaacugaagcagccugcagacgggaauccagauccgaacgccaaucccaacguugacccuaacgcgaauccaaacguggaucccaaugcuaacccuaauguagacccaaacgccaaucccaacgcaaauccuaacgccaauccaaacgcuaauccgaacgcaaaucccaacgccaacccuaaugcuaacccaaaugccaaccccaaugcgaacccuaaugcaaacccaaaugccaaccccaaugcuaacccgaaugccaacccuaaugcaaaccccaacgcuaauccaaacgccaauccuaacgcgaaucccaacguggauccaaaugccaaccccaaugcaaacccuaaugcuaacccaaaugccaacccgaaugcuaaccccaacgccaauccuaacgcaaauccaaacgccaaucccaacgcuaauccuaacgcgaauccaaacgcaaaucccaacgccaauccgaacgcuaauccuaacgccaauccaaacgcaaaccccaaugccaacccuaaugcuaaccccaaugccaacccaaauaaaaacaaucagggaaacggccaaggucauaauaugccuaacgaccccaaucgcaacgucgaugaaaaugcaaacgcgaacagcgcugugaagaauaacaauaacgaggaaccaagugacaaacacauuaaggaguacuugaauaagauacagaacucccucucuacggaguggagcccguguuccguuaccugcgggaauggaauccaggugcgaauuaaaccuggcucagccaacaagcccaaagaugaacuggacuacgcaaaugacaucgagaagaaaauuuguaagauggaaaaaugcaguagcgucuucaacgugguaaauucuuccuga

SEQ ID NO: 169 - RNA, 1293 nt, Artificial Sequence
  derived and/or modified CDS sequence (opt3) from Pf(3D7)__XP_001351122.1__HsALB_Pf-CSP(19-384)_TM domain HA
augaagugggugaccuucaucagccugcucuuucuuuucuccucugccuacucacuguuucaggaguaucaaugcuacggcaguagcuccaacacaagagucuugaaugaauuaaacuaugacaaugcugggacuaaccuguacaaugagcuagaaaugaacuauuacggaaaacaggagaauugguauucucucaagaaaaacucgaggucacugggugaaaaugaugacggcaacaaugaggauaacgagaaacuucggaagcccaagcacaagaaacugaagcagccugcagacgggaauccagauccgaacgccaaucccaacguugacccuaacgcgaauccaaacguggaucccaaugcuaacccuaauguagacccaaacgccaaucccaacgcaaauccuaacgccaauccaaacgcuaauccgaacgcaaaucccaacgccaacccuaaugcuaacccaaaugccaaccccaaugcgaacccuaaugcaaacccaaaugccaaccccaaugcuaacccgaaugccaacccuaaugcaaaccccaacgcuaauccaaacgccaauccuaacgcgaaucccaacguggauccaaaugccaaccccaaugcaaacccuaaugcuaacccaaaugccaacccgaaugcuaaccccaacgccaauccuaacgcaaauccaaacgccaaucccaacgcuaauccuaacgcgaauccaaacgcaaaucccaacgccaauccgaacgcuaauccuaacgccaauccaaacgcaaaccccaaugccaacccuaaugcuaaccccaaugccaacccaaauaaaaacaaucagggaaacggccaaggucauaauaugccuaacgaccccaaucgcaacgucgaugaaaaugcaaacgcgaacagcgcugugaagaauaacaauaacgaggaaccaagugacaaacacauuaaggaguacuugaauaagauacagaacucccucucuacggaguggagcccguguuccguuaccugcgggaauggaauccaggugcgaauuaaaccuggcucagccaacaagcccaaagaugaacuggacuacgcaaaugacaucgagaagaaaauuuguaagauggaaaaaugcaguagcgucuucaacgugguaaauucuuccaagcuggagucaacacguaucuaucagauacucgccaucuacagcacuguugcuaguucuuuagugcuggucgugucccuuggcgccauuagcuuuuggauguguucgaacgggucuuugcaaugcagaaucuguauuuga

SEQ ID NO: 170 - RNA, 1005 nt, Artificial Sequence
  derived and/or modified CDS sequence (opt3) from Pf(3D7)__XP_001351122.1__HsALB_Pf-CSP(82-397)
augaagugggugaccuucaucagccugcucuuucuuuucuccucugccuacucagacaacgagaaacugagaaagcccaaacacaagaaauugaagcagccugcugauggcaauccagacccgaacgcaaaucccaacgucgauccuaaugccaacccaaauguugaccccaacgcgaauccuaacguggauccaaaugcuaaccccaaugccaacccuaaugcaaacccaaacgccaauccgaacgcuaaucccaacgcaaauccuaacgccaauccaaacgcuaaucccaacgccaauccuaacgcgaauccaaacgcaaaucccaacgccaacccgaaugcuaacccuaaugccaaccccaaugcaaacccaaaugcuaacccuaaugccaaccccaauguagacccaaacgcgaaucccaacgccaauccuaacgcaaacccaaaugcuaacccgaaugccaaccccaaugcuaacccuaaugccaacccaaaugcaaaccccaaugccaacccuaaugcuaacccaaaugcgaaccccaacgcaaauccgaacgccaauccuaacgcuaauccaaacgccaaucccaacgcaaauccuaacgccaaucccaacgcuaauccaaacaagaauaaccaggggaauggacagggucauaacaugccuaacgaucccaauaggaacguggacgaaaaugccaacgcaaauagugcggucaaaaacaauaacaaugaggaaccaagcgauaagcacauuaaagaguauuuaaacaagauacaaaauucccugucuacagaauggucgccgugcucagugacuuguggcaacgggauccagguucggauuaaaccuggaagcgcuaauaagcccaaggacgagcuagauuacgccaacgacaucgagaaaaagauuugcaaaauggaaaaguguaguuccguguuuaaugucgugaacucuagcaucggccucauaaugguacuguccuuccuuuuucugaacuga

SEQ ID NO: 171 - RNA, 357 nt, Artificial Sequence
  derived and/or modified CDS sequence (opt3) from Pf(3D7)__XP_001351122.1__HsALB_Pf-CSP(93-192)
augaagugggugaccuucaucagccugcucuuucuuuucuccucugccuacucaaaacugaagcagcccgcugacggcaacccugauccaaaugcaaacccgaaugucgaccccaacgccaauccuaacguugauccaaaugcgaaccccaauguggacccuaacgcuaauccaaacgccaaucccaacgcaaauccuaacgccaacccaaaugcuaacccgaaugcaaaccccaaugccaacccuaaugcuaacccaaaugccaaccccaaugcgaacccuaaugcaaacccaaaugccaaccccaacgcuaauccgaacgccaauccuaacgcaaaucccaacgcuaauccauga

SEQ ID NO: 172 - RNA, 597 nt, Artificial Sequence
  derived and/or modified CDS sequence (opt3) from Pf(3D7)__XP_001351122.1__HsALB_Pf-CSP(93-272)
augaagugggugaccuucaucagccugcucuuucuuuucuccucugccuacucaaaacugaagcagcccgcugacggcaacccugauccaaaugcaaacccgaaugucgaccccaacgccaauccuaacguugauccaaaugcgaaccccaauguggacccuaacgcuaauccaaacgccaaucccaacgcaaauccuaacgccaacccaaaugcuaacccgaaugcaaaccccaaugccaacccuaaugcuaacccaaaugccaaccccaaugcgaacccuaaugcaaacccaaaugccaaccccaacgcuaauccgaacgccaauccuaacgcaaaucccaacgcuaauccaaacgccaauccuaacguagaucccaaugcgaacccaaaugccaaccccaaugcaaacccuaacgcuaauccaaacgccaauccgaacgcuaaucccaacgccaauccuaacgcaaauccaaacgccaaucccaacgcuaauccuaacgcgaauccaaacgcaaaccccaaugccaacccgaaugcuaacccuaaugccaacccaaaugcaaaccccaaugccaacccuaaugcuaaccccuga

SEQ ID NO: 173 - RNA, 972 nt, Artificial Sequence
  derived and/or modified CDS sequence (opt3) from Pf(3D7)__XP_001351122.1__HsALB_Pf-CSP(93-397)
augaagugggugaccuucaucagccugcucuuucuuuucuccucugccuacucaaaacugaagcagcccgcugacggcaacccugauccaaaugcaaacccgaaugucgaccccaacgccaauccuaacguugauccaaaugcgaaccccaauguggacccuaacgcuaauccaaacgccaaucccaacgcaaauccuaacgccaacccaaaugcuaacccgaaugcaaaccccaaugccaacccuaaugcuaacccaaaugccaaccccaaugcgaacccuaaugcaaacccaaaugccaaccccaacgcuaauccgaacgccaauccuaacgcaaaucccaacgcuaauccaaacgccaauccuaacguagaucccaaugcgaacccaaaugccaaccccaaugcaaacccuaacgcuaauccaaacgccaauccgaacgcuaaucccaacgccaauccuaacgcaaauccaaacgccaaucccaacgcuaauccuaacgcgaauccaaacgcaaaccccaaugccaacccgaaugcuaacccuaaugccaacccaaaugcaaaccccaaugccaacccuaaugcuaaccccaauaaaaacaaucaagggaacggacagggucacaauaugccaaacgacccuaacagaaauguggaugagaacgccaaugcaaacagugcggucaagaauaacaauaacgaggaacccagcgacaaacauauuaaggaauauuugaauaagauacagaacuccuuaucuacagaguggucgccaugcucagugacuuguggcaaugggauccagguuaggauuaaaccgggaagcgcuaacaagccuaaagaugaacuggacuacgccaaugauaucgagaagaaaauuugcaagauggagaaguguaguuccguguuuaacgucguaaauucuagcaucggccuaauaauggugcucuccuuccuguuucuuaacuga

SEQ ID NO: 174 - RNA, 342 nt, Artificial Sequence
  derived and/or modified CDS sequence (opt3) from Pf(3D7)__XP_001351122.1__HsALB_Pf-CSP(98-192)
augaagugggugaccuucaucagccugcucuuucuuuucuccucugccuacucagcugacggcaaccccgauccuaaugcaaacccaaaugucgacccgaacgccaaucccaacguugauccuaaugcgaacccaaauguggaccccaacgcuaauccuaacgccaauccaaacgcaaaucccaacgccaacccuaaugcuaacccaaaugcaaacccgaaugccaaccccaaugcuaacccuaaugccaacccaaaugcgaaccccaaugcaaacccuaaugccaacccaaacgcuaaucccaacgccaauccgaacgcaaauccuaacgcuaaucccuga

SEQ ID NO: 175 - RNA, 582 nt, Artificial Sequence
  derived and/or modified CDS sequence (opt3) from Pf(3D7)__XP_001351122.1__HsALB_Pf-CSP(98-272)
augaagugggugaccuucaucagccugcucuuucuuuucuccucugccuacucagcugacggcaaccccgauccuaaugcaaacccaaaugucgacccgaacgccaaucccaacguugauccuaaugcgaacccaaauguggaccccaacgcuaauccuaacgccaauccaaacgcaaaucccaacgccaacccuaaugcuaacccaaaugcaaacccgaaugccaaccccaaugcuaacccuaaugccaacccaaaugcgaaccccaaugcaaacccuaaugccaacccaaacgcuaaucccaacgccaauccgaacgcaaauccuaacgcuaaucccaacgccaauccaaacguagauccuaaugcgaaccccaaugccaacccaaaugcaaaccccaacgcuaauccuaacgccaauccaaacgcuaauccgaacgccaaucccaacgcaaauccuaacgccaauccaaacgcuaaucccaacgcgaauccuaacgcaaacccaaaugccaaccccaaugcuaacccgaaugccaacccuaaugcaaacccaaaugccaaccccaaugcuaacccuuga

SEQ ID NO: 176 - RNA, 888 nt, Artificial Sequence
  derived and/or modified CDS sequence (opt3) from Pf(3D7)__XP_001351122.1__HsALB_Pf-CSP(98-374)
augaagugggugaccuucaucagccugcucuuucuuuucuccucugccuacucagcugacggcaaccccgauccuaaugcaaacccaaaugucgacccgaacgccaaucccaacguugauccuaaugcgaacccaaauguggaccccaacgcuaauccuaacgccaauccaaacgcaaaucccaacgccaacccuaaugcuaacccaaaugcaaacccgaaugccaaccccaaugcuaacccuaaugccaacccaaaugcgaaccccaaugcaaacccuaaugccaacccaaacgcuaaucccaacgccaauccgaacgcaaauccuaacgcuaaucccaacgccaauccaaacguagauccuaaugcgaaccccaaugccaacccaaaugcaaaccccaacgcuaauccuaacgccaauccaaacgcuaauccgaacgccaaucccaacgcaaauccuaacgccaauccaaacgcuaaucccaacgcgaauccuaacgcaaacccaaaugccaaccccaaugcuaacccgaaugccaacccuaaugcaaacccaaaugccaaccccaaugcuaacccuaauaaaaacaaucaggggaacggacaaggucacaauaugcccaacgacccaaacagaaauguggaugagaacgccaaugcaaacagugcggucaagaauaacaauaacgaggaaccuagcgacaaacauauuaaggaauaucugaauaaaauacagaacuccuugucuacagaguggucgcccugcucagugacuuguggcaaugggauccagguuaggauuaagccaggaagcgcuaacaagccgaaagaugaauuagacuacgccaaugauaucgagaagaaaauuugcaagauggagaaauguuga

SEQ ID NO: 177 - RNA, 957 nt, Artificial Sequence
  derived and/or modified CDS sequence (opt3) from Pf(3D7)__XP_001351122.1__HsALB_Pf-CSP(98-397)
augaagugggugaccuucaucagccugcucuuucuuuucuccucugccuacucagcugacggcaaccccgauccuaaugcaaacccaaaugucgacccgaacgccaaucccaacguugauccuaaugcgaacccaaauguggaccccaacgcuaauccuaacgccaauccaaacgcaaaucccaacgccaacccuaaugcuaacccaaaugcaaacccgaaugccaaccccaaugcuaacccuaaugccaacccaaaugcgaaccccaaugcaaacccuaaugccaacccaaacgcuaaucccaacgccaauccgaacgcaaauccuaacgcuaaucccaacgccaauccaaacguagauccuaaugcgaaccccaaugccaacccaaaugcaaaccccaacgcuaauccuaacgccaauccaaacgcuaauccgaacgccaaucccaacgcaaauccuaacgccaauccaaacgcuaaucccaacgcgaauccuaacgcaaacccaaaugccaaccccaaugcuaacccgaaugccaacccuaaugcaaacccaaaugccaaccccaaugcuaacccuaauaaaaacaaucaggggaacggacaaggucacaauaugcccaacgacccaaacagaaauguggaugagaacgccaaugcaaacagugcggucaagaauaacaauaacgaggaaccuagcgacaaacauauuaaggaauaucugaauaaaauacagaacuccuugucuacagaguggucgcccugcucagugacuuguggcaaugggauccagguuaggauuaagccaggaagcgcuaacaagccgaaagaugaauuagacuacgccaaugauaucgagaagaaaauuugcaagauggagaaauguaguuccguguuuaacgucguaaauucuagcaucggccugauaauggugcuauccuuccucuuucugaacuga

SEQ ID NO: 178 - RNA, 1284 nt, Artificial Sequence
  derived and/or modified CDS sequence (opt3) from Pf(3D7)__XP_001351122.1__HsALB_Pf-CSP(199-377)_L(PVTN)_HBsAg
augaagugggugaccuucaucagccugcucuuucuuuucuccucugccuacucagaccccaacgcuaauccuaacgcaaauccaaacgccaauccgaacgcgaaucccaacgcuaauccuaacgccaauccaaacgcaaaucccaacgccaauccuaacgcuaacccaaaugcaaaccccaaugccaacccuaaugcuaacccaaaugccaacccgaaugcgaaccccaaugcaaacccuaaugccaacccaaaugcuaaccccaacgccaauccuaacaaaaauaaccagggcaaugggcaaggacacaacaugccaaaugaucccaacagaaaugucgacgagaacgcaaaugcuaacagugccguuaagaauaacaauaacgaggaaccgagcgauaaacauauuaaggaauaucugaacaaaauacaaaauuccuugucuacagaguggucgccuugcucagugacuugugguaacggcauccagguaaggauuaagcccgggagcgcgaauaagccaaaagacgaauuagauuacgccaacgacaucgagaagaaaauuugcaagauggagaaauguaguuccgugccugucacgaauauggaaaacaucaccucuggauuucugggcccccuacucgugcugcaggcagguuucuuucuucugacacggauauugacuaucccacagagccucgauuccugguggaccucacugaauuuccucgggggaagucccguuugccugggccagaacagccagucuccuacauccaaucacucaccaaccagcuguccgcccauuugcccuggcuaucgcuggauguguuuacgacguuuuaucauuuuccuguuuauccuuuugcugugccuaauauuccuccuggugcuucuggacuaccaggggauguugccagucuguccccucauuccuggaaguacuacaaccaacacggguccaugcaagacuuguaccacacccgcucaaggcaauucuauguuuccguccugcugcuguacuaagccuaccgaugggaacugcacauguaucccaauucccagcucgugggccuucgcuaaauaucugugggagugggccucugugagauuuuccugguuaucacugcucguaccuuucguucagugguucgugggacuuagucccaccgucuggcugagcgcaaucuggaugaugugguacuggggcccauccuuguauucuaucgugagcccuuuuauuccccuacugccaauauucuuuugccucuggguguacaucuga

SEQ ID NO: 179 - RNA, 1023 nt, Artificial Sequence
  derived and/or modified CDS sequence (opt3) from Pb(ANKA)__XP_022712148.1__Pb-CSP
augaagaaaugcaccauccugguggucgccagccuccuucugguuaacuccuuguuacccggcuacgggcagaauaagucuauucaagcucagagaaaccugaaugagcuauguuauaacgaaggaaaugacaacaaacucuaccacgugcuuaauucaaagaacgguaaaauauauaauaggaacacaguaaaucggcugcuggcagaugccccugagggcaagaagaacgaaaagaaaaaugagaaaaucgaacgcaacaauaaguugaaacagccaccgcccccuccaaaccccaacgacccuccacccccuaauccaaacgauccgcccccuccaaaucccaacgacccuccacccccgaauccuaacgaucccccaccucccaaugcgaacgacccacccccuccaaaugcuaacgauccggcacccccuaaugccaacgacccagcucccccuaaugccaacgauccagcacccccgaaugccaacgacccugcuccacccaacgccaaugauccucccccaccuaaccccaaugacccagcgccgccuaacgcaaaugaucccccacccccuaacccaaaugaccccgccccuccgcaggggaacaauaacccacaaccccagccucgaccacagccccagccucaaccgcagccccagccacagccucaaccccagccacagccucguccccaaccacagccgcagccuggaggcaauaacaauaacaagaauaacaacaaugacgauaguuacauucccagcgcugagaagauccucgaguucgugaaacagauuagagacuccaucacugaagaguggucucaaugcaacgucacgugugguucggggauaagggugcggaagcgcaaaggaucaaauaagaaagccgaagaucugacccuggaggacaucgauacagagauuugcaagauggacaaauguagcaguaucuuuaacauuguuuccaauucucucggcuucgugaucuuacugguccuuguguuuuucaacuga

SEQ ID NO: 180 - RNA, 1188 nt, Artificial Sequence
  derived and/or modified CDS sequence (opt3) from Pb(ANKA)__XP_022712148.1__Pb-CSP_L(G4SG4)_TM domain HA
augaagaaaugcaccauccugguggucgccagccuccuucugguuaacuccuuguuacccggcuacgggcagaauaagucuauucaagcucagagaaaccugaaugagcuauguuauaacgaaggaaaugacaacaaacucuaccacgugcuuaauucaaagaacgguaaaauauauaauaggaacacaguaaaucggcugcuggcagaugccccugagggcaagaagaacgaaaagaaaaaugagaaaaucgaacgcaacaauaaguugaaacagccaccgcccccuccaaaccccaacgacccuccacccccuaauccaaacgauccgcccccuccaaaucccaacgacccuccacccccgaauccuaacgaucccccaccucccaaugcgaacgacccacccccuccaaaugcuaacgauccggcacccccuaaugccaacgacccagcucccccuaaugccaacgauccagcacccccgaaugccaacgacccugcuccacccaacgccaaugauccucccccaccuaaccccaaugacccagcgccgccuaacgcaaaugaucccccacccccuaacccaaaugaccccgccccuccgcaggggaacaauaacccacaaccccagccucgaccacagccccagccucaaccgcagccccagccacagccucaaccccagccacagccucguccccaaccacagccgcagccuggaggcaauaacaauaacaagaauaacaacaaugacgauaguuacauucccagcgcugagaagauccucgaguucgugaaacagauuagagacuccaucacugaagaguggucucaaugcaacgucacgugugguucggggauaagggugcggaagcgcaaaggaucaaauaagaaagccgaagaucugacccuggaggacaucgauacagagauuugcaagauggacaaauguagcaguaucuuuaacauuguuuccaauucucucggcuucgugaucuuacugguccuuguguuuuucaacggcgggggagguagcggcgggggaggcaaguuggaauccacuagaauauaucagauucuggcaaucuacucaaccguagcuaguagccuaguucucguggucucucugggugccauuuccuuuuggaugugcucaaaugggagccuucaguguaggaucugcaucuga

SEQ ID NO: 181 - RNA, 1008 nt, Artificial Sequence
  derived and/or modified CDS sequence (opt3) from Pb(ANKA)__XP_022712148.1__HsALB_Pb-CSP(24-340)
augaagugggugaccuucaucagccugcucuuucuuuucuccucugccuacucacagaacaaaaguauucaagcucagagaaaucugaacgaguugugcuauaaugaaggcaacgacaauaaguuauaccacguccugaacagcaaaaaugggaagauauauaacaggaauacaguuaaccggcuacucgcagaugcccccgaggguaaaaagaaugaaaagaaaaacgagaagaucgaacgcaauaacaaacugaagcagccuccaccgcccccuaauccaaacgaucccccuccacccaacccuaaugacccaccgcccccuaacccaaaugaucccccuccacccaacccgaaugacccucccccaccuaacgcgaaugaucccccacccccuaacgcuaaugacccagccccgcccaacgcaaaugacccugccccacccaacgcuaaugauccugcaccacccaacgccaaugacccggcuccuccaaacgccaacgaucccccucccccaaauccuaacgaccccgcgccaccgaaugcaaacgauccucccccacccaauccuaacgacccagcucccccucagggaaauaacaauccgcaaccacagccccgaccucagccacagccccaaccucagccgcagccccagccacaaccucagccccagccacguccucaaccccagccacagccgggcgggaacaauaacaauaaaaacaauaacaacgacgauuccuacauuccuucugccgagaagauccuugaguuugugaagcagauuagagacucgaucacugaagaguggucacaauguaauguaacgugcggaagcggcauaagggugcggaaacgcaaggguaguaacaaaaaggccgaagaucugaccuuggaggacaucgauacagagauuuguaaaauggacaagugcuccucuaucuucaauauugucagcaacucccucggguuugugauccugcugguucucguguucuuuaauuga

SEQ ID NO: 182 - RNA, 1026 nt, Artificial Sequence
  derived and/or modified CDS sequence (opt3) from Pb(ANKA)__XP_022712148.1__HsIns-iso1_Pb-CSP(24-340)
auggcccuguggaugagacuccuuccccuguuggcuuuacuggcacuauggggcccugacccagccgcggcucagaacaagagcauccaagcccagaggaaucucaacgagcugugcuacaaugaagggaacgauaauaaacuuuaucacguucugaacuccaagaauggaaaaauuuacaaccggaauaccgucaaccgcuugcucgcagacgccccggaggguaagaaaaaugaaaagaagaacgagaaaauagaacgaaauaacaagcugaaacagcccccuccacccccuaauccaaacgaucccccuccaccgaaccccaaugacccuccacccccuaacccaaaugaucccccgccucccaacccaaaugacccucccccacccaacgcuaaugauccuccaccgcccaacgcaaaugacccugccccacccaacgcuaaugauccugccccacccaacgcgaaugacccggcaccuccaaacgccaaugaucccgcuccucccaacgccaacgacccaccucccccaaauccgaacgauccugcacccccaaaugcuaacgaucccccuccacccaauccuaacgacccggccccaccccagggcaauaacaauccucaaccacagccccguccucagccgcagccccaaccacagccucagccccagccacaaccucagccccagccaagaccgcaaccucagccccagccagggggaaacaauaacaauaagaacaauaacaacgacgacucuuauauccccucagcggagaaaauucuggaguucguuaagcagaucagggauaguauuacagaagaguggagccaauguaaugugacuugcggcuccgguauccggguacgcaagagaaaagggucuaacaagaaagccgaagaccucacguuagaggauauagacaccgagaucuguaagauggauaaaugcucgucaauuuuuaauaucgugagcaacagucugggauucgucauucuuuuggugcugguguuuuucaauuga

SEQ ID NO: 183 - RNA, 1005 nt, Artificial Sequence
  derived and/or modified CDS sequence (opt3) from Pb(ANKA)__XP_022712148.1__HsSPARC_Pb-CSP(24-340)
augagagccuggaucuucuuucugcucugccuugcuggcagggcacuggcccagaacaagagcauucaagcgcagcggaauuugaacgaguuauguuacaaugaagggaacgacaauaaacuguaucacguucuaaacuccaagaauggaaaaauauacaaccgcaauaccgucaaccgacuccuggcugaugcccccgaggguaagaaaaaugaaaagaagaacgagaaaaucgaacguaauaacaaacuuaagcagccuccaccgcccccuaauccaaacgacccgccuccacccaacccuaaugauccaccgcccccuaacccaaaugaucccccuccacccaacccgaaugacccucccccaccuaacgcaaaugaucccccacccccuaacgccaaugacccagcuccgcccaacgcaaaugacccugccccacccaacgcuaaugauccugccccacccaacgcgaaugacccggcaccuccaaacgccaacgaucccccucccccaaauccuaacgaccccgcuccaccgaaugccaacgauccucccccacccaauccuaacgacccagcacccccucagggcaauaacaauccgcaaccacagcccagaccucagccacagccccaaccucagccgcagccccagccacaaccucagccccagccaaggccucaaccccagccacagcccgggggaaacaauaacaauaagaacaauaacaacgacgauucuuauauuccuucagcugagaaaauccuggaguucguuaagcagauucgggacaguaucacagaagaguggagccaaugcaaugugacuuguggcuccgguauacgcguaagaaagaggaaagggucuaacaagaaagccgaagauuugacgcucgaggacaucgauaccgagauuugcaagauggacaaauguucgucaaucuuuaauauugugagcaacagucugggauucgucauccugcucguguuaguguuuuucaauuga

SEQ ID NO: 184 - RNA, 1008 nt, Artificial Sequence
  derived and/or modified CDS sequence (opt3) from Pb(ANKA)__XP_022712148.1__IgE_Pb-CSP(24-340)
auggacuggaccuggauccuguuccucguggccgcugcaacaagaguccacagccagaacaaguccauucaagcccagaggaaucuuaacgagcugugcuacaaugaaggcaacgauaauaaauuguaucauguuuuaaacucuaagaaugggaaaauauacaaccggaauacugugaaccgccugcuagcggacgcucccgagggaaagaaaaaugaaaagaagaacgagaaaaucgaacgaaauaacaagcucaaacagccuccaccgcccccuaauccaaacgaucccccuccacccaacccuaaugacccaccgcccccuaacccaaaugaucccccuccacccaacccgaaugacccucccccaccuaacgccaaugaucccccacccccuaacgcaaaugacccagccccgcccaacgcuaaugauccugcaccacccaacgccaaugacccugcuccacccaacgccaaugauccggcgccuccaaacgcaaacgaucccccucccccaaauccuaacgaccccgccccaccgaaugcuaacgacccucccccacccaauccuaacgacccagcacccccucaggguaauaacaauccgcaaccacagccccguccucagccacagccccaaccucagccgcagccccagccacaaccucagccccagccaagaccucaaccccagccacagccgggcgggaacaauaacaauaagaacaauaacaacgaugacucauauauuccuagugccgagaaaauccuggaguuuguaaagcagauuagggauagcaucacggaagaguggucccaauguaaugugaccugcggaucuggcauacggguccgcaagagaaaagguucgaacaagaaagcugaagaccuuacacuggaggauaucgacacugagauuuguaagauggauaaaugcucaagcaucuucaauauugugaguaacuccuugggguuuguuauccuccuggugcuggucuucuuuaauuga

SEQ ID NO: 185 - RNA, 1194 nt, Artificial Sequence
  derived and/or modified CDS sequence (opt4) from Pf(3D7)__XP_001351122.1__Pf-CSP
augaugagaaagcuggccauccugagcgugagcagcuuccuguucguggaggcccuguuccaggaguaccagugcuacggcagcagcagcaacaccagagugcugaacgagcugaacuacgacaacgccggcaccaaccuguacaacgagcuggagaugaacuacuacggcaagcaggagaacugguacagccugaagaagaacagcagaagccugggcgagaacgacgacggcaacaacgaggacaacgagaagcugagaaagcccaagcacaagaagcugaagcagcccgccgacggcaaccccgaccccaacgccaaccccaacguggaccccaacgccaaccccaacguggaccccaacgccaaccccaacguggaccccaacgccaaccccaacgccaaccccaacgccaaccccaacgccaaccccaacgccaaccccaacgccaaccccaacgccaaccccaacgccaaccccaacgccaaccccaacgccaaccccaacgccaaccccaacgccaaccccaacgccaaccccaacgccaaccccaacgccaaccccaacgccaaccccaacgccaaccccaacguggaccccaacgccaaccccaacgccaaccccaacgccaaccccaacgccaaccccaacgccaaccccaacgccaaccccaacgccaaccccaacgccaaccccaacgccaaccccaacgccaaccccaacgccaaccccaacgccaaccccaacgccaaccccaacgccaaccccaacgccaaccccaacgccaaccccaacgccaaccccaacgccaaccccaacaagaacaaccagggcaacggccagggccacaacaugcccaacgaccccaacagaaacguggacgagaacgccaacgccaacagcgccgugaagaacaacaacaacgaggagcccagcgacaagcacaucaaggaguaccugaacaagauccagaacagccugagcaccgaguggagccccugcagcgugaccugcggcaacggcauccaggugagaaucaagcccggcagcgccaacaagcccaaggacgagcuggacuacgccaacgacaucgagaagaagaucugcaagauggagaagugcagcagcguguucaacguggugaacagcagcaucggccugaucauggugcugagcuuccuguuccugaacuga

SEQ ID NO: 186 - RNA, 1122 nt, Artificial Sequence
  derived and/or modified CDS sequence (opt4) from Pf(3D7)__XP_001351122.1__Pf-CSP(1-374)
augaugagaaagcuggccauccugagcgugagcagcuuccuguucguggaggcccuguuccaggaguaccagugcuacggcagcagcagcaacaccagagugcugaacgagcugaacuacgacaacgccggcaccaaccuguacaacgagcuggagaugaacuacuacggcaagcaggagaacugguacagccugaagaagaacagcagaagccugggcgagaacgacgacggcaacaacgaggacaacgagaagcugagaaagcccaagcacaagaagcugaagcagcccgccgacggcaaccccgaccccaacgccaaccccaacguggaccccaacgccaaccccaacguggaccccaacgccaaccccaacguggaccccaacgccaaccccaacgccaaccccaacgccaaccccaacgccaaccccaacgccaaccccaacgccaaccccaacgccaaccccaacgccaaccccaacgccaaccccaacgccaaccccaacgccaaccccaacgccaaccccaacgccaaccccaacgccaaccccaacgccaaccccaacgccaaccccaacgccaaccccaacguggaccccaacgccaaccccaacgccaaccccaacgccaaccccaacgccaaccccaacgccaaccccaacgccaaccccaacgccaaccccaacgccaaccccaacgccaaccccaacgccaaccccaacgccaaccccaacgccaaccccaacgccaaccccaacgccaaccccaacgccaaccccaacgccaaccccaacgccaaccccaacgccaaccccaacaagaacaaccagggcaacggccagggccacaacaugcccaacgaccccaacagaaacguggacgagaacgccaacgccaacagcgccgugaagaacaacaacaacgaggagcccagcgacaagcacaucaaggaguaccugaacaagauccagaacagccugagcaccgaguggagccccugcagcgugaccugcggcaacggcauccaggugagaaucaagcccggcagcgccaacaagcccaaggacgagcuggacuacgccaacgacaucgagaagaagaucugcaagauggagaagugc

SEQ ID NO: 187 - RNA, 975 nt, Artificial Sequence
  derived and/or modified CDS sequence (opt4) from Pf(3D7)__XP_001351122.1__Pf-CSP(1-325)
augaugagaaagcuggccauccugagcgugagcagcuuccuguucguggaggcccuguuccaggaguaccagugcuacggcagcagcagcaacaccagagugcugaacgagcugaacuacgacaacgccggcaccaaccuguacaacgagcuggagaugaacuacuacggcaagcaggagaacugguacagccugaagaagaacagcagaagccugggcgagaacgacgacggcaacaacgaggacaacgagaagcugagaaagcccaagcacaagaagcugaagcagcccgccgacggcaaccccgaccccaacgccaaccccaacguggaccccaacgccaaccccaacguggaccccaacgccaaccccaacguggaccccaacgccaaccccaacgccaaccccaacgccaaccccaacgccaaccccaacgccaaccccaacgccaaccccaacgccaaccccaacgccaaccccaacgccaaccccaacgccaaccccaacgccaaccccaacgccaaccccaacgccaaccccaacgccaaccccaacgccaaccccaacgccaaccccaacgccaaccccaacguggaccccaacgccaaccccaacgccaaccccaacgccaaccccaacgccaaccccaacgccaaccccaacgccaaccccaacgccaaccccaacgccaaccccaacgccaaccccaacgccaaccccaacgccaaccccaacgccaaccccaacgccaaccccaacgccaaccccaacgccaaccccaacgccaaccccaacgccaaccccaacgccaaccccaacaagaacaaccagggcaacggccagggccacaacaugcccaacgaccccaacagaaacguggacgagaacgccaacgccaacagcgccgugaagaacaacaacaacgaggagcccagcgacaagcacaucaaggaguaccugaacaagauccagaac

SEQ ID NO: 188 - RNA, 1194 nt, Artificial Sequence
  derived and/or modified CDS sequence (opt4) from Pf(3D7)__XP_001351122.1__HsALB_Pf-CSP(19-397)
augaagugggugaccuucaucagccugcuguuccuguucagcagcgccuacagccuguuccaggaguaccagugcuacggcagcagcagcaacaccagagugcugaacgagcugaacuacgacaacgccggcaccaaccuguacaacgagcuggagaugaacuacuacggcaagcaggagaacugguacagccugaagaagaacagcagaagccugggcgagaacgacgacggcaacaacgaggacaacgagaagcugagaaagcccaagcacaagaagcugaagcagcccgccgacggcaaccccgaccccaacgccaaccccaacguggaccccaacgccaaccccaacguggaccccaacgccaaccccaacguggaccccaacgccaaccccaacgccaaccccaacgccaaccccaacgccaaccccaacgccaaccccaacgccaaccccaacgccaaccccaacgccaaccccaacgccaaccccaacgccaaccccaacgccaaccccaacgccaaccccaacgccaaccccaacgccaaccccaacgccaaccccaacgccaaccccaacgccaaccccaacguggaccccaacgccaaccccaacgccaaccccaacgccaaccccaacgccaaccccaacgccaaccccaacgccaaccccaacgccaaccccaacgccaaccccaacgccaaccccaacgccaaccccaacgccaaccccaacgccaaccccaacgccaaccccaacgccaaccccaacgccaaccccaacgccaaccccaacgccaaccccaacgccaaccccaacaagaacaaccagggcaacggccagggccacaacaugcccaacgaccccaacagaaacguggacgagaacgccaacgccaacagcgccgugaagaacaacaacaacgaggagcccagcgacaagcacaucaaggaguaccugaacaagauccagaacagccugagcaccgaguggagccccugcagcgugaccugcggcaacggcauccaggugagaaucaagcccggcagcgccaacaagcccaaggacgagcuggacuacgccaacgacaucgagaagaagaucugcaagauggagaagugcagcagcguguucaacguggugaacagcagcaucggccugaucauggugcugagcuuccuguuccugaacuga

SEQ ID NO: 189 - RNA, 1212 nt, Artificial Sequence
  derived and/or modified CDS sequence (opt4) from Pf(3D7)__XP_001351122.1__HsIns-iso1_Pf-CSP(19-397)
auggcccuguggaugagacugcugccccugcuggcccugcuggcccuguggggccccgaccccgccgccgcccuguuccaggaguaccagugcuacggcagcagcagcaacaccagagugcugaacgagcugaacuacgacaacgccggcaccaaccuguacaacgagcuggagaugaacuacuacggcaagcaggagaacugguacagccugaagaagaacagcagaagccugggcgagaacgacgacggcaacaacgaggacaacgagaagcugagaaagcccaagcacaagaagcugaagcagcccgccgacggcaaccccgaccccaacgccaaccccaacguggaccccaacgccaaccccaacguggaccccaacgccaaccccaacguggaccccaacgccaaccccaacgccaaccccaacgccaaccccaacgccaaccccaacgccaaccccaacgccaaccccaacgccaaccccaacgccaaccccaacgccaaccccaacgccaaccccaacgccaaccccaacgccaaccccaacgccaaccccaacgccaaccccaacgccaaccccaacgccaaccccaacgccaaccccaacguggaccccaacgccaaccccaacgccaaccccaacgccaaccccaacgccaaccccaacgccaaccccaacgccaaccccaacgccaaccccaacgccaaccccaacgccaaccccaacgccaaccccaacgccaaccccaacgccaaccccaacgccaaccccaacgccaaccccaacgccaaccccaacgccaaccccaacgccaaccccaacgccaaccccaacaagaacaaccagggcaacggccagggccacaacaugcccaacgaccccaacagaaacguggacgagaacgccaacgccaacagcgccgugaagaacaacaacaacgaggagcccagcgacaagcacaucaaggaguaccugaacaagauccagaacagccugagcaccgaguggagccccugcagcgugaccugcggcaacggcauccaggugagaaucaagcccggcagcgccaacaagcccaaggacgagcuggacuacgccaacgacaucgagaagaagaucugcaagauggagaagugcagcagcguguucaacguggugaacagcagcaucggccugaucauggugcugagcuuccuguuccugaacuga

SEQ ID NO: 190 - RNA, 1191 nt, Artificial Sequence
  derived and/or modified CDS sequence (opt4) from Pf(3D7)__XP_001351122.1__HsSPARC_Pf-CSP(19-397)
augagagccuggaucuucuuccugcugugccuggccggcagagcccuggcccuguuccaggaguaccagugcuacggcagcagcagcaacaccagagugcugaacgagcugaacuacgacaacgccggcaccaaccuguacaacgagcuggagaugaacuacuacggcaagcaggagaacugguacagccugaagaagaacagcagaagccugggcgagaacgacgacggcaacaacgaggacaacgagaagcugagaaagcccaagcacaagaagcugaagcagcccgccgacggcaaccccgaccccaacgccaaccccaacguggaccccaacgccaaccccaacguggaccccaacgccaaccccaacguggaccccaacgccaaccccaacgccaaccccaacgccaaccccaacgccaaccccaacgccaaccccaacgccaaccccaacgccaaccccaacgccaaccccaacgccaaccccaacgccaaccccaacgccaaccccaacgccaaccccaacgccaaccccaacgccaaccccaacgccaaccccaacgccaaccccaacgccaaccccaacguggaccccaacgccaaccccaacgccaaccccaacgccaaccccaacgccaaccccaacgccaaccccaacgccaaccccaacgccaaccccaacgccaaccccaacgccaaccccaacgccaaccccaacgccaaccccaacgccaaccccaacgccaaccccaacgccaaccccaacgccaaccccaacgccaaccccaacgccaaccccaacgccaaccccaacaagaacaaccagggcaacggccagggccacaacaugcccaacgaccccaacagaaacguggacgagaacgccaacgccaacagcgccgugaagaacaacaacaacgaggagcccagcgacaagcacaucaaggaguaccugaacaagauccagaacagccugagcaccgaguggagccccugcagcgugaccugcggcaacggcauccaggugagaaucaagcccggcagcgccaacaagcccaaggacgagcuggacuacgccaacgacaucgagaagaagaucugcaagauggagaagugcagcagcguguucaacguggugaacagcagcaucggccugaucauggugcugagcuuccuguuccugaacuga

SEQ ID NO: 191 - RNA, 1194 nt, Artificial Sequence
  derived and/or modified CDS sequence (opt4) from Pf(3D7)__XP_001351122.1__IgE_Pf-CSP(19-397)
auggacuggaccuggauccuguuccugguggccgccgccaccagagugcacagccuguuccaggaguaccagugcuacggcagcagcagcaacaccagagugcugaacgagcugaacuacgacaacgccggcaccaaccuguacaacgagcuggagaugaacuacuacggcaagcaggagaacugguacagccugaagaagaacagcagaagccugggcgagaacgacgacggcaacaacgaggacaacgagaagcugagaaagcccaagcacaagaagcugaagcagcccgccgacggcaaccccgaccccaacgccaaccccaacguggaccccaacgccaaccccaacguggaccccaacgccaaccccaacguggaccccaacgccaaccccaacgccaaccccaacgccaaccccaacgccaaccccaacgccaaccccaacgccaaccccaacgccaaccccaacgccaaccccaacgccaaccccaacgccaaccccaacgccaaccccaacgccaaccccaacgccaaccccaacgccaaccccaacgccaaccccaacgccaaccccaacgccaaccccaacguggaccccaacgccaaccccaacgccaaccccaacgccaaccccaacgccaaccccaacgccaaccccaacgccaaccccaacgccaaccccaacgccaaccccaacgccaaccccaacgccaaccccaacgccaaccccaacgccaaccccaacgccaaccccaacgccaaccccaacgccaaccccaacgccaaccccaacgccaaccccaacgccaaccccaacaagaacaaccagggcaacggccagggccacaacaugcccaacgaccccaacagaaacguggacgagaacgccaacgccaacagcgccgugaagaacaacaacaacgaggagcccagcgacaagcacaucaaggaguaccugaacaagauccagaacagccugagcaccgaguggagccccugcagcgugaccugcggcaacggcauccaggugagaaucaagcccggcagcgccaacaagcccaaggacgagcuggacuacgccaacgacaucgagaagaagaucugcaagauggagaagugcagcagcguguucaacguggugaacagcagcaucggccugaucauggugcugagcuuccuguuccugaacuga

SEQ ID NO: 192 - RNA, 1359 nt, Artificial Sequence
  derived and/or modified CDS sequence (opt4) from Pf(3D7)__XP_001351122.1__Pf-CSP_L(G4SG4)_TM domain HA
augaugagaaagcuggccauccugagcgugagcagcuuccuguucguggaggcccuguuccaggaguaccagugcuacggcagcagcagcaacaccagagugcugaacgagcugaacuacgacaacgccggcaccaaccuguacaacgagcuggagaugaacuacuacggcaagcaggagaacugguacagccugaagaagaacagcagaagccugggcgagaacgacgacggcaacaacgaggacaacgagaagcugagaaagcccaagcacaagaagcugaagcagcccgccgacggcaaccccgaccccaacgccaaccccaacguggaccccaacgccaaccccaacguggaccccaacgccaaccccaacguggaccccaacgccaaccccaacgccaaccccaacgccaaccccaacgccaaccccaacgccaaccccaacgccaaccccaacgccaaccccaacgccaaccccaacgccaaccccaacgccaaccccaacgccaaccccaacgccaaccccaacgccaaccccaacgccaaccccaacgccaaccccaacgccaaccccaacgccaaccccaacguggaccccaacgccaaccccaacgccaaccccaacgccaaccccaacgccaaccccaacgccaaccccaacgccaaccccaacgccaaccccaacgccaaccccaacgccaaccccaacgccaaccccaacgccaaccccaacgccaaccccaacgccaaccccaacgccaaccccaacgccaaccccaacgccaaccccaacgccaaccccaacgccaaccccaacaagaacaaccagggcaacggccagggccacaacaugcccaacgaccccaacagaaacguggacgagaacgccaacgccaacagcgccgugaagaacaacaacaacgaggagcccagcgacaagcacaucaaggaguaccugaacaagauccagaacagccugagcaccgaguggagccccugcagcgugaccugcggcaacggcauccaggugagaaucaagcccggcagcgccaacaagcccaaggacgagcuggacuacgccaacgacaucgagaagaagaucugcaagauggagaagugcagcagcguguucaacguggugaacagcagcaucggccugaucauggugcugagcuuccuguuccugaacggcggcggcggcagcggcggcggcggcaagcuggagagcaccagaaucuaccagauccuggccaucuacagcaccguggccagcagccuggugcugguggugagccugggcgccaucagcuucuggaugugcagcaacggcagccugcagugcagaaucugcaucuga

SEQ ID NO: 193 - RNA, 1233 nt, Artificial Sequence
  derived and/or modified CDS sequence (opt4) from Pf(3D7)__XP_001351122.1__Pf-CSP(199-377)_L(PVTN)_HBsAg
auggaccccaacgccaaccccaacgccaaccccaacgccaaccccaacgccaaccccaacgccaaccccaacgccaaccccaacgccaaccccaacgccaaccccaacgccaaccccaacgccaaccccaacgccaaccccaacgccaaccccaacgccaaccccaacgccaaccccaacgccaaccccaacgccaaccccaacgccaaccccaacgccaaccccaacaagaacaaccagggcaacggccagggccacaacaugcccaacgaccccaacagaaacguggacgagaacgccaacgccaacagcgccgugaagaacaacaacaacgaggagcccagcgacaagcacaucaaggaguaccugaacaagauccagaacagccugagcaccgaguggagccccugcagcgugaccugcggcaacggcauccaggugagaaucaagcccggcagcgccaacaagcccaaggacgagcuggacuacgccaacgacaucgagaagaagaucugcaagauggagaagugcagcagcgugcccgugaccaacauggagaacaucaccagcggcuuccugggcccccugcuggugcugcaggccggcuucuuccugcugaccagaauccugaccaucccccagagccuggacagcugguggaccagccugaacuuccugggcggcagccccgugugccugggccagaacagccagagccccaccagcaaccacagccccaccagcugcccccccaucugccccggcuacagauggaugugccugagaagauucaucaucuuccuguucauccugcugcugugccugaucuuccugcuggugcugcuggacuaccagggcaugcugcccgugugcccccugauccccggcagcaccaccaccaacaccggccccugcaagaccugcaccacccccgcccagggcaacagcauguuccccagcugcugcugcaccaagcccaccgacggcaacugcaccugcauccccauccccagcagcugggccuucgccaaguaccugugggagugggccagcgugagauucagcuggcugagccugcuggugcccuucgugcagugguucgugggccugagccccaccguguggcugagcgccaucuggaugaugugguacuggggccccagccuguacagcaucgugagccccuucaucccccugcugcccaucuucuucugccuguggguguacaucuga

SEQ ID NO: 194 - RNA, 1275 nt, Artificial Sequence
  derived and/or modified CDS sequence (opt4) from Pf(3D7)__XP_001351122.1__Pf-CSP(199-387)_L(PVTN)_HBsAg
augauggcccccgaccccaacgccaaccccaacgccaaccccaacgccaaccccaacgccaaccccaacgccaaccccaacgccaaccccaacgccaaccccaacgccaaccccaacgccaaccccaacgccaaccccaacgccaaccccaacgccaaccccaacgccaaccccaacgccaaccccaacgccaaccccaacgccaaccccaacgccaaccccaacgccaaccccaacaagaacaaccagggcaacggccagggccacaacaugcccaacgaccccaacagaaacguggacgagaacgccaacgccaacagcgccgugaagaacaacaacaacgaggagcccagcgacaagcacaucaaggaguaccugaacaagauccagaacagccugagcaccgaguggagccccugcagcgugaccugcggcaacggcauccaggugagaaucaagcccggcagcgccaacaagcccaaggacgagcuggacuacgccaacgacaucgagaagaagaucugcaagauggagaagugcagcagcguguucaacguggugaacagcagcaucggccugggccccgugaccaacauggagaacaucaccagcggcuuccugggcccccugcuggugcugcaggccggcuucuuccugcugaccagaauccugaccaucccccagagccuggacagcugguggaccagccugaacuuccugggcggcagccccgugugccugggccagaacagccagagccccaccagcaaccacagccccaccagcugcccccccaucugccccggcuacagauggaugugccugagaagauucaucaucuuccuguucauccugcugcugugccugaucuuccugcuggugcugcuggacuaccagggcaugcugcccgugugcccccugauccccggcagcaccaccaccaacaccggccccugcaagaccugcaccacccccgcccagggcaacagcauguuccccagcugcugcugcaccaagcccaccgacggcaacugcaccugcauccccauccccagcagcugggccuucgccaaguaccugugggagugggccagcgugagauucagcuggcugagccugcuggugcccuucgugcagugguucgugggccugagccccaccguguggcugagcgccaucuggaugaugugguacuggggccccagccuguacagcaucgugagccccuucaucccccugcugcccaucuucuucugccuguggguguacaucuga

SEQ ID NO: 195 - RNA, 459 nt, Artificial Sequence
  derived and/or modified CDS sequence (opt4) from Pf(3D7)__XP_001351122.1__HsALB_Pf-CSP(19-152)
augaagugggugaccuucaucagccugcuguuccuguucagcagcgccuacagccuguuccaggaguaccagugcuacggcagcagcagcaacaccagagugcugaacgagcugaacuacgacaacgccggcaccaaccuguacaacgagcuggagaugaacuacuacggcaagcaggagaacugguacagccugaagaagaacagcagaagccugggcgagaacgacgacggcaacaacgaggacaacgagaagcugagaaagcccaagcacaagaagcugaagcagcccgccgacggcaaccccgaccccaacgccaaccccaacguggaccccaacgccaaccccaacguggaccccaacgccaaccccaacguggaccccaacgccaaccccaacgccaaccccaacgccaaccccaacgccaaccccaacgccaaccccaacgccaaccccuga

SEQ ID NO: 196 - RNA, 579 nt, Artificial Sequence
  derived and/or modified CDS sequence (opt4) from Pf(3D7)__XP_001351122.1__HsALB_Pf-CSP(19-192)
augaagugggugaccuucaucagccugcuguuccuguucagcagcgccuacagccuguuccaggaguaccagugcuacggcagcagcagcaacaccagagugcugaacgagcugaacuacgacaacgccggcaccaaccuguacaacgagcuggagaugaacuacuacggcaagcaggagaacugguacagccugaagaagaacagcagaagccugggcgagaacgacgacggcaacaacgaggacaacgagaagcugagaaagcccaagcacaagaagcugaagcagcccgccgacggcaaccccgaccccaacgccaaccccaacguggaccccaacgccaaccccaacguggaccccaacgccaaccccaacguggaccccaacgccaaccccaacgccaaccccaacgccaaccccaacgccaaccccaacgccaaccccaacgccaaccccaacgccaaccccaacgccaaccccaacgccaaccccaacgccaaccccaacgccaaccccaacgccaaccccaacgccaaccccaacgccaaccccaacgccaaccccaacgccaaccccuga

SEQ ID NO: 197 - RNA, 819 nt, Artificial Sequence
  derived and/or modified CDS sequence (opt4) from Pf(3D7)__XP_001351122.1__HsALB_Pf-CSP(19-272)
augaagugggugaccuucaucagccugcuguuccuguucagcagcgccuacagccuguuccaggaguaccagugcuacggcagcagcagcaacaccagagugcugaacgagcugaacuacgacaacgccggcaccaaccuguacaacgagcuggagaugaacuacuacggcaagcaggagaacugguacagccugaagaagaacagcagaagccugggcgagaacgacgacggcaacaacgaggacaacgagaagcugagaaagcccaagcacaagaagcugaagcagcccgccgacggcaaccccgaccccaacgccaaccccaacguggaccccaacgccaaccccaacguggaccccaacgccaaccccaacguggaccccaacgccaaccccaacgccaaccccaacgccaaccccaacgccaaccccaacgccaaccccaacgccaaccccaacgccaaccccaacgccaaccccaacgccaaccccaacgccaaccccaacgccaaccccaacgccaaccccaacgccaaccccaacgccaaccccaacgccaaccccaacgccaaccccaacgccaaccccaacguggaccccaacgccaaccccaacgccaaccccaacgccaaccccaacgccaaccccaacgccaaccccaacgccaaccccaacgccaaccccaacgccaaccccaacgccaaccccaacgccaaccccaacgccaaccccaacgccaaccccaacgccaaccccaacgccaaccccaacgccaaccccaacgccaaccccaacgccaaccccaacgccaaccccuga

SEQ ID NO: 198 - RNA, 981 nt, Artificial Sequence
  derived and/or modified CDS sequence (opt4) from Pf(3D7)__XP_001351122.1__HsALB_Pf-CSP(19-272)_L(AAY)_Pf-CSP(310-3 27)_L(AAY)_Pf-CSP(346-375)
augaagugggugaccuucaucagccugcuguuccuguucagcagcgccuacagccuguuccaggaguaccagugcuacggcagcagcagcaacaccagagugcugaacgagcugaacuacgacaacgccggcaccaaccuguacaacgagcuggagaugaacuacuacggcaagcaggagaacugguacagccugaagaagaacagcagaagccugggcgagaacgacgacggcaacaacgaggacaacgagaagcugagaaagcccaagcacaagaagcugaagcagcccgccgacggcaaccccgaccccaacgccaaccccaacguggaccccaacgccaaccccaacguggaccccaacgccaaccccaacguggaccccaacgccaaccccaacgccaaccccaacgccaaccccaacgccaaccccaacgccaaccccaacgccaaccccaacgccaaccccaacgccaaccccaacgccaaccccaacgccaaccccaacgccaaccccaacgccaaccccaacgccaaccccaacgccaaccccaacgccaaccccaacgccaaccccaacgccaaccccaacguggaccccaacgccaaccccaacgccaaccccaacgccaaccccaacgccaaccccaacgccaaccccaacgccaaccccaacgccaaccccaacgccaaccccaacgccaaccccaacgccaaccccaacgccaaccccaacgccaaccccaacgccaaccccaacgccaaccccaacgccaaccccaacgccaaccccaacgccaaccccaacgccaaccccgccgccuacgagcccagcgacaagcacaucaaggaguaccugaacaagauccagaacagccuggccgccuacaucaagcccggcagcgccaacaagcccaaggacgagcuggacuacgccaacgacaucgagaagaagaucugcaagauggagaagugcagcuga

SEQ ID NO: 199 - RNA, 942 nt, Artificial Sequence
  derived and/or modified CDS sequence (opt4) from Pf(3D7)__XP_001351122.1__HsALB_Pf-CSP(19-272)_L(AAY)_Pf-CSP(346-3 65)_L(AAY)_P2
augaagugggugaccuucaucagccugcuguuccuguucagcagcgccuacagccuguuccaggaguaccagugcuacggcagcagcagcaacaccagagugcugaacgagcugaacuacgacaacgccggcaccaaccuguacaacgagcuggagaugaacuacuacggcaagcaggagaacugguacagccugaagaagaacagcagaagccugggcgagaacgacgacggcaacaacgaggacaacgagaagcugagaaagcccaagcacaagaagcugaagcagcccgccgacggcaaccccgaccccaacgccaaccccaacguggaccccaacgccaaccccaacguggaccccaacgccaaccccaacguggaccccaacgccaaccccaacgccaaccccaacgccaaccccaacgccaaccccaacgccaaccccaacgccaaccccaacgccaaccccaacgccaaccccaacgccaaccccaacgccaaccccaacgccaaccccaacgccaaccccaacgccaaccccaacgccaaccccaacgccaaccccaacgccaaccccaacgccaaccccaacguggaccccaacgccaaccccaacgccaaccccaacgccaaccccaacgccaaccccaacgccaaccccaacgccaaccccaacgccaaccccaacgccaaccccaacgccaaccccaacgccaaccccaacgccaaccccaacgccaaccccaacgccaaccccaacgccaaccccaacgccaaccccaacgccaaccccaacgccaaccccaacgccaaccccgccgccuacaucaagcccggcagcgccaacaagcccaaggacgagcuggacuacgccaacgacaucgaggccgccuaccaguacaucaaggccaacagcaaguucaucggcaucaccgagcuguga

SEQ ID NO: 200 - RNA, 936 nt, Artificial Sequence
  derived and/or modified CDS sequence (opt4) from Pf(3D7)__XP_001351122.1__HsALB_Pf-CSP(19-272)_L(AAY)_Pf-CSP(346-3 65)_L(AAY)_PADRE
augaagugggugaccuucaucagccugcuguuccuguucagcagcgccuacagccuguuccaggaguaccagugcuacggcagcagcagcaacaccagagugcugaacgagcugaacuacgacaacgccggcaccaaccuguacaacgagcuggagaugaacuacuacggcaagcaggagaacugguacagccugaagaagaacagcagaagccugggcgagaacgacgacggcaacaacgaggacaacgagaagcugagaaagcccaagcacaagaagcugaagcagcccgccgacggcaaccccgaccccaacgccaaccccaacguggaccccaacgccaaccccaacguggaccccaacgccaaccccaacguggaccccaacgccaaccccaacgccaaccccaacgccaaccccaacgccaaccccaacgccaaccccaacgccaaccccaacgccaaccccaacgccaaccccaacgccaaccccaacgccaaccccaacgccaaccccaacgccaaccccaacgccaaccccaacgccaaccccaacgccaaccccaacgccaaccccaacgccaaccccaacguggaccccaacgccaaccccaacgccaaccccaacgccaaccccaacgccaaccccaacgccaaccccaacgccaaccccaacgccaaccccaacgccaaccccaacgccaaccccaacgccaaccccaacgccaaccccaacgccaaccccaacgccaaccccaacgccaaccccaacgccaaccccaacgccaaccccaacgccaaccccaacgccaaccccgccgccuacaucaagcccggcagcgccaacaagcccaaggacgagcuggacuacgccaacgacaucgaggccgccuacgccaaguucguggccgccuggacccugaaggccgccgccuga

SEQ ID NO: 201 - RNA, 993 nt, Artificial Sequence
  derived and/or modified CDS sequence (opt4) from Pf(3D7)__XP_001351122.1__HsALB_Pf-CSP(19-272)_L(G4S)_Pf-CSP(310-3 27)_L(G4S)_Pf-CSP(346-375)
augaagugggugaccuucaucagccugcuguuccuguucagcagcgccuacagccuguuccaggaguaccagugcuacggcagcagcagcaacaccagagugcugaacgagcugaacuacgacaacgccggcaccaaccuguacaacgagcuggagaugaacuacuacggcaagcaggagaacugguacagccugaagaagaacagcagaagccugggcgagaacgacgacggcaacaacgaggacaacgagaagcugagaaagcccaagcacaagaagcugaagcagcccgccgacggcaaccccgaccccaacgccaaccccaacguggaccccaacgccaaccccaacguggaccccaacgccaaccccaacguggaccccaacgccaaccccaacgccaaccccaacgccaaccccaacgccaaccccaacgccaaccccaacgccaaccccaacgccaaccccaacgccaaccccaacgccaaccccaacgccaaccccaacgccaaccccaacgccaaccccaacgccaaccccaacgccaaccccaacgccaaccccaacgccaaccccaacgccaaccccaacguggaccccaacgccaaccccaacgccaaccccaacgccaaccccaacgccaaccccaacgccaaccccaacgccaaccccaacgccaaccccaacgccaaccccaacgccaaccccaacgccaaccccaacgccaaccccaacgccaaccccaacgccaaccccaacgccaaccccaacgccaaccccaacgccaaccccaacgccaaccccaacgccaaccccggcggcggcggcagcgagcccagcgacaagcacaucaaggaguaccugaacaagauccagaacagccugggcggcggcggcagcaucaagcccggcagcgccaacaagcccaaggacgagcuggacuacgccaacgacaucgagaagaagaucugcaagauggagaagugcagcuga

SEQ ID NO: 202 - RNA, 978 nt, Artificial Sequence
  derived and/or modified CDS sequence (opt4) from Pf(3D7)__XP_001351122.1__HsALB_Pf-CSP(19-272)_L(G4S)_Pf-CSP(310-3 27)_Pf-CSP(346-375)
augaagugggugaccuucaucagccugcuguuccuguucagcagcgccuacagccuguuccaggaguaccagugcuacggcagcagcagcaacaccagagugcugaacgagcugaacuacgacaacgccggcaccaaccuguacaacgagcuggagaugaacuacuacggcaagcaggagaacugguacagccugaagaagaacagcagaagccugggcgagaacgacgacggcaacaacgaggacaacgagaagcugagaaagcccaagcacaagaagcugaagcagcccgccgacggcaaccccgaccccaacgccaaccccaacguggaccccaacgccaaccccaacguggaccccaacgccaaccccaacguggaccccaacgccaaccccaacgccaaccccaacgccaaccccaacgccaaccccaacgccaaccccaacgccaaccccaacgccaaccccaacgccaaccccaacgccaaccccaacgccaaccccaacgccaaccccaacgccaaccccaacgccaaccccaacgccaaccccaacgccaaccccaacgccaaccccaacgccaaccccaacguggaccccaacgccaaccccaacgccaaccccaacgccaaccccaacgccaaccccaacgccaaccccaacgccaaccccaacgccaaccccaacgccaaccccaacgccaaccccaacgccaaccccaacgccaaccccaacgccaaccccaacgccaaccccaacgccaaccccaacgccaaccccaacgccaaccccaacgccaaccccaacgccaaccccggcggcggcggcagcgagcccagcgacaagcacaucaaggaguaccugaacaagauccagaacagccugaucaagcccggcagcgccaacaagcccaaggacgagcuggacuacgccaacgacaucgagaagaagaucugcaagauggagaagugcagcuga

SEQ ID NO: 203 - RNA, 978 nt, Artificial Sequence
  derived and/or modified CDS sequence (opt4) from Pf(3D7)__XP_001351122.1__HsALB_Pf-CSP(19-325)
augaagugggugaccuucaucagccugcuguuccuguucagcagcgccuacagccuguuccaggaguaccagugcuacggcagcagcagcaacaccagagugcugaacgagcugaacuacgacaacgccggcaccaaccuguacaacgagcuggagaugaacuacuacggcaagcaggagaacugguacagccugaagaagaacagcagaagccugggcgagaacgacgacggcaacaacgaggacaacgagaagcugagaaagcccaagcacaagaagcugaagcagcccgccgacggcaaccccgaccccaacgccaaccccaacguggaccccaacgccaaccccaacguggaccccaacgccaaccccaacguggaccccaacgccaaccccaacgccaaccccaacgccaaccccaacgccaaccccaacgccaaccccaacgccaaccccaacgccaaccccaacgccaaccccaacgccaaccccaacgccaaccccaacgccaaccccaacgccaaccccaacgccaaccccaacgccaaccccaacgccaaccccaacgccaaccccaacgccaaccccaacguggaccccaacgccaaccccaacgccaaccccaacgccaaccccaacgccaaccccaacgccaaccccaacgccaaccccaacgccaaccccaacgccaaccccaacgccaaccccaacgccaaccccaacgccaaccccaacgccaaccccaacgccaaccccaacgccaaccccaacgccaaccccaacgccaaccccaacgccaaccccaacgccaaccccaacaagaacaaccagggcaacggccagggccacaacaugcccaacgaccccaacagaaacguggacgagaacgccaacgccaacagcgccgugaagaacaacaacaacgaggagcccagcgacaagcacaucaaggaguaccugaacaagauccagaacuga

SEQ ID NO: 204 - RNA, 1155 nt, Artificial Sequence
  derived and/or modified CDS sequence (opt4) from Pf(3D7)__XP_001351122.1__HsALB_Pf-CSP(19-384)
augaagugggugaccuucaucagccugcuguuccuguucagcagcgccuacagccuguuccaggaguaccagugcuacggcagcagcagcaacaccagagugcugaacgagcugaacuacgacaacgccggcaccaaccuguacaacgagcuggagaugaacuacuacggcaagcaggagaacugguacagccugaagaagaacagcagaagccugggcgagaacgacgacggcaacaacgaggacaacgagaagcugagaaagcccaagcacaagaagcugaagcagcccgccgacggcaaccccgaccccaacgccaaccccaacguggaccccaacgccaaccccaacguggaccccaacgccaaccccaacguggaccccaacgccaaccccaacgccaaccccaacgccaaccccaacgccaaccccaacgccaaccccaacgccaaccccaacgccaaccccaacgccaaccccaacgccaaccccaacgccaaccccaacgccaaccccaacgccaaccccaacgccaaccccaacgccaaccccaacgccaaccccaacgccaaccccaacgccaaccccaacguggaccccaacgccaaccccaacgccaaccccaacgccaaccccaacgccaaccccaacgccaaccccaacgccaaccccaacgccaaccccaacgccaaccccaacgccaaccccaacgccaaccccaacgccaaccccaacgccaaccccaacgccaaccccaacgccaaccccaacgccaaccccaacgccaaccccaacgccaaccccaacgccaaccccaacaagaacaaccagggcaacggccagggccacaacaugcccaacgaccccaacagaaacguggacgagaacgccaacgccaacagcgccgugaagaacaacaacaacgaggagcccagcgacaagcacaucaaggaguaccugaacaagauccagaacagccugagcaccgaguggagccccugcagcgugaccugcggcaacggcauccaggugagaaucaagcccggcagcgccaacaagcccaaggacgagcuggacuacgccaacgacaucgagaagaagaucugcaagauggagaagugcagcagcguguucaacguggugaacagcagcuga

SEQ ID NO: 205 - RNA, 1293 nt, Artificial Sequence
  derived and/or modified CDS sequence (opt4) from Pf(3D7)__XP_001351122.1__HsALB_Pf-CSP(19-384)_TM domain HA
augaagugggugaccuucaucagccugcuguuccuguucagcagcgccuacagccuguuccaggaguaccagugcuacggcagcagcagcaacaccagagugcugaacgagcugaacuacgacaacgccggcaccaaccuguacaacgagcuggagaugaacuacuacggcaagcaggagaacugguacagccugaagaagaacagcagaagccugggcgagaacgacgacggcaacaacgaggacaacgagaagcugagaaagcccaagcacaagaagcugaagcagcccgccgacggcaaccccgaccccaacgccaaccccaacguggaccccaacgccaaccccaacguggaccccaacgccaaccccaacguggaccccaacgccaaccccaacgccaaccccaacgccaaccccaacgccaaccccaacgccaaccccaacgccaaccccaacgccaaccccaacgccaaccccaacgccaaccccaacgccaaccccaacgccaaccccaacgccaaccccaacgccaaccccaacgccaaccccaacgccaaccccaacgccaaccccaacgccaaccccaacguggaccccaacgccaaccccaacgccaaccccaacgccaaccccaacgccaaccccaacgccaaccccaacgccaaccccaacgccaaccccaacgccaaccccaacgccaaccccaacgccaaccccaacgccaaccccaacgccaaccccaacgccaaccccaacgccaaccccaacgccaaccccaacgccaaccccaacgccaaccccaacgccaaccccaacaagaacaaccagggcaacggccagggccacaacaugcccaacgaccccaacagaaacguggacgagaacgccaacgccaacagcgccgugaagaacaacaacaacgaggagcccagcgacaagcacaucaaggaguaccugaacaagauccagaacagccugagcaccgaguggagccccugcagcgugaccugcggcaacggcauccaggugagaaucaagcccggcagcgccaacaagcccaaggacgagcuggacuacgccaacgacaucgagaagaagaucugcaagauggagaagugcagcagcguguucaacguggugaacagcagcaagcuggagagcaccagaaucuaccagauccuggccaucuacagcaccguggccagcagccuggugcugguggugagccugggcgccaucagcuucuggaugugcagcaacggcagccugcagugcagaaucugcaucuga

SEQ ID NO: 206 - RNA, 1005 nt, Artificial Sequence
  derived and/or modified CDS sequence (opt4) from Pf(3D7)__XP_001351122.1__HsALB_Pf-CSP(82-397)
augaagugggugaccuucaucagccugcuguuccuguucagcagcgccuacagcgacaacgagaagcugagaaagcccaagcacaagaagcugaagcagcccgccgacggcaaccccgaccccaacgccaaccccaacguggaccccaacgccaaccccaacguggaccccaacgccaaccccaacguggaccccaacgccaaccccaacgccaaccccaacgccaaccccaacgccaaccccaacgccaaccccaacgccaaccccaacgccaaccccaacgccaaccccaacgccaaccccaacgccaaccccaacgccaaccccaacgccaaccccaacgccaaccccaacgccaaccccaacgccaaccccaacgccaaccccaacgccaaccccaacguggaccccaacgccaaccccaacgccaaccccaacgccaaccccaacgccaaccccaacgccaaccccaacgccaaccccaacgccaaccccaacgccaaccccaacgccaaccccaacgccaaccccaacgccaaccccaacgccaaccccaacgccaaccccaacgccaaccccaacgccaaccccaacgccaaccccaacgccaaccccaacgccaaccccaacaagaacaaccagggcaacggccagggccacaacaugcccaacgaccccaacagaaacguggacgagaacgccaacgccaacagcgccgugaagaacaacaacaacgaggagcccagcgacaagcacaucaaggaguaccugaacaagauccagaacagccugagcaccgaguggagccccugcagcgugaccugcggcaacggcauccaggugagaaucaagcccggcagcgccaacaagcccaaggacgagcuggacuacgccaacgacaucgagaagaagaucugcaagauggagaagugcagcagcguguucaacguggugaacagcagcaucggccugaucauggugcugagcuuccuguuccugaacuga

SEQ ID NO: 207 - RNA, 357 nt, Artificial Sequence
  derived and/or modified CDS sequence (opt4) from Pf(3D7)__XP_001351122.1__HsALB_Pf-CSP(93-192)
augaagugggugaccuucaucagccugcuguuccuguucagcagcgccuacagcaagcugaagcagcccgccgacggcaaccccgaccccaacgccaaccccaacguggaccccaacgccaaccccaacguggaccccaacgccaaccccaacguggaccccaacgccaaccccaacgccaaccccaacgccaaccccaacgccaaccccaacgccaaccccaacgccaaccccaacgccaaccccaacgccaaccccaacgccaaccccaacgccaaccccaacgccaaccccaacgccaaccccaacgccaaccccaacgccaaccccaacgccaaccccaacgccaaccccuga

SEQ ID NO: 208 - RNA, 597 nt, Artificial Sequence
  derived and/or modified CDS sequence (opt4) from Pf(3D7)__XP_001351122.1__HsALB_Pf-CSP(93-272)
augaagugggugaccuucaucagccugcuguuccuguucagcagcgccuacagcaagcugaagcagcccgccgacggcaaccccgaccccaacgccaaccccaacguggaccccaacgccaaccccaacguggaccccaacgccaaccccaacguggaccccaacgccaaccccaacgccaaccccaacgccaaccccaacgccaaccccaacgccaaccccaacgccaaccccaacgccaaccccaacgccaaccccaacgccaaccccaacgccaaccccaacgccaaccccaacgccaaccccaacgccaaccccaacgccaaccccaacgccaaccccaacgccaaccccaacgccaaccccaacguggaccccaacgccaaccccaacgccaaccccaacgccaaccccaacgccaaccccaacgccaaccccaacgccaaccccaacgccaaccccaacgccaaccccaacgccaaccccaacgccaaccccaacgccaaccccaacgccaaccccaacgccaaccccaacgccaaccccaacgccaaccccaacgccaaccccaacgccaaccccaacgccaaccccuga

SEQ ID NO: 209 - RNA, 972 nt, Artificial Sequence
  derived and/or modified CDS sequence (opt4) from Pf(3D7)__XP_001351122.1__HsALB_Pf-CSP(93-397)
augaagugggugaccuucaucagccugcuguuccuguucagcagcgccuacagcaagcugaagcagcccgccgacggcaaccccgaccccaacgccaaccccaacguggaccccaacgccaaccccaacguggaccccaacgccaaccccaacguggaccccaacgccaaccccaacgccaaccccaacgccaaccccaacgccaaccccaacgccaaccccaacgccaaccccaacgccaaccccaacgccaaccccaacgccaaccccaacgccaaccccaacgccaaccccaacgccaaccccaacgccaaccccaacgccaaccccaacgccaaccccaacgccaaccccaacgccaaccccaacguggaccccaacgccaaccccaacgccaaccccaacgccaaccccaacgccaaccccaacgccaaccccaacgccaaccccaacgccaaccccaacgccaaccccaacgccaaccccaacgccaaccccaacgccaaccccaacgccaaccccaacgccaaccccaacgccaaccccaacgccaaccccaacgccaaccccaacgccaaccccaacgccaaccccaacaagaacaaccagggcaacggccagggccacaacaugcccaacgaccccaacagaaacguggacgagaacgccaacgccaacagcgccgugaagaacaacaacaacgaggagcccagcgacaagcacaucaaggaguaccugaacaagauccagaacagccugagcaccgaguggagccccugcagcgugaccugcggcaacggcauccaggugagaaucaagcccggcagcgccaacaagcccaaggacgagcuggacuacgccaacgacaucgagaagaagaucugcaagauggagaagugcagcagcguguucaacguggugaacagcagcaucggccugaucauggugcugagcuuccuguuccugaacuga

SEQ ID NO: 210 - RNA, 342 nt, Artificial Sequence
  derived and/or modified CDS sequence (opt4) from Pf(3D7)__XP_001351122.1__HsALB_Pf-CSP(98-192)
augaagugggugaccuucaucagccugcuguuccuguucagcagcgccuacagcgccgacggcaaccccgaccccaacgccaaccccaacguggaccccaacgccaaccccaacguggaccccaacgccaaccccaacguggaccccaacgccaaccccaacgccaaccccaacgccaaccccaacgccaaccccaacgccaaccccaacgccaaccccaacgccaaccccaacgccaaccccaacgccaaccccaacgccaaccccaacgccaaccccaacgccaaccccaacgccaaccccaacgccaaccccaacgccaaccccaacgccaaccccuga

SEQ ID NO: 211 - RNA, 582 nt, Artificial Sequence
  derived and/or modified CDS sequence (opt4) from Pf(3D7)__XP_001351122.1__HsALB_Pf-CSP(98-272)
augaagugggugaccuucaucagccugcuguuccuguucagcagcgccuacagcgccgacggcaaccccgaccccaacgccaaccccaacguggaccccaacgccaaccccaacguggaccccaacgccaaccccaacguggaccccaacgccaaccccaacgccaaccccaacgccaaccccaacgccaaccccaacgccaaccccaacgccaaccccaacgccaaccccaacgccaaccccaacgccaaccccaacgccaaccccaacgccaaccccaacgccaaccccaacgccaaccccaacgccaaccccaacgccaaccccaacgccaaccccaacgccaaccccaacguggaccccaacgccaaccccaacgccaaccccaacgccaaccccaacgccaaccccaacgccaaccccaacgccaaccccaacgccaaccccaacgccaaccccaacgccaaccccaacgccaaccccaacgccaaccccaacgccaaccccaacgccaaccccaacgccaaccccaacgccaaccccaacgccaaccccaacgccaaccccaacgccaaccccuga

SEQ ID NO: 212 - RNA, 888 nt, Artificial Sequence
  derived and/or modified CDS sequence (opt4) from Pf(3D7)__XP_001351122.1__HsALB_Pf-CSP(98-374)
augaagugggugaccuucaucagccugcuguuccuguucagcagcgccuacagcgccgacggcaaccccgaccccaacgccaaccccaacguggaccccaacgccaaccccaacguggaccccaacgccaaccccaacguggaccccaacgccaaccccaacgccaaccccaacgccaaccccaacgccaaccccaacgccaaccccaacgccaaccccaacgccaaccccaacgccaaccccaacgccaaccccaacgccaaccccaacgccaaccccaacgccaaccccaacgccaaccccaacgccaaccccaacgccaaccccaacgccaaccccaacgccaaccccaacguggaccccaacgccaaccccaacgccaaccccaacgccaaccccaacgccaaccccaacgccaaccccaacgccaaccccaacgccaaccccaacgccaaccccaacgccaaccccaacgccaaccccaacgccaaccccaacgccaaccccaacgccaaccccaacgccaaccccaacgccaaccccaacgccaaccccaacgccaaccccaacgccaaccccaacaagaacaaccagggcaacggccagggccacaacaugcccaacgaccccaacagaaacguggacgagaacgccaacgccaacagcgccgugaagaacaacaacaacgaggagcccagcgacaagcacaucaaggaguaccugaacaagauccagaacagccugagcaccgaguggagccccugcagcgugaccugcggcaacggcauccaggugagaaucaagcccggcagcgccaacaagcccaaggacgagcuggacuacgccaacgacaucgagaagaagaucugcaagauggagaagugcuga

SEQ ID NO: 213 - RNA, 957 nt, Artificial Sequence
  derived and/or modified CDS sequence (opt4) from Pf(3D7)__XP_001351122.1__HsALB_Pf-CSP(98-397)
augaagugggugaccuucaucagccugcuguuccuguucagcagcgccuacagcgccgacggcaaccccgaccccaacgccaaccccaacguggaccccaacgccaaccccaacguggaccccaacgccaaccccaacguggaccccaacgccaaccccaacgccaaccccaacgccaaccccaacgccaaccccaacgccaaccccaacgccaaccccaacgccaaccccaacgccaaccccaacgccaaccccaacgccaaccccaacgccaaccccaacgccaaccccaacgccaaccccaacgccaaccccaacgccaaccccaacgccaaccccaacgccaaccccaacguggaccccaacgccaaccccaacgccaaccccaacgccaaccccaacgccaaccccaacgccaaccccaacgccaaccccaacgccaaccccaacgccaaccccaacgccaaccccaacgccaaccccaacgccaaccccaacgccaaccccaacgccaaccccaacgccaaccccaacgccaaccccaacgccaaccccaacgccaaccccaacgccaaccccaacaagaacaaccagggcaacggccagggccacaacaugcccaacgaccccaacagaaacguggacgagaacgccaacgccaacagcgccgugaagaacaacaacaacgaggagcccagcgacaagcacaucaaggaguaccugaacaagauccagaacagccugagcaccgaguggagccccugcagcgugaccugcggcaacggcauccaggugagaaucaagcccggcagcgccaacaagcccaaggacgagcuggacuacgccaacgacaucgagaagaagaucugcaagauggagaagugcagcagcguguucaacguggugaacagcagcaucggccugaucauggugcugagcuuccuguuccugaacuga

SEQ ID NO: 214 - RNA, 1284 nt, Artificial Sequence
  derived and/or modified CDS sequence (opt4) from Pf(3D7)__XP_001351122.1__HsALB_Pf-CSP(199-377)_L(PVTN)_HBsAg
augaagugggugaccuucaucagccugcuguuccuguucagcagcgccuacagcgaccccaacgccaaccccaacgccaaccccaacgccaaccccaacgccaaccccaacgccaaccccaacgccaaccccaacgccaaccccaacgccaaccccaacgccaaccccaacgccaaccccaacgccaaccccaacgccaaccccaacgccaaccccaacgccaaccccaacgccaaccccaacgccaaccccaacgccaaccccaacgccaaccccaacaagaacaaccagggcaacggccagggccacaacaugcccaacgaccccaacagaaacguggacgagaacgccaacgccaacagcgccgugaagaacaacaacaacgaggagcccagcgacaagcacaucaaggaguaccugaacaagauccagaacagccugagcaccgaguggagccccugcagcgugaccugcggcaacggcauccaggugagaaucaagcccggcagcgccaacaagcccaaggacgagcuggacuacgccaacgacaucgagaagaagaucugcaagauggagaagugcagcagcgugcccgugaccaacauggagaacaucaccagcggcuuccugggcccccugcuggugcugcaggccggcuucuuccugcugaccagaauccugaccaucccccagagccuggacagcugguggaccagccugaacuuccugggcggcagccccgugugccugggccagaacagccagagccccaccagcaaccacagccccaccagcugcccccccaucugccccggcuacagauggaugugccugagaagauucaucaucuuccuguucauccugcugcugugccugaucuuccugcuggugcugcuggacuaccagggcaugcugcccgugugcccccugauccccggcagcaccaccaccaacaccggccccugcaagaccugcaccacccccgcccagggcaacagcauguuccccagcugcugcugcaccaagcccaccgacggcaacugcaccugcauccccauccccagcagcugggccuucgccaaguaccugugggagugggccagcgugagauucagcuggcugagccugcuggugcccuucgugcagugguucgugggccugagccccaccguguggcugagcgccaucuggaugaugugguacuggggccccagccuguacagcaucgugagccccuucaucccccugcugcccaucuucuucugccuguggguguacaucuga

SEQ ID NO: 215 - RNA, 1023 nt, Artificial Sequence
  derived and/or modified CDS sequence (opt4) from Pb(ANKA)__XP_022712148.1__Pb-CSP
augaagaagugcaccauccuggugguggccagccugcugcuggugaacagccugcugcccggcuacggccagaacaagagcauccaggcccagagaaaccugaacgagcugugcuacaacgagggcaacgacaacaagcuguaccacgugcugaacagcaagaacggcaagaucuacaacagaaacaccgugaacagacugcuggccgacgcccccgagggcaagaagaacgagaagaagaacgagaagaucgagagaaacaacaagcugaagcagcccccccccccccccaaccccaacgacccccccccccccaaccccaacgacccccccccccccaaccccaacgacccccccccccccaaccccaacgacccccccccccccaacgccaacgacccccccccccccaacgccaacgaccccgccccccccaacgccaacgaccccgccccccccaacgccaacgaccccgccccccccaacgccaacgaccccgccccccccaacgccaacgacccccccccccccaaccccaacgaccccgccccccccaacgccaacgacccccccccccccaaccccaacgaccccgcccccccccagggcaacaacaacccccagccccagcccagaccccagccccagccccagccccagccccagccccagccccagccccagccccagcccagaccccagccccagccccagcccggcggcaacaacaacaacaagaacaacaacaacgacgacagcuacauccccagcgccgagaagauccuggaguucgugaagcagaucagagacagcaucaccgaggaguggagccagugcaacgugaccugcggcagcggcaucagagugagaaagagaaagggcagcaacaagaaggccgaggaccugacccuggaggacaucgacaccgagaucugcaagauggacaagugcagcagcaucuucaacaucgugagcaacagccugggcuucgugauccugcuggugcugguguucuucaacuga

SEQ ID NO: 216 - RNA, 1188 nt, Artificial Sequence
  derived and/or modified CDS sequence (opt4) from Pb(ANKA)__XP_022712148.1__Pb-CSP_L(G4SG4)_TM domain HA
augaagaagugcaccauccuggugguggccagccugcugcuggugaacagccugcugcccggcuacggccagaacaagagcauccaggcccagagaaaccugaacgagcugugcuacaacgagggcaacgacaacaagcuguaccacgugcugaacagcaagaacggcaagaucuacaacagaaacaccgugaacagacugcuggccgacgcccccgagggcaagaagaacgagaagaagaacgagaagaucgagagaaacaacaagcugaagcagcccccccccccccccaaccccaacgacccccccccccccaaccccaacgacccccccccccccaaccccaacgacccccccccccccaaccccaacgacccccccccccccaacgccaacgacccccccccccccaacgccaacgaccccgccccccccaacgccaacgaccccgccccccccaacgccaacgaccccgccccccccaacgccaacgaccccgccccccccaacgccaacgacccccccccccccaaccccaacgaccccgccccccccaacgccaacgacccccccccccccaaccccaacgaccccgcccccccccagggcaacaacaacccccagccccagcccagaccccagccccagccccagccccagccccagccccagccccagccccagccccagcccagaccccagccccagccccagcccggcggcaacaacaacaacaagaacaacaacaacgacgacagcuacauccccagcgccgagaagauccuggaguucgugaagcagaucagagacagcaucaccgaggaguggagccagugcaacgugaccugcggcagcggcaucagagugagaaagagaaagggcagcaacaagaaggccgaggaccugacccuggaggacaucgacaccgagaucugcaagauggacaagugcagcagcaucuucaacaucgugagcaacagccugggcuucgugauccugcuggugcugguguucuucaacggcggcggcggcagcggcggcggcggcaagcuggagagcaccagaaucuaccagauccuggccaucuacagcaccguggccagcagccuggugcugguggugagccugggcgccaucagcuucuggaugugcagcaacggcagccugcagugcagaaucugcaucuga

SEQ ID NO: 217 - RNA, 1008 nt, Artificial Sequence
  derived and/or modified CDS sequence (opt4) from Pb(ANKA)__XP_022712148.1__HsALB_Pb-CSP(24-340)
augaagugggugaccuucaucagccugcuguuccuguucagcagcgccuacagccagaacaagagcauccaggcccagagaaaccugaacgagcugugcuacaacgagggcaacgacaacaagcuguaccacgugcugaacagcaagaacggcaagaucuacaacagaaacaccgugaacagacugcuggccgacgcccccgagggcaagaagaacgagaagaagaacgagaagaucgagagaaacaacaagcugaagcagcccccccccccccccaaccccaacgacccccccccccccaaccccaacgacccccccccccccaaccccaacgacccccccccccccaaccccaacgacccccccccccccaacgccaacgacccccccccccccaacgccaacgaccccgccccccccaacgccaacgaccccgccccccccaacgccaacgaccccgccccccccaacgccaacgaccccgccccccccaacgccaacgacccccccccccccaaccccaacgaccccgccccccccaacgccaacgacccccccccccccaaccccaacgaccccgcccccccccagggcaacaacaacccccagccccagcccagaccccagccccagccccagccccagccccagccccagccccagccccagccccagcccagaccccagccccagccccagcccggcggcaacaacaacaacaagaacaacaacaacgacgacagcuacauccccagcgccgagaagauccuggaguucgugaagcagaucagagacagcaucaccgaggaguggagccagugcaacgugaccugcggcagcggcaucagagugagaaagagaaagggcagcaacaagaaggccgaggaccugacccuggaggacaucgacaccgagaucugcaagauggacaagugcagcagcaucuucaacaucgugagcaacagccugggcuucgugauccugcuggugcugguguucuucaacuga

SEQ ID NO: 218 - RNA, 1026 nt, Artificial Sequence
  derived and/or modified CDS sequence (opt4) from Pb(ANKA)__XP_022712148.1__HsIns-iso1_Pb-CSP(24-340)
auggcccuguggaugagacugcugccccugcuggcccugcuggcccuguggggccccgaccccgccgccgcccagaacaagagcauccaggcccagagaaaccugaacgagcugugcuacaacgagggcaacgacaacaagcuguaccacgugcugaacagcaagaacggcaagaucuacaacagaaacaccgugaacagacugcuggccgacgcccccgagggcaagaagaacgagaagaagaacgagaagaucgagagaaacaacaagcugaagcagcccccccccccccccaaccccaacgacccccccccccccaaccccaacgacccccccccccccaaccccaacgacccccccccccccaaccccaacgacccccccccccccaacgccaacgacccccccccccccaacgccaacgaccccgccccccccaacgccaacgaccccgccccccccaacgccaacgaccccgccccccccaacgccaacgaccccgccccccccaacgccaacgacccccccccccccaaccccaacgaccccgccccccccaacgccaacgacccccccccccccaaccccaacgaccccgcccccccccagggcaacaacaacccccagccccagcccagaccccagccccagccccagccccagccccagccccagccccagccccagccccagcccagaccccagccccagccccagcccggcggcaacaacaacaacaagaacaacaacaacgacgacagcuacauccccagcgccgagaagauccuggaguucgugaagcagaucagagacagcaucaccgaggaguggagccagugcaacgugaccugcggcagcggcaucagagugagaaagagaaagggcagcaacaagaaggccgaggaccugacccuggaggacaucgacaccgagaucugcaagauggacaagugcagcagcaucuucaacaucgugagcaacagccugggcuucgugauccugcuggugcugguguucuucaacuga

SEQ ID NO: 219 - RNA, 1005 nt, Artificial Sequence
  derived and/or modified CDS sequence (opt4) from Pb(ANKA)__XP_022712148.1__HsSPARC_Pb-CSP(24-340)
augagagccuggaucuucuuccugcugugccuggccggcagagcccuggcccagaacaagagcauccaggcccagagaaaccugaacgagcugugcuacaacgagggcaacgacaacaagcuguaccacgugcugaacagcaagaacggcaagaucuacaacagaaacaccgugaacagacugcuggccgacgcccccgagggcaagaagaacgagaagaagaacgagaagaucgagagaaacaacaagcugaagcagcccccccccccccccaaccccaacgacccccccccccccaaccccaacgacccccccccccccaaccccaacgacccccccccccccaaccccaacgacccccccccccccaacgccaacgacccccccccccccaacgccaacgaccccgccccccccaacgccaacgaccccgccccccccaacgccaacgaccccgccccccccaacgccaacgaccccgccccccccaacgccaacgacccccccccccccaaccccaacgaccccgccccccccaacgccaacgacccccccccccccaaccccaacgaccccgcccccccccagggcaacaacaacccccagccccagcccagaccccagccccagccccagccccagccccagccccagccccagccccagccccagcccagaccccagccccagccccagcccggcggcaacaacaacaacaagaacaacaacaacgacgacagcuacauccccagcgccgagaagauccuggaguucgugaagcagaucagagacagcaucaccgaggaguggagccagugcaacgugaccugcggcagcggcaucagagugagaaagagaaagggcagcaacaagaaggccgaggaccugacccuggaggacaucgacaccgagaucugcaagauggacaagugcagcagcaucuucaacaucgugagcaacagccugggcuucgugauccugcuggugcugguguucuucaacuga

SEQ ID NO: 220 - RNA, 1008 nt, Artificial Sequence
  derived and/or modified CDS sequence (opt4) from Pb(ANKA)__XP_022712148.1__IgE_Pb-CSP(24-340)
auggacuggaccuggauccuguuccugguggccgccgccaccagagugcacagccagaacaagagcauccaggcccagagaaaccugaacgagcugugcuacaacgagggcaacgacaacaagcuguaccacgugcugaacagcaagaacggcaagaucuacaacagaaacaccgugaacagacugcuggccgacgcccccgagggcaagaagaacgagaagaagaacgagaagaucgagagaaacaacaagcugaagcagcccccccccccccccaaccccaacgacccccccccccccaaccccaacgacccccccccccccaaccccaacgacccccccccccccaaccccaacgacccccccccccccaacgccaacgacccccccccccccaacgccaacgaccccgccccccccaacgccaacgaccccgccccccccaacgccaacgaccccgccccccccaacgccaacgaccccgccccccccaacgccaacgacccccccccccccaaccccaacgaccccgccccccccaacgccaacgacccccccccccccaaccccaacgaccccgcccccccccagggcaacaacaacccccagccccagcccagaccccagccccagccccagccccagccccagccccagccccagccccagccccagcccagaccccagccccagccccagcccggcggcaacaacaacaacaagaacaacaacaacgacgacagcuacauccccagcgccgagaagauccuggaguucgugaagcagaucagagacagcaucaccgaggaguggagccagugcaacgugaccugcggcagcggcaucagagugagaaagagaaagggcagcaacaagaaggccgaggaccugacccuggaggacaucgacaccgagaucugcaagauggacaagugcagcagcaucuucaacaucgugagcaacagccugggcuucgugauccugcuggugcugguguucuucaacuga

SEQ ID NO: 221 - RNA, 1194 nt, Artificial Sequence
  derived and/or modified CDS sequence (opt5) from Pf(3D7)__XP_001351122.1__Pf-CSP
augaugagaaagcuggccauccucagcguguccucuuuccuguuugucgaggcucuuuuccaggaauaccaaugcuauggcagcuccucuaacacccggguucugaaugagcucaacuacgacaaugccgggacaaaccuguauaaugaacuugagaugaacuacuauggaaaacaggaaaauugguacagccugaagaaaaacucccgcucucucggcgagaaugaugacgggaacaaugaggauaacgaaaagcugagaaaacccaagcacaagaaacugaagcagccugcggacggaaauccggaucccaacgcuaauccuaacguggaccccaacgccaauccuaacguggaucccaaugccaacccuaaugucgacccgaacgcuaaucccaacgccaauccuaacgcuaaucccaacgccaauccuaacgcgaaucccaacgccaacccgaaugcuaacccuaaugccaaccccaaugcuaacccuaaugccaaccccaaugcgaaccccaaugccaacccuaaugcuaacccgaaugccaaccccaacgcuaauccuaacgccaaucccaacgccaauccuaacguggaucccaaugcuaacccgaaugcgaacccuaaugccaaccccaaugcuaacccuaaugccaaccccaacgccaauccuaacgcuaaucccaacgccaauccgaacgcgaauccuaacgcuaaucccaacgccaaucccaacgccaauccuaacgcuaauccgaacgccaaucccaacgcuaacccuaaugccaaccccaaugcgaacccuaaugccaaccccaauaaaaacaaucagggcaacgggcaaggacauaauaugccuaacgaccccaaucggaacguugaugagaaugcuaacgccaacagcgcugugaagaauaacaauaacgaggaaccguccgacaaacacauuaaggaguaucucaauaagauccagaacagccugucuacggaaugguccccuuguagcgugaccugcggcaauggcauucagguccgcaucaaacccgggucugccaacaagccuaaagaugagcuugacuacgcgaaugacauugaaaagaaaaucuguaagauggagaaaugcuccagcguuuuuaacguggucaauucuuccaucggacugauuauggugcucagcuuccuguuucuuaacuga

SEQ ID NO: 222 - RNA, 1122 nt, Artificial Sequence
  derived and/or modified CDS sequence (opt5) from Pf(3D7)__XP_001351122.1__Pf-CSP(1-374)
augaugagaaagcuggccauccucagcguguccucuuuccuguuugucgaggcucuuuuccaggaauaccaaugcuauggcagcuccucuaacacccggguucugaaugagcucaacuacgacaaugccgggacaaaccuguauaaugaacuugagaugaacuacuauggaaaacaggaaaauugguacagccugaagaaaaacucccgcucucucggcgagaaugaugacgggaacaaugaggauaacgaaaagcugagaaaacccaagcacaagaaacugaagcagccugcggacggaaauccggaucccaacgcuaauccuaacguggaccccaacgccaauccuaacguggaucccaaugccaacccuaaugucgacccgaacgcuaaucccaacgccaauccuaacgcuaaucccaacgccaauccuaacgcgaaucccaacgccaacccgaaugcuaacccuaaugccaaccccaaugcuaacccuaaugccaaccccaaugcgaaccccaaugccaacccuaaugcuaacccgaaugccaaccccaacgcuaauccuaacgccaaucccaacgccaauccuaacguggaucccaaugcuaacccgaaugcgaacccuaaugccaaccccaaugcuaacccuaaugccaaccccaacgccaauccuaacgcuaaucccaacgccaauccgaacgcgaauccuaacgcuaaucccaacgccaaucccaacgccaauccuaacgcuaauccgaacgccaaucccaacgcuaacccuaaugccaaccccaaugcgaacccuaaugccaaccccaauaaaaacaaucagggcaacgggcaaggacauaauaugccuaacgaccccaaucggaacguugaugagaaugcuaacgccaacagcgcugugaagaauaacaauaacgaggaaccguccgacaaacacauuaaggaguaucucaauaagauccagaacagccugucuacggaaugguccccuuguagcgugaccugcggcaauggcauucagguccgcaucaaacccgggucugccaacaagccuaaagaugagcuugacuacgcgaaugacauugaaaagaaaaucuguaagauggagaaaugc

SEQ ID NO: 223 - RNA, 975 nt, Artificial Sequence
  derived and/or modified CDS sequence (opt5) from Pf(3D7)__XP_001351122.1__Pf-CSP(1-325)
augaugagaaagcuggccauccucagcguguccucuuuccuguuugucgaggcucuuuuccaggaauaccaaugcuauggcagcuccucuaacacccggguucugaaugagcucaacuacgacaaugccgggacaaaccuguauaaugaacuugagaugaacuacuauggaaaacaggaaaauugguacagccugaagaaaaacucccgcucucucggcgagaaugaugacgggaacaaugaggauaacgaaaagcugagaaaacccaagcacaagaaacugaagcagccugcggacggaaauccggaucccaacgcuaauccuaacguggaccccaacgccaauccuaacguggaucccaaugccaacccuaaugucgacccgaacgcuaaucccaacgccaauccuaacgcuaaucccaacgccaauccuaacgcgaaucccaacgccaacccgaaugcuaacccuaaugccaaccccaaugcuaacccuaaugccaaccccaaugcgaaccccaaugccaacccuaaugcuaacccgaaugccaaccccaacgcuaauccuaacgccaaucccaacgccaauccuaacguggaucccaaugcuaacccgaaugcgaacccuaaugccaaccccaaugcuaacccuaaugccaaccccaacgccaauccuaacgcuaaucccaacgccaauccgaacgcgaauccuaacgcuaaucccaacgccaaucccaacgccaauccuaacgcuaauccgaacgccaaucccaacgcuaacccuaaugccaaccccaaugcgaacccuaaugccaaccccaauaaaaacaaucagggcaacgggcaaggacauaauaugccuaacgaccccaaucggaacguugaugagaaugcuaacgccaacagcgcugugaagaauaacaauaacgaggaaccguccgacaaacacauuaaggaguaucucaauaagauccagaac

SEQ ID NO: 224 - RNA, 1194 nt, Artificial Sequence
  derived and/or modified CDS sequence (opt5) from Pf(3D7)__XP_001351122.1__HsALB_Pf-CSP(19-397)
augaagugggugaccuucaucagccugcucuuucuguucuccucugccuacagccuuuuucaggaguaucaaugcuacggcuccucuagcaacacaagaguccugaaugaacucaacuaugacaaugcugggacgaaccuguacaaugagcuugaaaugaacuauuacggaaaacaggagaauugguauucccugaagaaaaacucucggagccucggcgaaaaugaugacgggaacaaugaggauaacgagaagcugcgcaaacccaagcacaagaaacugaagcagccugccgacggaaauccggaucccaacgcgaauccuaacguugaccccaacgcuaauccuaacguggaucccaaugccaacccuaauguggacccgaacgccaaucccaacgcuaauccuaacgccaaucccaacgcuaauccuaacgccaaucccaacgcgaacccgaaugccaacccuaaugcuaaccccaaugccaacccuaaugcuaaccccaaugccaaccccaaugcgaacccuaaugccaacccgaaugcuaaccccaacgccaauccuaacgcuaaucccaacgccaauccuaacgucgaucccaaugccaacccgaaugcuaacccuaaugcgaaccccaaugccaacccuaaugcuaaccccaacgccaauccuaacgccaaucccaacgcuaauccgaacgccaauccuaacgcgaaucccaacgcuaaucccaacgccaauccuaacgccaauccgaacgcuaaucccaacgccaacccuaaugcuaaccccaaugccaacccuaaugcgaaccccaauaaaaacaaucagggcaacgggcaaggacauaauaugccuaacgaccccaauagaaacguggaugaaaaugccaacgcuaacuccgccguuaagaauaacaauaacgaggaaccgagcgacaaacacauuaaggaguaccucaauaagauccagaacucucuguccaccgaguggagcccuuguucugugacaugcggcaauggcauucagguccggaucaaacccggguccgcuaacaagccuaaagaugaacuugacuacgccaaugacauugagaagaaaaucuguaagauggaaaaaugcagcucuguguucaacguugucaauuccagcaucggacugauuauggugcucuccuuucuguuccuuaacuga

SEQ ID NO: 225 - RNA, 1212 nt, Artificial Sequence
  derived and/or modified CDS sequence (opt5) from Pf(3D7)__XP_001351122.1__HsIns-iso1_Pf-CSP(19-397)
auggcccuguggaugagacuccugccccuucuggcucuccuggcccuuuggggcccugacccggcggcugcccuguuccaggaguaccaaugcuaugggagcuccucuaacacccgggugcucaaugaacugaacuacgauaaugccggaacaaaccuguauaaugagcucgaaaugaacuacuauggcaagcaggagaauugguacagccugaaaaagaacucccgcucucuuggggaaaaugacgauggaaacaaugaggacaacgagaaacugagaaagcccaaacacaagaagcucaaacagccugcugauggcaaucccgacccuaacgccaaucccaacgucgauccuaacgcuaauccgaacguugaccccaaugccaacccuaauguggaucccaacgcgaauccuaacgccaaucccaacgcuaauccgaacgccaauccuaacgcuaaucccaacgccaacccuaaugcgaaccccaaugccaaccccaaugcuaacccuaaugccaacccgaaugcuaaccccaaugccaacccuaaugccaaccccaaugcuaacccuaacgcgaaucccaacgccaauccgaacgcuaauccuaacguggaccccaaugccaacccuaaugccaaccccaaugcuaacccuaaugccaaccccaaugcgaacccgaacgcuaauccuaacgccaaucccaacgccaaucccaacgcuaauccuaacgccaauccgaacgcuaaucccaacgccaauccuaacgcgaaucccaacgccaauccuaacgcuaaccccaaugccaacccuaaugcuaaccccaaugccaacccgaauaagaacaaucaggggaacggacaaggccauaauaugccuaacgaucccaaucggaacgucgacgaaaaugcgaacgccaacagcgcugugaaaaauaacaauaacgaggaaccuuccgauaagcacaucaaagaguaucugaauaagauucagaacucucuuagcacggaguggucccccuguagcguuaccugcggcaaugggauccaggugcgcauuaagccgggaucugccaacaaaccuaaggacgaacuggacuacgcuaaugauaucgagaaaaagauuuguaaaauggaaaagugcuccagcgucuuuaacgugguuaauucuuccaucggccucaucauggugcugagcuuccuguuucucaacuga

SEQ ID NO: 226 - RNA, 1191 nt, Artificial Sequence
  derived and/or modified CDS sequence (opt5) from Pf(3D7)__XP_001351122.1__HsSPARC_Pf-CSP(19-397)
augagagccuggaucuucuuucugcucugccuggcuggccgggcccuugcgcuguuccaggaguaccaauguuaugggagcuccucuaacacccgcgugcucaaugaacugaacuacgacaaugcuggaacaaaccuuuauaaugagcuggaaaugaacuacuauggcaagcaggagaauugguacagccucaaaaagaacuccagaucucugggggaaaaugaugacggaaacaaugaggauaacgagaaacugcggaagcccaaacacaagaagcucaaacagccugccgacggcaauccggaucccaacgccaauccuaacgucgaccccaacgcuaauccuaacguugaucccaaugccaacccuaauguggacccgaacgcuaaucccaacgccaauccuaacgcgaaucccaacgccaauccuaacgcuaaucccaacgccaacccgaaugcuaacccuaaugccaaccccaaugcgaacccuaaugccaaccccaaugcuaaccccaaugccaacccuaaugcuaacccgaaugccaaccccaacgccaauccuaacgcuaaucccaacgcgaauccuaacguggaucccaaugccaacccgaaugcuaacccuaaugccaaccccaaugccaacccuaaugcuaaccccaacgccaauccuaacgcgaaucccaacgcuaauccgaacgccaauccuaacgccaaucccaacgcuaaucccaacgccaauccuaacgcuaauccgaacgccaaucccaacgcgaacccuaaugccaaccccaaugcuaacccuaaugccaaccccaauaagaacaaucaggggaacggacaaggccauaauaugccuaacgaccccaaucgcaacgucgaugaaaaugcuaacgccaacagcgcggugaaaaauaacaauaacgaggaaccguccgacaagcacauuaaagaguaucugaauaagauccagaacucucuuagcacggagugguccccuugcagcguuaccuguggcaaugggauucaggugagaaucaagcccggaucugccaacaaaccuaaggaugaacuggacuacgcuaaugacauugagaaaaagaucugcaaaauggaaaaguguuccagcgucuuuaacgugguuaauucuuccaucggccucauuauggugcugagcuuccuuuuucugaacuga

SEQ ID NO: 227 - RNA, 1194 nt, Artificial Sequence
  derived and/or modified CDS sequence (opt5) from Pf(3D7)__XP_001351122.1__IgE_Pf-CSP(19-397)
auggacuggaccuggauccuguuccucguggccgcugccacaagaguccacagccuguuucaggaguaccaaugcuauggcuccucuagcaacacgcggguucuuaaugaacugaacuacgauaaugcggggaccaaccucuauaaugagcuggaaaugaacuacuauggaaagcaggagaauugguacucccuuaaaaagaacucucgcagccugggcgaaaaugacgaugggaacaaugaggacaacgagaaacucagaaagcccaaacauaagaagcugaaacagccugcugauggaaauccggaccccaacgccaauccuaacguggaucccaacgccaauccuaacguggaccccaaugcuaacccuaaugucgauccgaacgccaaucccaacgcuaauccuaacgccaaucccaacgcgaauccuaacgccaaucccaacgcuaacccgaaugccaacccuaaugcuaaccccaaugccaacccuaaugcgaaccccaaugccaaccccaaugcuaacccuaaugccaacccgaaugcuaaccccaacgccaauccuaacgccaaucccaacgcuaauccuaacguggaccccaaugcgaacccgaaugccaacccuaaugcuaaccccaaugccaacccuaaugccaaccccaacgcuaauccuaacgccaaucccaacgcgaauccgaacgcuaauccuaacgccaaucccaacgccaaucccaacgcuaauccuaacgccaauccgaacgcuaaucccaacgccaacccuaaugcgaaccccaaugccaacccuaaugcuaaccccaauaagaacaaucagggcaacgggcaaggacacaauaugccuaacgaucccaaucggaacguugacgaaaaugccaacgcuaacuccgccgugaaaaauaacaauaacgaggaaccgucugauaagcauauuaaagaguaucugaauaagauccagaacagccucuccacagaguggagcccuuguucugugaccugcggcaauggcauucagguccgcaucaagcccggguccgcgaacaaaccuaaggacgaacuggacuacgccaaugauauugagaaaaagaucuguaaaauggaaaagugcagcucuguuuucaacguggucaauuccagcaucggacuuauuauggugcugucuuuucucuuccugaacuga

SEQ ID NO: 228 - RNA, 1359 nt, Artificial Sequence
  derived and/or modified CDS sequence (opt5) from Pf(3D7)__XP_001351122.1__Pf-CSP_L(G4SG4)_TM domain HA
augaugagaaagcuggccauccucagcguguccucuuuccuguuugucgaggcucuuuuccaggaauaccaaugcuauggcagcuccucuaacacccggguucugaaugagcucaacuacgacaaugccgggacaaaccuguauaaugaacuugagaugaacuacuauggaaaacaggaaaauugguacagccugaagaaaaacucccgcucucucggcgagaaugaugacgggaacaaugaggauaacgaaaagcugagaaaacccaagcacaagaaacugaagcagccugcggacggaaauccggaucccaacgcuaauccuaacguggaccccaacgccaauccuaacguggaucccaaugccaacccuaaugucgacccgaacgcuaaucccaacgccaauccuaacgcuaaucccaacgccaauccuaacgcgaaucccaacgccaacccgaaugcuaacccuaaugccaaccccaaugcuaacccuaaugccaaccccaaugcgaaccccaaugccaacccuaaugcuaacccgaaugccaaccccaacgcuaauccuaacgccaaucccaacgccaauccuaacguggaucccaaugcuaacccgaaugcgaacccuaaugccaaccccaaugcuaacccuaaugccaaccccaacgccaauccuaacgcuaaucccaacgccaauccgaacgcgaauccuaacgcuaaucccaacgccaaucccaacgccaauccuaacgcuaauccgaacgccaaucccaacgcuaacccuaaugccaaccccaaugcgaacccuaaugccaaccccaauaaaaacaaucagggcaacgggcaaggacauaauaugccuaacgaccccaaucggaacguugaugagaaugcuaacgccaacagcgcugugaagaauaacaauaacgaggaaccguccgacaaacacauuaaggaguaucucaauaagauccagaacagccugucuacggaaugguccccuuguagcgugaccugcggcaauggcauucagguccgcaucaaacccgggucugccaacaagccuaaagaugagcuugacuacgcgaaugacauugaaaagaaaaucuguaagauggagaaaugcuccagcguuuuuaacguggucaauucuuccaucggacugauuauggugcucagcuuccuguuucuuaacggcgggggaggcuccgggggaggcggcaagcuggaaucuacaagaaucuaccagauucucgccaucuauagcaccguggcuuccagccugguccugguugugucucucggggccauuuccuucuggauguguagcaauggaucucugcaaugccggaucuguauuuga

SEQ ID NO: 229 - RNA, 1233 nt, Artificial Sequence
  derived and/or modified CDS sequence (opt5) from Pf(3D7)__XP_001351122.1__Pf-CSP(199-377)_L(PVTN)_HBsAg
auggaccccaacgccaauccuaacgcuaauccgaacgccaaucccaacgcgaauccuaacgcuaaucccaacgccaauccuaacgccaaucccaacgcuaauccuaacgccaacccgaaugcuaaccccaaugccaacccuaaugcgaaccccaaugccaacccuaaugcuaaccccaaugccaacccgaaugcuaacccuaaugccaaccccaacgcgaauccuaacaagaauaaccagggcaaugggcaaggacacaacaugcccaaugaucccaacagaaauguggacgagaacgccaaugcuaacagcgccgucaaaaauaacaauaacgaggaaccuuccgauaagcauaucaaagaauaccugaacaagauucaaaauucucucagcaccgagugguccccgugcucuguuacauguggcaacgggauccaggugcggauuaaacccggaagcgcuaauaagccuaaggacgaacuggauuaugccaacgacaucgagaaaaagauuugcaaaauggagaaguguuccucugugcccgucacgaauauggaaaacaucaccagcggcuuccuugggccucugcucgugcugcaggccggauuuuuccuucugacacgcauccucaccauuccccagucccuggauagcugguggacaucucugaauuuucucggcggcuccccgguuugccuggggcagaacagccagucuccuaccuccaaucacagccccacaucuuguccucccaucugcccuggauacagauggaugugucuucggcgcuucauuaucuuucuguucauucuccugcuuugccugaucuuucuccuggugcugcucgacuaucagggcaugcugcccgucuguccgcuuauuccuggguccaccacgaccaacacaggacccugcaaaaccuguacaacccccgcucaaggcaauagcauguucccuuccugcugcuguacgaagccgacagaugggaacugcaccuguauccccaucccuucuagcugggcguuugccaaguaccugugggagugggcuuccgugagauucagcuggcucucucugcuuguucccuuugugcagugguucgucggacuguccccuacaguguggcucagcgccauuuggaugaugugguauuggggccccucucuguacagcaucguguccccuuuuauuccccugcucccgaucuucuucugccugugggucuauauuuga

SEQ ID NO: 230 - RNA, 1275 nt, Artificial Sequence
  derived and/or modified CDS sequence (opt5) from Pf(3D7)__XP_001351122.1__Pf-CSP(199-387)_L(PVTN)_HBsAg
augauggcccccgacccuaacgcuaauccgaacgccaaucccaacgcgaauccuaacgcuaaucccaacgccaauccuaacgccaaucccaacgcuaauccuaacgccaauccgaacgcuaaccccaaugccaacccuaaugcgaaccccaaugccaacccuaaugcuaaccccaaugccaacccgaaugcuaacccuaaugccaaccccaaugcgaacccuaacgccaaucccaacaagaauaaccagggcaaugggcaaggacacaacaugcccaaugauccuaacagaaauguggacgagaacgcuaaugccaacagcgcugucaaaaauaacaauaacgaggaaccguccgauaagcauaucaaagaauaccugaacaagauucaaaauucucucagcaccgaguggucccccugcucuguuacauguggcaacgggauccaggugcggauuaaaccuggaagcgccaauaagcccaaggacgaacuggauuaugccaacgacaucgagaaaaagauuugcaaaauggagaaguguuccucuguguucaaugucgugaacagcuccaucggccuugggccuguuacgaauauggaaaacaucaccagcggauuucugggcccccuccuggugcuucaggcuggcuucuuucugcucacacgcauucugaccaucccgcagucucuggauuccugguggacaagccucaauuuccuugggggaucuccugucugccugggccagaacucccagagccccaccucuaaucacuccccuacaagcugucccccuauuugccccggguacagauggaugugucugcggcgcuuuaucauuuuccucuuuauccugcuucugugccucauuuuccugcuggugcuccuggacuaucagggaaugcuuccgguuuguccucugauccccggcuccaccacgaccaacacagggcccugcaaaaccuguacaaccccugcgcaaggaaauucuauguuuccgagcugcugcuguacgaagcccacagauggcaacugcaccuguaucccuauucccuccagcugggccuucgcuaaguaccucugggagugggccucugugagauuuuccuggcugagccuucuggucccuuucgugcagugguuugugggccucucucccacagucuggcugagcgccaucuggaugaugugguauugggggccuucccuguacucuauuguuagccccuucaucccgcuccugccuauuuucuuuugccuuuggguguauaucuga

SEQ ID NO: 231 - RNA, 459 nt, Artificial Sequence
  derived and/or modified CDS sequence (opt5) from Pf(3D7)__XP_001351122.1__HsALB_Pf-CSP(19-152)
augaagugggugaccuucaucagccugcucuuucuguucuccucugccuacagccuuuuucaggaguaucaaugcuacggcuccucuagcaacacaagaguccugaaugaacucaacuaugacaaugcugggacgaaccuguacaaugagcuugaaaugaacuauuacggaaaacaggagaauugguauucccugaagaaaaacucucggagccucggcgaaaaugaugacgggaacaaugaggauaacgagaagcugcgcaaacccaagcacaagaaacugaagcagccugccgacggaaauccggaucccaacgcgaauccuaacguugaccccaacgcuaauccuaacguggaucccaaugccaacccuaauguggacccgaacgccaaucccaacgcuaauccuaacgccaaucccaacgcuaauccuaacgccaaucccaacgcgaacccguga

SEQ ID NO: 232 - RNA, 579 nt, Artificial Sequence
  derived and/or modified CDS sequence (opt5) from Pf(3D7)__XP_001351122.1__HsALB_Pf-CSP(19-192)
augaagugggugaccuucaucagccugcucuuucuguucuccucugccuacagccuuuuucaggaguaucaaugcuacggcuccucuagcaacacaagaguccugaaugaacucaacuaugacaaugcugggacgaaccuguacaaugagcuugaaaugaacuauuacggaaaacaggagaauugguauucccugaagaaaaacucucggagccucggcgaaaaugaugacgggaacaaugaggauaacgagaagcugcgcaaacccaagcacaagaaacugaagcagccugccgacggaaauccggaucccaacgcgaauccuaacguugaccccaacgcuaauccuaacguggaucccaaugccaacccuaauguggacccgaacgccaaucccaacgcuaauccuaacgccaaucccaacgcuaauccuaacgccaaucccaacgcgaacccgaaugccaacccuaaugcuaaccccaaugccaacccuaaugcuaaccccaaugccaaccccaaugcgaacccuaaugccaacccgaaugcuaaccccaacgccaauccuaacgcuaaucccuga

SEQ ID NO: 233 - RNA, 819 nt, Artificial Sequence
  derived and/or modified CDS sequence (opt5) from Pf(3D7)__XP_001351122.1__HsALB_Pf-CSP(19-272)
augaagugggugaccuucaucagccugcucuuucuguucuccucugccuacagccuuuuucaggaguaucaaugcuacggcuccucuagcaacacaagaguccugaaugaacucaacuaugacaaugcugggacgaaccuguacaaugagcuugaaaugaacuauuacggaaaacaggagaauugguauucccugaagaaaaacucucggagccucggcgaaaaugaugacgggaacaaugaggauaacgagaagcugcgcaaacccaagcacaagaaacugaagcagccugccgacggaaauccggaucccaacgcgaauccuaacguugaccccaacgcuaauccuaacguggaucccaaugccaacccuaauguggacccgaacgccaaucccaacgcuaauccuaacgccaaucccaacgcuaauccuaacgccaaucccaacgcgaacccgaaugccaacccuaaugcuaaccccaaugccaacccuaaugcuaaccccaaugccaaccccaaugcgaacccuaaugccaacccgaaugcuaaccccaacgccaauccuaacgcuaaucccaacgccaauccuaacgucgaucccaaugccaacccgaaugcuaacccuaaugcgaaccccaaugccaacccuaaugcuaaccccaacgccaauccuaacgccaaucccaacgcuaauccgaacgccaauccuaacgcgaaucccaacgcuaaucccaacgccaauccuaacgccaauccgaacgcuaaucccaacgccaacccuaaugcuaaccccaaugccaacccuaaugcgaaccccuga

SEQ ID NO: 234 - RNA, 981 nt, Artificial Sequence
  derived and/or modified CDS sequence (opt5) from Pf(3D7)__XP_001351122.1__HsALB_Pf-CSP(19-272)_L(AAY)_Pf-CSP(310-3 27)_L(AAY)_Pf-CSP(346-375)
augaagugggugaccuucaucagccugcucuuucuguucuccucugccuacagccuuuuucaggaguaucaaugcuacggcuccucuagcaacacaagaguccugaaugaacucaacuaugacaaugcugggacgaaccuguacaaugagcuugaaaugaacuauuacggaaaacaggagaauugguauucccugaagaaaaacucucggagccucggcgaaaaugaugacgggaacaaugaggauaacgagaagcugcgcaaacccaagcacaagaaacugaagcagccugccgacggaaauccggaucccaacgcgaauccuaacguugaccccaacgcuaauccuaacguggaucccaaugccaacccuaauguggacccgaacgccaaucccaacgcuaauccuaacgccaaucccaacgcuaauccuaacgccaaucccaacgcgaacccgaaugccaacccuaaugcuaaccccaaugccaacccuaaugcuaaccccaaugccaaccccaaugcgaacccuaaugccaacccgaaugcuaaccccaacgccaauccuaacgcuaaucccaacgccaauccuaacgucgaucccaaugccaacccgaaugcuaacccuaaugcgaaccccaaugccaacccuaaugcuaaccccaacgccaauccuaacgccaaucccaacgcuaauccgaacgccaauccuaacgcgaaucccaacgcuaaucccaacgccaauccuaacgccaauccgaacgcuaaucccaacgccaacccuaaugcuaaccccaaugccaacccuaaugcgaaccccgccgcuuacgaaccuuccgacaaacauauuaaggaguaccucaauaaaauccagaacagccuggccgcuuauauuaagcccggcucugccaauaagccgaaagaugaacuugacuacgcgaacgauaucgagaagaaaauuuguaagauggagaaaugcuccuga

SEQ ID NO: 235 - RNA, 942 nt, Artificial Sequence
  derived and/or modified CDS sequence (opt5) from Pf(3D7)__XP_001351122.1__HsALB_Pf-CSP(19-272)_L(AAY)_Pf-CSP(346-3 65)_L(AAY)_P2
augaagugggugaccuucaucagccugcucuuucuguucuccucugccuacagccuuuuucaggaguaucaaugcuacggcuccucuagcaacacaagaguccugaaugaacucaacuaugacaaugcugggacgaaccuguacaaugagcuugaaaugaacuauuacggaaaacaggagaauugguauucccugaagaaaaacucucggagccucggcgaaaaugaugacgggaacaaugaggauaacgagaagcugcgcaaacccaagcacaagaaacugaagcagccugccgacggaaauccggaucccaacgcgaauccuaacguugaccccaacgcuaauccuaacguggaucccaaugccaacccuaauguggacccgaacgccaaucccaacgcuaauccuaacgccaaucccaacgcuaauccuaacgccaaucccaacgcgaacccgaaugccaacccuaaugcuaaccccaaugccaacccuaaugcuaaccccaaugccaaccccaaugcgaacccuaaugccaacccgaaugcuaaccccaacgccaauccuaacgcuaaucccaacgccaauccuaacgucgaucccaaugccaacccgaaugcuaacccuaaugcgaaccccaaugccaacccuaaugcuaaccccaacgccaauccuaacgccaaucccaacgcuaauccgaacgccaauccuaacgcgaaucccaacgcuaaucccaacgccaauccuaacgccaauccgaacgcuaaucccaacgccaacccuaaugcuaaccccaaugccaacccuaaugcgaaccccgccgcuuacauuaaaccuggcuccgccaauaagcccaaagacgaacucgauuacgcuaacgacaucgaggccgcguaucaguacauuaaggccaauagcaaguucaucgggauuaccgaacuguga

SEQ ID NO: 236 - RNA, 936 nt, Artificial Sequence
  derived and/or modified CDS sequence (opt5) from Pf(3D7)__XP_001351122.1__HsALB_Pf-CSP(19-272)_L(AAY)_Pf-CSP(346-3 65)_L(AAY)_PADRE
augaagugggugaccuucaucagccugcucuuucuguucuccucugccuacagccuuuuucaggaguaucaaugcuacggcuccucuagcaacacaagaguccugaaugaacucaacuaugacaaugcugggacgaaccuguacaaugagcuugaaaugaacuauuacggaaaacaggagaauugguauucccugaagaaaaacucucggagccucggcgaaaaugaugacgggaacaaugaggauaacgagaagcugcgcaaacccaagcacaagaaacugaagcagccugccgacggaaauccggaucccaacgcgaauccuaacguugaccccaacgcuaauccuaacguggaucccaaugccaacccuaauguggacccgaacgccaaucccaacgcuaauccuaacgccaaucccaacgcuaauccuaacgccaaucccaacgcgaacccgaaugccaacccuaaugcuaaccccaaugccaacccuaaugcuaaccccaaugccaaccccaaugcgaacccuaaugccaacccgaaugcuaaccccaacgccaauccuaacgcuaaucccaacgccaauccuaacgucgaucccaaugccaacccgaaugcuaacccuaaugcgaaccccaaugccaacccuaaugcuaaccccaacgccaauccuaacgccaaucccaacgcuaauccgaacgccaauccuaacgcgaaucccaacgcuaaucccaacgccaauccuaacgccaauccgaacgcuaaucccaacgccaacccuaaugcuaaccccaaugccaacccuaaugcgaaccccgccgcuuacauuaaaccuggcuccgccaauaagcccaaagacgaacucgauuacgcuaacgacaucgaggccgcguaugccaaguucguggcugccuggacccugaaggcugccgccuga

SEQ ID NO: 237 - RNA, 993 nt, Artificial Sequence
  derived and/or modified CDS sequence (opt5) from Pf(3D7)__XP_001351122.1__HsALB_Pf-CSP(19-272)_L(G4S)_Pf-CSP(310-3 27)_L(G4S)_Pf-CSP(346-375)
augaagugggugaccuucaucagccugcucuuucuguucuccucugccuacagccuuuuucaggaguaucaaugcuacggcuccucuagcaacacaagaguccugaaugaacucaacuaugacaaugcugggacgaaccuguacaaugagcuugaaaugaacuauuacggaaaacaggagaauugguauucccugaagaaaaacucucggagccucggcgaaaaugaugacgggaacaaugaggauaacgagaagcugcgcaaacccaagcacaagaaacugaagcagccugccgacggaaauccggaucccaacgcgaauccuaacguugaccccaacgcuaauccuaacguggaucccaaugccaacccuaauguggacccgaacgccaaucccaacgcuaauccuaacgccaaucccaacgcuaauccuaacgccaaucccaacgcgaacccgaaugccaacccuaaugcuaaccccaaugccaacccuaaugcuaaccccaaugccaaccccaaugcgaacccuaaugccaacccgaaugcuaaccccaacgccaauccuaacgcuaaucccaacgccaauccuaacgucgaucccaaugccaacccgaaugcuaacccuaaugcgaaccccaaugccaacccuaaugcuaaccccaacgccaauccuaacgccaaucccaacgcuaauccgaacgccaauccuaacgcgaaucccaacgcuaaucccaacgccaauccuaacgccaauccgaacgcuaaucccaacgccaacccuaaugcuaaccccaaugccaacccuaaugcgaaccccggcgggggaggcuccgaaccuagcgacaaacauauuaaggaguaccucaauaaaauccagaacucucugggcgggggaggcuccauuaagcccgggagcgccaauaagccgaaagaugaacuugacuacgcuaacgauaucgagaagaaaauuuguaagauggagaaaugcucuuga

SEQ ID NO: 238 - RNA, 978 nt, Artificial Sequence
  derived and/or modified CDS sequence (opt5) from Pf(3D7)__XP_001351122.1__HsALB_Pf-CSP(19-272)_L(G4S)_Pf-CSP(310-3 27)_Pf-CSP(346-375)
augaagugggugaccuucaucagccugcucuuucuguucuccucugccuacagccuuuuucaggaguaucaaugcuacggcuccucuagcaacacaagaguccugaaugaacucaacuaugacaaugcugggacgaaccuguacaaugagcuugaaaugaacuauuacggaaaacaggagaauugguauucccugaagaaaaacucucggagccucggcgaaaaugaugacgggaacaaugaggauaacgagaagcugcgcaaacccaagcacaagaaacugaagcagccugccgacggaaauccggaucccaacgcgaauccuaacguugaccccaacgcuaauccuaacguggaucccaaugccaacccuaauguggacccgaacgccaaucccaacgcuaauccuaacgccaaucccaacgcuaauccuaacgccaaucccaacgcgaacccgaaugccaacccuaaugcuaaccccaaugccaacccuaaugcuaaccccaaugccaaccccaaugcgaacccuaaugccaacccgaaugcuaaccccaacgccaauccuaacgcuaaucccaacgccaauccuaacgucgaucccaaugccaacccgaaugcuaacccuaaugcgaaccccaaugccaacccuaaugcuaaccccaacgccaauccuaacgccaaucccaacgcuaauccgaacgccaauccuaacgcgaaucccaacgcuaaucccaacgccaauccuaacgccaauccgaacgcuaaucccaacgccaacccuaaugcuaaccccaaugccaacccuaaugcgaaccccggcgggggaggcuccgaaccuagcgacaaacauauuaaggaguaccucaauaaaauccagaacucucugauuaagcccggcuccgccaauaagccgaaagaugaacuugacuacgcuaacgauaucgagaagaaaauuuguaagauggagaaaugcagcuga

SEQ ID NO: 239 - RNA, 978 nt, Artificial Sequence
  derived and/or modified CDS sequence (opt5) from Pf(3D7)__XP_001351122.1__HsALB_Pf-CSP(19-325)
augaagugggugaccuucaucagccugcucuuucuguucuccucugccuacagccuuuuucaggaguaucaaugcuacggcuccucuagcaacacaagaguccugaaugaacucaacuaugacaaugcugggacgaaccuguacaaugagcuugaaaugaacuauuacggaaaacaggagaauugguauucccugaagaaaaacucucggagccucggcgaaaaugaugacgggaacaaugaggauaacgagaagcugcgcaaacccaagcacaagaaacugaagcagccugccgacggaaauccggaucccaacgcgaauccuaacguugaccccaacgcuaauccuaacguggaucccaaugccaacccuaauguggacccgaacgccaaucccaacgcuaauccuaacgccaaucccaacgcuaauccuaacgccaaucccaacgcgaacccgaaugccaacccuaaugcuaaccccaaugccaacccuaaugcuaaccccaaugccaaccccaaugcgaacccuaaugccaacccgaaugcuaaccccaacgccaauccuaacgcuaaucccaacgccaauccuaacgucgaucccaaugccaacccgaaugcuaacccuaaugcgaaccccaaugccaacccuaaugcuaaccccaacgccaauccuaacgccaaucccaacgcuaauccgaacgccaauccuaacgcgaaucccaacgcuaaucccaacgccaauccuaacgccaauccgaacgcuaaucccaacgccaacccuaaugcuaaccccaaugccaacccuaaugcgaaccccaauaaaaacaaucagggcaacgggcaaggacauaauaugccuaacgaccccaauagaaacguggaugaaaaugccaacgcuaacuccgccguuaagaauaacaauaacgaggaaccgagcgacaaacacauuaaggaguaccucaauaagauccagaacuga

SEQ ID NO: 240 - RNA, 1155 nt, Artificial Sequence
  derived and/or modified CDS sequence (opt5) from Pf(3D7)__XP_001351122.1__HsALB_Pf-CSP(19-384)
augaagugggugaccuucaucagccugcucuuucuguucuccucugccuacagccuuuuucaggaguaucaaugcuacggcuccucuagcaacacaagagugcugaaugaacucaacuaugacaaugcugggacgaaccuguacaaugagcuugaaaugaacuauuacggaaaacaggagaauugguauucccugaagaaaaacucucggagccucggcgaaaaugaugacgggaacaaugaggauaacgagaagcugcgcaaacccaagcacaagaaacugaagcagccugccgacggaaauccggaucccaacgcgaauccuaacguugaccccaacgcuaauccuaacguggaucccaaugccaacccuaauguggacccgaacgccaaucccaacgcuaauccuaacgccaaucccaacgcuaauccuaacgccaaucccaacgcgaacccgaaugccaacccuaaugcuaaccccaaugccaacccuaaugcuaaccccaaugccaaccccaaugcgaacccuaaugccaacccgaaugcuaaccccaacgccaauccuaacgcuaaucccaacgccaauccuaacgucgaucccaaugccaacccgaaugcuaacccuaaugcgaaccccaaugccaacccuaaugcuaaccccaacgccaauccuaacgccaaucccaacgcuaauccgaacgccaauccuaacgcgaaucccaacgcuaaucccaacgccaauccuaacgccaauccgaacgcuaaucccaacgccaacccuaaugcuaaccccaaugccaacccuaaugcgaaccccaauaaaaacaaucagggcaacgggcaaggacauaauaugccuaacgaccccaauagaaacguggaugaaaaugccaacgcuaacuccgccguuaagaauaacaauaacgaggaaccgagcgacaaacacauuaaggaguaccucaauaagauccagaacucucuguccaccgaguggagcccuuguucugugacaugcggcaauggcauucagguccggaucaaacccggguccgcuaacaagccuaaagaugaacuugacuacgccaaugacauugagaagaaaaucuguaagauggaaaaaugcagcucuguguucaacguugucaauuccagcuga

SEQ ID NO: 241 - RNA, 1293 nt, Artificial Sequence
  derived and/or modified CDS sequence (opt5) from Pf(3D7)__XP_001351122.1__HsALB_Pf-CSP(19-384)_TM domain HA
augaagugggugaccuucaucagccugcucuuucuguucuccucugccuacagccuuuuucaggaguaucaaugcuacggcuccucuagcaacacaagaguccugaaugaacucaacuaugacaaugcugggacgaaccuguacaaugagcuugaaaugaacuauuacggaaaacaggagaauugguauucccugaagaaaaacucucggagccucggcgaaaaugaugacgggaacaaugaggauaacgagaagcugcgcaaacccaagcacaagaaacugaagcagccugccgacggaaauccggaucccaacgcgaauccuaacguugaccccaacgcuaauccuaacguggaucccaaugccaacccuaauguggacccgaacgccaaucccaacgcuaauccuaacgccaaucccaacgcuaauccuaacgccaaucccaacgcgaacccgaaugccaacccuaaugcuaaccccaaugccaacccuaaugcuaaccccaaugccaaccccaaugcgaacccuaaugccaacccgaaugcuaaccccaacgccaauccuaacgcuaaucccaacgccaauccuaacgucgaucccaaugccaacccgaaugcuaacccuaaugcgaaccccaaugccaacccuaaugcuaaccccaacgccaauccuaacgccaaucccaacgcuaauccgaacgccaauccuaacgcgaaucccaacgcuaaucccaacgccaauccuaacgccaauccgaacgcuaaucccaacgccaacccuaaugcuaaccccaaugccaacccuaaugcgaaccccaauaaaaacaaucagggcaacgggcaaggacauaauaugccuaacgaccccaauagaaacguggaugaaaaugccaacgcuaacuccgccguuaagaauaacaauaacgaggaaccgagcgacaaacacauuaaggaguaccucaauaagauccagaacucucuguccaccgaguggagcccuuguucugugacaugcggcaauggcauucagguccggaucaaacccggguccgcuaacaagccuaaagaugaacuugacuacgccaaugacauugagaagaaaaucuguaagauggaaaaaugcagcucuguguucaacguugucaauuccagcaagcuggaguccacccgcaucuaucagauucucgcgaucuacucuacaguggccagcucccuggugcuuguggucagccugggagcuauuucuuuuuggauguguuccaacggcagccuccaaugcagaaucuguauuuga

SEQ ID NO: 242 - RNA, 1005 nt, Artificial Sequence
  derived and/or modified CDS sequence (opt5) from Pf(3D7)__XP_001351122.1__HsALB_Pf-CSP(82-397)
augaagugggugaccuucaucagccugcucuuucuguucuccucugccuacagcgacaacgagaaacuuagaaagcccaaacacaagaaacugaagcagccugcugauggcaauccggaccccaacgccaauccuaacgucgaucccaaugcgaacccuaauguugaccccaacgcuaauccuaacguggauccgaaugccaaccccaaugccaacccuaaugcuaaccccaacgccaauccuaacgcuaaucccaacgccaauccgaacgcgaauccuaacgccaaucccaacgcuaauccuaacgccaaucccaacgcuaaucccaacgccaacccuaaugcgaacccgaaugccaaccccaaugcuaacccuaaugccaaccccaaugcuaacccuaauguggaccccaacgccaauccgaacgccaauccuaacgcuaaccccaaugcgaacccuaaugccaaccccaaugcuaacccuaaugccaaccccaaugccaacccgaaugcuaacccuaaugccaaccccaaugcgaaccccaacgcuaauccuaacgccaauccgaacgccaaucccaacgcuaauccuaacgccaaucccaacgcuaauccuaacgccaaucccaacaagaauaaccaagggaauggacagggccauaacaugccuaacgaucccaaucggaacgucgacgaaaaugcgaacgccaauuccgcugugaaaaacaauaacaaugaggaaccgucugauaagcacauuaaagaguaucucaacaagauccagaauagccuguccacagaauggucuccuugcagcguuacgugugggaacggcauucaggugcgcaucaaacccggauccgccaauaagccuaaggacgagcuugauuacgcuaacgacauugagaaaaagaucugcaaaauggaaaaguguagcucugucuuuaaugugguuaacuccagcaucgggcugauuauggugcucucuuuccuguuucugaacuga

SEQ ID NO: 243 - RNA, 357 nt, Artificial Sequence
  derived and/or modified CDS sequence (opt5) from Pf(3D7)__XP_001351122.1__HsALB_Pf-CSP(93-192)
augaagugggugaccuucaucagccugcucuuucuguucuccucugccuacagcaaacuuaagcagcccgcugacggcaacccugauccgaaugccaaccccaaugucgacccuaacgcgaaucccaacguugauccuaaugcuaaccccaauguggacccuaacgccaauccgaacgccaaucccaacgcuaauccuaacgccaaccccaaugcuaacccuaaugccaaccccaaugcgaacccgaaugccaacccuaaugcuaaccccaaugccaacccuaaugcuaaccccaaugccaaccccaacgcgaauccuaacgccaauccgaacgcuaaucccaacgccaauccuuga

SEQ ID NO: 244 - RNA, 597 nt, Artificial Sequence
  derived and/or modified CDS sequence (opt5) from Pf(3D7)__XP_001351122.1__HsALB_Pf-CSP(93-272)
augaagugggugaccuucaucagccugcucuuucuguucuccucugccuacagcaaacuuaagcagcccgcugacggcaacccugauccgaaugccaaccccaaugucgacccuaacgcgaaucccaacguugauccuaaugcuaaccccaauguggacccuaacgccaauccgaacgccaaucccaacgcuaauccuaacgccaaccccaaugcuaacccuaaugccaaccccaaugcgaacccgaaugccaacccuaaugcuaaccccaaugccaacccuaaugcuaaccccaaugccaaccccaacgcgaauccuaacgccaauccgaacgcuaaucccaacgccaauccuaacgcuaaucccaacguggauccuaaugccaaccccaaugccaacccgaaugcuaacccuaacgcgaaucccaacgccaauccuaacgcuaaucccaacgccaauccuaacgccaaucccaacgcuaauccgaacgccaauccuaacgcgaaucccaacgcuaaccccaaugccaacccuaaugccaacccgaaugcuaaccccaaugccaacccuaaugcuaaccccaaugccaacccuuga

SEQ ID NO: 245 - RNA, 972 nt, Artificial Sequence
  derived and/or modified CDS sequence (opt5) from Pf(3D7)__XP_001351122.1__HsALB_Pf-CSP(93-397)
augaagugggugaccuucaucagccugcucuuucuguucuccucugccuacagcaaacuuaagcagcccgcugacggcaacccugauccgaaugccaaccccaaugucgacccuaacgcgaaucccaacguugauccuaaugcuaaccccaauguggacccuaacgccaauccgaacgccaaucccaacgcuaauccuaacgccaaccccaaugcuaacccuaaugccaaccccaaugcgaacccgaaugccaacccuaaugcuaaccccaaugccaacccuaaugcuaaccccaaugccaaccccaacgcgaauccuaacgccaauccgaacgcuaaucccaacgccaauccuaacgcuaaucccaacguggauccuaaugccaaccccaaugccaacccgaaugcuaacccuaacgcgaaucccaacgccaauccuaacgcuaaucccaacgccaauccuaacgccaaucccaacgcuaauccgaacgccaauccuaacgcgaaucccaacgcuaaccccaaugccaacccuaaugccaacccgaaugcuaaccccaaugccaacccuaaugcuaaccccaaugccaacccuaauaaaaacaaucaagggaacggacagggccacaauaugcccaacgacccuaacagaaaugucgaugagaacgcgaaugccaacuccgcugugaagaauaacaauaacgaggaacccucugacaaacauauuaaggaauaucugaauaagauccagaacagccucuccacagaguggucuccgugcagcguuacgugugggaauggcauucaggugcggaucaaaccuggauccgccaacaagcccaaagaugaacuggacuacgcuaaugauauugagaagaaaaucugcaagauggagaaguguagcucugucuuuaacgugguuaauuccagcaucgggcuuauuauggugcugucuuuccucuuucugaacuga

SEQ ID NO: 246 - RNA, 342 nt, Artificial Sequence
  derived and/or modified CDS sequence (opt5) from Pf(3D7)__XP_001351122.1__HsALB_Pf-CSP(98-192)
augaagugggugaccuucaucagccugcucuuucuguucuccucugccuacagcgcugacggcaaccccgauccuaaugccaacccgaaugucgaccccaacgcgaauccuaacguugaucccaaugcuaacccuaauguggaccccaacgccaauccuaacgccaauccgaacgcuaaucccaacgccaacccuaaugcuaaccccaaugccaacccuaaugcgaaccccaaugccaacccgaaugcuaacccuaaugccaaccccaaugcuaacccuaaugccaaccccaacgcgaaucccaacgccaauccuaacgcuaauccgaacgccaaucccuga

SEQ ID NO: 247 - RNA, 582 nt, Artificial Sequence
  derived and/or modified CDS sequence (opt5) from Pf(3D7)__XP_001351122.1__HsALB_Pf-CSP(98-272)
augaagugggugaccuucaucagccugcucuuucuguucuccucugccuacagcgcugacggcaaccccgauccuaaugccaacccgaaugucgaccccaacgcgaauccuaacguugaucccaaugcuaacccuaauguggaccccaacgccaauccuaacgccaauccgaacgcuaaucccaacgccaacccuaaugcuaaccccaaugccaacccuaaugcgaaccccaaugccaacccgaaugcuaacccuaaugccaaccccaaugcuaacccuaaugccaaccccaacgcgaaucccaacgccaauccuaacgcuaauccgaacgccaaucccaacgcuaauccuaacguggaucccaaugccaacccuaaugccaaccccaaugcuaacccgaacgcgaauccuaacgccaaucccaacgcuaauccuaacgccaaucccaacgccaauccuaacgcuaaucccaacgccaauccgaacgcgaauccuaacgcuaaccccaaugccaaccccaaugccaacccuaaugcuaacccgaaugccaaccccaaugcuaacccuaaugccaaccccuga

SEQ ID NO: 248 - RNA, 888 nt, Artificial Sequence
  derived and/or modified CDS sequence (opt5) from Pf(3D7)__XP_001351122.1__HsALB_Pf-CSP(98-374)
augaagugggugaccuucaucagccugcucuuucuguucuccucugccuacagcgcugacggcaaccccgauccuaaugccaacccgaaugucgaccccaacgcgaauccuaacguugaucccaaugcuaacccuaauguggaccccaacgccaauccuaacgccaauccgaacgcuaaucccaacgccaacccuaaugcuaaccccaaugccaacccuaaugcgaaccccaaugccaacccgaaugcuaacccuaaugccaaccccaaugcuaacccuaaugccaaccccaacgcgaaucccaacgccaauccuaacgcuaauccgaacgccaaucccaacgcuaauccuaacguggaucccaaugccaacccuaaugccaaccccaaugcuaacccgaacgcgaauccuaacgccaaucccaacgcuaauccuaacgccaaucccaacgccaauccuaacgcuaaucccaacgccaauccgaacgcgaauccuaacgcuaaccccaaugccaaccccaaugccaacccuaaugcuaacccgaaugccaaccccaaugcuaacccuaaugccaaccccaauaaaaacaaucaggggaacggacaaggccacaauaugccuaacgaccccaacagaaaugucgaugagaacgcgaaugccaacuccgcugugaagaauaacaauaacgaggaaccuucugacaaacauauuaaggaauaucuuaauaaaauccagaacagccuguccacagaguggucucccugcagcguuacgugugggaauggcauucaggugcggaucaagccgggauccgccaacaagccuaaagaugaacucgacuacgcuaaugauauugagaagaaaaucugcaagauggagaaauguuga

SEQ ID NO: 249 - RNA, 957 nt, Artificial Sequence
  derived and/or modified CDS sequence (opt5) from Pf(3D7)__XP_001351122.1__HsALB_Pf-CSP(98-397)
augaagugggugaccuucaucagccugcucuuucuguucuccucugccuacagcgcugacggcaaccccgauccuaaugccaacccgaaugucgaccccaacgcgaauccuaacguugaucccaaugcuaacccuaauguggaccccaacgccaauccuaacgccaauccgaacgcuaaucccaacgccaacccuaaugcuaaccccaaugccaacccuaaugcgaaccccaaugccaacccgaaugcuaacccuaaugccaaccccaaugcuaacccuaaugccaaccccaacgcgaaucccaacgccaauccuaacgcuaauccgaacgccaaucccaacgcuaauccuaacguggaucccaaugccaacccuaaugccaaccccaaugcuaacccgaacgcgaauccuaacgccaaucccaacgcuaauccuaacgccaaucccaacgccaauccuaacgcuaaucccaacgccaauccgaacgcgaauccuaacgcuaaccccaaugccaaccccaaugccaacccuaaugcuaacccgaaugccaaccccaaugcuaacccuaaugccaaccccaauaaaaacaaucaggggaacggacaaggccacaauaugccuaacgaccccaacagaaaugucgaugagaacgcgaaugccaacuccgcugugaagaauaacaauaacgaggaaccuucugacaaacauauuaaggaauaucuuaauaaaauccagaacagccuguccacagaguggucucccugcagcguuacgugugggaauggcauucaggugcggaucaagccgggauccgccaacaagccuaaagaugaacucgacuacgcuaaugauauugagaagaaaaucugcaagauggagaaauguagcucugucuuuaacgugguuaauuccagcaucgggcugauuauggugcuuucuuuccuguuucucaacuga

SEQ ID NO: 250 - RNA, 1284 nt, Artificial Sequence
  derived and/or modified CDS sequence (opt5) from Pf(3D7)__XP_001351122.1__HsALB_Pf-CSP(199-377)_L(PVTN)_HBsAg
augaagugggugaccuucaucagccugcucuuucuguucuccucugccuacagcgaccccaacgcuaauccuaacgccaauccgaacgcgaaucccaacgcuaauccuaacgccaaucccaacgccaauccuaacgcuaaucccaacgccaauccuaacgcuaacccgaaugccaaccccaaugcgaacccuaaugccaaccccaaugcuaacccuaaugccaaccccaaugcuaacccgaaugccaacccuaaugcgaaccccaacgccaauccuaacaaaaauaaccagggcaaugggcaaggacacaacaugcccaaugaucccaacagaaaugucgacgagaacgcuaaugccaacuccgcuguuaagaauaacaauaacgaggaaccuucugauaaacauauuaaggaauaucuuaacaaaauccagaauagccuguccacagaguggucuccgugcagcgugacguguggcaacgggauucaggugcggaucaagcccggauccgccaauaagccuaaagacgaacucgauuacgccaacgacauugagaagaaaaucugcaagauggagaaauguagcucuguccccgugaccaauauggaaaacaucacauccggcuuucuggggccucuucugguucuccaggcuggauucuuucugcugacccgcauucucacaaucccccaaagccuggauucuugguggaccucccuuaauuuccugggcggcagcccggugugccucgggcagaacucucaguccccuacaagcaaucacucccccaccucuuguccucccauuugcccuggauauagauggaugugucugcggcgcuuuaucauuuuccuuuuuauccugcuccugugccugauuuuccuccugguccuucuggacuaccagggcaugcuccccguguguccgcugaucccugggagcacgaccacaaacaccggacccugcaagacauguaccacgcccgcgcaaggcaauuccauguuuccuagcugcugcuguacaaagccgaccgaugggaacugcacauguauccccauuccuucuuccugggccuucgcuaaauaucuuugggagugggccagcguuagauuuucuuggcugagccuccuggugcccuucguccagugguucgugggacuguccccuaccguguggcucucugccaucuggaugaugugguacuggggccccagccuguauuccauugucagcccuuuuaucccccuucugccgauuuucuuuugccucuggguuuacaucuga

SEQ ID NO: 251 - RNA, 1023 nt, Artificial Sequence
  derived and/or modified CDS sequence (opt5) from Pb(ANKA)__XP_022712148.1__Pb-CSP
augaagaaaugcaccauccugguugucgccagccuccugcuuguuaacucccugcuccccggcuacgggcagaauaagucuauucaagcucagagaaaccugaaugagcuuuguuauaacgaaggaaaugacaacaaacuguaccacgugcucaauagcaagaacggcaaaaucuauaaucggaacacagugaaucgccugcuggccgaugcgccugaggggaagaagaacgaaaagaaaaaugagaaaauugaaagaaacaauaagcucaaacagccgcccccucccccuaaccccaacgacccuccgcccccuaaucccaacgauccucccccgccuaaucccaacgacccucccccucccaauccgaacgaucccccucccccuaaugcuaacgaucccccgccucccaaugccaacgacccugcucccccuaaugccaacgaccccgccccgccuaaugcuaacgaucccgcgcccccuaaugccaacgacccggcucccccuaacgccaaugaucccccucccccuaaccccaaugacccggccccucccaacgcuaaugauccucccccgccuaaccccaaugacccugccccuccccagggaaacaauaacccccaaccgcagccccggccucagccccagccucaaccccagccucagccgcagccccaaccucagccccagccucgcccccaaccgcagccucagcccggcgggaauaacaauaacaagaauaacaacaaugacgauuccuacauccccucugcggagaagauucuggaguucgucaaacagaucagagacagcaucacggaagaguggucccaaugcaacgugaccuguggaucuggcauucggguucgcaagagaaaaggcagcaauaagaaagccgaagaucuuacacuggaggacaucgauaccgagauuugcaagauggacaaauguuccagcaucuuuaacauugugucuaauucccucggguucgucauccugcuugugcugguguuuuucaacuga

SEQ ID NO: 252 - RNA, 1188 nt, Artificial Sequence
  derived and/or modified CDS sequence (opt5) from Pb(ANKA)__XP_022712148.1__Pb-CSP_L(G4SG4)_TM domain HA
augaagaaaugcaccauccugguggucgccagccuccugcuuguuaacucccugcuccccggcuacgggcagaauaagucuauucaagcucagagaaaccugaaugagcuuuguuauaacgaaggaaaugacaacaaacuguaccacgugcucaauagcaagaacggcaaaaucuauaaucggaacacagugaaucgccugcuggccgaugcgccugaggggaagaagaacgaaaagaaaaaugagaaaauugaaagaaacaauaagcucaaacagccgcccccucccccuaaccccaacgacccuccgcccccuaaucccaacgauccucccccgccuaaucccaacgacccucccccucccaauccgaacgaucccccucccccuaaugcuaacgaucccccgccucccaaugccaacgacccugcucccccuaaugccaacgaccccgccccgccuaaugcuaacgaucccgcgcccccuaaugccaacgacccggcucccccuaacgccaaugaucccccucccccuaaccccaaugacccggccccucccaacgcuaaugauccucccccgccuaaccccaaugacccugccccuccccagggaaacaauaacccccaaccgcagccccggccucagccccagccucaaccccagccucagccgcagccccaaccucagccccagccucgcccccaaccgcagccucagcccggcgggaauaacaauaacaagaauaacaacaaugacgauuccuacauccccucugcggagaagauucuggaguucgucaaacagaucagagacagcaucacggaagaguggucccaaugcaacgugaccuguggaucuggcauucggguucgcaagagaaaaggcagcaauaagaaagccgaagaucuuacacuggaggacaucgauaccgagauuugcaagauggacaaauguuccagcaucuuuaacauugugucuaauucccucggguucgucauccugcuugugcugguguuuuucaacggaggcgggggaagcggcgggggaggcaagcucgaaucuacacggauuuaucagauccuggcuaucuacuccaccguugccagcucucugguccucguggugucccugggcgcuauuagcuuuuggaugugcuccaaugggucucuucagugucgcaucugcauuuga

SEQ ID NO: 253 - RNA, 1008 nt, Artificial Sequence
  derived and/or modified CDS sequence (opt5) from Pb(ANKA)__XP_022712148.1__HsALB_Pb-CSP(24-340)
augaagugggugaccuucaucagccugcucuuucuguucuccucugccuacagccagaacaaauccauucaagcucagagaaaucuuaacgagcugugcuauaaugaaggcaacgacaauaagcucuaccacguccugaacucuaaaaaugggaagaucuauaaccggaauacaguuaaccgccuucuggccgaugcgcccgagggcaaaaagaaugaaaagaaaaacgagaagauugaaagaaauaacaaacucaagcagccuccgcccccucccaauccuaacgacccucccccgcccaacccuaaugaucccccucccccgaacccuaaugaucccccuccucccaaccccaaugacccgcccccucccaacgcuaaugacccucccccgccuaacgccaaugaucccgccccucccaacgcuaaugacccugcucccccgaacgccaaugauccugccccucccaacgcgaaugaccccgccccgcccaacgcuaacgauccucccccucccaauccuaacgaccccgccccgccuaaugcuaacgaucccccucccccgaauccuaacgaccccgccccuccccagggaaauaacaauccccaaccucagccgcggccccagccucagccccaaccucagccccagccucagccgcaaccccagccucagccccgcccucaaccccagccgcagccugggggaaacaauaacaauaaaaacaauaacaacgacgauagcuacauccccuccgcggagaagauucuggaguuugugaagcagaucagagacucuaucacggaagaguggagccaaugcaaugugaccugcggcuccgggauucggguccgcaaaagaaagggaagcaacaaaaaggccgaagaucugacacucgaggacaucgauaccgagauuuguaaaauggacaaguguucuuccaucuucaauauugugagcaacucucugggcuuuguuauccuucuggugcucgucuucuuuaauuga

SEQ ID NO: 254 - RNA, 1026 nt, Artificial Sequence
  derived and/or modified CDS sequence (opt5) from Pb(ANKA)__XP_022712148.1__HsIns-iso1_Pb-CSP(24-340)
auggcccuguggaugagacuccugccccuucuggcucuccuggcccuuuggggcccugacccggcggcugcccagaacaagagcauccaagcccagcggaaucugaacgagcucugcuacaaugaagggaacgauaauaaacuguaucacgugcugaacuccaagaauggaaaaauuuacaaccgcaauaccgucaacagacuccuggcugacgcccccgagggcaagaaaaaugaaaagaagaacgagaaaaucgaacggaauaacaaacuuaagcagccucccccucccccuaauccgaacgaucccccucccccuaaccccaaugacccgccucccccuaaccccaaugaucccccuccgcccaacccuaaugaucccccucccccgaacgcuaaugacccucccccucccaacgccaaugacccugcgcccccgaacgccaaugauccugcuccucccaacgccaaugaccccgcuccgcccaacgccaaugauccugcgcccccuaacgccaacgaucccccucccccgaauccuaacgaccccgcuccucccaaugccaacgacccgccucccccuaaucccaacgaccccgcuccuccgcaggggaauaacaauccccaaccucagccccgcccucagccccagccucaaccgcagccccagccucagccccaaccucagccccagccgagaccucaaccccagccccagccuggaggcaacaauaacaauaagaacaauaacaacgaugacucuuauauucccagcgccgagaaaauccuggaguucguuaagcagauucgggauuccaucacagaagaguggucucaauguaaugugacgugcgggagcggaauccgcgugagaaagcggaaaggcuccaacaagaaagccgaagaccucacccuggaggauauugacacagagaucuguaagauggauaaaugcucuagcauuuuuaauaucgucuccaacagccuuggcuucgugauucugcucguucugguguuuuucaauuga

SEQ ID NO: 255 - RNA, 1005 nt, Artificial Sequence
  derived and/or modified CDS sequence (opt5) from Pb(ANKA)__XP_022712148.1__HsSPARC_Pb-CSP(24-340)
augagagccuggaucuucuuucugcucugccuggcuggccgggcccuugcgcagaacaagagcauucaagcucagcgcaaucugaacgagcucuguuacaaugaagggaacgacaauaaacuguaucacgugcuuaacuccaagaauggaaaaaucuacaacagaaauaccgucaaccggcugcucgccgaugcccccgagggcaagaaaaaugaaaagaagaacgagaaaauugaacgcaauaacaagcugaaacagccuccgcccccucccaauccuaacgacccucccccgcccaacccuaaugaucccccucccccgaacccuaaugaucccccuccucccaaccccaaugacccgcccccucccaacgcuaaugacccucccccgccuaacgccaaugaucccgcuccucccaacgccaaugacccugcgcccccgaacgccaaugauccugcuccucccaacgccaaugaccccgcuccgcccaacgccaacgauccucccccucccaauccuaacgaccccgcgccgccuaaugccaacgaucccccucccccgaauccuaacgaccccgcuccuccccaggggaauaacaauccccaaccucagccgagaccccagccucagccccaaccucagccccagccucagccgcaaccccagccucagccccggccucaaccccagccgcagccuggaggcaacaauaacaauaagaacaauaacaacgacgauucuuauauccccagcgccgagaaaauucuggaguucguuaagcagauccgcgacuccaucacagaagaguggucucaaugcaaugugacgugugggagcggaauuagagugcggaagcgcaaaggcuccaacaagaaagcugaagaucucacccuggaggacaucgauacagagauuugcaagauggacaaauguucuagcaucuuuaauauugucuccaacagccuuggcuucgugauccugcucguucugguguuuuucaauuga

SEQ ID NO: 256 - RNA, 1008 nt, Artificial Sequence
  derived and/or modified CDS sequence (opt5) from Pb(ANKA)__XP_022712148.1__IgE_Pb-CSP(24-340)
auggacuggaccuggauccuguuccucguggccgcugccacaagaguccacagccagaacaaguccauucaagcgcagcggaaucugaacgagcuuugcuacaaugaaggcaacgauaauaaacuguaucauguucucaacucuaagaaugggaaaaucuacaaccgcaauacggugaacagacugcuugcugacgcccccgagggaaagaaaaaugaaaagaagaacgagaaaauugaacggaauaacaagcugaaacagccuccgcccccucccaauccuaacgaucccccuccgcccaacccuaaugacccgccucccccgaacccuaaugaucccccuccucccaaccccaaugacccgcccccucccaacgccaaugauccucccccgccuaacgcuaaugaccccgccccucccaacgcuaaugauccugccccucccaacgcgaaugaccccgccccucccaacgcuaaugaucccgccccgcccaacgcuaacgacccucccccucccaauccuaacgaucccgccccgccuaaugcgaacgaucccccucccccgaauccuaacgaccccgccccuccccagggcaauaacaauccccaaccucagccgcgcccccagccucagccccaaccucagccccagccucagccgcaaccccagccucagcccagaccucaaccccagccgcagccugggggaaacaauaacaauaagaacaauaacaacgacgacagcuauauccccuccgcugagaaaauucucgaguuugugaagcagauccgggauucuaucaccgaagaguggagccaauguaaugucacaugcggcuccgggauucgcgugagaaagcggaaaggaucuaacaagaaagccgaagaccugacccuggaggauaucgacacagagauuuguaagauggauaaaugcagcuccaucuucaauauuguuagcaacucucucggcuuugugauccugcuuguccugguguucuuuaauuga

SEQ ID NO: 257 - RNA, 1194 nt, Artificial Sequence
  derived and/or modified CDS sequence (opt6) from Pf(3D7)__XP_001351122.1__Pf-CSP
augaugagaaaacuugcaauacuaagcguaucuucauuccuauucguagaagcacuauuccaagaauaucaaugcuauggaucaagcuccaacacaagaguacuuaacgaacuaaauuacgacaaugcaggaacaaaccuauacaaugaacuugaaaugaauuacuacggcaaacaagaaaacugguacucccuaaaaaaaaacucaaggucauuaggagaaaacgacgacggaaacaacgaagacaacgaaaaacuacgaaaacccaaacacaaaaaauuaaaacaaccagcagacggaaaccccgacccaaacgcaaacccaaacgucgacccaaacgcaaacccgaacguagacccaaacgcgaacccaaacguagacccaaacgcaaacccaaacgcaaacccaaacgcaaacccaaacgcaaacccaaaugcaaacccaaacgcaaacccaaacgccaauccaaacgccaacccaaacgcaaacccaaacgcaaacccaaacgcaaacccaaacgcaaaccccaacgcaaacccaaacgcuaacccaaacgcaaacccuaaugcaaacccuaacgcaaacccaaacgucgacccgaacgcaaacccaaaugcaaacccaaacgcaaacccaaacgcaaaccccaacgccaacccaaaugcaaacccaaaugcaaauccaaacgcaaacccaaacgcaaacccuaacgcaaacccaaacgcaaaccccaacgcaaacccaaacgcaaacccaaacgccaacccaaacgcaaaccccaaugcaaacccaaacgcaaacccaaacgcaaacccaaacaaaaacaaucaaggcaacggacaaggacacaacaugcccaacgacccaaaccgaaacgucgacgaaaacgccaacgcaaacagcgcaguaaaaaacaacaacaacgaagaacccucagacaaacacauaaaagaauacuuaaacaaaauacaaaacucacuaucuacagaauggucacccuguagcguaaccugcggcaacggaauacaaguaagaauaaaaccaggcucagcaaacaaaccaaaagaugaacuagacuacgccaaugauauagaaaaaaaaauauguaaaauggaaaaauguagcucagucuucaacguagucaacucaucaauaggacuaauaaugguacucuccuuccucuuccuaaauuaa

SEQ ID NO: 258 - RNA, 1122 nt, Artificial Sequence
  derived and/or modified CDS sequence (opt6) from Pf(3D7)__XP_001351122.1__Pf-CSP(1-374)
augaugagaaaacuagcaauauuaagcguaagcucauuccuauucguugaagcauuauuccaagaauaccaaugcuacggcucaagcucaaacacaagaguauuaaacgaauuaaacuacgacaaugcaggaaccaaccucuacaacgaacuagaaaugaauuauuacggcaaacaagaaaacugguacucacucaaaaaaaacucacgaucccuaggagaaaacgaugacggaaacaaugaagauaacgaaaaauuaagaaaaccaaaacacaaaaaauuaaaacaaccugcagacggaaacccagacccaaacgcaaauccaaauguagacccaaacgcaaaccccaacguagacccaaaugcaaacccaaacguagacccaaacgcaaacccaaaugcaaacccaaacgcaaacccaaacgcaaacccaaacgcaaaccccaacgcaaacccaaacgcaaacccaaacgccaaccccaacgcaaacccaaacgcaaacccgaaugcaaacccaaacgcaaacccaaacgcaaacccaaacgcaaacccaaacgcaaacccaaacgcaaacccaaaugcaaacccaaacguggauccaaacgcaaauccaaacgcaaacccaaacgcaaacccaaacgcaaaccccaacgcaaauccaaacgcaaaccccaaugcaaauccaaacgcaaacccaaacgccaacccaaacgcaaacccgaacgccaauccaaacgcaaacccaaacgcaaacccaaacgcaaacccaaacgccaacccaaacgcaaacccaaacgcaaacccaaacgcaaaccccaacaaaaacaaccaaggaaacggacaaggacacaacaugccaaacgauccaaacagaaacgucgacgaaaacgccaacgcuaacagcgcaguaaaaaacaauaacaacgaagaaccaucagacaaacauauaaaagaauacuuaaacaaaauccaaaacucacuaucaacagaauggucccccuguuccguaacaugcggaaacggaauacaaguacgaaucaaaccaggaucagccaacaaaccgaaagacgaacuagacuaugccaacgauauagaaaaaaaaauaugcaaaauggaaaaaugc

SEQ ID NO: 259 - RNA, 975 nt, Artificial Sequence
  derived and/or modified CDS sequence (opt6) from Pf(3D7)__XP_001351122.1__Pf-CSP(1-325)
augaugcgaaaauuagcaauacuaagcguaagcucauucuuauucguagaagcacucuuccaagaauaccaaugcuacggaucaagcucaaacacaagaguccuaaacgaauuaaacuaugacaacgcaggaacaaaccuauacaacgaacuagaaaugaacuacuacggaaaacaagaaaacugguacucacucaaaaaaaacagcagaagucuaggagaaaacgacgacggaaacaacgaagacaacgaaaaacuacgaaaaccaaaacacaaaaaacuaaaacaaccagcagacgggaacccagacccaaacgcaaacccaaacguagauccaaacgcaaacccaaauguagacccuaacgcaaacccaaauguagacccaaacgcaaacccuaacgcaaacccaaaugcaaacccaaacgcaaauccaaacgcaaacccaaacgcaaacccaaacgcgaacccaaacgcaaacccaaacgcaaacccaaaugcaaaccccaacgcaaauccaaaugcaaacccaaaugcaaauccaaacgcaaacccaaacgcaaacccaaaugcaaauccaaacgcaaauccaaacguggauccaaacgcaaacccaaacgcaaacccaaacgcaaacccaaacgcaaacccaaacgcaaacccaaacgcaaauccaaacgccaauccaaacgcaaauccaaaugcaaacccaaacgcaaacccaaacgcaaacccaaacgcaaacccaaacgcaaacccaaacgcaaacccaaacgcaaacccaaacgcaaacccaaacgcaaacccaaacgcaaacccaaacaaaaacaaccaaggaaacggacaaggacacaacaugccaaacgacccaaacagaaacguagacgaaaacgccaacgcaaauagcgcagucaaaaacaacaauaacgaagaaccaucggacaaacacauaaaagaauacuuaaacaaaauacaaaac

SEQ ID NO: 260 - RNA, 1194 nt, Artificial Sequence
  derived and/or modified CDS sequence (opt6) from Pf(3D7)__XP_001351122.1__HsALB_Pf-CSP(19-397)
augaaaugggucacauuuauuucacuacuauucuuauucucaagcgcauacucacuauuucaagaauaccaaugcuacggcucauccucaaauacacgaguacuaaaugaacucaacuacgacaacgcaggaaccaaucucuacaacgaauuagaaaugaacuacuacggcaaacaagaaaacugguauucacuaaaaaaaaacaguagaucacuaggagaaaaugacgacggaaacaaugaagacaacgaaaaacuaagaaaaccaaaacacaaaaaauuaaaacaaccagcagacggaaacccagacccaaacgcaaacccuaacguagaucccaaugccaacccaaauguagacccaaacgcaaaccccaacgucgauccaaacgcaaacccaaacgcaaacccaaacgcaaacccaaacgcaaacccaaacgcaaacccaaaugcaaaccccaacgcaaacccaaacgcuaacccaaacgcaaacccaaacgcaaacccaaacgcaaacccaaacgcaaacccaaacgccaacccaaacgccaacccaaacgcaaauccaaacgcaaacccaaaugccaauccaaacguugacccaaacgcaaacccaaacgcaaaccccaacgcaaacccaaacgcaaauccaaacgcgaaccccaacgcaaacccaaacgcaaacccaaaugcaaacccaaacgcuaacccaaaugcaaacccaaacgccaacccaaacgccaacccaaacgcaaaccccaacgcaaacccaaacgcaaacccaaacgccaauccaaacgcaaacccaaaugcaaacccaaacaaaaacaaccaaggaaacggacaaggacacaacaugccaaacgaccccaacagaaacguagaugaaaaugcaaaugcuaacucagccguaaaaaacaauaacaacgaagaaccaucagacaaacacauaaaagaauaccuaaauaaaauacaaaauuccuuaucaacagaaugguccccaugcucaguaacuugcgguaacggcauacaaguaagaauaaaaccaggaucagcaaacaaaccaaaagacgaauuagacuaugcaaacgacauagaaaaaaaaauauguaaaauggaaaaaugcagcucaguauucaacguaguaaauuccucaaucggacucaucaugguauuaucauuccuauuuuuaaauuaa

SEQ ID NO: 261 - RNA, 1212 nt, Artificial Sequence
  derived and/or modified CDS sequence (opt6) from Pf(3D7)__XP_001351122.1__HsIns-iso1_Pf-CSP(19-397)
auggcacuauggaugagacuacuaccacuacuagcacuccuagccuuauggggacccgauccagccgcagcacucuuccaagaauaccaaugcuauggaucauccuccaacacaagaguccuaaacgaauuaaauuacgacaacgcuggaacaaaccuauacaaugaacuagaaaugaauuauuacggaaaacaagaaaauugguacucacuaaaaaaaaacucuagaagccuaggagaaaacgacgacggaaacaacgaagauaacgaaaaacuaagaaaaccaaaacacaaaaaauuaaaacaacccgcagacggcaacccagacccaaaugcaaauccaaacguagacccaaacgcaaauccaaacguagacccaaacgcaaacccaaauguagacccaaacgcaaauccaaacgcaaacccaaaugcaaacccaaaugcaaacccaaacgcaaauccaaacgcaaaucccaacgccaacccaaacgcaaacccaaacgcaaauccaaacgcaaacccaaacgcaaacccaaacgcaaacccaaacgcaaacccaaaugcaaacccaaaugccaauccaaacgccaacccaaacgcaaacccaaacguagacccaaacgcaaacccaaacgccaacccaaacgcaaaccccaaugcaaacccaaacgcaaacccaaacgcaaaccccaacgcaaauccaaacgcaaacccaaacgcaaauccaaacgcaaauccaaacgccaacccaaacgcaaacccaaacgcaaauccaaacgcaaaccccaacgcaaacccaaacgccaacccaaaugcaaacccaaacgcaaaucccaauaaaaacaaccaaggaaacggacaaggacacaacaugccaaacgauccaaacagaaacguagacgaaaacgcaaacgcaaacucagcagucaaaaacaauaacaacgaagaaccaucagacaaacacauaaaagaauaccuaaacaaaauacaaaacucacuauccacagaauggucaccaugcucaguaaccugcggaaacggaauacaaguaagaauaaaaccaggaucagccaacaaaccaaaagacgaacuagacuaugcuaaugacauagaaaaaaaaauaugcaaaauggaaaaaugcuccucaguauucaacgucguaaacucuucaauaggacuaauaaugguacuauccuucuuauuucuaaacuaa

SEQ ID NO: 262 - RNA, 1191 nt, Artificial Sequence
  derived and/or modified CDS sequence (opt6) from Pf(3D7)__XP_001351122.1__HsSPARC_Pf-CSP(19-397)
augcgcgcauggauauucuuccuccuaugucuagcaggucgagcacuugcacucuuccaagaauaccaauguuacggauccucaagcaacacacgaguacuaaacgaacuaaacuacgauaacgcaggaaccaacuuauacaacgaacuagaaaugaacuacuacggcaaacaagaaaacugguacucacucaaaaaaaacagcagaagccuaggagaaaaugacgacggaaacaacgaagauaacgaaaaauuacgaaaacccaaacacaaaaaauuaaaacaacccgcagauggaaauccagacccgaacgcaaacccaaacguagacccaaacgcaaacccaaacguugacccaaacgcaaacccaaacguagacccaaacgcaaacccuaacgccaacccaaacgcaaacccaaacgcaaacccaaaugcgaacccaaaugcaaacccaaacgccaacccaaaugcaaaccccaacgcaaauccaaacgcaaacccaaaugcaaacccaaacgcaaacccaaacgcaaacccaaacgcaaacccaaacgccaaccccaaugcaaacccaaacgcaaacccaaacgucgacccaaacgcaaacccaaacgcaaacccaaacgcaaauccaaacgcaaauccaaacgcaaacccuaacgcaaacccaaacgcaaacccaaaugcaaauccaaacgcaaacccaaacgcaaacccaaacgcaaauccaaacgcaaacccaaacgcaaacccaaacgcaaacccuaaugcaaacccaaaugcaaauccaaacgcaaacccaaaugcaaaccccaacaaaaacaaccaaggaaacggacaaggacacaauaugccaaacgacccaaacagaaacguagacgaaaacgcaaacgccaacagcgcaguaaaaaacaacaacaacgaagaaccaucagacaaacacauaaaagaauaccuaaacaaaauacaaaacucacuaucaacagaauggucucccugcuccguaacaugcggaaacggcauacaaguacgaauaaaaccuggaucagccaacaaaccaaaagacgaacuagacuaugcaaaugacauagaaaaaaaaauaugcaaaauggaaaaaugcaguucagucuucaacguagucaacagcucaauaggccuaauaaugguacucucauuccuauucuuaaacuaa

SEQ ID NO: 263 - RNA, 1194 nt, Artificial Sequence
  derived and/or modified CDS sequence (opt6) from Pf(3D7)__XP_001351122.1__IgE_Pf-CSP(19-397)
auggauuggacauggauucucuuccucguagcagcagccacaagaguacacucuuuauuucaagaauaccaaugcuacggaucaagcucaaacacacgcguacuaaacgaacuaaacuacgacaacgcaggaacaaacuuauacaacgaacuagaaaugaacuauuauggcaaacaagaaaacugguacucacuaaaaaaaaacuccagaagcuuaggagaaaacgacgacggaaacaacgaagacaacgaaaaacuacgcaaaccuaaacacaaaaaacuaaaacaaccugcagacggaaacccagacccaaacgcgaacccaaacguagauccaaacgcaaacccaaacguagaucccaacgcaaacccgaacguagacccuaacgcaaauccaaacgcaaaccccaacgcaaacccgaacgcaaacccaaacgcaaacccaaacgcaaacccaaacgcaaacccaaacgcaaacccaaacgccaacccaaacgcaaauccaaacgcuaacccaaaugcaaacccuaacgcaaacccaaacgccaacccaaacgcaaacccaaacgcaaacccaaacgcaaaucccaauguagacccaaacgcaaacccaaacgcaaacccaaacgcuaacccaaaugcaaacccaaacgcaaacccaaacgcaaacccaaacgcuaaccccaacgcaaacccgaacgcaaacccaaaugcaaacccaaacgcaaacccaaaugcaaacccaaacgcaaacccaaacgcaaaccccaaugccaacccaaacgcaaauccaaaugccaauccaaacgcaaacccaaacaaaaacaaccaaggaaauggacaaggacauaacaugccaaacgaccccaaccgaaauguagacgaaaacgccaacgcaaauagugcagucaaaaacaauaacaaugaagaacccucagauaaacauauaaaagaauacuuaaacaaaauacaaaacucacuaucaaccgaguggucuccuugcucaguaacauguggaaacggaauacaaguacgaauaaaaccaggaucagcaaacaaaccgaaagacgaacuagacuacgccaacgacauagaaaagaaaauauguaaaauggagaaauguaguucaguauucaacgugguaaacagcucaauaggccuaauaaugguacucucuuuccuauuccuaaacuaa

SEQ ID NO: 264 - RNA, 1359 nt, Artificial Sequence
  derived and/or modified CDS sequence (opt6) from Pf(3D7)__XP_001351122.1__Pf-CSP_L(G4SG4)_TM domain HA
augaugcguaaacuagcaauacuaucugucaguucauucuuauucguagaagcacuauuccaagaauaccaauguuacggaucuucaucaaacacaagaguacucaacgaauuaaacuacgauaacgcuggaaccaauuuauacaacgaacuagaaaugaacuacuauggaaaacaagaaaacugguauucacuaaaaaaaaacagcagaaguuuaggagaaaaugacgacggaaacaaugaagacaaugaaaaauuacgaaaaccaaaacacaaaaaauuaaaacaacccgccgacggaaauccagacccaaacgcaaacccaaauguagacccaaacgcaaacccaaauguagaucccaacgcaaacccaaacguagaucccaaugcaaacccaaacgcaaacccaaaugcaaaccccaacgcaaacccaaaugcaaacccuaacgcaaacccgaacgcaaacccaaacgcaaaucccaaugcaaaccccaacgcaaauccaaaugcaaacccuaacgcaaauccgaacgcaaauccaaacgcaaacccaaacgcaaacccaaacgcaaacccaaacgcaaacccaaacgucgacccaaacgccaauccaaacgcaaaccccaaugcaaacccaaaugcaaacccaaacgcaaacccaaaugccaacccaaacgcaaacccaaacgcaaacccaaacgcaaacccaaacgcaaacccaaaugcaaacccaaaugcaaacccaaacgccaacccaaacgcaaacccaaacgcaaacccaaacgccaacccaaacgcaaacccuaacgcaaauccaaacaaaaacaaccaagggaacggacaaggacacaacaugccaaacgacccaaacagaaacguagacgaaaacgccaacgcaaacucagcugucaaaaacaauaacaacgaagaacccuccgauaaacacauaaaagaauaccuaaacaaaauccaaaacucccuuucuacagaauggucacccugcucaguaacaugcggcaacggcauacaaguuagaaucaaaccaggaucagcaaauaaaccaaaagacgaauuagacuaugccaacgacauagaaaaaaaaauauguaaaauggaaaaaugcucaucaguuuucaacguaguaaacagcucaaucggauuaauaaugguacuaucauucuuauuuuuaaacggaggaggaggcuccggcggagguggaaaacuagaaucaacuagaauauaccaaauauuagcaauauacucaacaguagcaucaucacucguauuaguaguaucgcuaggagcaauaaguuucuggaugugcucuaacggaagccuacaaugccgaauaugcauauaa

SEQ ID NO: 265 - RNA, 1233 nt, Artificial Sequence
  derived and/or modified CDS sequence (opt6) from Pf(3D7)__XP_001351122.1__Pf-CSP(199-377)_L(PVTN)_HBsAg
auggacccaaacgccaaccccaacgcaaacccaaaugcaaacccaaacgcuaaccccaacgcaaacccaaacgcuaacccuaacgcaaauccaaacgcaaaucccaacgcaaauccaaacgcaaacccaaacgcaaacccaaaugccaacccaaacgcaaacccuaacgcaaaucccaacgcaaauccaaaugcaaaccccaaugcaaacccaaacgcaaauccaaacaaaaauaaucaaggaaauggacaaggacauaacaugccaaacgacccuaaccgaaacgucgacgaaaaugcaaacgcaaacuccgcaguaaaaaacaacaacaacgaagaaccuuccgacaaacacauaaaagaauaccuaaacaaaauacaaaacucucuauccacugaauggucaccaugcucaguaaccugcggaaauggcauacaaguaagaauaaaaccaggaucugcaaauaaaccuaaagacgaacuagauuacgcaaaugacauagaaaaaaaaauaugcaaaauggaaaaaugcucaucagucccaguaacaaacauggaaaacaucacaucaggauucuuaggaccacuacucguauuacaagcaggauucuuucuuuuaacaagaauauuaacaauaccacaaucccuagacucaugguggacaucauuaaacuuccuagguggaucaccagucugccucggacaaaacucacaaucaccaacaucaaaccacucaccaacauccugcccaccaauuuguccaggauacagauggaugugccuacgaagauucauaauauucuuauuuauauuacuacuaugucucauauuuuuacucguacuauuagacuaucagggcauguuacccguauguccacuaauaccaggcucaaccaccacaaacacagguccaugcaaaaccugcaccacaccagcacaaggaaacuccauguuucccucauguugcugcaccaaacccaccgauggaaacugcaccugcauaccaaucccaucuucaugggcauucgcaaaauaucuaugggaaugggcauccguaagauuuucauggcuaucacuauuaguaccauucguacaaugguucguaggauuaucaccaacaguaugguuaucagcaauauggaugaugugguacuggggaccaucacuauacucaauaguauccccuuucauaccauuacucccaauauuuuucugccuuuggguauacauauaa

SEQ ID NO: 266 - RNA, 1275 nt, Artificial Sequence
  derived and/or modified CDS sequence (opt6) from Pf(3D7)__XP_001351122.1__Pf-CSP(199-387)_L(PVTN)_HBsAg
augauggcaccagauccaaacgcaaacccaaacgcaaacccaaacgcaaauccaaaugcaaacccaaacgcaaaucccaaugcaaacccuaacgcaaacccaaacgccaacccaaaugccaacccaaacgcaaacccaaacgcaaauccaaacgcaaacccaaacgcuaacccaaaugcaaaccccaacgcaaauccaaacgcaaacccaaacgcaaauccaaacgcuaacccaaacaaaaauaaccaaggaaacggacaaggacacaauaugccaaaugacccaaauagaaacguagacgaaaacgcaaacgcaaauucagcagucaaaaacaauaacaacgaagaaccauccgauaaacacauaaaagaauacuuaaacaaaauccaaaacucacuaucaacugaauggucaccuuguucaguaacauguggcaacggaauacaaguaagaauaaaaccagguucagccaacaaaccuaaagacgaacuagacuacgcaaacgacauagaaaaaaaaaucugcaaaauggaaaaaugcucaucaguauuuaauguaguaaacucaucaauaggacuaggcccuguaacaaacauggaaaacauaaccucaggauucuuaggcccacuacuaguacuccaagcaggauucuuucuucuaacaagaauauuaaccauuccucaaucauuagacucaugguggacaucccuuaacuuucuaggaggaagccccguaugcuuaggacaaaacagccaauccccaacauccaaccacuccccaacaucaugccccccaauaugcccaggauacagauggaugugccuaagaagauucaucauauuccuauuuauucucuuacucugcuuaauauucuuacucguauuacucgacuaccaaggaauguuaccaguaugcccacuaauaccaggauccacaacaacaaacacgggaccaugcaaaacaugcacaacaccugcccaaggaaauuccauguucccaucaugcugcugcacaaaaccaaccgacggcaacugcacaugcauaccaauaccaucaagcugggccuucgcaaaauaccuaugggaaugggcaucagugagauucucauggcucucauuacuagucccauucguacaaugguuuguaggauuaucaccaacaguuuggcucagcgcaauauggaugaugugguacuggggccccucuuuauauucaauaguauccccauuuauaccacuacucccaauauucuucuguuuauggguauacauauaa

SEQ ID NO: 267 - RNA, 459 nt, Artificial Sequence
  derived and/or modified CDS sequence (opt6) from Pf(3D7)__XP_001351122.1__HsALB_Pf-CSP(19-152)
augaaauggguaacauucauaucacuacuauuccuauucuccagcgcauacucacuauuccaagaauaccaaugcuacggaucaagcucaaacacacgaguacuaaacgaacuaaacuacgacaacgcaggaaccaaccuauacaacgaacuagaaaugaacuacuacggaaaacaagaaaacugguacucacuaaaaaaaaacagcagaucacuaggagaaaacgacgacggaaacaacgaagacaacgaaaaacuaagaaaaccaaaacacaaaaaacuaaaacaacccgcagacggaaacccagacccaaacgcaaacccaaacguagacccaaaugcaaacccaaacguagacccaaacgcaaacccaaacguagacccaaacgcaaacccaaacgcaaacccaaacgcaaacccaaacgcaaacccaaacgcaaacccaaacgcaaacccauaa

SEQ ID NO: 268 - RNA, 579 nt, Artificial Sequence
  derived and/or modified CDS sequence (opt6) from Pf(3D7)__XP_001351122.1__HsALB_Pf-CSP(19-192)
augaaauggguaacauucaucucacuacuauucuuauucucaucagcauacucacuauuccaagaauaccaaugcuacggaucaucaucaaacacacgaguacucaacgaacuaaacuacgacaacgcaggaacaaaccuauacaacgaacuagaaaugaacuacuacggaaaacaagaaaacugguauucacuaaaaaaaaacucaagaucacuaggagaaaacgacgacggaaacaacgaagacaacgaaaaacuaagaaaaccaaaacacaaaaaacuaaaacaaccagcagacggaaacccagacccaaacgcaaacccaaacguagacccaaacgccaacccaaacguagacccaaacgcaaacccaaacguagacccaaacgcaaacccaaacgcaaacccaaacgcaaacccaaacgcaaacccaaacgcaaacccaaacgcaaacccaaacgcaaacccaaacgcaaacccaaacgcaaacccaaacgcaaacccaaacgcaaacccaaacgcaaauccaaacgcaaacccaaacgcaaacccaaacgcaaacccaaacgcaaaccccuaa

SEQ ID NO: 269 - RNA, 819 nt, Artificial Sequence
  derived and/or modified CDS sequence (opt6) from Pf(3D7)__XP_001351122.1__HsALB_Pf-CSP(19-272)
augaaauggguaacauucauaucacuacuauuccuauucucaagcgcauauucacuauuccaagaauaccaaugcuacggaucaagcucaaacacaagaguacuuaacgaacuaaacuacgacaacgcaggaacaaaccuauacaacgaacuugaaaugaacuacuacggaaaacaagaaaacugguacucacuaaaaaaaaauagcagaagcuuaggagaaaacgacgacggaaacaacgaagacaacgaaaaauuaagaaaaccuaaacacaaaaaacuaaaacaacccgcagacggaaacccagacccuaacgccaacccaaauguagacccaaacgcaaacccaaacguagacccaaacgcaaaccccaacguagacccaaacgcaaacccaaacgcaaacccaaacgcaaacccaaacgcaaaccccaacgcaaacccaaacgcaaacccaaacgcaaacccaaacgcaaacccaaacgcaaacccaaacgcaaacccaaacgcaaacccaaacgcaaacccaaacgcgaacccaaacgcaaacccaaacgcaaacccaaacgcaaacccaaacgcaaacccaaacguagacccaaaugcaaaccccaacgcaaacccaaacgcaaacccaaaugcaaaccccaacgcaaacccaaacgcaaacccaaacgcaaacccaaacgcaaacccaaaugcaaacccaaacgcaaacccaaacgccaacccaaacgcaaacccaaacgcaaacccaaacgcaaacccaaacgcaaacccgaacgcaaacccaaacgcaaacccaaacgcaaacccauaa

SEQ ID NO: 270 - RNA, 981 nt, Artificial Sequence
  derived and/or modified CDS sequence (opt6) from Pf(3D7)__XP_001351122.1__HsALB_Pf-CSP(19-272)_L(AAY)_Pf-CSP(310-3 27)_L(AAY)_Pf-CSP(346-375)
augaaauggguaacauuuauaucacuccuauuccuuuuuucgucagcauacucacuauuccaagaauaucaaugcuacggaucaagcuccaacacaagaguacuaaacgaacuaaacuacgacaacgcaggaacaaaccuauacaacgaacuagaaaugaacuacuacggaaaacaagaaaacugguacucacuaaaaaaaaacagccgaagcuuaggagaaaaugacgacggaaacaacgaagacaacgaaaaauuacgcaaacccaaacacaaaaaacugaaacaaccagcagacggaaacccagacccaaacgcaaacccaaacguagacccaaacgcaaacccaaacguagacccaaacgcaaacccaaacguagacccaaacgcaaacccaaacgcgaacccaaacgccaacccaaacgcaaacccaaacgcaaacccaaacgcaaacccaaacgcaaacccaaacgcaaacccaaacgccaacccgaacgcaaacccaaacgcaaacccaaacgcaaauccaaacgcaaacccaaacgcaaacccaaacgccaacccaaacgcaaacccaaacgcaaacccaaauguggacccaaacgcaaacccaaacgcaaacccaaacgcaaacccaaaugcaaacccaaacgcaaacccaaacgcaaacccaaacgcaaacccaaacgcaaacccaaaugcaaacccaaacgcaaauccaaacgcaaacccaaacgcaaacccaaacgcaaacccaaacgcaaacccuaacgcaaacccaaacgcaaacccaaacgccaaccccaaugcaaacccagcagcauacgaaccaucagacaaacacauaaaagaauaccuaaacaaaauacaaaacucacucgcagcauauauaaagccaggaagcgccaacaaaccaaaagacgaacuagauuacgcaaacgacauagaaaaaaaaaucuguaaaauggaaaaaugcucauaa

SEQ ID NO: 271 - RNA, 942 nt, Artificial Sequence
  derived and/or modified CDS sequence (opt6) from Pf(3D7)__XP_001351122.1__HsALB_Pf-CSP(19-272)_L(AAY)_Pf-CSP(346-3 65)_L(AAY)_P2
augaaauggguaacauucauaucacuauuauuccuuuucucaucagcuuacucacuauuccaagaauaccaaugcuacggaucauccucaaacacaagaguacuaaacgaacuaaacuacgacaacgccggaaccaaccuauacaacgaacucgaaaugaacuacuacggaaaacaagaaaacugguacucacuaaaaaaaaacagccgaucccuaggagaaaacgacgacggaaauaacgaagacaaugaaaaauuaagaaaaccaaaacacaaaaaacuaaaacaaccagcagacggaaacccagacccaaacgcaaacccaaacguagauccaaacgcaaacccaaacguagacccaaacgcaaacccaaacguagacccaaacgcuaacccaaacgcaaacccaaacgcaaacccaaacgcaaacccaaacgcaaacccaaacgcaaacccgaacgcaaaccccaacgcaaacccaaacgcaaacccaaacgcaaaccccaacgcaaacccaaacgcaaacccgaacgcaaacccaaacgcaaacccaaacgcaaacccaaacgcaaacccaaacgcaaacccaaacguagacccaaacgccaacccaaacgcaaacccaaacgcaaacccaaacgcaaacccaaacgcaaacccaaacgcaaacccaaacgcaaacccaaacgcaaacccaaacgcaaacccaaacgcaaaccccaacgcaaacccaaaugcaaacccaaacgcaaacccaaaugcaaaccccaacgcaaacccaaaugccaauccaaacgcaaacccaaacgcaaacccagccgcauacauaaaaccaggauccgcaaacaaaccaaaagacgaacuagacuacgcaaacgacauagaagcagcauaccaauauauaaaagccaacuccaaauucauagguauaacagaacucuaa

SEQ ID NO: 272 - RNA, 936 nt, Artificial Sequence
  derived and/or modified CDS sequence (opt6) from Pf(3D7)__XP_001351122.1__HsALB_Pf-CSP(19-272)_L(AAY)_Pf-CSP(346-3 65)_L(AAY)_PADRE
augaaauggguaaccuucauaucacuacuauucuuauucucaucagcauacucacucuuccaagaauaccaaugcuacggcucaagcucaaacacaagaguacuaaacgaauuaaacuaugacaacgccggaacaaaccuauacaaugaauuagaaaugaacuacuacggcaaacaagaaaacugguacucacucaaaaaaaacuccagaaguuuaggagaaaaugacgacggaaacaaugaagacaaugaaaaauuacgaaaaccaaaacacaaaaaacuaaaacaacccgccgacggaaaccccgacccgaacgcaaacccaaacguagacccaaacgcaaacccaaacguagacccaaaugcaaacccaaacguagacccaaacgcaaacccaaacgcaaacccaaacgcaaauccaaacgcaaacccaaaugcaaacccaaaugcaaauccaaacgcaaaccccaacgcaaacccaaacgcaaacccaaaugcaaauccaaacgccaacccaaaugcaaacccaaacgcaaauccaaacgcaaacccaaacgcaaauccaaacgcaaacccaaaugcaaacccaaacguagauccaaacgcaaacccaaacgccaacccaaacgcaaacccgaacgcaaacccaaacgcaaacccaaacgccaacccaaacgccaacccaaacgccaacccaaacgcaaacccaaacgcaaacccaaacgcaaacccaaacgcaaacccaaaugcaaacccuaacgcaaacccaaacgcaaacccaaacgcaaacccaaacgccaacccaaacgcaaauccagcagcauacauaaaaccaggaucagcaaacaaaccaaaagaugaacuagacuacgcaaaugacaucgaagcagccuacgcuaaauucguagcagccuggacacuaaaagcagcagccuaa

SEQ ID NO: 273 - RNA, 993 nt, Artificial Sequence
  derived and/or modified CDS sequence (opt6) from Pf(3D7)__XP_001351122.1__HsALB_Pf-CSP(19-272)_L(G4S)_Pf-CSP(310-3 27)_L(G4S)_Pf-CSP(346-375)
augaaauggguaaccuucaucucacuacuauuccuauucucaagcgcauacucacucuuucaagaauaccaaugcuacggcucaagcucaaacacacgaguacuaaacgaacuaaacuacgacaacgcaggaacaaaccuauauaacgaacucgaaaugaacuacuacggcaaacaagaaaauugguacucacuaaaaaaaaacagcagaagcuuaggagaaaacgacgacggaaacaacgaagauaacgaaaaacuaagaaaaccaaaacacaaaaaacuaaaacaacccgcagacggaaacccagacccaaacgcaaauccaaauguagacccgaacgcaaacccaaacguagacccaaaugcgaacccaaacgucgacccaaacgcaaacccaaaugcaaacccaaaugcgaacccaaacgcaaacccaaacgcaaauccaaacgcaaauccaaaugcaaacccaaacgcgaauccaaacgcaaacccaaacgcaaacccaaacgcaaacccaaacgcaaacccaaacgcaaacccaaacgcaaacccgaacgcuaacccaaacgcaaacccaaacgcaaacccaaacguagauccaaacgcgaacccaaacgcaaacccaaaugcaaacccaaacgcaaacccaaacgcaaacccaaacgcaaacccaaacgcaaacccaaacgcaaacccaaacgcgaacccaaacgcaaauccaaaugcaaacccaaacgcaaacccaaacgcaaacccaaacgcaaacccaaaugcaaacccaaacgcaaacccaaaugcaaacccaaacgcaaacccaggaggaggaggaucagaacccucagacaaacacauaaaagaauaccuaaacaaaauacaaaacucacuaggaggaggaggaucgaucaaaccaggaagcgcaaacaaaccaaaagacgaacucgacuacgcaaacgauauagaaaaaaaaauaugcaaaauggaaaaaugcucguaa

SEQ ID NO: 274 - RNA, 978 nt, Artificial Sequence
  derived and/or modified CDS sequence (opt6) from Pf(3D7)__XP_001351122.1__HsALB_Pf-CSP(19-272)_L(G4S)_Pf-CSP(310-3 27)_Pf-CSP(346-375)
augaaauggguaacauucauaucacuccuauuccuauucuccucagcauacucccucuuccaagaauaccaaugcuacggcucaagcucaaacacacgaguacuaaacgaacuaaauuacgacaacgccggaacaaaccuauauaaugaacuagaaaugaauuacuacggaaaacaagaaaacugguacucacuuaaaaaaaacucaagaucauuaggagaaaacgacgacggcaacaacgaagacaacgaaaaacuaagaaaaccaaaacacaaaaaacuaaaacaacccgcagacggaaauccagauccaaacgcaaacccaaacguagacccaaacgcaaacccaaacguagacccaaacgcaaacccaaacgucgacccaaacgccaacccaaacgcaaacccaaacgcaaacccaaacgcaaacccaaacgccaacccaaacgcaaacccaaacgcaaacccaaacgcaaacccaaacgcaaacccaaacgcaaacccaaacgcaaacccgaacgcaaacccaaacgcaaauccuaacgcaaacccaaacgcaaacccaaacgcaaauccgaacgcaaacccaaacguagacccaaacgcaaacccaaacgcaaacccaaacgcaaacccaaacgcaaacccaaacgcaaacccuaacgcaaacccaaaugcaaacccaaacgcgaacccaaaugcaaacccaaaugcaaacccaaacgcaaacccaaacgcaaacccaaacgcaaauccaaacgcaaauccaaacgcaaacccaaacgcaaacccaaacgcaaacccaaacgccaacccaggaggagguggaagcgaaccauccgacaaacacauaaaagaauaccuaaacaaaauacaaaacucacuaauaaaacccggcucagcaaacaaaccaaaagacgaacuagacuacgccaacgacauagaaaaaaaaauauguaaaauggaaaaaugcucauaa

SEQ ID NO: 275 - RNA, 978 nt, Artificial Sequence
  derived and/or modified CDS sequence (opt6) from Pf(3D7)__XP_001351122.1__HsALB_Pf-CSP(19-325)
augaaauggguaacauucauaucacuccuauuccuauucucaagcgcauacucauuauuccaagaauaccaaugcuacggaucaucaucuaacacaagaguacucaacgaacuaaacuacgacaacgcaggaacuaaucucuacaacgaacuagaaaugaacuacuacggaaaacaagaaaacugguauucacuaaaaaaaaacagccgaucauuaggagaaaacgacgacggcaacaacgaagacaacgaaaaacuacgaaaaccaaaacacaaaaaauuaaaacagccagccgacggaaacccagacccaaacgcaaacccaaacguagacccaaacgcaaacccaaacguagacccaaacgcaaacccaaacguagacccaaacgcaaacccaaacgcaaacccaaacgcaaauccaaacgcaaacccaaacgccaacccaaacgcaaacccaaacgcaaaccccaacgcaaacccaaacgcaaacccaaacgcaaacccaaaugccaacccaaacgcaaacccaaacgcaaacccaaacgcaaacccaaacgcaaacccaaaugcaaacccaaacgcaaacccaaacguagacccaaacgcaaacccaaaugcaaacccaaacgcaaaccccaacgcaaacccaaacgcaaacccaaacgcaaacccaaacgcaaacccaaacgccaacccaaacgcaaacccaaacgcaaacccaaacgcaaacccaaacgcaaacccaaacgcaaauccaaacgcaaacccaaacgcaaacccaaacgcaaacccaaacgcaaacccaaacgcaaacccaaauaaaaacaaucaaggaaacggacaaggacacaacaugccaaacgauccaaaucgcaacguagacgaaaacgcaaacgcaaacagcgcagucaaaaacaacaacaacgaagaaccaucagacaaacacauaaaagaauaccuaaauaaaauacaaaacuag

SEQ ID NO: 276 - RNA, 1155 nt, Artificial Sequence
  derived and/or modified CDS sequence (opt6) from Pf(3D7)__XP_001351122.1__HsALB_Pf-CSP(19-384)
augaaauggguaaccuuuauaucacucuuauuccuauuuucaucagcauacucacucuuccaagaauaucaaugcuacggaucaucaucaaacacaagaguccucaaugaauuaaacuaugacaaugcaggaaccaaccuauacaacgaauuagaaaugaacuacuacggcaaacaagaaaacugguacucacucaaaaaaaacucaagauccuuaggagaaaaugaugacggaaacaacgaagacaacgaaaaacuccgaaaaccaaaacacaaaaaacuaaaacaacccgccgacggaaacccagaccccaacgcaaacccaaauguagaccccaacgcaaacccaaacguagacccaaacgcaaacccaaacguagacccaaacgcaaauccaaacgccaacccaaacgcaaacccaaacgccaacccaaacgcaaacccaaacgcaaacccaaacgcaaacccaaacgcaaacccaaaugcaaacccaaaugcaaacccaaacgcaaacccaaacgcaaacccaaacgcaaacccaaacgcaaacccaaaugcaaacccaaacgcaaacccaaacgcaaacccaaacguagacccaaaugcaaacccaaacgcaaacccaaacgcaaauccaaaugcaaauccaaacgcaaauccaaacgcaaacccaaacgcaaacccaaacgcaaacccaaacgcaaauccaaaugcaaacccaaacgcaaacccaaacgcaaacccaaacgcuaacccaaacgccaauccaaacgcaaacccaaacgcaaacccuaaugcaaacccaaacgccaacccaaauaaaaauaaccaaggaaacggacaaggacacaacaugccaaacgacccaaacagaaacgucgaugaaaacgcaaacgcaaauuccgcagucaaaaacaacaacaacgaagaaccaucagacaaacacauaaaagaauaccucaacaaaauacaaaacucccuaucaacagaauggucacccugcuccguuacaugcgguaacggcauacaaguaagaauaaaaccaggaucagcuaacaaacccaaagacgaacuagacuacgccaacgacauagaaaaaaaaauaugcaaaauggaaaaaugcuccucaguauucaacguaguaaacucaucauaa

SEQ ID NO: 277 - RNA, 1293 nt, Artificial Sequence
  derived and/or modified CDS sequence (opt6) from Pf(3D7)__XP_001351122.1__HsALB_Pf-CSP(19-384)_TM domain HA
augaaauggguaacauuuauaucacuacuuuuccuauucucaucagcauacucacucuuccaagaauaucaaugcuauggauccucaucaaacacaagaguacucaacgaauuaaacuacgauaaugccggaacaaaccuauauaacgaacuagaaaugaacuacuacggaaaacaagaaaauugguacucauuaaaaaaaaacuccagaucccuuggagaaaacgacgauggaaacaacgaagauaacgaaaaauuaagaaaaccaaaacacaaaaaauugaaacaaccagcagacgguaacccagacccaaacgccaacccaaacguagacccaaacgcgaauccaaacgucgacccaaacgcaaaucccaacguagacccaaaugcaaauccaaaugccaauccaaacgcaaacccaaacgcaaacccaaaugcaaacccaaacgccaacccaaacgcaaauccaaacgcaaacccaaacgcaaacccaaacgccaacccaaacgccaaccccaaugcaaacccaaaugcaaacccaaacgcaaacccaaacgcaaauccaaacgcaaacccaaacgccaacccaaacguagacccaaacgcaaauccaaacgcaaacccaaacgccaauccaaacgcaaacccaaacgccaacccaaaugcaaaucccaacgcaaacccaaacgcaaauccaaaugcaaaccccaacgcaaauccaaacgcaaacccaaacgcaaauccaaacgcaaauccaaaugcaaacccaaacgcaaacccuaaugcaaacccaaacgcaaacccaaacgccaacccaaacaaaaacaaccaaggaaacggacaaggucacaauaugccaaaugacccaaaccgaaacguagacgaaaacgcaaaugccaauagcgcaguaaaaaacaauaacaacgaagaaccuucagauaaacacauaaaagaauaccuaaacaaaauacaaaacucccuaucaacagaauggucaccuuguucagucacauguggaaacggaauacaaguaagaauaaaaccaggaucagcaaacaaaccaaaagacgaacuagauuacgcaaacgauauagaaaaaaaaauauguaaaauggaaaaaugcuccucagucuucaacguagucaacaguuccaaacuagaaucaaccagaaucuaccaaauacuagcaauauauuccacaguagcaagcucacucguauuaguagucucccuaggagcaauaucauucuggaugugcucaaacggaagcuuacaaugccgaauauguauauaa

SEQ ID NO: 278 - RNA, 1005 nt, Artificial Sequence
  derived and/or modified CDS sequence (opt6) from Pf(3D7)__XP_001351122.1__HsALB_Pf-CSP(82-397)
augaaauggguaacauucauaucacuacuauuccucuucaguucagccuauagcgauaacgaaaaacuaagaaaaccaaaacacaaaaaacucaaacaaccagcagacggaaacccagacccaaacgcaaacccaaacguagacccaaacgcaaacccaaacguagacccaaacgcaaauccaaacguagacccaaaugcaaaccccaacgcaaacccaaacgcaaacccaaacgcaaacccaaacgcaaacccaaaugcgaacccaaaugcaaauccaaacgcaaacccaaacgcaaacccaaacgcaaacccaaacgcuaacccaaacgcaaacccaaacgcaaacccaaaugcaaacccaaacgcaaacccaaacgcaaaccccaacgcaaacccaaacguagacccaaacgcaaacccaaacgcaaacccaaacgcaaacccaaacgccaacccaaaugccaacccaaacgcaaacccaaaugcaaaccccaacgcaaacccaaacgccaacccaaacgcaaacccaaacgcaaacccaaacgcaaaccccaaugcaaacccaaacgcaaacccaaaugcaaauccaaacgcaaacccaaacgcaaacccaaacgcaaacccaaacaaaaacaaccaaggaaacggacaaggacacaacaugccaaacgacccaaaucgaaacgucgaugaaaacgccaacgcaaacucagcaguaaaaaacaacaacaacgaagaaccaucugacaaacacauaaaagaauaccuaaacaaaauacaaaacucauuauccaccgaauggucaccauguucaguaacaugcggcaacggaauacaagucagaauaaaaccaggcucagcaaauaaaccaaaagacgaacuagacuacgcaaacgacauagaaaaaaaaauaugcaaaauggaaaaauguucaucagucuucaacguaguaaacucaucaauaggacucauaaugguacuaucauuccuauucuuaaacuaa

SEQ ID NO: 279 - RNA, 357 nt, Artificial Sequence
  derived and/or modified CDS sequence (opt6) from Pf(3D7)__XP_001351122.1__HsALB_Pf-CSP(93-192)
augaaauggguaacauucaucucacuacuauuccuauucucaagcgcauacucaaaacuaaaacaaccagcagacggaaacccagacccaaacgcaaacccaaacguagacccaaacgcaaacccaaacguagacccaaacgcaaacccaaacguagacccaaacgcaaacccaaacgcaaacccaaacgcaaacccaaacgcaaacccaaacgcaaacccaaacgcaaacccaaacgcaaacccaaacgcaaacccaaacgcaaacccaaacgcaaacccaaacgcaaacccaaacgcaaacccaaacgcaaacccaaacgcaaacccaaacgcaaacccaaacgcaaacccauaa

SEQ ID NO: 280 - RNA, 597 nt, Artificial Sequence
  derived and/or modified CDS sequence (opt6) from Pf(3D7)__XP_001351122.1__HsALB_Pf-CSP(93-272)
augaaaugggucacauucauaucacuccuauuccuauucucaagcgcauacucaaaacuaaaacaaccagcagacggaaacccagacccaaacgcaaacccaaacguagacccaaacgcaaacccaaacguagacccaaacgcaaacccaaacguagacccaaacgcaaacccaaacgcaaacccaaacgccaacccaaacgcaaacccaaacgcaaacccaaacgcaaacccaaacgcaaacccaaacgcaaacccaaacgcaaacccaaacgcaaacccaaacgcaaacccaaacgcaaacccaaacgcaaauccaaacgcaaacccaaacgccaacccaaacgcaaacccaaacgcaaacccaaacguagacccaaacgcaaacccaaacgcaaacccaaacgcaaacccaaacgcaaacccaaacgcaaacccaaacgcaaacccaaacgcaaacccaaacgcaaacccaaacgcaaauccaaacgcaaacccaaacgcaaacccaaacgcaaacccaaacgcaaacccaaacgcaaacccaaacgcaaacccaaacgcaaacccaaacgcaaacccaaacgcaaacccauaa

SEQ ID NO: 281 - RNA, 972 nt, Artificial Sequence
  derived and/or modified CDS sequence (opt6) from Pf(3D7)__XP_001351122.1__HsALB_Pf-CSP(93-397)
augaaauggguaacauucauaucacuccuauuccuauucucaucagcauacucaaaacuaaaacaacccgcagacggaaacccagacccaaacgccaacccaaacguagacccaaacgcaaacccgaacguagacccaaacgcaaaccccaacguagacccaaacgcaaacccaaaugcaaacccaaacgcaaacccaaacgcaaacccaaacgcaaacccaaacgcaaacccaaacgcaaacccaaacgcaaacccaaacgcaaacccaaacgcgaaucccaacgcaaauccaaacgcaaacccaaacgcaaauccaaacgcaaacccgaacgcaaacccaaacgcaaacccaaacgcaaacccaaacguagauccaaacgcaaauccaaacgcaaacccaaacgcaaauccaaacgcaaacccaaacgcaaacccaaacgcaaaccccaacgcaaacccaaacgcaaacccaaacgcaaacccaaacgcaaauccaaacgccaacccaaacgcaaacccaaacgcaaacccaaacgcgaacccaaacgcgaacccaaacgcaaacccaaacgcaaacccaaacgcaaacccaaacaaaaacaaccaagggaacggacaaggacacaacaugccaaacgauccaaacagaaacguagacgaaaacgcaaacgcaaacucagcaguaaaaaacaacaacaacgaagaaccaucagacaaacacauaaaagaauaccuaaacaaaauacaaaacucacucucaacagaauggucaccaugcaguguaacaugcggaaauggaauacaaguacguauaaaaccaggaucagcaaacaaaccaaaagacgaauuagacuacgccaacgauauagaaaaaaaaauaugcaaaauggaaaaaugcagcucagucuucaacguagucaacagcucaauaggacuaauaaugguccucucauucuuauuucuaaacuga

SEQ ID NO: 282 - RNA, 342 nt, Artificial Sequence
  derived and/or modified CDS sequence (opt6) from Pf(3D7)__XP_001351122.1__HsALB_Pf-CSP(98-192)
augaaauggguaacauucauaagccuacuauuccuauucagcucagcauacagcgcagacggaaacccagacccaaacgcaaacccaaacguagacccaaacgcaaacccaaacguagacccaaacgcaaacccaaacguagacccaaacgcaaacccaaacgcaaacccaaacgcaaacccaaacgcaaacccaaacgcaaacccaaacgcaaacccaaacgcaaacccaaacgcaaacccaaacgcaaacccaaacgcaaacccaaacgcaaacccaaacgcaaacccaaacgcaaacccaaacgcaaacccaaacgcaaacccaaacgcaaacccauaa

SEQ ID NO: 283 - RNA, 582 nt, Artificial Sequence
  derived and/or modified CDS sequence (opt6) from Pf(3D7)__XP_001351122.1__HsALB_Pf-CSP(98-272)
augaaauggguaacauucauaucacuacuauuccuauucagcucagccuacagcgcagacggaaacccagacccaaacgcaaacccaaacguagacccaaacgcaaacccaaacgucgacccaaacgcaaacccaaacguagacccaaacgcaaacccaaacgcaaacccaaacgcaaacccaaacgcaaacccaaacgcaaacccaaacgcaaacccaaacgcaaacccaaacgcaaacccaaacgcaaacccaaacgcaaacccaaacgcaaacccaaacgcaaacccaaacgcaaacccaaacgcaaacccaaacgcaaacccaaacgcaaacccaaacgcaaacccaaacguagacccaaaugcaaacccaaacgcaaacccaaacgcaaacccaaacgcaaacccaaacgcaaacccaaacgcaaacccaaacgcaaacccaaacgcaaacccaaacgcaaacccaaacgcaaacccaaacgcaaacccaaacgcgaacccaaacgcaaacccaaacgcaaacccaaacgcaaacccaaacgcaaacccaaaugcaaacccaaacgcaaacccauaa

SEQ ID NO: 284 - RNA, 888 nt, Artificial Sequence
  derived and/or modified CDS sequence (opt6) from Pf(3D7)__XP_001351122.1__HsALB_Pf-CSP(98-374)
augaaaugggucacauucauaucccuacuauuccuauucucaucagcauauucagcagauggaaacccagacccaaacgccaacccaaacguagacccaaacgcaaacccaaacguagacccaaacgcaaacccaaacguagacccaaacgcaaacccaaacgcaaacccaaacgcaaacccaaacgcaaacccaaacgcaaacccaaacgcaaacccaaacgcaaacccaaacgcaaacccaaacgcaaacccaaacgcaaacccaaacgcaaacccaaaugcaaauccaaacgcaaauccaaacgcaaacccaaacgccaacccaaacgcaaauccaaacgcaaacccaaacguagacccgaacgcaaacccgaacgcaaacccaaacgcaaacccaaaugcaaacccaaacgcaaacccaaacgccaacccaaacgcaaacccaaacgcaaacccaaaugcaaacccaaacgcaaacccaaacgccaacccaaacgcaaacccaaacgcaaacccaaacgcaaacccaaacgcaaacccaaaugcaaacccaaacgcaaacccaaacgcaaacccaaacaaaaacaaccaaggaaauggacaaggccacaacaugccaaacgacccaaacagaaacguagacgaaaacgcaaacgcaaacuccgcagucaaaaacaacaacaacgaagaaccauccgacaaacacauaaaagaauaccucaauaaaauacaaaacucacuaucaacagaaugguccccaugcucaguaacaugcggaaacggaauacaaguaagaauaaaaccaggauccgcaaacaaaccaaaagacgaacuagacuacgcaaacgauauagaaaaaaaaauaugcaaaauggaaaaaugcuaa

SEQ ID NO: 285 - RNA, 957 nt, Artificial Sequence
  derived and/or modified CDS sequence (opt6) from Pf(3D7)__XP_001351122.1__HsALB_Pf-CSP(98-397)
augaaauggguaaccuucauaucauuacuauuccuuuucagcucggcauacucagcagacggcaacccagacccaaacgcaaacccaaacgucgacccaaaugcgaacccaaacguagacccaaacgcaaacccaaacguagauccaaacgcaaacccaaacgcaaacccaaacgcaaacccaaacgcaaacccaaacgccaacccaaaugcaaacccaaacgcaaaccccaacgcaaacccaaacgcaaacccaaacgcaaacccaaacgcaaaucccaacgcaaauccaaacgcaaacccaaaugcaaacccaaacgccaacccaaacgcaaacccaaacgcaaaccccaaugucgacccaaacgcaaacccaaacgcaaacccaaacgcaaacccaaacgcaaauccaaacgcaaaccccaacgcaaacccaaacgcaaacccaaacgcaaacccaaacgcaaacccaaacgcaaacccaaacgcaaacccaaacgcaaacccaaacgcaaacccaaacgcaaacccaaacgcaaauccaaacgcaaacccaaacgcaaacccaaacgcaaacccaaacaaaaacaaccaaggaaauggacaaggacacaacaugccaaaugaccccaacagaaacgucgacgaaaacgccaacgcaaacagcgcaguaaaaaacaacaacaaugaagaaccaucagacaaacacauaaaagaauaccuaaacaaaauucaaaacucacuaucaaccgaaugguccccaugcucaguaacaugcggaaacgguauacaaguacgaauaaaaccaggaucagcaaacaaaccaaaagacgaacuagacuacgcaaacgacauagaaaaaaaaauaugcaaaauggaaaaaugcucaucaguuuuuaacguagucaauagcucaaucggacucauaaugguacuaucauuucucuuccuaaauuaa

SEQ ID NO: 286 - RNA, 1284 nt, Artificial Sequence
  derived and/or modified CDS sequence (opt6) from Pf(3D7)__XP_001351122.1__HsALB_Pf-CSP(199-377)_L(PVTN)_HBsAg
augaaauggguaacauuuauauccuuacuauuucucuucuccucagcuuacucugacccaaacgcaaaucccaacgcaaacccaaaugcaaacccaaacgcaaauccaaacgcaaacccaaaugcuaaucccaacgcaaacccaaacgcaaaccccaaugccaacccaaacgcuaacccaaacgcaaacccaaacgccaacccaaaugcaaacccaaacgcaaacccaaacgcaaauccaaaugcaaacccaaacgcaaauccaaacgcaaacccaaacaaaaacaaccaaggaaacggacaaggccauaauaugccuaaugaccccaacagaaacguagacgaaaaugcuaacgccaacucagcaguaaaaaacaacaauaacgaagaaccaucagauaaacacauaaaagaauacuuaaacaaaauacaaaauucauuaucaacagaauggucaccaugcucagucaccugcggaaacgguauacaaguacgcauaaaaccaggcucagcaaauaaaccaaaagacgaacuagauuacgcuaacgacauagaaaaaaaaauaugcaaaauggaaaaaugcucaucaguaccaguaacaaauauggaaaacauaacaucaggauuccuaggcccacucuuaguacuacaagcaggauuuuuucuucuaacaagaaucuuaacuauaccccaaucacucgacucaugguggaccucacuaaauuuccucggaggaucuccaguaugccucggacaaaauucacaaucaccaacauccaaucacucacccaccuccugcccaccaaucugcccaggauacagauggaugugcuuacgaagauucauaauauuccuauucauacuacuucuaugcuuaauauuccuucucguccuacucgacuaucaaggaaugcucccuguaugcccacucauaccaggauccacaacaacuaacacaggacccuguaaaacaugcacaacacccgcccaaggaaauucaauguuccccucuugcugcugcacaaaaccaacagacggaaauugcacaugcauuccaauuccaucaucuugggcauuugcaaaauacuuaugggaaugggcaucaguccgauucucgugguuaucuuuacuaguaccauucguucaaugguuuguaggacuuucaccuacaguaugguuaucugcaauauggaugaugugguacuggggaccaucauuauacucaaucguaucaccauuuauaccacuacuacccauauuuuucugccuauggguauacauauaa

SEQ ID NO: 287 - RNA, 1023 nt, Artificial Sequence
  derived and/or modified CDS sequence (opt6) from Pb(ANKA)__XP_022712148.1__Pb-CSP
augaaaaaaugcacaaucuuaguaguagcaucacuccuacuagucaacucucuccuaccaggauacggccaaaacaaauccauacaagcccaacgcaaccuaaacgaauuaugcuauaacgaaggcaacgacaacaaauuauaccauguauuaaacucaaaaaacggaaaaauauacaacagaaacacaguaaacagacuacucgcagacgcacccgaaggaaaaaaaaaugaaaaaaaaaacgaaaaaauagaacgcaacaacaaacuuaaacaaccaccaccacccccaaaccccaacgacccaccacccccaaaccccaacgauccaccccccccaaaccccaacgacccaccacccccaaacccaaacgaccccccaccaccaaaugcaaacgacccaccaccaccaaacgcaaacgacccagcaccacccaacgccaacgaccccgcaccaccaaacgcaaacgauccagcucccccaaacgcaaacgauccagcaccaccaaacgccaacgacccaccaccaccaaacccaaacgacccagcaccaccaaacgcaaaugacccaccaccccccaacccaaacgaccccgccccaccacaagguaacaacaacccacaaccacaaccacgcccacaaccacaaccacaaccacaaccacaaccccaaccacaaccacaaccacaaccacgcccacaaccccaaccucaaccaggaggcaauaacaacaacaaaaacaauaauaacgaugacuccuacauaccaucugccgaaaaaauccucgaauucguaaaacaaauaagagacucaauaacagaagaauggucacaauguaacguaacaugcggaucaggcauacgaguaagaaaacgcaaaggaucaaacaaaaaagcagaagaccuaacacucgaagacauugacacagaaaucugcaaaauggacaaaugcucaucaauauucaacauagucucaaacucauuaggauucguaauccuacuaguacucguauucuucaacuaa

SEQ ID NO: 288 - RNA, 1188 nt, Artificial Sequence
  derived and/or modified CDS sequence (opt6) from Pb(ANKA)__XP_022712148.1__Pb-CSP_L(G4SG4)_TM domain HA
augaaaaaaugcaccauacuagucguagccucacuacuacuagucaauucauuauuaccaggauacggccaaaauaaauccauacaagcacaaagaaaucucaaugaauuaugcuacaacgaaggaaacgacaauaaacuauaccacguauuaaacucaaaaaauggaaaaauauacaaccgaaacaccguaaaccguuuauuagcagacgcaccagaaggaaaaaaaaacgaaaaaaaaaacgaaaaaauugaaagaaacaauaaacucaaacaaccaccucccccacccaacccaaacgacccacccccacccaacccaaacgacccaccacccccaaaccccaacgauccccccccacccaauccaaacgauccaccaccaccaaacgcaaacgacccaccaccaccaaacgcaaacgacccagcaccaccaaacgcaaacgaccccgcaccaccaaacgcaaacgauccagcaccacccaacgcaaacgacccagcacccccaaacgccaacgaccccccaccaccaaacccaaacgaccccgcaccuccaaacgcaaacgacccaccaccaccaaacccuaacgacccagcccccccacaaggaaacaacaauccucaaccacaaccacgcccucaaccacaaccccaaccucaaccacaaccacaaccacaaccccaaccacaaccacgaccacaaccucaaccucaaccaggaggcaacaacaacaacaaaaacaacaacaacgacgacucauacauaccaucagcagaaaaaauacuagaauucgucaaacaaauaagagacucuauaacugaagaauggucccaaugcaauguaacuugcggaucaggcaucagagucagaaaacgcaaaggauccaacaaaaaagccgaagaccuaacccucgaagauauagacacagaaaucugcaaaauggacaaaugcucaucaauuuucaauauagucucaaauucacuaggauucgucaucuuacuaguacuaguauucuuuaauggaggaggaggaucaggaggaggaggaaaacuagaaucaacccgaauauaccaaauacuagcaauauacucaaccguagcaucaucacucguacuagugguauccuuaggagcaauaagcuuuuggaugugcuccaacggcucucuacaaugucgaauaugcauauga

SEQ ID NO: 289 - RNA, 1008 nt, Artificial Sequence
  derived and/or modified CDS sequence (opt6) from Pb(ANKA)__XP_022712148.1__HsALB_Pb-CSP(24-340)
augaaaugggucacauucauaucacuccuauuccuauucucaucagcauacucacaaaacaaaucaauccaagcccaacgaaaccuaaacgaacuaugcuacaacgaaggaaacgauaacaaacuauaccacguacuaaacucaaaaaacggaaaaauauacaaucgaaacacaguaaacagacucuuagcagacgcaccagaaggaaaaaaaaacgaaaaaaaaaacgaaaaaaucgaaagaaacaacaaacucaaacaaccaccaccaccaccaaacccaaacgauccaccaccccccaacccaaacgacccacccccacccaacccaaacgaccccccaccaccaaacccaaacgaccccccaccaccaaacgcaaacgauccaccaccccccaacgcaaacgauccagcaccacccaacgccaacgacccagcaccacccaaugcaaacgacccagcacccccaaacgcaaacgacccagcacccccaaacgccaacgacccaccaccaccaaacccaaaugacccagcaccaccaaacgccaacgauccaccacccccaaacccaaacgacccugcaccuccccaaggaaacaacaacccacaaccacaaccaagaccacaaccucaaccacaaccacaaccacaaccacaaccacaaccacaaccccaaccaagaccacaaccacaaccccaaccaggaggcaacaacaauaacaaaaauaacaacaacgacgacucauacaucccauccgcagaaaaaauauuagaauuuguaaaacaaauaagagacucaauaacagaagaauggucccaaugcaacguaacaugcgguucaggaauccguguacgaaaacgcaaaggcucaaacaaaaaagcagaagaccucacacucgaagacauugacacagaaauaugcaaaauggacaaaugcuccucaaucuucaacauugucucaaacucauuaggauucguaaucuuacucguacucguauucuucaacuaa

SEQ ID NO: 290 - RNA, 1026 nt, Artificial Sequence
  derived and/or modified CDS sequence (opt6) from Pb(ANKA)__XP_022712148.1__HsIns-iso1_Pb-CSP(24-340)
auggcacuauggaugagacuacuaccacuauuagcacuacucgcacuauggggacccgacccagcagcagcacaaaacaaaucaauacaagcccaaagaaaccuaaaugaacuaugcuacaacgaaggaaacgacaacaaauuauaccacguacuaaacuccaaaaacggaaaaauuuacaacagaaacaccguaaaccgacuacuagcagacgcaccagaaggaaaaaaaaacgaaaaaaaaaacgaaaaaauagaaagaaacaauaaacuaaaacaaccaccacccccaccaaaccccaacgacccaccaccaccaaacccaaacgacccuccaccaccaaaccccaacgaccccccucccccaaacccaaacgaccccccaccaccaaacgcaaaugaccccccccccccaaaugcaaacgaccccgcaccaccaaacgcaaacgacccagccccaccaaacgccaacgauccugcaccaccaaaugcaaacgacccagcccccccaaacgcaaaugacccaccaccaccaaacccaaacgacccugcaccaccaaaugcuaacgaccccccaccaccaaauccaaacgaccccgcccccccacaaggaaacaauaacccacaaccccaacccagaccacaaccacaaccucaaccacaaccccaaccacaaccccaaccacaaccacaaccacgcccacaaccacaaccacaaccaggaggaaacaacaauaauaaaaacaacaauaacgacgacucauacauucccuccgcagaaaaaauacucgaauucguaaaacaaauaagagacucuauaacagaagaauggucccaaugcaacgucacaugcggauccggaauaagagucagaaaaagaaaaggaucaaacaaaaaagcagaagaccucacacuagaagacauagauacagaaauaugcaaaauggacaaauguucaucaauauuuaacauaguaucaaacucuuuaggauucgucauauuacucguacuaguauucuucaacuaa

SEQ ID NO: 291 - RNA, 1005 nt, Artificial Sequence
  derived and/or modified CDS sequence (opt6) from Pb(ANKA)__XP_022712148.1__HsSPARC_Pb-CSP(24-340)
augcgagcauggauauucuucuuacuuugucucgcaggacgcgcccuagcacaaaacaaaucaauacaagcacaaagaaaccucaacgaacuaugcuacaacgaaggaaacgacaacaaacuauaccacgucuuaaacucaaaaaacggaaaaauauacaauagaaacacaguaaaccgacuauuagcagacgcacccgaaggaaaaaaaaacgaaaaaaaaaaugaaaaaaucgaaagaaacaacaaacucaaacaaccacccccacccccaaacccuaacgacccaccaccaccaaaccccaacgauccaccaccaccaaacccaaacgacccaccaccccccaacccaaacgacccacccccacccaacgccaacgauccaccacccccaaaugcaaacgacccagccccaccaaacgcaaacgauccagcuccaccaaacgcaaacgaccccgccccaccaaacgccaacgacccagcuccaccaaacgcaaaugauccaccaccacccaacccaaacgacccugcacccccaaacgcaaacgacccaccaccaccaaacccaaacgacccagcacccccacaaggcaacaauaacccacaaccacaacccagaccacaaccccaaccgcaaccccaaccacaaccacaaccacaaccacaaccacaaccaagaccacaaccacaaccucaaccuggcggaaacaauaacaauaaaaacaacaacaacgacgacucauauauaccaucagccgaaaaaauucuagaauucguaaaacaaaucagagacucaauaacagaagaauggucacaaugcaacguaacauguggauccggaauaagaguaagaaaaagaaaaggaucaaacaaaaaagcagaagaucuaacacuagaagauauagacacagaaauaugcaaaauggacaaaugcucaucaauauucaacauagucuccaacucacucggauucguaauccuacucguacucguauucuucaacuaa

SEQ ID NO: 292 - RNA, 1008 nt, Artificial Sequence
  derived and/or modified CDS sequence (opt6) from Pb(ANKA)__XP_022712148.1__IgE_Pb-CSP(24-340)
auggacuggacguggauauuauuuuuagucgccgcagccaccagaguacacucucaaaacaaaucaauacaagcccaaagaaaucuaaacgaauuaugcuacaacgaaggaaacgacaacaaacuauaccacguccucaacucuaaaaauggaaaaauauacaacagaaacaccguaaacagacuacuagcagacgcaccagaaggaaaaaaaaaugaaaaaaaaaacgaaaaaauagaaagaaauaacaaacucaaacaaccaccaccaccucccaacccaaacgacccaccacccccaaacccaaaugacccaccaccaccaaacccaaacgacccaccacccccaaacccaaaugacccaccaccaccaaacgcaaacgacccaccaccaccaaacgcaaacgacccagccccaccaaacgcaaacgacccagcaccaccaaacgcaaacgacccagcaccacccaaugccaaugacccagcaccaccaaacgcaaacgaccccccaccaccaaacccuaaugaccccgcaccaccaaacgcaaacgaccccccaccaccuaaccccaacgaccccgccccaccacaaggaaacaacaacccacaaccacaaccacguccacaaccacaaccacaaccccaaccacaaccccaaccacaaccacaaccacaaccccgaccacaaccacaaccacaacccggagguaacaacaacaauaaaaacaacaauaacgacgacuccuacauacccuccgcagaaaaaauacuagaauucguaaaacaaauaagagacucaauaacugaagaauggucacaauguaacguaacaugcgguucaggaauaagagucagaaaaagaaaaggaucaaacaaaaaagcagaagauuuaacacuagaagacauagacaccgaaauaugcaaaauggacaaaugcagcuccaucuucaacauaguaucaaacucacuaggauuuguaauacuacucguacuaguauucuucaauuaa

SEQ ID NO: 293 - RNA, 1194 nt, Artificial Sequence
  derived and/or modified CDS sequence (opt11) from Pf(3D7)__XP_001351122.1__Pf-CSP
augaugcgaaagcuugcgauccucagcgucuccucauuccuauucguagaagcacuauuccaagaauaccaaugcuacggcucauccucaaacacacgcguacucaacgaacucaacuacgacaacgcaggaacaaaccucuacaacgaacuagagaugaacuacuacggcaaacaagaaaacugguacucucucaaaaaaaacucacgaagccucggcgagaacgacgacggaaacaacgaagacaacgaaaaacuccgcaaaccaaaacacaaaaaacucaaacaacccgccgacggaaacccagacccaaacgcaaacccaaacguagacccaaacgccaaccccaacguagaccccaacgccaacccuaacgucgaccccaaugcaaaccccaacgcgaacccaaacgcaaaccccaacgcaaaccccaacgcaaacccaaacgccaaccccaacgcaaacccaaacgcaaacccuaacgccaacccaaacgccaacccaaacgccaacccaaacgcaaacccgaacgccaaccccaacgccaacccaaacgcaaacccaaacgcaaaccccaacgccaaccccaacguagaccccaacgcaaaccccaacgcaaacccaaacgccaaccccaacgccaaccccaacgccaaccccaacgccaaccccaaugccaacccaaacgcgaaccccaacgcaaacccgaacgcaaacccaaacgcgaacccaaacgcgaacccaaacgccaaccccaacgccaaccccaacgcaaacccaaacgcgaacccaaacgcaaaccccaacgccaacccaaacaaaaacaaccaaggaaacggacaaggccacaacaugccaaacgaccccaaccgcaacguagacgaaaacgccaacgccaacuccgcugucaagaacaacaacaacgaagaaccauccgacaaacacauaaaagaauaccuaaacaaaauccaaaacucccucucaaccgaauggucccccugcuccgucacaugcggaaacggcauccaaguccgaaucaaaccaggcuccgccaacaaacccaaagacgaacuggacuacgccaacgacaucgaaaaaaaaaucugcaaaauggaaaaaugcucauccgucuucaacguggucaacuccuccaucggacuaauaaugguccucuccuuccuauuccuaaacuaa

SEQ ID NO: 294 - RNA, 1122 nt, Artificial Sequence
  derived and/or modified CDS sequence (opt11) from Pf(3D7)__XP_001351122.1__Pf-CSP(1-374)
augaugcgcaaacucgcaauccucuccgucucaucguuccuauucguagaagcacucuuccaagaauaccaaugcuacggcucaagcuccaacacaagaguacucaacgaacucaacuacgacaaugccggaacaaaccuauacaacgagcuagaaaugaacuacuacggcaaacaagaaaacugguacucgcuaaaaaaaaacagcagaagccuaggugaaaacgacgacggaaacaacgaagacaacgaaaaacugcgcaaaccaaaacacaaaaaacuaaaacaacccgcagacggcaacccagacccaaacgcaaacccaaacguagaccccaacgccaacccaaacguagacccaaacgccaacccaaacguagacccaaacgcaaacccgaacgcaaacccaaacgcaaacccaaacgcaaacccaaacgcaaacccaaacgccaaccccaacgcaaauccaaacgcaaaccccaacgcaaaccccaacgccaacccaaacgcaaaccccaacgcgaacccaaacgccaaccccaacgccaacccaaacgcaaacccaaacgcaaacccaaacgccaaccccaacgucgacccaaacgccaacccaaacgcaaaccccaacgccaaccccaacgcaaacccaaacgccaacccgaacgcaaacccgaacgcaaacccaaacgcaaaccccaacgcaaaccccaacgcaaacccaaacgcaaaccccaacgccaaccccaacgccaaccccaacgcaaacccaaacgcaaacccgaacgcaaaccccaacgcaaaccccaacgccaaucccaacaaaaacaaccaaggcaacggacaaggacacaacaugccaaacgaccccaaccgcaacgucgacgaaaacgccaacgccaacuccgcggucaaaaacaacaacaacgaagagcccucagacaaacacauaaaagaauaccuaaacaaaauccaaaacucccucucgacagaauggucccccugcagcgucaccugcggaaacggcauacaaguacgaauaaaacccggcucagccaacaaaccaaaagacgaacuagacuacgccaacgacauagaaaaaaaaauaugcaaaauggaaaaaugc

SEQ ID NO: 295 - RNA, 975 nt, Artificial Sequence
  derived and/or modified CDS sequence (opt11) from Pf(3D7)__XP_001351122.1__Pf-CSP(1-325)
augaugcgcaaacucgcaauccuaucaguaagcucauuccuguucguagaagcacuauuccaagaauaccaaugcuacggcucauccucaaacacaagaguacuaaacgaacuaaacuacgacaacgccggaaccaaccuauacaacgaacucgaaaugaacuacuacggcaaacaagaaaacugguacucacuaaagaaaaacagcagaagccucggcgaaaacgacgacggcaacaacgaagacaacgagaaacugagaaaaccaaaacacaagaaacuaaaacaacccgcggacgggaacccagacccaaaugcaaacccaaacgucgacccaaacgcaaacccaaacguagacccaaacgcaaaccccaacguagaccccaacgcaaacccaaacgcaaacccaaacgcaaacccaaacgcaaacccaaacgcaaaccccaacgcaaacccaaacgcaaacccaaacgcaaaccccaacgccaacccaaacgccaaccccaacgcaaacccaaacgcaaacccaaacgcaaaccccaacgccaacccgaacgcaaacccaaacgcaaacccaaacgcaaaccccaacguagacccaaacgcaaacccaaacgccaaccccaacgcaaacccaaacgcaaacccgaacgcaaaccccaacgcaaaccccaacgcaaacccaaacgcaaaccccaacgcaaauccaaacgcaaacccaaacgcaaacccaaacgccaacccaaacgcaaaucccaacgcaaacccaaacgcaaaccccaacgcaaacccaaacgcaaacccaaacgcaaacccaaacaaaaacaaccaaggaaacggccaaggacacaacaugccaaacgacccaaaccgaaacguagacgaaaacgccaacgccaacagcgcagucaaaaacaacaauaaugaagaacccuccgacaaacacauaaaagaauaccuaaacaaaauccaaaac

SEQ ID NO: 296 - RNA, 1194 nt, Artificial Sequence
  derived and/or modified CDS sequence (opt11) from Pf(3D7)__XP_001351122.1__HsALB_Pf-CSP(19-397)
augaaaugggucaccuucauaucccuccuauuccucuucucaucagccuacucccucuuccaggaauaccaaugcuacggaucguccucaaacacuagaguacucaaugaauuaaacuacgacaacgccggcaccaaccucuacaacgaacucgaaaugaacuacuacggaaaacaagaaaacugguacucacucaaaaaaaacucucgaucccucggcgaaaacgacgacggcaacaacgaagacaacgagaaacuacgcaaaccaaaacacaaaaaauuaaaacaacccgccgacggcaaccccgaccccaacgccaaccccaacguagaccccaacgcgaaccccaacgucgacccaaacgccaaccccaacguggaccccaacgccaacccaaacgccaaccccaacgccaacccaaacgcaaaccccaacgccaacccaaacgccaaccccaacgcaaacccaaacgcgaacccaaacgcaaacccaaacgccaacccaaacgcaaacccaaacgcgaacccaaacgccaacccaaacgccaaccccaacgcaaacccaaacgccaacccaaacgccaacccaaacguagacccaaacgcgaaccccaacgcuaacccaaacgcaaacccaaacgccaacccaaacgccaacccuaacgcaaacccaaacgccaaccccaacgccaaccccaacgccaaccccaacgcaaacccaaacgccaacccaaacgccaaccccaacgccaacccaaacgcaaacccaaacgcaaacccaaacgcaaaccccaacgccaacccaaacgccaacccaaacaaaaauaaccaaggcaaugggcaaggccacaacaugccaaacgaccccaaccgcaaugucgacgaaaacgccaacgccaacucugcaguaaaaaacaauaacaacgaagaacccucagacaaacacaucaaagaauaccucaacaagauccaaaauucccucuccacagaauggucccccugcagcguaaccugcggcaacggcauccaaguccgcaucaaacccggcuccgccaacaaaccgaaagacgaacuagacuacgccaacgacauagaaaaaaaaaucugcaaaauggaaaaaugcagcuccgucuucaacgucgucaacagcuccaucggccucaucaugguccucuccuuccuguuccucaacuaa

SEQ ID NO: 297 - RNA, 1212 nt, Artificial Sequence
  derived and/or modified CDS sequence (opt11) from Pf(3D7)__XP_001351122.1__HsIns-iso1_Pf-CSP(19-397)
auggcacucuggaugagacuccucccccuccucgcacuccucgcccuauggggcccagacccagcggcagcccucuuccaagaauaccaaugcuacggcucauccuccaacacccgaguccucaaugaacuaaacuacgacaacgccggcaccaaccuauacaacgaacuagaaaugaacuacuacggcaaacaagaaaacugguacucccucaaaaaaaauucacgcucccuaggugagaacgacgacggaaacaacgaagacaacgaaaaacuccgaaaacccaaacacaaaaaacuaaaacaaccagcagacggcaaccccgaccccaacgcaaaccccaacguagacccaaacgcgaaccccaacgucgauccaaacgccaacccaaacguugaccccaacgcgaaccccaacgcaaacccaaacgcaaacccuaacgcgaaccccaacgcaaaccccaacgccaaccccaacgccaaccccaacgccaacccaaacgcaaaccccaacgccaaccccaacgcaaacccaaacgcaaacccgaacgcaaaccccaacgccaacccaaacgcaaacccaaacgccaacccaaacgcaaaccccaacguagacccaaacgccaaucccaacgcgaaccccaacgcaaacccaaacgcgaacccaaacgccaacccaaacgcaaacccgaacgccaacccaaacgccaaccccaacgcaaaccccaacgcaaacccaaacgccaacccaaacgcaaacccaaacgcaaaccccaacgccaaccccaacgcaaacccaaaugccaaccccaacgccaaccccaacgcaaacccaaacaaaaacaaccaaggaaacggccaaggccacaacaugccgaacgaccccaaccgaaacgucgacgaaaacgcaaacgccaacucagcggucaaaaacaacaacaacgaagaacccucagacaaacacaucaaagaauaccuaaacaagauccagaacucucucucaacagaauggucccccugcuccguaacaugcggcaacggcauccaaguacgaaucaaaccgggaucagccaauaaacccaaagacgaacucgacuacgccaacgacaucgaaaaaaaaauaugcaaaauggaaaaaugcagcucagucuucaacguagucaacagcuccauaggccucaucaugguacucuccuuccuguuccuaaacuaa

SEQ ID NO: 298 - RNA, 1191 nt, Artificial Sequence
  derived and/or modified CDS sequence (opt11) from Pf(3D7)__XP_001351122.1__HsSPARC_Pf-CSP(19-397)
augcgcgccuggauauucuuccuccuaugccuagcaggacgcgcccucgcacucuuccaagaauaccaaugcuacggcucauccucaaacacccgcguacuuaacgaacuaaacuacgacaacgccggaaccaaccuauacaacgaacucgaaaugaacuacuacgguaaacaagaaaacugguacucccucaaaaaaaacagccgaagccuaggagaaaacgacgacggaaacaacgaagacaacgaaaaacugcgcaaacccaaacacaaaaaacucaaacaacccgcagacgggaacccagacccaaacgcaaacccaaacguggacccaaacgccaacccuaacguagaccccaacgcaaaccccaacgucgacccuaaugcaaacccaaacgccaaccccaacgcgaacccaaacgcaaaccccaacgcuaacccgaacgccaaccccaacgccaacccgaacgcaaacccaaacgcaaacccaaacgcgaacccaaacgcaaacccaaacgccaaccccaacgcgaacccaaacgccaauccaaacgccaacccaaacgcaaacccaaacgccaaccccaacguagacccaaacgccaacccaaacgcgaacccaaacgcaaaccccaacgcaaacccaaacgcaaacccaaacgccaacccuaacgcaaacccaaacgccaaccccaacgccaacccaaacgcaaacccaaacgccaacccaaacgccaaccccaacgcaaacccgaacgcaaaccccaacgcaaacccaaacgcaaacccaaacgcgaacccgaacgccaacccaaauaagaacaaccaaggaaacggacaaggccacaacaugccaaacgaccccaaccgcaacgucgacgaaaacgcaaaugccaacuccgcagucaaaaacaacaauaacgaagaacccucggacaaacacaucaaagaauaccucaacaagauccaaaacucacucuccaccgaauggucacccugcagcguaacuugcggcaacggcauccaaguccgcauaaaaccaggcuccgcaaacaaacccaaagacgaacucgacuaugccaacgacaucgaaaaaaaaauaugcaaaauggaaaaaugcagcucagucuucaacguagucaacagcucuaucggacuaauaaugguacucuccuuccuauucuuaaacuaa

SEQ ID NO: 299 - RNA, 1194 nt, Artificial Sequence
  derived and/or modified CDS sequence (opt11) from Pf(3D7)__XP_001351122.1__IgE_Pf-CSP(19-397)
auggacuggacauggauccucuuccucgucgccgcggccacacgcguacacucacucuuccaagaauaucaaugcuacggcucaagcucgaacacgcgcguacucaacgaacuaaacuacgacaacgccggcaccaaccuauacaacgaacucgaaaugaacuacuacggcaaacaagaaaacugguacucacuuaagaaaaauucacgaucccucggagaaaacgacgaugggaacaacgaagacaacgaaaaacuacgcaaacccaaacacaagaaacuuaaacaacccgcagacggcaacccagacccaaacgcaaaccccaacguagaccccaacgcaaacccaaacguagacccaaacgccaacccaaacguagacccaaacgcgaacccaaacgccaacccaaacgccaaccccaacgcaaacccaaacgcaaauccaaacgcaaacccaaaugcaaacccgaacgccaauccaaacgcaaaccccaacgcaaacccaaacgcaaaccccaaugccaacccaaacgcaaaccccaacgcaaaccccaacgcaaaccccaacgcaaacccaaacgcgaacccaaacguagaccccaacgccaaccccaacgccaacccaaacgcaaacccaaacgccaacccaaacgccaaccccaacgcaaaccccaacgcaaacccgaacgcaaacccaaacgcaaacccaaacgcaaacccgaacgcaaacccuaacgcgaaccccaacgccaaccccaacgcaaacccaaacgcaaacccaaacgccaacccaaacgcaaacccaaacgcaaacccaaacaaaaacaaccaaggaaacgggcaaggacauaacaugccgaacgaccccaaccgcaacguagacgaaaacgccaacgccaacagcgcagucaaaaacaacaacaacgaagaacccuccgacaaacacaucaaagaauaccuaaacaaaauccagaacucacuauccaccgaauggucccccugcagcgugaccugcggcaacggcauacaaguccgcauaaaaccaggcuccgccaacaaacccaaagacgaacuagacuacgccaacgacauagaaaagaaaauaugcaaaauggaaaaaugcagcucagucuucaauguagucaacuccuccaucggacucauaaugguccuaucauuccucuuccuaaacuaa

SEQ ID NO: 300 - RNA, 1359 nt, Artificial Sequence
  derived and/or modified CDS sequence (opt11) from Pf(3D7)__XP_001351122.1__Pf-CSP_L(G4SG4)_TM domain HA
augaugcgcaaacucgccauccucagcgucagcucguuccucuucgucgaagcacuauuccaagaauaccaguguuacggcucauccucaaacacacgcgugcucaacgaacuaaacuacgacaacgccggcaccaaccucuacaacgaacuagaaaugaacuauuacggcaagcaagaaaacugguacucacucaaaaaaaacagccgaagccuaggcgagaacgacgacgggaacaacgaagacaacgaaaaacuacgcaaacccaagcacaaaaaacugaaacaaccagccgacggaaauccagaccccaacgcaaacccgaacguagaccccaacgcgaaccccaacguggacccgaacgcaaacccgaacguagacccaaacgcaaacccaaacgcgaacccaaacgcaaacccaaacgcuaacccaaacgcaaaccccaacgccaaccccaacgcgaacccaaacgcaaacccaaacgcaaacccaaacgcaaacccgaacgcaaacccaaacgccaacccaaacgcgaacccaaacgccaacccaaacgcaaacccaaacgcaaacccaaacgcaaacccaaacguagacccgaacgccaacccgaaugcaaacccaaacgcaaacccgaacgcaaacccaaacgcgaacccgaacgccaacccaaacgcaaacccgaacgcaaaccccaacgccaacccaaacgcaaaccccaacgcaaaccccaacgcaaacccgaacgcaaacccaaacgcaaacccaaacgccaaccccaacgccaaccccaacgcaaacccgaacgccaacccaaacaaaaacaaccaaggcaacgggcaaggacacaacaugccaaacgaccccaaccgaaacgucgacgaaaacgccaacgccaacuccgcagucaaaaacaacaacaacgaagaacccucagacaaacacauaaaagaauaccucaacaaaauccaaaacucacucucaaccgaguggucacccugcagugugaccuguggcaacggaauacaaguacgcauaaaacccggaucagccaacaaaccgaaagacgaacuagacuacgccaacgacauagaaaaaaaaauaugcaaaauggagaaaugcagcucugucuucaacgucgucaacagcucaaucggacucauaaugguccucuccuuccuauuccucaacggcggagggggcucaggcggcggaggaaaauuagaauccaccagaaucuaucagauucucgccauauacagcacagucgcaagcucgcuuguccuugucguaucacuaggcgcaaucucauucuggaugugcuccaacggaagccugcaaugccgcauuugcauauaa

SEQ ID NO: 301 - RNA, 1233 nt, Artificial Sequence
  derived and/or modified CDS sequence (opt11) from Pf(3D7)__XP_001351122.1__Pf-CSP(199-377)_L(PVTN)_HBsAg
auggaccccaacgccaaccccaacgccaaccccaacgccaaucccaacgcuaaccccaacgccaaccccaacgcaaaccccaacgccaacccaaacgccaaccccaacgcaaaccccaacgccaaucccaaugccaaccccaacgccaaccccaacgcgaaccccaacgccaaccccaacgcaaacccaaacgccaaccccaacgccaaccccaacgccaaccccaacaaaaacaaccaaggcaacggccaaggccacaacaugcccaacgaccccaaccgcaacguagacgagaacgccaacgccaacagcgcugucaaaaacaacaacaacgaggaacccuccgacaaacacaucaaagaauaccuuaacaaaauccaaaacucucucuccaccgaguggucccccugcucagucacaugcggcaacggcauacaaguucguaucaaacccggcucagcaaacaaacccaaagacgaacucgacuacgcaaacgacauagaaaagaaaaucugcaaaauggaaaaauguucauccguccccgucaccaacauggaaaacaucacuuccggauuccucgguccccuacucguacuccaagccggcuucuuccuccucacccgcauccucaccaucccccaaucacuugacuccugguggaccucccucaacuuccucggcggcucccccgucugccuaggccaaaacagccaaucccccacuagcaaccacucccccacauccugcccacccaucugccccggauaucgauggaugugccuucgccgauucauaaucuuccucuucauccuccuacucugccucaucuuccuccucguccuucuagauuaccaaggcaugcuccccgucugcccccuuauccccggcuccaccaccacaaacaccggccccugcaaaaccugcacaacccccgcccaaggcaauagcauguuccccuccugcugcugcacuaaaccaacagacggcaacuguaccugcaucccaaucccaucaucaugggccuucgccaaauaccucugggaaugggcaucuguacgauucuccuggcucucccuucucguacccuucguccagugguucgucggccucucccccaccguauggcuauccgccaucuggaugaugugguacuggggccccucccuauacuccaucgucuccccauucauaccacuccuacccaucuucuucugccucugggucuacaucuga

SEQ ID NO: 302 - RNA, 1275 nt, Artificial Sequence
  derived and/or modified CDS sequence (opt11) from Pf(3D7)__XP_001351122.1__Pf-CSP(199-387)_L(PVTN)_HBsAg
augauggcccccgaccccaacgcaaauccaaacgcaaaccccaacgccaacccuaacgcaaaccccaacgccaacccaaacgccaaucccaacgccaacccuaacgccaaccccaacgcaaaccccaacgccaaccccaacgccaacccuaacgcaaaccccaacgccaacccaaacgcaaaccccaacgccaaccccaacgccaaccccaacgcaaacccaaacgcaaaccccaacaaaaacaaccaaggaaacggacaaggccacaacaugccuaacgaccccaaucgcaacgucgacgaaaacgcaaacgccaacuccgccgucaaaaacaacaacaacgaagaacccucugacaaacacaucaaagaauaccucaacaagauccaaaacucccuauccaccgaauggucccccugcuccgucacuugcgguaauggcauccaaguccgcauaaaaccaggauccgcaaacaaacccaaagacgaacuagacuacgccaacgacauagaaaagaaaaucugcaaaauggaaaaaugcuccucagucuucaaugucguaaacuccuccauuggccuaggccccgucaccaacauggaaaacauuaccuccggauuccucgguccucuccucguccuccaagccggauucuuucuccucacacgaauccucacuaucccucaaucccuggacucaugguggaccucccucaacuuccugggcggcucccccgucugccucggccaaaacagccaauccccaaccuccaaucacucccccacaagcugcccucccauaugccccggcuaccgcuggaugugccuccgucgcuucaucauauuccucuucauacuucuccucugccucaucuuccuccuuguccugcuagacuaccaaggcaugcuccccgucugcccacucauccccgguuccaccacaacaaacaccggccccugcaaaacaugcaccacacccgcccaagguaacuccauguuccccuccugcugcugcaccaaaccaaccgacggcaacugcacuugcauucccauccccucauccugggccuucgccaaauaccucugggaaugggcauccguccguuucucauggcuaucucuccuaguaccauucguacaaugguucguuggccucucccccaccguauggcucuccgccauauggaugaugugguacuggggcccuucacuuuacuccaucgucucacccuucaucccacuccuacccaucuucuucugccuuuggguauacaucuaa

SEQ ID NO: 303 - RNA, 459 nt, Artificial Sequence
  derived and/or modified CDS sequence (opt11) from Pf(3D7)__XP_001351122.1__HsALB_Pf-CSP(19-152)
augaaaugggucaccuucaucucccuccucuuccucuucuccagcgcauacucccucuuccaagaauaccaaugcuacggcuccuccuccaacacccgcguccucaacgaacucaacuacgacaacgccggcaccaaccucuacaacgaacucgaaaugaacuacuacggcaaacaagaaaacugguacucccucaaaaaaaacucccgcucccuaggcgaaaacgacgacggaaacaacgaagacaacgaaaaacuccgcaaacccaaacacaaaaaacucaaacaacccgccgacggaaaccccgaccccaacgccaacccaaacgucgaccccaacgccaaccccaacgucgaccccaacgccaaccccaacgucgaccccaacgccaaccccaacgcaaacccaaacgcaaacccaaacgccaaccccaacgccaaccccaacgccaaccccuaa

SEQ ID NO: 304 - RNA, 579 nt, Artificial Sequence
  derived and/or modified CDS sequence (opt11) from Pf(3D7)__XP_001351122.1__HsALB_Pf-CSP(19-192)
augaaauggguaaccuucauaucccuccucuuccuauucucgagcgccuacucccucuuccaagaauaccaaugcuacggcucauccuccaacacccgcguccucaacgaacucaacuacgacaacgccggcaccaaccucuacaacgaacuagagaugaacuacuacggcaaacaagaaaacugguacucacucaaaaaaaacucccgaucccuaggagaaaacgacgacggcaacaacgaagacaacgaaaaacuacgaaaacccaaacacaaaaaacucaaacaacccgccgacggcaaccccgaccccaacgccaaccccaacgucgaccccaacgccaacccaaacguagaccccaacgccaaccccaacgucgacccaaacgccaaccccaacgccaaccccaacgccaacccaaacgcaaacccaaacgcaaacccaaacgccaacccaaacgccaaccccaacgccaaccccaacgcaaaccccaacgcaaaccccaacgccaacccaaacgcaaaccccaacgccaacccaaacgccaacccaaacgccaaccccaacgcaaaccccuaa

SEQ ID NO: 305 - RNA, 819 nt, Artificial Sequence
  derived and/or modified CDS sequence (opt11) from Pf(3D7)__XP_001351122.1__HsALB_Pf-CSP(19-272)
augaaauggguaaccuucaucucccuccucuuccuauucucaucagcauacucacucuuccaagaauaccaaugcuacggcucgagcucaaacacacgcguacucaacgaacugaacuacgacaacgccggaaccaaccucuacaaugaacucgaaaugaacuacuacggcaaacaagagaacugguacucacucaaaaaaaacagcagaagccucggagaaaacgacgacggaaacaacgaagacaacgaaaaacuccgcaaacccaagcacaaaaaacuaaaacaacccgcagacggaaaccccgaccccaacgcaaacccgaacgucgacccaaacgccaacccaaacguagaccccaacgcgaacccaaacguagacccaaacgccaacccaaacgcaaaccccaacgccaaccccaacgcaaacccaaacgccaacccaaacgcaaaccccaaugcaaaccccaacgcaaacccaaacgccaaccccaacgcaaacccaaacgcaaacccaaacgcaaacccaaacgcaaacccaaacgcgaacccaaacgcaaacccaaacgcaaacccgaacgcaaacccaaacguagacccaaacgcaaaccccaacgccaacccaaacgcaaacccaaacgcaaacccaaacgcaaacccaaacgcgaacccaaacgccaacccaaacgcaaacccaaacgcaaacccaaacgcaaacccaaacgcaaacccaaacgcaaacccaaacgcaaacccgaacgcgaacccaaacgcaaacccaaacgcgaacccgaacgcaaaccccaacgcaaacccauaa

SEQ ID NO: 306 - RNA, 981 nt, Artificial Sequence
  derived and/or modified CDS sequence (opt11) from Pf(3D7)__XP_001351122.1__HsALB_Pf-CSP(19-272)_L(AAY)_Pf-CSP(310-3 27)_L(AAY)_Pf-CSP(346-375)
augaaaugggucaccuucaucucacuccuauuccuauucuccuccgcauacucacucuuccaagaauaccagugcuacggaucaagcuccaacacacgcguacuaaacgaacugaacuacgacaacgccggaaccaaccucuacaacgaacucgaaaugaauuacuacggcaaacaagagaacugguacucacucaaaaaaaacagcagaucccuaggcgaaaacgacgacggaaacaacgaagacaacgaaaaacuacgcaaacccaaacacaaaaaacuaaaacaacccgcagacggaaacccagauccaaacgcaaacccaaacguagacccaaacgccaacccaaacguagacccaaacgcaaacccaaacguagaccccaacgcaaacccaaacgcaaacccgaacgccaacccaaacgcaaaccccaacgccaacccaaacgcaaacccaaacgcaaacccaaacgcaaacccaaacgccaaccccaacgcgaacccaaacgcaaacccuaacgccaacccaaacgcaaacccaaacgcaaacccgaacgcaaacccaaacgcaaacccaaacgcaaacccgaacguagacccaaacgcaaacccaaacgcaaacccaaacgcaaacccaaacgccaacccaaacgccaacccaaacgcaaaccccaacgcaaaccccaacgcgaacccaaacgccaaccccaacgcaaacccaaacgccaacccaaacgccaacccgaacgcaaacccaaacgccaacccaaacgccaacccgaacgcaaacccaaacgccaacccaaacgccaacccagccgcguacgaacccucagauaaacacauaaaagaauaccucaacaaaauccaaaacucacuagcagccuacaucaaaccaggauccgccaacaaacccaaggacgaacucgacuacgcaaacgacaucgaaaaaaaaaucugcaaaauggaaaaaugcucauga

SEQ ID NO: 307 - RNA, 942 nt, Artificial Sequence
  derived and/or modified CDS sequence (opt11) from Pf(3D7)__XP_001351122.1__HsALB_Pf-CSP(19-272)_L(AAY)_Pf-CSP(346-3 65)_L(AAY)_P2
augaaaugggucaccuucaucucacuccuauuccuauucucgagcgcauacucacucuuccaagaauaccaaugcuauggcuccagcucaaacacacgcguccuaaacgaacucaacuacgacaacgccggaacaaaccucuacaacgaacucgaaaugaacuacuacggcaaacaagaaaacugguacucgcucaaaaaaaacucccgaagucuaggcgaaaacgacgacggaaacaacgaagacaacgaaaaacuacgcaaacccaaacacaaaaaacuaaaacaacccgcagacggaaaccccgacccaaacgcaaaccccaacguagacccaaacgcaaaccccaacguagacccaaacgcaaacccgaacguagacccaaacgccaacccaaacgccaaccccaacgcaaacccaaacgccaaccccaacgcaaacccaaacgcaaacccaaacgcaaacccaaacgcaaacccaaacgccaaccccaacgccaacccaaacgccaaccccaacgcgaaccccaacgcgaacccaaacgccaacccaaacgcaaaccccaacgcaaacccaaacgcaaacccaaacgucgacccaaacgcaaacccaaacgcaaacccgaacgcaaacccaaacgcaaaccccaacgccaacccaaacgcgaacccaaacgccaacccaaacgccaacccaaacgcaaacccaaacgccaacccaaacgcaaacccaaacgcaaaccccaacgcaaaccccaacgcaaacccaaacgccaaccccaacgcaaaccccaacgcaaacccaaacgccaacccagccgcauacauaaaacccggcuccgccaacaaaccaaaagacgaacuagacuacgccaacgacauagaagcagccuaccaauacaucaaagccaacagcaaauucauaggaauaaccgagcuauaa

SEQ ID NO: 308 - RNA, 936 nt, Artificial Sequence
  derived and/or modified CDS sequence (opt11) from Pf(3D7)__XP_001351122.1__HsALB_Pf-CSP(19-272)_L(AAY)_Pf-CSP(346-3 65)_L(AAY)_PADRE
augaaauggguaaccuucaucucgcuacuguuccucuucucauccgcauacucccucuuccaagaauaccaaugcuacggcucauccucaaacacacgaguacuaaacgaacucaacuacgacaacgccggaaccaaccuauacaacgaacucgaaaugaacuacuacggcaaacaagaaaacugguacucacucaaaaaaaacucccgaucccucggcgaaaacgacgacggaaacaacgaagacaacgaaaaacugagaaaacccaaacacaaaaaacuaaaacaaccagccgacggcaacccagaccccaacgcaaaccccaacguagacccaaacgccaaccccaacguagacccaaacgcaaacccaaacguagaccccaacgccaacccaaacgccaacccaaacgccaaccccaacgcaaacccaaacgcaaacccaaacgcaaacccaaacgccaacccaaacgcaaacccaaacgccaacccgaacgcaaaccccaacgcaaacccaaacgcaaaccccaacgccaacccaaacgcaaacccaaacgcaaaccccaacgcaaacccaaaugcgaacccaaacguggacccgaacgcaaaccccaacgccaacccaaacgcaaaccccaacgccaaccccaacgccaaccccaacgcaaaccccaacgccaaccccaacgccaacccaaacgccaacccaaacgcgaacccaaacgcaaaccccaacgcaaacccaaacgcaaacccaaacgcaaacccaaacgcaaaccccaacgcaaacccaaacgcaaacccaaacgcaaaccccgcagccuacauuaaaccaggcuccgccaacaaacccaaagacgaacucgacuacgccaacgacauagaagcagccuacgccaaauucguagccgcauggacacucaaagccgcagccuaa

SEQ ID NO: 309 - RNA, 993 nt, Artificial Sequence
  derived and/or modified CDS sequence (opt11) from Pf(3D7)__XP_001351122.1__HsALB_Pf-CSP(19-272)_L(G4S)_Pf-CSP(310-3 27)_L(G4S)_Pf-CSP(346-375)
augaaaugggucaccuucaucucccuacuauuccucuucucaucagccuacucacucuuccaagaguaccaaugcuacggcucaagcucaaacacacgcguacucaacgaacuaaacuacgacaacgcaggcaccaaccucuacaacgaacucgagaugaacuacuacggcaaacaagaaaacugguacucacucaaaaaaaacucccgcagccucggcgaaaacgacgacggcaacaacgaagauaacgagaaacuacgcaaacccaaacacaaaaaacuaaaacaacccgccgacggaaacccagacccaaacgccaacccaaacguagacccaaacgcaaacccaaacguagacccaaacgccaaccccaacguagacccaaacgccaacccaaacgccaacccaaacgcaaacccaaacgcaaacccaaacgcgaacccaaacgcaaaccccaacgccaacccaaacgcaaacccaaacgccaaccccaacgcaaacccaaacgcaaaccccaacgcaaacccaaacgccaaccccaacgcaaaccccaacgcaaacccaaacgcaaacccaaacgcaaacccaaacgucgacccaaacgcaaaccccaacgcaaacccaaacgcaaacccaaacgccaacccaaacgcaaacccaaacgccaacccaaacgcaaaccccaacgcaaaccccaacgccaacccaaacgcaaaccccaacgcgaacccaaacgcaaacccaaacgcaaacccaaacgcaaaccccaacgcaaaccccaacgcaaacccaaacgcaaacccaaacgcaaacccaggcggcggcggaagcgaacccucggacaaacacauaaaagaauaccucaacaaaauccaaaacucccucggaggcggaggcuccaucaaacccggaagcgcaaacaaacccaaagacgaacucgacuacgcaaacgacaucgagaaaaaaauaugcaaaauggaaaaaugcucauaa

SEQ ID NO: 310 - RNA, 978 nt, Artificial Sequence
  derived and/or modified CDS sequence (opt11) from Pf(3D7)__XP_001351122.1__HsALB_Pf-CSP(19-272)_L(G4S)_Pf-CSP(310-3 27)_Pf-CSP(346-375)
augaaauggguaaccuucaucucacuccuauuccucuucuccuccgcauacucgcucuuccaagaauaccaaugcuacggcucaagcucaaacacccgcguccucaacgaacucaacuacgacaacgccgguaccaaccuauacaacgaacucgaaaugaacuacuacggcaaacaagaaaacugguacucacucaaaaaaaacuccaggucccuaggagaaaacgacgauggcaacaacgaagacaacgaaaaacuccgaaagccaaaacacaaaaaacuaaaacagcccgcagacggcaacccagacccaaacgcaaacccaaacguagacccaaacgcgaaccccaacguagacccaaacgcaaacccaaacguagacccaaacgcaaaccccaacgcaaacccaaacgcaaaccccaacgcaaaccccaacgcaaacccaaacgcaaacccaaacgcaaacccaaacgcaaacccaaacgcaaaccccaacgccaaccccaacgcaaacccaaacgcaaacccaaacgcaaacccaaacgcaaacccaaacgcaaaccccaacgccaacccaaacgcaaacccaaacguagacccaaacgcaaacccaaacgcaaacccaaacgcaaaccccaacgccaacccaaacgcaaacccaaacgcaaacccaaacgcaaacccaaacgcaaauccaaacgcuaacccaaacgcaaacccgaacgcaaaccccaaugcaaaccccaacgcaaacccaaacgccaacccaaacgcaaacccaaacgcgaacccaaacgcaaacccaaacgcaaacccaggcggaggcggauccgaacccuccgacaaacacauaaaagaauaccuaaacaaaauccaaaacucucucauaaaacccggaucagccaacaaaccaaaagacgaacuagacuacgccaaugacauagaaaaaaaaauaugcaagauggaaaaaugcagcuaa

SEQ ID NO: 311 - RNA, 978 nt, Artificial Sequence
  derived and/or modified CDS sequence (opt11) from Pf(3D7)__XP_001351122.1__HsALB_Pf-CSP(19-325)
augaaauggguaaccuucaucucacuccuguuccuauucucauccgcauacucacucuuccaagaauaccaaugcuacggcucgucuucaaacacccgcguacucaacgaacucaacuacgacaacgccggaaccaaccucuacaacgaacucgaaaugaacuacuacggcaaacaagaaaacugguacucacucaaaaaaaacagccgaagccuaggcgaaaacgacgacggaaacaaugaagacaacgaaaaacuccgcaaacccaaacacaaaaaacucaaacaaccagcagacggaaaccccgacccgaacgcaaacccaaacguagacccaaacgcaaacccaaacguagacccaaacgcgaacccaaacguagaccccaacgcaaacccaaacgcaaacccaaacgcaaacccaaacgccaaccccaacgccaacccaaacgccaacccaaacgcaaacccgaacgcgaacccaaacgcaaaccccaacgcaaacccaaacgcaaacccaaacgcgaacccaaacgccaacccaaacgccaacccaaacgcaaacccaaacgccaacccaaacgcaaaccccaacguggaccccaacgcaaacccaaacgcaaacccaaacgccaaccccaacgcaaacccaaacgcaaacccuaacgcaaacccaaacgcaaaccccaacgcgaacccaaacgcaaacccaaacgcaaacccaaacgcaaaccccaacgcaaacccaaacgccaacccaaacgccaacccaaacgcgaauccaaacgcaaaccccaacgcaaacccaaacgcaaacccgaacaaaaacaaccaagggaacggacaaggacacaacaugccaaacgaccccaaccgcaacgucgacgaaaacgccaacgccaacuccgcaguaaaaaacaacaacaacgaagaacccuccgacaaacacauaaaagaauaccucaacaagauacaaaacuag

SEQ ID NO: 312 - RNA, 1155 nt, Artificial Sequence
  derived and/or modified CDS sequence (opt11) from Pf(3D7)__XP_001351122.1__HsALB_Pf-CSP(19-384)
augaaauggguaaccuucaucucacuacucuuccuauucucaagcgcguacucacucuuccaagaauaccaaugcuacggcucgagcucaaacacccgcguucucaacgaacuaaacuacgacaacgccggaaccaaccuauacaacgaacuugaaaugaacuacuacggcaaacaagaaaacugguacucgcucaaaaaaaacuccaggagccuaggcgaaaacgacgacggaaacaacgaagacaacgagaaacuaagaaaacccaaacacaaaaaacucaaacagcccgcggacggaaaccccgacccaaacgcaaaccccaacguagacccgaacgccaacccaaacguagacccaaacgcaaacccaaacguagaccccaacgcaaacccgaacgccaacccaaacgcaaacccaaaugcgaaccccaacgcgaacccaaacgcaaacccgaacgcaaaccccaacgccaacccaaacgcaaacccaaacgcaaaccccaacgcaaacccaaacgcgaacccaaacgcaaacccaaacgcgaacccgaacgcaaacccaaacgcaaacccgaacgcaaacccaaacguagacccaaacgccaacccaaacgcaaacccaaacgcaaaccccaacgcaaacccaaacgcaaacccgaacgcaaacccaaacgcaaacccaaacgcgaacccaaacgcaaaccccaacgcaaacccaaacgcaaacccuaacgcaaacccgaacgcaaacccaaacgccaacccaaacgcgaaccccaacgcaaacccaaacgccaacccaaacgccaacccgaacaaaaacaaccaaggaaacggacaaggacacaacaugccaaacgaccccaaccgaaacgucgacgaaaacgcaaacgccaacagugccgucaaaaacaacaacaaugaagaacccucagacaaacacauaaaagaauaccuaaacaaaauccagaacucgcucucaaccgaauggucacccugcagcgucaccugcggcaacggaauacaaguacgcaucaaaccaggcucggccaacaaaccaaaagacgaauuagacuacgcaaacgacaucgaaaaaaaaauaugcaaaauggaaaaaugcagcucagucuucaacguagucaauagcucauaa

SEQ ID NO: 313 - RNA, 1293 nt, Artificial Sequence
  derived and/or modified CDS sequence (opt11) from Pf(3D7)__XP_001351122.1__HsALB_Pf-CSP(19-384)_TM domain HA
augaagugggucaccuucaucucccuccuauuccucuucucuagcgcguacucacucuuccaagaauaccaaugcuacggauccagcucaaacacacgcguccucaaugaacugaacuacgauaacgccggaaccaaccucuacaacgaacucgaaaugaacuacuacggcaaacaagaaaacugguacucacuaaagaaaaauagcaggucccucggcgaaaacgacgacgggaacaacgaagauaacgaaaaacuacgcaaacccaagcacaagaaacuaaaacagccagcagacggaaacccagaccccaacgccaacccaaacgucgaccccaacgcaaacccaaacguagauccgaacgcaaacccaaacgucgauccaaacgcaaacccaaacgcaaacccaaacgcuaaccccaacgccaacccaaacgcaaacccgaacgcaaaccccaacgcgaacccgaacgcaaacccaaacgcaaacccaaacgccaacccaaacgcaaacccaaacgcaaacccaaacgccaacccaaacgcaaaccccaacgcgaaccccaacgcaaaccccaacgcaaacccaaacgucgacccaaacgcaaaccccaacgcaaaccccaacgcaaaccccaaugcaaacccaaacgcgaaccccaacgcaaacccaaacgcgaacccaaaugcaaaccccaacgccaaccccaacgccaacccgaacgcaaacccaaacgccaacccaaacgccaacccaaacgcaaaucccaacgccaacccaaacgcgaacccgaacgcaaacccaaacgcaaacccgaacaaaaacaaccaaggaaacggucaaggacacaacaugccaaacgaccccaaccgcaacgucgacgaaaacgccaaugccaacagcgccgucaaaaacaacaacaacgaagaacccucagacaaacacaucaaagaguaccuaaacaagauccaaaacucccucuccaccgaauggucccccugcagcguaaccugcggaaacggcauccaaguccgcauaaaaccaggcucagccaacaaaccaaaagaugaacucgacuacgcaaacgacauagaaaagaaaaucugcaaaauggaaaaaugcagcuccguauucaacgugguuaacuccucaaaacuagaauccacccgcaucuaccaaauacucgcaauauacagcacaguagccagcucacucguccuagucgucucccucggagccaucagcuucuggaugugcuccaacggaaguuuacaaugucgcauaugcauauaa

SEQ ID NO: 314 - RNA, 1005 nt, Artificial Sequence
  derived and/or modified CDS sequence (opt11) from Pf(3D7)__XP_001351122.1__HsALB_Pf-CSP(82-397)
augaaaugggucaccuucaucucacuccuguuccucuucucauccgccuacagcgacaacgaaaaacugcgcaaacccaaacacaagaaacucaaacaaccagccgacggcaaccccgaccccaacgccaacccaaacguagaccccaacgccaaccccaacguagacccaaacgccaacccaaacguggaccccaacgcaaacccaaacgccaacccaaacgccaauccaaacgccaacccaaacgcaaacccaaacgcaaaccccaacgccaacccuaacgccaaccccaacgcaaacccaaacgccaaccccaacgccaaccccaacgcaaaccccaacgcaaacccuaacgccaaccccaacgccaaccccaacgcaaacccaaacgccaaccccaacguagacccaaacgccaaccccaacgcaaaccccaacgccaacccaaacgcaaacccaaacgccaaccccaacgccaaccccaacgcaaacccaaacgcaaacccaaaugcaaaccccaacgccaaccccaacgccaaccccaacgcaaaccccaacgcaaaccccaacgcaaacccgaacgccaacccaaacgccaacccaaacgccaaccccaacgcaaaccccaacaaaaacaaccaaggcaacggacaaggacacaacaugcccaacgaccccaaccgcaacgucgacgaaaacgccaacgccaacuccgccgucaaaaacaacaacaacgaagaacccuccgacaaacacaucaaagaauaccucaacaaaauccaaaacucccucucaaccgaauggucacccugcuccguaaccugcggcaacggcauccaaguccgcaucaaacccggcucagccaacaaacccaaagacgaacucgacuacgccaaugacaucgaaaagaaaauaugcaaaauggaaaaaugcuccuccgucuucaacgucgucaacuccuccaucggccucaucaugguccucucguuccuauuccuaaacuaa

SEQ ID NO: 315 - RNA, 357 nt, Artificial Sequence
  derived and/or modified CDS sequence (opt11) from Pf(3D7)__XP_001351122.1__HsALB_Pf-CSP(93-192)
augaaauggguaaccuucaucucacuccuauuccuauucucaagcgcauacucaaaacuaaaacaacccgcagacggaaacccagacccaaacgcaaacccaaacguagacccaaacgcaaacccaaacguagacccaaacgcaaacccaaacguagacccaaacgcaaacccaaacgcaaacccaaacgcaaacccaaacgcaaacccaaacgcaaaccccaacgcaaacccaaacgcaaacccaaacgcaaacccaaacgcaaacccaaacgcaaacccaaacgcaaacccaaacgcaaacccaaacgcaaacccaaacgcaaacccaaacgccaacccaaacgcaaacccauaa

SEQ ID NO: 316 - RNA, 597 nt, Artificial Sequence
  derived and/or modified CDS sequence (opt11) from Pf(3D7)__XP_001351122.1__HsALB_Pf-CSP(93-272)
augaaaugggucaccuucaucucacuccuauuccuauucucauccgcauacucaaaacuaaaacaacccgccgacggaaacccagacccaaacgcaaacccaaacguagacccaaacgcaaacccaaacguagacccaaacgcaaacccaaacguagacccaaacgcaaacccaaacgccaacccaaacgcaaauccaaacgcaaacccaaacgcaaacccaaacgcaaacccaaacgcaaacccaaacgccaacccaaacgccaacccaaacgcaaacccaaacgcaaacccaaacgcaaacccaaacgcaaacccaaacgcaaacccaaacgccaaccccaacgcaaacccaaacgcaaaccccaacguagacccaaacgcaaacccaaacgccaaccccaacgcaaaccccaacgccaaccccaacgccaacccaaacgccaacccaaacgcaaacccaaacgcaaacccaaacgcaaacccaaacgcaaacccaaacgcaaacccaaacgcaaacccaaacgcaaacccaaacgcaaacccaaacgccaacccaaacgcaaacccaaacgcaaacccgaacgcaaacccauaa

SEQ ID NO: 317 - RNA, 972 nt, Artificial Sequence
  derived and/or modified CDS sequence (opt11) from Pf(3D7)__XP_001351122.1__HsALB_Pf-CSP(93-397)
augaaaugggucacauucaucucacuccuauuccuauucucaagcgccuacuccaaacucaaacaacccgccgacggcaacccagacccaaacgccaaccccaacgucgacccaaacgccaacccaaacgucgacccaaacgcaaacccaaacgucgaccccaacgccaaccccaacgccaaccccaacgccaacccaaacgccaaucccaacgccaaccccaacgccaacccaaacgcaaaccccaacgccaauccaaacgccaaccccaacgcaaaccccaacgccaaccccaacgcaaacccaaacgcaaacccaaacgcaaaccccaacgccaaccccaacgcaaaccccaacgccaaccccaacgucgaccccaacgccaacccaaacgccaacccaaacgccaaccccaacgccaaccccaacgcaaacccaaacgcgaaccccaacgcaaaccccaacgccaacccgaacgccaacccgaacgcaaacccaaacgccaaccccaacgcaaaccccaacgcaaacccaaacgcgaaccccaacgccaacccaaacgccaacccaaacgcgaacccaaacgccaaccccaacaaaaacaaccaagggaacggacaaggccacaacaugcccaacgaccccaaccgcaacgucgacgaaaacgccaacgccaacuccgccgucaaaaacaacaacaacgaagaacccuccgacaaacacauaaaagaauaccuaaacaaaauccaaaacucacucucuacugaauggucccccugcucagucaccugcggcaacggcauacaaguccgcauaaaacccggcucggccaacaaaccaaaagacgaacuagacuacgcaaacgacaucgaaaaaaaaauaugcaaaauggaaaaaugcuccucagucuucaacguaguaaacuccuccaucggccucauaaugguccucuccuuccuauuccucaacuaa

SEQ ID NO: 318 - RNA, 342 nt, Artificial Sequence
  derived and/or modified CDS sequence (opt11) from Pf(3D7)__XP_001351122.1__HsALB_Pf-CSP(98-192)
augaaaugggucacauucauaagccuacucuuccucuucagcucagccuacuccgcagacggaaacccagacccaaacgcaaacccaaacguagacccaaacgcaaacccaaacguagacccaaacgcaaacccaaacguagacccaaacgcaaacccaaacgcaaacccaaacgcaaacccaaacgcaaacccaaacgcaaacccaaacgcaaacccaaacgcaaacccaaacgcaaacccaaacgcaaacccaaacgcaaaccccaacgcaaacccaaacgcaaacccaaacgcaaacccaaacgcaaacccaaacgcaaacccaaacgcaaacccauaa

SEQ ID NO: 319 - RNA, 582 nt, Artificial Sequence
  derived and/or modified CDS sequence (opt11) from Pf(3D7)__XP_001351122.1__HsALB_Pf-CSP(98-272)
augaaauggguaaccuucauaagccuacucuuccuauucucaucagccuacagcgcagacggaaacccagaccccaacgcaaacccaaacguagacccaaacgcaaacccaaacguagaccccaacgcaaacccaaacguagacccaaacgccaacccaaacgcaaacccaaacgcaaacccaaacgccaacccaaacgcaaacccaaacgccaacccaaacgcaaacccaaacgcaaacccaaacgcaaacccaaacgcaaacccaaacgcaaacccaaacgcaaacccaaacgccaacccaaacgcaaacccaaacgcaaacccaaacgcaaacccaaacgccaaccccaacguagacccaaacgccaaccccaacgcaaacccaaacgcaaacccaaacgcaaacccaaacgcaaacccaaacgcaaacccaaacgcaaacccaaacgcaaacccaaacgcaaacccgaacgccaacccaaacgcaaacccaaacgcaaacccaaacgcaaacccaaacgcaaacccaaacgcaaaccccaacgcaaacccaaacgcaaacccaaacgcaaacccauaa

SEQ ID NO: 320 - RNA, 888 nt, Artificial Sequence
  derived and/or modified CDS sequence (opt11) from Pf(3D7)__XP_001351122.1__HsALB_Pf-CSP(98-374)
augaaauggguaaccuucauaucccuacucuuccuuuucuccucggccuacuccgcagacggaaacccagacccaaacgcaaaccccaacguagacccaaacgcaaacccaaauguagacccaaacgcaaacccaaacguggacccaaacgcgaaccccaacgcaaaccccaacgcaaacccaaacgccaacccaaacgcaaacccaaacgccaacccaaacgcaaaccccaacgccaaccccaacgccaacccaaacgcaaacccaaacgcaaaccccaacgcaaacccaaacgccaacccaaacgccaacccaaacgccaaccccaacgcaaacccaaacgccaacccaaacguagacccaaacgcaaacccaaacgcaaacccaaacgcaaaccccaacgcaaaccccaacgcaaacccaaacgcaaacccaaacgcaaacccaaacgcaaacccaaacgccaacccaaacgcgaaccccaacgccaacccaaacgcaaacccaaacgccaacccaaacgccaacccaaacgcaaaccccaacgcaaacccaaacgcaaacccaaacgccaacccgaacaaaaacaaccaaggcaacggccaaggacacaacaugccaaacgaccccaaccgcaacguagacgaaaacgccaacgcaaacuccgcagucaaaaacaacaacaacgaagaacccuccgacaaacacauaaaagaauaccuaaacaaaauccaaaacucgcucucaaccgaauggucccccugcuccgucaccugcggcaacggcauccaaguacgcaucaaaccaggcucagcaaacaaaccaaaagacgaacucgacuacgccaacgacauagaaaaaaaaauaugcaaaauggagaaaugcuaa

SEQ ID NO: 321 - RNA, 957 nt, Artificial Sequence
  derived and/or modified CDS sequence (opt11) from Pf(3D7)__XP_001351122.1__HsALB_Pf-CSP(98-397)
augaaauggguaaccuucaucagccuacuauuccuauucagcuccgccuacagcgccgacggaaacccagacccaaacgccaaccccaacgucgacccaaacgccaaccccaacguagacccaaacgccaaccccaacgucgaccccaacgccaaccccaacgccaacccaaacgccaacccuaacgccaacccaaacgccaacccgaacgccaaccccaacgcgaacccaaacgccaacccaaacgcaaaccccaacgccaaccccaacgccaaccccaacgcaaaccccaacgcaaacccaaacgccaacccaaacgccaaccccaacgccaaccccaaugcaaacccaaacgucgaccccaacgccaacccaaacgccaaccccaacgccaaccccaacgccaaccccaacgcaaaccccaacgccaaccccaacgcgaaccccaacgccaaccccaacgccaacccaaacgccaaccccaacgccaaccccaacgccaaccccaacgcuaaccccaacgcaaacccaaacgccaacccaaacgccaacccaaacgccaaccccaacgccaacccaaacaaaaacaaccaaggcaacggacaaggacacaacaugccaaacgaccccaaccgcaacgucgacgaaaaugccaacgccaacuccgccgucaaaaacaacaacaacgaagaacccuccgacaaacacaucaaagaauaccuaaacaaaauacaaaacucucucucaaccgaauggucccccugcuccgucacaugcggcaacggcauccaaguccgcaucaaaccaggaucagccaauaaacccaaagacgaacucgacuacgccaacgacauagaaaaaaaaaucugcaaaauggaaaaaugcagcucagucuucaacgucgucaacuccucaaucggacuuauaaugguccuauccuuccucuuccuuaacuaa

SEQ ID NO: 322 - RNA, 1284 nt, Artificial Sequence
  derived and/or modified CDS sequence (opt11) from Pf(3D7)__XP_001351122.1__HsALB_Pf-CSP(199-377)_L(PVTN)_HBsAg
augaaaugggucacauucaucucgcuccucuuccuauucuccuccgccuacuccgacccuaacgccaaucccaacgccaaccccaacgccaaccccaacgccaaccccaacgccaaccccaaugcaaacccaaacgcaaaccccaacgccaaccccaacgcaaacccaaaugcaaaccccaacgcaaaccccaacgccaaccccaaugccaaccccaacgcuaaccccaacgccaauccaaacgccaaccccaacgcaaaccccaacgccaacccuaacaaaaauaaccaaggcaacggccaaggacacaacaugcccaacgaccccaaccgaaaugucgacgaaaacgcuaacgcuaacagcgccgucaaaaacaacaacaacgaagaacccuccgacaaacacauuaaagaauaccucaacaaaauccaaaacucccucuccaccgaauggucccccugcucuguaacuugcggcaacggcauccaaguccgcauaaaacccggaucagcaaacaaacccaaagacgaacucgacuacgcaaacgacauugagaagaaaaucugcaaaauggaaaaaugcucaucaguacccgucacuaacauggaaaacaucaccuccggcuuccucggcccccuccuaguccuacaagccgguuucuuccuucuuacacgcauccuaaccaucccacaaucccuagacuccugguggacaucuuuaaacuuccuuggaggauccccugucugccucggccaaaacucccaauccccaaccucuaaccacucucccacauccugcccucccauaugccccgguuaccgcuggaugugccuccgccgcuucaucaucuuccucuucauacuccucuuaugccucaucuuccuccucguacuacucgacuaccaagguaugcuacccguaugcccucucauccccggcuccaccacaaccaacaccggccccugcaaaacaugcaccacccccgcacagggcaauuccauguuccccuccugcuguugcaccaaacccacagacggcaacuguaccugcauccccauccccuccucuugggcauuugccaaauaccucugggaaugggccuccguccgauucucuuggcuuucacuccucguucccuucguacaaugguucgucggccuaucacccaccgucuggcucuccgccaucuggaugaugugguacuggggcccuucacuuuacuccauagucagccccuucauaccacuccuccccaucuucuucugccuauggguauacaucuaa

SEQ ID NO: 323 - RNA, 1023 nt, Artificial Sequence
  derived and/or modified CDS sequence (opt11) from Pb(ANKA)__XP_022712148.1__Pb-CSP
augaaaaaaugcaccauccucgucguagccucccuccuccuagucaacucccuccuccccggauacgggcaaaacaaaucaauucaagcccaacgcaaccucaacgaacucugcuacaacgaaggcaacgacaacaaacuauaccacguacucaacuccaaaaacgguaaaaucuacaaccgcaacacugucaaccgccuacucgccgacgcccccgaaggcaaaaaaaacgaaaaaaaaaacgaaaaaaucgaacgcaacaacaaacucaaacaacccccacccccaccaaaccccaacgacccccccccccccaaucccaaugaccccccaccccccaaccccaacgaccccccccccccaaaccccaacgacccccccccccccaacgccaacgauccaccuccucccaacgcaaacgacccagcaccuccaaacgccaacgaccccgcccccccaaacgcaaacgacccagcccccccaaacgcaaacgaccccgccccccccaacgccaacgacccacccccccccaaccccaacgacccagccccccccaaugccaacgacccccccccucccaaccccaacgaccccgcccccccacaaggaaacaacaacccacaaccccaaccacgaccccaaccccaaccccaaccccaaccacaaccacaaccccaaccccaaccacaaccccgaccacaaccccaaccccaacccggcggcaacaacaacaacaaaaacaacaacaacgacgacuccuacaucccauccgccgaaaaaauccucgaauucgucaaacaaauacgcgacuccauaaccgaagaauggucccaaugcaacgugaccugcggcucaggcauccgaguccgcaaacgcaaaggaucuaacaaaaaagccgaagaccucacccuagaagacaucgacaccgaaaucugcaaaauggacaaaugcuccuccauauucaacaucgucucaaacucacucggcuuugucauccuccucguacucgucuucuucaacuaa

SEQ ID NO: 324 - RNA, 1188 nt, Artificial Sequence
  derived and/or modified CDS sequence (opt11) from Pb(ANKA)__XP_022712148.1__Pb-CSP_L(G4SG4)_TM domain HA
augaaaaaaugcacaauccuugucguagccucccuacuacucguaaacucacuccuacccggauacggccaaaacaaaucuauccaagcccaacguaaccuuaaugaacuaugcuacaacgaaggcaacgacaacaaacuuuaccacguccugaacuccaaaaacggcaaaaucuacaaccggaacaccguaaaucgccugcucgcugacgcaccagaaggaaaaaaaaacgaaaaaaaaaacgaaaaaauagagcguaacaacaagcucaaacaaccgcccccccccccaaaccccaacgaccccccccccccuaaccccaacgacccaccgccacccaacccaaacgacccccccccaccaaaccccaacgacccaccaccaccgaacgccaacgacccaccuccccccaacgccaacgacccugcaccccccaacgccaacgaucccgccccccccaacgccaacgacccagcacccccaaacgccaacgauccagcuccccccaacgccaacgaccccccaccccccaaccccaacgacccagcccccccaaacgcuaacgacccccccccccccaacccaaacgacccagcccccccccaaggcaacaacaacccucaaccccaaccccgcccgcaaccccaaccccaaccacaaccacaaccucaaccacaaccacaaccccaaccccgcccacaaccacaaccccaaccaggcggcaacaacaacaacaaaaacaacaacaacgacgacuccuacauccccucagcagaaaaaauccucgaguucgucaaacaaauccgcgacucuaucacagaagaauggucccaaugcaacguaaccugcggcucaggcauccgcguccgaaaacgaaaaggcucaaacaaaaaagccgaagaccucacacucgaagacaucgacaccgaaauaugcaaaauggacaaaugcuccuccauauucaacaucgucucaaacucucucgguuucgucaucuuacucguccucguauucuucaacggcggcggaggcuccggcggaggaggcaaacuagaauccaccagaaucuaccaaauccucgccauauacucuaccgucgccagcucccuuguccucguggucucccucggagcaaucuccuucuggaugugcucuaacggcucacuccaaugccguaucugcauuuaa

SEQ ID NO: 325 - RNA, 1008 nt, Artificial Sequence
  derived and/or modified CDS sequence (opt11) from Pb(ANKA)__XP_022712148.1__HsALB_Pb-CSP(24-340)
augaaaugggucaccuucaucucccuacuauuccucuuuucauccgcuuacucacaaaacaaauccauccaagcccaacgcaaccucaaugaacuaugcuacaacgaaggcaacgacaacaaacucuaccacguccucaacucaaaaaacggaaaaauauacaaccgcaacaccguaaaccgccuacuagccgacgcccccgaaggcaaaaaaaacgaaaaaaaaaacgaaaaaaucgaacgcaacaacaaacuaaaacaacccccccccccccccaaccccaacgacccccccccccccaaccccaacgaccccccacccccaaacccaaacgaccccccuccccccaacccaaacgaccccccaccccccaacgcaaacgacccccccccacccaacgccaacgaccccgccccccccaacgccaacgaucccgccccccccaacgccaacgaccccgccccccccaacgccaacgacccagccccccccaacgcaaacgacccccccccccccaaccccaacgaccccgcaccccccaacgccaacgacccacccccacccaaccccaacgaccccgcacccccacaaggaaacaacaacccccaaccccaaccccgaccccaaccccaaccccaaccccaaccccaaccgcaaccccagccacaaccacaaccccgcccucaaccucaaccccaacccggaggaaacaacaacaacaaaaauaacaacaacgaugacuccuacauccccuccgcagaaaaaauacucgaauucguaaaacaaauccgcgacucaaucaccgaagaauggucccaaugcaacguaaccugcggcuccggcauccgcguccgcaaacgcaaaggcuccaacaagaaagccgaagaccucacacuggaagacauagacaccgaaauaugcaaaauggauaaaugcuccuccaucuucaacaucgucuccaacucucucggcuucguaauacuucucguucucguauucuucaacuaa

SEQ ID NO: 326 - RNA, 1026 nt, Artificial Sequence
  derived and/or modified CDS sequence (opt11) from Pb(ANKA)__XP_022712148.1__HsIns-iso1_Pb-CSP(24-340)
auggcccucuggaugcgacuacucccccuccucgcacuccuagcccucuggggccccgaccccgccgccgcacaaaacaaauccauccaagcccaacgcaaccucaaugaacucugcuacaacgaaggcaacgacaacaaacucuaccacguccucaacucaaaaaacggaaaaaucuacaaccgaaacaccgucaaccgccuccuugccgacgccccagaaggcaaaaaaaacgagaaaaaaaaugaaaaaaucgaacgcaacaacaaacucaaacaaccccccccccccccgaacccuaacgacccccccccccccaaccccaaugaccccccacccccaaacccgaacgaccccccaccccccaaccccaacgaccccccucccccuaacgcaaacgacccuccaccccccaacgccaacgaccccgccccaccaaacgccaaugaccccgccccaccaaacgcaaacgauccagcccccccaaacgcaaacgaccccgcaccacccaacgcaaacgacccccccccccccaaccccaacgaccccgcccccccaaacgccaacgaccccccaccacccaaccccaacgaccccgcacccccacaaggcaacaacaacccacaaccacaaccccgcccccaaccccaaccacaaccccaaccccaaccccaaccacaaccacaaccacaaccccgcccccaaccccaaccccaacccggcggcaacaacaacaacaaaaacaacaauaacgacgacucuuacauccccucagccgaaaaaauacucgaauucgucaaacaaauccgcgacuccaucaccgaagaauggucacaaugcaacgucaccugcggaucaggcauccgaguacgcaaacgcaaaggcuccaacaaaaaagccgaagaccucacccucgaagacaucgacaccgaaauuugcaaaauggacaagugcuccuccauauucaacaucguuucaaacucauuaggauucgucauccuccucguccucgucuucuucaacuaa

SEQ ID NO: 327 - RNA, 1005 nt, Artificial Sequence
  derived and/or modified CDS sequence (opt11) from Pb(ANKA)__XP_022712148.1__HsSPARC_Pb-CSP(24-340)
augcgcgccuggaucuucuuccuccucugccuugccggccgcgcacuagcccaaaacaaaucuauccaagcccaacgcaaccucaacgaacucugcuacaacgaaggaaacgacaacaaacucuaccauguacucaacuccaaaaacggaaaaaucuacaaccgcaacaccguaaaccgccuacucgcugacgccccugaaggcaaaaaaaacgaaaaaaaaaacgaaaaaaucgaacgcaacaacaaacucaaacaaccuccccccccccccaacccaaacgacccccccccucccaacccaaacgaccccccacccccaaaccccaacgacccccccccccccaacccaaacgacccccccccccccaacgccaacgacccccccccccccaacgccaacgaccccgccccaccaaacgcaaacgauccagcaccccccaacgccaacgaccccgcaccccccaacgcaaacgaccccgccccccccaacgccaacgaccccccgccaccuaacccaaacgacccagcaccccccaacgccaacgaucccccaccccccaaccccaacgacccagcccccccccaaggaaacaacaacccacaaccccaaccccgcccucaaccacaaccacaaccccaaccucaaccccaaccucaaccccaaccccaaccacgaccacaaccccaaccacaaccuggcggcaacaacaacaacaaaaacaacaacaacgacgacucauacaucccauccgcagaaaaaauacucgaauucguaaaacaaaucagagacuccauaacagaagaauggucccaaugcaacgucacuugcggcucaggcauacgcguccgcaaacgcaagggcuccaacaaaaaagccgaagaccuaacacucgaagacaucgacacagaaaucugcaaaauggacaaaugcucaucaaucuucaacaucguauccaacucacucggcuucguaauccuccucguccucgucuucuucaacuaa

SEQ ID NO: 328 - RNA, 1008 nt, Artificial Sequence
  derived and/or modified CDS sequence (opt11) from Pb(ANKA)__XP_022712148.1__IgE_Pb-CSP(24-340)
auggacuggaccuggauccuuuuccuaguagccgccgcaacccgcguccacucacaaaacaaauccauccaagcacagcguaaccucaacgaacucuguuacaacgagggcaacgacaacaaacuauaccacguccugaacuccaaaaacggcaaaaucuacaaccgcaacaccguaaaccgucuccucgccgacgccccagaaggcaaaaaaaaugaaaaaaaaaacgaaaaaaucgaacgaaacaacaaacuaaaacaacccccccccccccccaaccccaacgacccccccccccccaaccccaacgauccccccccccccaaccccaacgacccccccccccccaaucccaacgacccccccccccccaacgcaaacgaccccccccccccuaaugccaacgacccagcaccccccaacgccaacgaccccgccccccccaacgcaaacgaccccgccccccccaacgccaacgaccccgccccaccuaacgcaaacgacccacccccccccaaccccaacgaccccgccccccccaacgcuaacgacccccccccccccaacccaaacgacccagcacccccacaaggcaacaacaacccacaaccccaaccccgcccccaaccucaaccacaaccccaaccacaaccccaaccccaaccccaaccccaaccccgcccacaaccccaaccucaacccggcggcaacaacaacaacaaaaacaacaacaacgacgacuccuacauaccauccgccgaaaaaauccucgaauucgucaaacaaauccgcgacucaaucaccgaagaauggucacaaugcaacgucaccugcggcuccgguauccgcguaagaaaacgcaaaggaucaaacaaaaaagccgaagaccucacccucgaagacauagacaccgaaaucugcaaaauggacaaauguucauccaucuuuaacaucgucuccaacucacucggauucguaauacuacuaguccuaguauucuucaacuaa

SEQ ID NO: 329 - RNA, 1470 nt, Artificial Sequence
  mRNA Design a-1 (A64-N5-C30-hSL-N5) comprising derived and/or modified sequence from Pf(3D7)__XP_001351122.1__Pf-CSP (wt)
gggagagucccgcagucggcguccagcggcucugcuuguucgugugugugucguugcaggccuuauucaagcuuaccaugaugagaaaauuagcuauuuuaucuguuucuuccuuuuuauuuguugaggccuuauuccaggaauaccagugcuauggaaguucgucaaacacaaggguucuaaaugaauuaaauuaugauaaugcaggcacuaauuuauauaaugaauuagaaaugaauuauuaugggaaacaggaaaauugguauagucuuaaaaaaaauaguagaucacuuggagaaaaugaugauggaaauaacgaagacaacgagaaauuaaggaaaccaaaacauaaaaaauuaaagcaaccagcggaugguaauccugauccaaaugcaaacccaaauguagaucccaaugccaacccaaauguagauccaaaugcaaacccaaauguagauccaaaugcaaacccaaaugcaaacccaaaugcaaacccaaaugcaaacccaaaugcaaacccaaaugcaaacccaaaugcaaacccaaaugcaaacccaaaugcaaacccaaaugcaaacccaaaugcaaacccaaaugcaaacccaaaugcaaacccaaaugcaaaccccaaugcaaauccuaaugcaaacccaaaugcaaacccaaacguagauccuaaugcaaauccaaaugcaaacccaaacgcaaaccccaaugcaaauccuaaugcaaaccccaaugcaaauccuaaugcaaauccuaaugccaauccaaaugcaaauccaaaugcaaacccaaacgcaaaccccaaugcaaauccuaaugccaauccaaaugcaaauccaaaugcaaacccaaaugcaaacccaaaugcaaaccccaaugcaaauccuaauaaaaacaaucaagguaauggacaaggucacaauaugccaaaugacccaaaccgaaauguagaugaaaaugcuaaugccaacagugcuguaaaaaauaauaauaacgaagaaccaagugauaagcacauaaaagaauauuuaaacaaaauacaaaauucucuuucaacugaaugguccccauguaguguaacuuguggaaaugguauucaaguuagaauaaagccuggcucugcuaauaaaccuaaagacgaauuagauuaugcaaaugauauugaaaaaaaaauuuguaaaauggaaaaauguuccaguguguuuaaugucguaaauaguucaauaggauuaauaaugguauuauccuucuuguuccuuaauuagggacuagucccuguucccagagcccacuuuuuuuucuuuuuuugaaauaaaauagccugucuuucagaucuaaaaaaaaaaaaaaaaaaaaaaaaaaaaaaaaaaaaaaaaaaaaaaaaaaaaaaaaaaaaaaaaugcaucccccccccccccccccccccccccccccccaaaggcucuuuucagagccaccagaauu

SEQ ID NO: 330 - RNA, 1401 nt, Artificial Sequence
  mRNA Design a-1 (A64-N5-C30-hSL-N5) comprising derived and/or modified sequence from Pf(3D7)__XP_001351122.1__Pf-CSP(1-374) (wt)
gggagagucccgcagucggcguccagcggcucugcuuguucgugugugugucguugcaggccuuauucaagcuuaccaugaugagaaaauuagcuauuuuaucuguuucuuccuuuuuauuuguugaggccuuauuccaggaauaccagugcuauggaaguucgucaaacacaaggguucuaaaugaauuaaauuaugauaaugcaggcacuaauuuauauaaugaauuagaaaugaauuauuaugggaaacaggaaaauugguauagucuuaaaaaaaauaguagaucacuuggagaaaaugaugauggaaauaacgaagacaacgagaaauuaaggaaaccaaaacauaaaaaauuaaagcaaccagcggaugguaauccugauccaaaugcaaacccaaauguagaucccaaugccaacccaaauguagauccaaaugcaaacccaaauguagauccaaaugcaaacccaaaugcaaacccaaaugcaaacccaaaugcaaacccaaaugcaaacccaaaugcaaacccaaaugcaaacccaaaugcaaacccaaaugcaaacccaaaugcaaacccaaaugcaaacccaaaugcaaacccaaaugcaaacccaaaugcaaaccccaaugcaaauccuaaugcaaacccaaaugcaaacccaaacguagauccuaaugcaaauccaaaugcaaacccaaacgcaaaccccaaugcaaauccuaaugcaaaccccaaugcaaauccuaaugcaaauccuaaugccaauccaaaugcaaauccaaaugcaaacccaaacgcaaaccccaaugcaaauccuaaugccaauccaaaugcaaauccaaaugcaaacccaaaugcaaacccaaaugcaaaccccaaugcaaauccuaauaaaaacaaucaagguaauggacaaggucacaauaugccaaaugacccaaaccgaaauguagaugaaaaugcuaaugccaacagugcuguaaaaaauaauaauaacgaagaaccaagugauaagcacauaaaagaauauuuaaacaaaauacaaaauucucuuucaacugaaugguccccauguaguguaacuuguggaaaugguauucaaguuagaauaaagccuggcucugcuaauaaaccuaaagacgaauuagauuaugcaaaugauauugaaaaaaaaauuuguaaaauggaaaaauguugaggacuagucccuguucccagagcccacuuuuuuuucuuuuuuugaaauaaaauagccugucuuucagaucuaaaaaaaaaaaaaaaaaaaaaaaaaaaaaaaaaaaaaaaaaaaaaaaaaaaaaaaaaaaaaaaaugcaucccccccccccccccccccccccccccccccaaaggcucuuuucagagccaccagaauu

SEQ ID NO: 331 - RNA, 1254 nt, Artificial Sequence
  mRNA Design a-1 (A64-N5-C30-hSL-N5) comprising derived and/or modified sequence from Pf(3D7)__XP_001351122.1__Pf-CSP(1-325) (wt)
gggagagucccgcagucggcguccagcggcucugcuuguucgugugugugucguugcaggccuuauucaagcuuaccaugaugagaaaauuagcuauuuuaucuguuucuuccuuuuuauuuguugaggccuuauuccaggaauaccagugcuauggaaguucgucaaacacaaggguucuaaaugaauuaaauuaugauaaugcaggcacuaauuuauauaaugaauuagaaaugaauuauuaugggaaacaggaaaauugguauagucuuaaaaaaaauaguagaucacuuggagaaaaugaugauggaaauaacgaagacaacgagaaauuaaggaaaccaaaacauaaaaaauuaaagcaaccagcggaugguaauccugauccaaaugcaaacccaaauguagaucccaaugccaacccaaauguagauccaaaugcaaacccaaauguagauccaaaugcaaacccaaaugcaaacccaaaugcaaacccaaaugcaaacccaaaugcaaacccaaaugcaaacccaaaugcaaacccaaaugcaaacccaaaugcaaacccaaaugcaaacccaaaugcaaacccaaaugcaaacccaaaugcaaacccaaaugcaaaccccaaugcaaauccuaaugcaaacccaaaugcaaacccaaacguagauccuaaugcaaauccaaaugcaaacccaaacgcaaaccccaaugcaaauccuaaugcaaaccccaaugcaaauccuaaugcaaauccuaaugccaauccaaaugcaaauccaaaugcaaacccaaacgcaaaccccaaugcaaauccuaaugccaauccaaaugcaaauccaaaugcaaacccaaaugcaaacccaaaugcaaaccccaaugcaaauccuaauaaaaacaaucaagguaauggacaaggucacaauaugccaaaugacccaaaccgaaauguagaugaaaaugcuaaugccaacagugcuguaaaaaauaauaauaacgaagaaccaagugauaagcacauaaaagaauauuuaaacaaaauacaaaauugaggacuagucccuguucccagagcccacuuuuuuuucuuuuuuugaaauaaaauagccugucuuucagaucuaaaaaaaaaaaaaaaaaaaaaaaaaaaaaaaaaaaaaaaaaaaaaaaaaaaaaaaaaaaaaaaaugcaucccccccccccccccccccccccccccccccaaaggcucuuuucagagccaccagaauu

SEQ ID NO: 332 - RNA, 1299 nt, Artificial Sequence
  mRNA Design a-1 (A64-N5-C30-hSL-N5) comprising derived and/or modified sequence from Pb(ANKA)__XP_022712148.1__Pb-CSP (wt)
gggagagucccgcagucggcguccagcggcucugcuuguucgugugugugucguugcaggccuuauucaagcuuaccaugaagaaguguaccauuuuaguuguagcgucacuuuuauuaguuaauucucuacuuccaggauauggacaaaauaaaagcauccaagcccaaaggaacuuaaacgagcuauguuacaaugaaggaaaugauaauaaauuguaucacgugcuuaacucuaagaauggaaaaauauacaaucgaaauacagucaacagauuacuugccgaugcucccgaaggaaaaaaaaaugagaaaaaaaacgaaaaaauagagcguaauaauaaauugaaacaaccaccaccaccaccaaacccaaaugacccaccaccaccaaacccaaaugacccaccaccaccaaacccaaaugacccaccaccaccaaacccaaaugacccaccaccaccaaacgcaaaugacccaccaccaccaaacgcaaaugacccagcaccaccaaacgcaaaugacccagcaccaccaaacgcaaaugacccagcaccaccaaacgcaaaugacccagcaccaccaaacgcaaaugacccaccaccaccaaacccaaaugacccagcaccaccaaacgcaaaugacccaccaccaccaaacccaaaugacccagcaccaccacaaggaaauaacaauccacaaccacagccacggccgcagccacaaccacagccacagccacaaccacagccacagccacaaccacagccacgaccacagccacaaccacagccaggugguaauaacaauaacaaaaauaauaauaaugacgauucuuauaucccaagcgcggaaaaaauacuagaauuuguuaaacagaucagggauaguaucacagaggaauggucucaauguaacguaacaugugguucugguauaagaguuagaaaacgaaaagguucaaauaagaaagcagaagauuugaccuuagaagauauugauacugaaauuuguaaaauggauaaauguucaaguauauuuaauauuguaagcaauucauuaggauuuguaauauuauuaguauuaguauucuuuaauuaaggacuagucccuguucccagagcccacuuuuuuuucuuuuuuugaaauaaaauagccugucuuucagaucuaaaaaaaaaaaaaaaaaaaaaaaaaaaaaaaaaaaaaaaaaaaaaaaaaaaaaaaaaaaaaaaaugcaucccccccccccccccccccccccccccccccaaaggcucuuuucagagccaccagaauu

SEQ ID NO: 333 - RNA, 1470 nt, Artificial Sequence
  mRNA Design a-1 (A64-N5-C30-hSL-N5) comprising derived and/or modified sequence from Pf(3D7)__XP_001351122.1__Pf-CSP (opt1) R7112/R7111
gggagagucccgcagucggcguccagcggcucugcuuguucgugugugugucguugcaggccuuauucaagcuuaccaugaugcgcaagcuggccauccucagcguguccagcuuccuguucgucgaggcccuguuccaggaguaccagugcuacggcuccagcuccaacacccgggugcucaacgagcugaacuacgacaacgcggggaccaaccuguacaacgagcucgagaugaacuacuacggcaagcaggagaacugguacagccugaagaagaacucccgcagccugggggagaacgacgacggcaacaacgaggacaacgagaagcuccggaagcccaagcacaagaagcugaagcagccggccgacgggaaccccgaccccaacgccaaccccaacguggacccgaacgccaaccccaacgucgaccccaacgccaaccccaacguggacccgaacgcgaaccccaacgccaaccccaacgccaaccccaacgccaacccgaacgcgaaccccaacgccaaccccaacgccaaccccaacgccaacccgaacgccaaccccaacgcgaaccccaacgccaaccccaacgccaacccgaacgccaaccccaacgccaaccccaacgcgaaccccaacgccaacccgaacgccaaccccaacguggaccccaacgccaaccccaacgccaacccgaacgcgaaccccaacgccaaccccaacgccaacccgaacgccaaccccaacgccaaccccaacgcgaaccccaacgccaacccgaacgccaaccccaacgccaaccccaacgcgaaccccaacgccaacccgaacgccaaccccaacgccaaccccaacgccaaccccaacgcgaacccgaacgccaaccccaacaagaacaaccagggcaacggccaggggcacaacaugcccaacgaccccaaccgcaacgucgacgagaacgccaacgccaacuccgccgugaagaacaacaacaacgaggagccgagcgacaagcacaucaaggaguaccugaacaagauccagaacucccucagcacggaguggucccccugcagcgugaccugcggcaacgggauccagguccggaucaagcccggcuccgcgaacaagcccaaggacgagcuggacuacgccaacgacaucgagaagaagaucugcaagauggagaagugcagcuccguguucaacguggucaacagcuccaucgggcugaucauggugcucagcuuccuguuccugaacugaggacuagucccuguucccagagcccacuuuuuuuucuuuuuuugaaauaaaauagccugucuuucagaucuaaaaaaaaaaaaaaaaaaaaaaaaaaaaaaaaaaaaaaaaaaaaaaaaaaaaaaaaaaaaaaaaugcaucccccccccccccccccccccccccccccccaaaggcucuuuucagagccaccagaauu

SEQ ID NO: 334 - RNA, 1401 nt, Artificial Sequence
  mRNA Design a-1 (A64-N5-C30-hSL-N5) comprising derived and/or modified sequence from Pf(3D7)__XP_001351122.1__Pf-CSP(1-374) (opt1)
gggagagucccgcagucggcguccagcggcucugcuuguucgugugugugucguugcaggccuuauucaagcuuaccaugaugcgcaagcuggccauccucagcguguccagcuuccuguucgucgaggcccuguuccaggaguaccagugcuacggcuccagcuccaacacccgggugcucaacgagcugaacuacgacaacgcggggaccaaccuguacaacgagcucgagaugaacuacuacggcaagcaggagaacugguacagccugaagaagaacucccgcagccugggggagaacgacgacggcaacaacgaggacaacgagaagcuccggaagcccaagcacaagaagcugaagcagccggccgacgggaaccccgaccccaacgccaaccccaacguggacccgaacgccaaccccaacgucgaccccaacgccaaccccaacguggacccgaacgcgaaccccaacgccaaccccaacgccaaccccaacgccaacccgaacgcgaaccccaacgccaaccccaacgccaaccccaacgccaacccgaacgccaaccccaacgcgaaccccaacgccaaccccaacgccaacccgaacgccaaccccaacgccaaccccaacgcgaaccccaacgccaacccgaacgccaaccccaacguggaccccaacgccaaccccaacgccaacccgaacgcgaaccccaacgccaaccccaacgccaacccgaacgccaaccccaacgccaaccccaacgcgaaccccaacgccaacccgaacgccaaccccaacgccaaccccaacgcgaaccccaacgccaacccgaacgccaaccccaacgccaaccccaacgccaaccccaacgcgaacccgaacgccaaccccaacaagaacaaccagggcaacggccaggggcacaacaugcccaacgaccccaaccgcaacgucgacgagaacgccaacgccaacuccgccgugaagaacaacaacaacgaggagccgagcgacaagcacaucaaggaguaccugaacaagauccagaacucccucagcacggaguggucccccugcagcgugaccugcggcaacgggauccagguccggaucaagcccggcuccgcgaacaagcccaaggacgagcuggacuacgccaacgacaucgagaagaagaucugcaagauggagaagugcugaggacuagucccuguucccagagcccacuuuuuuuucuuuuuuugaaauaaaauagccugucuuucagaucuaaaaaaaaaaaaaaaaaaaaaaaaaaaaaaaaaaaaaaaaaaaaaaaaaaaaaaaaaaaaaaaaugcaucccccccccccccccccccccccccccccccaaaggcucuuuucagagccaccagaauu

SEQ ID NO: 335 - RNA, 1254 nt, Artificial Sequence
  mRNA Design a-1 (A64-N5-C30-hSL-N5) comprising derived and/or modified sequence from Pf(3D7)__XP_001351122.1__Pf-CSP(1-325) (opt1)
gggagagucccgcagucggcguccagcggcucugcuuguucgugugugugucguugcaggccuuauucaagcuuaccaugaugcgcaagcuggccauccucagcguguccagcuuccuguucgucgaggcccuguuccaggaguaccagugcuacggcuccagcuccaacacccgggugcucaacgagcugaacuacgacaacgcggggaccaaccuguacaacgagcucgagaugaacuacuacggcaagcaggagaacugguacagccugaagaagaacucccgcagccugggggagaacgacgacggcaacaacgaggacaacgagaagcuccggaagcccaagcacaagaagcugaagcagccggccgacgggaaccccgaccccaacgccaaccccaacguggacccgaacgccaaccccaacgucgaccccaacgccaaccccaacguggacccgaacgcgaaccccaacgccaaccccaacgccaaccccaacgccaacccgaacgcgaaccccaacgccaaccccaacgccaaccccaacgccaacccgaacgccaaccccaacgcgaaccccaacgccaaccccaacgccaacccgaacgccaaccccaacgccaaccccaacgcgaaccccaacgccaacccgaacgccaaccccaacguggaccccaacgccaaccccaacgccaacccgaacgcgaaccccaacgccaaccccaacgccaacccgaacgccaaccccaacgccaaccccaacgcgaaccccaacgccaacccgaacgccaaccccaacgccaaccccaacgcgaaccccaacgccaacccgaacgccaaccccaacgccaaccccaacgccaaccccaacgcgaacccgaacgccaaccccaacaagaacaaccagggcaacggccaggggcacaacaugcccaacgaccccaaccgcaacgucgacgagaacgccaacgccaacuccgccgugaagaacaacaacaacgaggagccgagcgacaagcacaucaaggaguaccugaacaagauccagaacugaggacuagucccuguucccagagcccacuuuuuuuucuuuuuuugaaauaaaauagccugucuuucagaucuaaaaaaaaaaaaaaaaaaaaaaaaaaaaaaaaaaaaaaaaaaaaaaaaaaaaaaaaaaaaaaaaugcaucccccccccccccccccccccccccccccccaaaggcucuuuucagagccaccagaauu

SEQ ID NO: 336 - RNA, 1470 nt, Artificial Sequence
  mRNA Design a-1 (A64-N5-C30-hSL-N5) comprising derived and/or modified sequence from Pf(3D7)__XP_001351122.1__HsALB_Pf-CSP(19-397) (opt1) R7267
gggagagucccgcagucggcguccagcggcucugcuuguucgugugugugucguugcaggccuuauucaagcuuaccaugaagugggugaccuucaucagccugcucuuccuguucuccagcgccuacucccuguuccaggaguaccagugcuacggcuccagcuccaacacccgggugcucaacgagcugaacuacgacaacgcggggaccaaccuguacaacgagcucgagaugaacuacuacggcaagcaggagaacugguacagccugaagaagaacucccgcagccugggggagaacgacgacggcaacaacgaggacaacgagaagcuccggaagcccaagcacaagaagcugaagcagccggccgacgggaaccccgaccccaacgccaaccccaacguggacccgaacgccaaccccaacgucgaccccaacgccaaccccaacguggacccgaacgcgaaccccaacgccaaccccaacgccaaccccaacgccaacccgaacgcgaaccccaacgccaaccccaacgccaaccccaacgccaacccgaacgccaaccccaacgcgaaccccaacgccaaccccaacgccaacccgaacgccaaccccaacgccaaccccaacgcgaaccccaacgccaacccgaacgccaaccccaacguggaccccaacgccaaccccaacgccaacccgaacgcgaaccccaacgccaaccccaacgccaacccgaacgccaaccccaacgccaaccccaacgcgaaccccaacgccaacccgaacgccaaccccaacgccaaccccaacgcgaaccccaacgccaacccgaacgccaaccccaacgccaaccccaacgccaaccccaacgcgaacccgaacgccaaccccaacaagaacaaccagggcaacggccaggggcacaacaugcccaacgaccccaaccgcaacgucgacgagaacgccaacgccaacuccgccgugaagaacaacaacaacgaggagccgagcgacaagcacaucaaggaguaccugaacaagauccagaacucccucagcacggaguggucccccugcagcgugaccugcggcaacgggauccagguccggaucaagcccggcuccgcgaacaagcccaaggacgagcuggacuacgccaacgacaucgagaagaagaucugcaagauggagaagugcagcuccguguucaacguggucaacagcuccaucgggcugaucauggugcucagcuuccuguuccugaacugaggacuagucccuguucccagagcccacuuuuuuuucuuuuuuugaaauaaaauagccugucuuucagaucuaaaaaaaaaaaaaaaaaaaaaaaaaaaaaaaaaaaaaaaaaaaaaaaaaaaaaaaaaaaaaaaaugcaucccccccccccccccccccccccccccccccaaaggcucuuuucagagccaccagaauu

SEQ ID NO: 337 - RNA, 1488 nt, Artificial Sequence
  mRNA Design a-1 (A64-N5-C30-hSL-N5) comprising derived and/or modified sequence from Pf(3D7)__XP_001351122.1__HsIns-iso1_Pf-CSP(19-397) (opt1) R7268
gggagagucccgcagucggcguccagcggcucugcuuguucgugugugugucguugcaggccuuauucaagcuuaccauggcccuguggaugcgccuccugccccugcucgcccugcuggcgcucuggggcccggaccccgccgccgcccuguuccaggaguaccagugcuacggcuccagcuccaacacccgggugcucaacgagcugaacuacgacaacgcggggaccaaccuguacaacgagcucgagaugaacuacuacggcaagcaggagaacugguacagccugaagaagaacucccgcagccugggggagaacgacgacggcaacaacgaggacaacgagaagcuccggaagcccaagcacaagaagcugaagcagccggccgacgggaaccccgaccccaacgccaaccccaacguggacccgaacgccaaccccaacgucgaccccaacgccaaccccaacguggacccgaacgcgaaccccaacgccaaccccaacgccaaccccaacgccaacccgaacgcgaaccccaacgccaaccccaacgccaaccccaacgccaacccgaacgccaaccccaacgcgaaccccaacgccaaccccaacgccaacccgaacgccaaccccaacgccaaccccaacgcgaaccccaacgccaacccgaacgccaaccccaacguggaccccaacgccaaccccaacgccaacccgaacgcgaaccccaacgccaaccccaacgccaacccgaacgccaaccccaacgccaaccccaacgcgaaccccaacgccaacccgaacgccaaccccaacgccaaccccaacgcgaaccccaacgccaacccgaacgccaaccccaacgccaaccccaacgccaaccccaacgcgaacccgaacgccaaccccaacaagaacaaccagggcaacggccaggggcacaacaugcccaacgaccccaaccgcaacgucgacgagaacgccaacgccaacuccgccgugaagaacaacaacaacgaggagccgagcgacaagcacaucaaggaguaccugaacaagauccagaacucccucagcacggaguggucccccugcagcgugaccugcggcaacgggauccagguccggaucaagcccggcuccgcgaacaagcccaaggacgagcuggacuacgccaacgacaucgagaagaagaucugcaagauggagaagugcagcuccguguucaacguggucaacagcuccaucgggcugaucauggugcucagcuuccuguuccugaacugaggacuagucccuguucccagagcccacuuuuuuuucuuuuuuugaaauaaaauagccugucuuucagaucuaaaaaaaaaaaaaaaaaaaaaaaaaaaaaaaaaaaaaaaaaaaaaaaaaaaaaaaaaaaaaaaaugcaucccccccccccccccccccccccccccccccaaaggcucuuuucagagccaccagaauu

SEQ ID NO: 338 - RNA, 1467 nt, Artificial Sequence
  mRNA Design a-1 (A64-N5-C30-hSL-N5) comprising derived and/or modified sequence from Pf(3D7)__XP_001351122.1__HsSPARC_Pf-CSP(19-397) (opt1) R7266
gggagagucccgcagucggcguccagcggcucugcuuguucgugugugugucguugcaggccuuauucaagcuuaccaugcgcgccuggaucuucuuccugcucugccuggccggccgggcccuggcccuguuccaggaguaccagugcuacggcuccagcuccaacacccgggugcucaacgagcugaacuacgacaacgcggggaccaaccuguacaacgagcucgagaugaacuacuacggcaagcaggagaacugguacagccugaagaagaacucccgcagccugggggagaacgacgacggcaacaacgaggacaacgagaagcuccggaagcccaagcacaagaagcugaagcagccggccgacgggaaccccgaccccaacgccaaccccaacguggacccgaacgccaaccccaacgucgaccccaacgccaaccccaacguggacccgaacgcgaaccccaacgccaaccccaacgccaaccccaacgccaacccgaacgcgaaccccaacgccaaccccaacgccaaccccaacgccaacccgaacgccaaccccaacgcgaaccccaacgccaaccccaacgccaacccgaacgccaaccccaacgccaaccccaacgcgaaccccaacgccaacccgaacgccaaccccaacguggaccccaacgccaaccccaacgccaacccgaacgcgaaccccaacgccaaccccaacgccaacccgaacgccaaccccaacgccaaccccaacgcgaaccccaacgccaacccgaacgccaaccccaacgccaaccccaacgcgaaccccaacgccaacccgaacgccaaccccaacgccaaccccaacgccaaccccaacgcgaacccgaacgccaaccccaacaagaacaaccagggcaacggccaggggcacaacaugcccaacgaccccaaccgcaacgucgacgagaacgccaacgccaacuccgccgugaagaacaacaacaacgaggagccgagcgacaagcacaucaaggaguaccugaacaagauccagaacucccucagcacggaguggucccccugcagcgugaccugcggcaacgggauccagguccggaucaagcccggcuccgcgaacaagcccaaggacgagcuggacuacgccaacgacaucgagaagaagaucugcaagauggagaagugcagcuccguguucaacguggucaacagcuccaucgggcugaucauggugcucagcuuccuguuccugaacugaggacuagucccuguucccagagcccacuuuuuuuucuuuuuuugaaauaaaauagccugucuuucagaucuaaaaaaaaaaaaaaaaaaaaaaaaaaaaaaaaaaaaaaaaaaaaaaaaaaaaaaaaaaaaaaaaugcaucccccccccccccccccccccccccccccccaaaggcucuuuucagagccaccagaauu

SEQ ID NO: 339 - RNA, 1470 nt, Artificial Sequence
  mRNA Design a-1 (A64-N5-C30-hSL-N5) comprising derived and/or modified sequence from Pf(3D7)__XP_001351122.1__IgE_Pf-CSP(19-397) (opt1) R7265
gggagagucccgcagucggcguccagcggcucugcuuguucgugugugugucguugcaggccuuauucaagcuuaccauggacuggaccuggauccuguuccucguggccgccgcgacccgcguccacagccuguuccaggaguaccagugcuacggcuccagcuccaacacccgggugcucaacgagcugaacuacgacaacgcggggaccaaccuguacaacgagcucgagaugaacuacuacggcaagcaggagaacugguacagccugaagaagaacucccgcagccugggggagaacgacgacggcaacaacgaggacaacgagaagcuccggaagcccaagcacaagaagcugaagcagccggccgacgggaaccccgaccccaacgccaaccccaacguggacccgaacgccaaccccaacgucgaccccaacgccaaccccaacguggacccgaacgcgaaccccaacgccaaccccaacgccaaccccaacgccaacccgaacgcgaaccccaacgccaaccccaacgccaaccccaacgccaacccgaacgccaaccccaacgcgaaccccaacgccaaccccaacgccaacccgaacgccaaccccaacgccaaccccaacgcgaaccccaacgccaacccgaacgccaaccccaacguggaccccaacgccaaccccaacgccaacccgaacgcgaaccccaacgccaaccccaacgccaacccgaacgccaaccccaacgccaaccccaacgcgaaccccaacgccaacccgaacgccaaccccaacgccaaccccaacgcgaaccccaacgccaacccgaacgccaaccccaacgccaaccccaacgccaaccccaacgcgaacccgaacgccaaccccaacaagaacaaccagggcaacggccaggggcacaacaugcccaacgaccccaaccgcaacgucgacgagaacgccaacgccaacuccgccgugaagaacaacaacaacgaggagccgagcgacaagcacaucaaggaguaccugaacaagauccagaacucccucagcacggaguggucccccugcagcgugaccugcggcaacgggauccagguccggaucaagcccggcuccgcgaacaagcccaaggacgagcuggacuacgccaacgacaucgagaagaagaucugcaagauggagaagugcagcuccguguucaacguggucaacagcuccaucgggcugaucauggugcucagcuuccuguuccugaacugaggacuagucccuguucccagagcccacuuuuuuuucuuuuuuugaaauaaaauagccugucuuucagaucuaaaaaaaaaaaaaaaaaaaaaaaaaaaaaaaaaaaaaaaaaaaaaaaaaaaaaaaaaaaaaaaaugcaucccccccccccccccccccccccccccccccaaaggcucuuuucagagccaccagaauu

SEQ ID NO: 340 - RNA, 1635 nt, Artificial Sequence
  mRNA Design a-1 (A64-N5-C30-hSL-N5) comprising derived and/or modified sequence from Pf(3D7)__XP_001351122.1__Pf-CSP_L(G4SG4)_TM domain HA (opt1)
gggagagucccgcagucggcguccagcggcucugcuuguucgugugugugucguugcaggccuuauucaagcuuaccaugaugcgcaagcuggccauccucagcguguccagcuuccuguucgucgaggcccuguuccaggaguaccagugcuacggcuccagcuccaacacccgggugcucaacgagcugaacuacgacaacgcggggaccaaccuguacaacgagcucgagaugaacuacuacggcaagcaggagaacugguacagccugaagaagaacucccgcagccugggggagaacgacgacggcaacaacgaggacaacgagaagcuccggaagcccaagcacaagaagcugaagcagccggccgacgggaaccccgaccccaacgccaaccccaacguggacccgaacgccaaccccaacgucgaccccaacgccaaccccaacguggacccgaacgcgaaccccaacgccaaccccaacgccaaccccaacgccaacccgaacgcgaaccccaacgccaaccccaacgccaaccccaacgccaacccgaacgccaaccccaacgcgaaccccaacgccaaccccaacgccaacccgaacgccaaccccaacgccaaccccaacgcgaaccccaacgccaacccgaacgccaaccccaacguggaccccaacgccaaccccaacgccaacccgaacgcgaaccccaacgccaaccccaacgccaacccgaacgccaaccccaacgccaaccccaacgcgaaccccaacgccaacccgaacgccaaccccaacgccaaccccaacgcgaaccccaacgccaacccgaacgccaaccccaacgccaaccccaacgccaaccccaacgcgaacccgaacgccaaccccaacaagaacaaccagggcaacggccaggggcacaacaugcccaacgaccccaaccgcaacgucgacgagaacgccaacgccaacuccgccgugaagaacaacaacaacgaggagccgagcgacaagcacaucaaggaguaccugaacaagauccagaacucccucagcacggaguggucccccugcagcgugaccugcggcaacgggauccagguccggaucaagcccggcuccgcgaacaagcccaaggacgagcuggacuacgccaacgacaucgagaagaagaucugcaagauggagaagugcagcuccguguucaacguggucaacagcuccaucgggcugaucauggugcucagcuuccuguuccugaacggcgggggcgggagcggcgggggcggcaagcucgaguccacgcggaucuaccagauccuggcgaucuacagcaccgucgccagcucccuggugcucguggucagccugggggccaucuccuucuggaugugcagcaacggcucccugcagugccgcaucugcaucugaggacuagucccuguucccagagcccacuuuuuuuucuuuuuuugaaauaaaauagccugucuuucagaucuaaaaaaaaaaaaaaaaaaaaaaaaaaaaaaaaaaaaaaaaaaaaaaaaaaaaaaaaaaaaaaaaugcaucccccccccccccccccccccccccccccccaaaggcucuuuucagagccaccagaauu

SEQ ID NO: 341 - RNA, 1509 nt, Artificial Sequence
  mRNA Design a-1 (A64-N5-C30-hSL-N5) comprising derived and/or modified sequence from Pf(3D7)__XP_001351122.1__Pf-CSP(199-377)_L(PVTN)_HBsAg (opt1) R7271
gggagagucccgcagucggcguccagcggcucugcuuguucgugugugugucguugcaggccuuauucaagcuuaccauggaccccaacgccaaccccaacgccaacccgaacgcgaaccccaacgccaaccccaacgccaacccgaacgccaaccccaacgccaaccccaacgcgaaccccaacgccaacccgaacgccaaccccaacgccaaccccaacgcgaaccccaacgccaacccgaacgccaaccccaacgccaaccccaacgccaaccccaacgcgaacccgaacgccaaccccaacaagaacaaccagggcaacggccaggggcacaacaugcccaacgaccccaaccgcaacgucgacgagaacgccaacgccaacuccgccgugaagaacaacaacaacgaggagccgagcgacaagcacaucaaggaguaccugaacaagauccagaacucccucagcacggaguggucccccugcagcgugaccugcggcaacgggauccagguccggaucaagcccggcuccgcgaacaagcccaaggacgagcuggacuacgccaacgacaucgagaagaagaucugcaagauggagaagugcagcuccgugccggugacgaacauggagaacaucaccagcggcuuccuggggccccuccuggugcugcaggccggcuucuuccuccugacccgcauccugaccaucccgcagucccucgacagcugguggaccucccugaacuuccucgggggcagccccgucugccuggggcagaacucccagagccccaccuccaaccacagccccaccuccugcccgcccaucugccccggcuaccgguggaugugccugcgccgguucaucaucuuccuguucauccuccugcugugccucaucuuccugcuggugcuccuggacuaccagggcaugcugcccgugugcccgcucauccccgggagcacgaccaccaacaccggccccugcaagacgugcaccacccccgcccaggggaacuccauguucccgagcugcugcugcaccaagcccacggacggcaacugcacgugcauccccauccccuccagcugggcguucgccaaguaccugugggagugggccuccguccgcuucagcuggcugucccuccuggugccguucgugcagugguucgucgggcugagccccaccguguggcucuccgccaucuggaugaugugguacuggggccccagccuguacagcaucgugucccccuucaucccgcugcuccccaucuucuucugccugugggucuacaucugaggacuagucccuguucccagagcccacuuuuuuuucuuuuuuugaaauaaaauagccugucuuucagaucuaaaaaaaaaaaaaaaaaaaaaaaaaaaaaaaaaaaaaaaaaaaaaaaaaaaaaaaaaaaaaaaaugcaucccccccccccccccccccccccccccccccaaaggcucuuuucagagccaccagaauu

SEQ ID NO: 342 - RNA, 1551 nt, Artificial Sequence
  mRNA Design a-1 (A64-N5-C30-hSL-N5) comprising derived and/or modified sequence from Pf(3D7)__XP_001351122.1__Pf-CSP(199-387)_L(PVTN)_HBsAg (opt1) R7216
gggagagucccgcagucggcguccagcggcucugcuuguucgugugugugucguugcaggccuuauucaagcuuaccaugauggccccggaccccaacgccaaccccaacgccaacccgaacgcgaaccccaacgccaaccccaacgccaacccgaacgccaaccccaacgccaaccccaacgcgaaccccaacgccaacccgaacgccaaccccaacgccaaccccaacgcgaaccccaacgccaacccgaacgccaaccccaacgccaaccccaacgccaaccccaacgcgaacccgaacgccaaccccaacaagaacaaccagggcaacggccaggggcacaacaugcccaacgaccccaaccgcaacgucgacgagaacgccaacgccaacuccgccgugaagaacaacaacaacgaggagccgagcgacaagcacaucaaggaguaccugaacaagauccagaacucccucagcacggaguggucccccugcagcgugaccugcggcaacgggauccagguccggaucaagcccggcuccgcgaacaagcccaaggacgagcuggacuacgccaacgacaucgagaagaagaucugcaagauggagaagugcagcuccguguucaacguggucaacagcuccaucgggcuggggccggugacgaacauggagaacaucaccagcggcuuccuggggccccuccuggugcugcaggccggcuucuuccuccugacccgcauccugaccaucccgcagucccucgacagcugguggaccucccugaacuuccucgggggcagccccgucugccuggggcagaacucccagagccccaccuccaaccacagccccaccuccugcccgcccaucugccccggcuaccgguggaugugccugcgccgguucaucaucuuccuguucauccuccugcugugccucaucuuccugcuggugcuccuggacuaccagggcaugcugcccgugugcccgcucauccccgggagcacgaccaccaacaccggccccugcaagacgugcaccacccccgcccaggggaacuccauguucccgagcugcugcugcaccaagcccacggacggcaacugcacgugcauccccauccccuccagcugggcguucgccaaguaccugugggagugggccuccguccgcuucagcuggcugucccuccuggugccguucgugcagugguucgucgggcugagccccaccguguggcucuccgccaucuggaugaugugguacuggggccccagccuguacagcaucgugucccccuucaucccgcugcuccccaucuucuucugccugugggucuacaucugaggacuagucccuguucccagagcccacuuuuuuuucuuuuuuugaaauaaaauagccugucuuucagaucuaaaaaaaaaaaaaaaaaaaaaaaaaaaaaaaaaaaaaaaaaaaaaaaaaaaaaaaaaaaaaaaaugcaucccccccccccccccccccccccccccccccaaaggcucuuuucagagccaccagaauu

SEQ ID NO: 343 - RNA, 735 nt, Artificial Sequence
  mRNA Design a-1 (A64-N5-C30-hSL-N5) comprising derived and/or modified sequence from Pf(3D7)__XP_001351122.1__HsALB_Pf-CSP(19-152) (opt1) R8091
gggagagucccgcagucggcguccagcggcucugcuuguucgugugugugucguugcaggccuuauucaagcuuaccaugaagugggugaccuucaucagccugcucuuccuguucuccagcgccuacucccuguuccaggaguaccagugcuacggcuccagcuccaacacccgggugcucaacgagcugaacuacgacaacgcggggaccaaccuguacaacgagcucgagaugaacuacuacggcaagcaggagaacugguacagccugaagaagaacucccgcagccugggggagaacgacgacggcaacaacgaggacaacgagaagcuccggaagcccaagcacaagaagcugaagcagccggccgacgggaaccccgaccccaacgccaaccccaacguggacccgaacgccaaccccaacgucgaccccaacgccaaccccaacguggacccgaacgcgaaccccaacgccaaccccaacgccaaccccaacgccaacccgaacgcgaaccccaacgccaaccccugaggacuagucccuguucccagagcccacuuuuuuuucuuuuuuugaaauaaaauagccugucuuucagaucuaaaaaaaaaaaaaaaaaaaaaaaaaaaaaaaaaaaaaaaaaaaaaaaaaaaaaaaaaaaaaaaaugcaucccccccccccccccccccccccccccccccaaaggcucuuuucagagccaccagaauu

SEQ ID NO: 344 - RNA, 855 nt, Artificial Sequence
  mRNA Design a-1 (A64-N5-C30-hSL-N5) comprising derived and/or modified sequence from Pf(3D7)__XP_001351122.1__HsALB_Pf-CSP(19-192) (opt1) R8090
gggagagucccgcagucggcguccagcggcucugcuuguucgugugugugucguugcaggccuuauucaagcuuaccaugaagugggugaccuucaucagccugcucuuccuguucuccagcgccuacucccuguuccaggaguaccagugcuacggcuccagcuccaacacccgggugcucaacgagcugaacuacgacaacgcggggaccaaccuguacaacgagcucgagaugaacuacuacggcaagcaggagaacugguacagccugaagaagaacucccgcagccugggggagaacgacgacggcaacaacgaggacaacgagaagcuccggaagcccaagcacaagaagcugaagcagccggccgacgggaaccccgaccccaacgccaaccccaacguggacccgaacgccaaccccaacgucgaccccaacgccaaccccaacguggacccgaacgcgaaccccaacgccaaccccaacgccaaccccaacgccaacccgaacgcgaaccccaacgccaaccccaacgccaaccccaacgccaacccgaacgccaaccccaacgcgaaccccaacgccaaccccaacgccaacccgaacgccaaccccaacgccaaccccaacgcgaaccccaacgccaacccgugaggacuagucccuguucccagagcccacuuuuuuuucuuuuuuugaaauaaaauagccugucuuucagaucuaaaaaaaaaaaaaaaaaaaaaaaaaaaaaaaaaaaaaaaaaaaaaaaaaaaaaaaaaaaaaaaaugcaucccccccccccccccccccccccccccccccaaaggcucuuuucagagccaccagaauu

SEQ ID NO: 345 - RNA, 1095 nt, Artificial Sequence
  mRNA Design a-1 (A64-N5-C30-hSL-N5) comprising derived and/or modified sequence from Pf(3D7)__XP_001351122.1__HsALB_Pf-CSP(19-272) (opt1) R7647
gggagagucccgcagucggcguccagcggcucugcuuguucgugugugugucguugcaggccuuauucaagcuuaccaugaagugggugaccuucaucagccugcucuuccuguucuccagcgccuacucccuguuccaggaguaccagugcuacggcuccagcuccaacacccgggugcucaacgagcugaacuacgacaacgcggggaccaaccuguacaacgagcucgagaugaacuacuacggcaagcaggagaacugguacagccugaagaagaacucccgcagccugggggagaacgacgacggcaacaacgaggacaacgagaagcuccggaagcccaagcacaagaagcugaagcagccggccgacgggaaccccgaccccaacgccaaccccaacguggacccgaacgccaaccccaacgucgaccccaacgccaaccccaacguggacccgaacgcgaaccccaacgccaaccccaacgccaaccccaacgccaacccgaacgcgaaccccaacgccaaccccaacgccaaccccaacgccaacccgaacgccaaccccaacgcgaaccccaacgccaaccccaacgccaacccgaacgccaaccccaacgccaaccccaacgcgaaccccaacgccaacccgaacgccaaccccaacguggaccccaacgccaaccccaacgccaacccgaacgcgaaccccaacgccaaccccaacgccaacccgaacgccaaccccaacgccaaccccaacgcgaaccccaacgccaacccgaacgccaaccccaacgccaaccccaacgcgaaccccaacgccaacccgaacgccaaccccaacgccaaccccaacgccaaccccaacgcgaacccgaacgccaaccccugaggacuagucccuguucccagagcccacuuuuuuuucuuuuuuugaaauaaaauagccugucuuucagaucuaaaaaaaaaaaaaaaaaaaaaaaaaaaaaaaaaaaaaaaaaaaaaaaaaaaaaaaaaaaaaaaaugcaucccccccccccccccccccccccccccccccaaaggcucuuuucagagccaccagaauu

SEQ ID NO: 346 - RNA, 1257 nt, Artificial Sequence
  mRNA Design a-1 (A64-N5-C30-hSL-N5) comprising derived and/or modified sequence from Pf(3D7)__XP_001351122.1__HsALB_Pf-CSP(19-272)_L(AAY)_Pf-CSP(310-3 27)_L(AAY)_Pf-CSP(346-375) (opt1) R8100
gggagagucccgcagucggcguccagcggcucugcuuguucgugugugugucguugcaggccuuauucaagcuuaccaugaagugggugaccuucaucagccugcucuuccuguucuccagcgccuacucccuguuccaggaguaccagugcuacggcuccagcuccaacacccgggugcucaacgagcugaacuacgacaacgcggggaccaaccuguacaacgagcucgagaugaacuacuacggcaagcaggagaacugguacagccugaagaagaacucccgcagccugggggagaacgacgacggcaacaacgaggacaacgagaagcuccggaagcccaagcacaagaagcugaagcagccggccgacgggaaccccgaccccaacgccaaccccaacguggacccgaacgccaaccccaacgucgaccccaacgccaaccccaacguggacccgaacgcgaaccccaacgccaaccccaacgccaaccccaacgccaacccgaacgcgaaccccaacgccaaccccaacgccaaccccaacgccaacccgaacgccaaccccaacgcgaaccccaacgccaaccccaacgccaacccgaacgccaaccccaacgccaaccccaacgcgaaccccaacgccaacccgaacgccaaccccaacguggaccccaacgccaaccccaacgccaacccgaacgcgaaccccaacgccaaccccaacgccaacccgaacgccaaccccaacgccaaccccaacgcgaaccccaacgccaacccgaacgccaaccccaacgccaaccccaacgcgaaccccaacgccaacccgaacgccaaccccaacgccaaccccaacgccaaccccaacgcgaacccgaacgccaaccccgccgcguaugagccgagcgacaagcacaucaaggaguaccugaacaagauccagaacucccucgcggccuacaucaagcccggcuccgcgaacaagcccaaggacgagcuggacuacgccaacgacaucgagaagaagaucugcaagauggagaagugcagcugaggacuagucccuguucccagagcccacuuuuuuuucuuuuuuugaaauaaaauagccugucuuucagaucuaaaaaaaaaaaaaaaaaaaaaaaaaaaaaaaaaaaaaaaaaaaaaaaaaaaaaaaaaaaaaaaaugcaucccccccccccccccccccccccccccccccaaaggcucuuuucagagccaccagaauu

SEQ ID NO: 347 - RNA, 1218 nt, Artificial Sequence
  mRNA Design a-1 (A64-N5-C30-hSL-N5) comprising derived and/or modified sequence from Pf(3D7)__XP_001351122.1__HsALB_Pf-CSP(19-272)_L(AAY)_Pf-CSP(346-3 65)_L(AAY)_P2 (opt1) R8102
gggagagucccgcagucggcguccagcggcucugcuuguucgugugugugucguugcaggccuuauucaagcuuaccaugaagugggugaccuucaucagccugcucuuccuguucuccagcgccuacucccuguuccaggaguaccagugcuacggcuccagcuccaacacccgggugcucaacgagcugaacuacgacaacgcggggaccaaccuguacaacgagcucgagaugaacuacuacggcaagcaggagaacugguacagccugaagaagaacucccgcagccugggggagaacgacgacggcaacaacgaggacaacgagaagcuccggaagcccaagcacaagaagcugaagcagccggccgacgggaaccccgaccccaacgccaaccccaacguggacccgaacgccaaccccaacgucgaccccaacgccaaccccaacguggacccgaacgcgaaccccaacgccaaccccaacgccaaccccaacgccaacccgaacgcgaaccccaacgccaaccccaacgccaaccccaacgccaacccgaacgccaaccccaacgcgaaccccaacgccaaccccaacgccaacccgaacgccaaccccaacgccaaccccaacgcgaaccccaacgccaacccgaacgccaaccccaacguggaccccaacgccaaccccaacgccaacccgaacgcgaaccccaacgccaaccccaacgccaacccgaacgccaaccccaacgccaaccccaacgcgaaccccaacgccaacccgaacgccaaccccaacgccaaccccaacgcgaaccccaacgccaacccgaacgccaaccccaacgccaaccccaacgccaaccccaacgcgaacccgaacgccaaccccgccgcguauaucaagcccggcuccgcgaacaagcccaaggacgagcuggacuacgccaacgacaucgaggcggccuaccaguacaucaaggccaacagcaaguucaucggcaucaccgagcugugaggacuagucccuguucccagagcccacuuuuuuuucuuuuuuugaaauaaaauagccugucuuucagaucuaaaaaaaaaaaaaaaaaaaaaaaaaaaaaaaaaaaaaaaaaaaaaaaaaaaaaaaaaaaaaaaaugcaucccccccccccccccccccccccccccccccaaaggcucuuuucagagccaccagaauu

SEQ ID NO: 348 - RNA, 1212 nt, Artificial Sequence
  mRNA Design a-1 (A64-N5-C30-hSL-N5) comprising derived and/or modified sequence from Pf(3D7)__XP_001351122.1__HsALB_Pf-CSP(19-272)_L(AAY)_Pf-CSP(346-3 65)_L(AAY)_PADRE (opt1) R8101
gggagagucccgcagucggcguccagcggcucugcuuguucgugugugugucguugcaggccuuauucaagcuuaccaugaagugggugaccuucaucagccugcucuuccuguucuccagcgccuacucccuguuccaggaguaccagugcuacggcuccagcuccaacacccgggugcucaacgagcugaacuacgacaacgcggggaccaaccuguacaacgagcucgagaugaacuacuacggcaagcaggagaacugguacagccugaagaagaacucccgcagccugggggagaacgacgacggcaacaacgaggacaacgagaagcuccggaagcccaagcacaagaagcugaagcagccggccgacgggaaccccgaccccaacgccaaccccaacguggacccgaacgccaaccccaacgucgaccccaacgccaaccccaacguggacccgaacgcgaaccccaacgccaaccccaacgccaaccccaacgccaacccgaacgcgaaccccaacgccaaccccaacgccaaccccaacgccaacccgaacgccaaccccaacgcgaaccccaacgccaaccccaacgccaacccgaacgccaaccccaacgccaaccccaacgcgaaccccaacgccaacccgaacgccaaccccaacguggaccccaacgccaaccccaacgccaacccgaacgcgaaccccaacgccaaccccaacgccaacccgaacgccaaccccaacgccaaccccaacgcgaaccccaacgccaacccgaacgccaaccccaacgccaaccccaacgcgaaccccaacgccaacccgaacgccaaccccaacgccaaccccaacgccaaccccaacgcgaacccgaacgccaaccccgccgcguauaucaagcccggcuccgcgaacaagcccaaggacgagcuggacuacgccaacgacaucgaggcggccuacgccaaguucguggccgccuggacccugaaggcggccgccugaggacuagucccuguucccagagcccacuuuuuuuucuuuuuuugaaauaaaauagccugucuuucagaucuaaaaaaaaaaaaaaaaaaaaaaaaaaaaaaaaaaaaaaaaaaaaaaaaaaaaaaaaaaaaaaaaugcaucccccccccccccccccccccccccccccccaaaggcucuuuucagagccaccagaauu

SEQ ID NO: 349 - RNA, 1269 nt, Artificial Sequence
  mRNA Design a-1 (A64-N5-C30-hSL-N5) comprising derived and/or modified sequence from Pf(3D7)__XP_001351122.1__HsALB_Pf-CSP(19-272)_L(G4S)_Pf-CSP(310-3 27)_L(G4S)_Pf-CSP(346-375) (opt1) R8103
gggagagucccgcagucggcguccagcggcucugcuuguucgugugugugucguugcaggccuuauucaagcuuaccaugaagugggugaccuucaucagccugcucuuccuguucuccagcgccuacucccuguuccaggaguaccagugcuacggcuccagcuccaacacccgggugcucaacgagcugaacuacgacaacgcggggaccaaccuguacaacgagcucgagaugaacuacuacggcaagcaggagaacugguacagccugaagaagaacucccgcagccugggggagaacgacgacggcaacaacgaggacaacgagaagcuccggaagcccaagcacaagaagcugaagcagccggccgacgggaaccccgaccccaacgccaaccccaacguggacccgaacgccaaccccaacgucgaccccaacgccaaccccaacguggacccgaacgcgaaccccaacgccaaccccaacgccaaccccaacgccaacccgaacgcgaaccccaacgccaaccccaacgccaaccccaacgccaacccgaacgccaaccccaacgcgaaccccaacgccaaccccaacgccaacccgaacgccaaccccaacgccaaccccaacgcgaaccccaacgccaacccgaacgccaaccccaacguggaccccaacgccaaccccaacgccaacccgaacgcgaaccccaacgccaaccccaacgccaacccgaacgccaaccccaacgccaaccccaacgcgaaccccaacgccaacccgaacgccaaccccaacgccaaccccaacgcgaaccccaacgccaacccgaacgccaaccccaacgccaaccccaacgccaaccccaacgcgaacccgaacgccaaccccggaggcggaggaucugagccgagcgacaagcacaucaaggaguaccugaacaagauccagaacucccucggcggagguggaaguaucaagcccggcuccgcgaacaagcccaaggacgagcuggacuacgccaacgacaucgagaagaagaucugcaagauggagaagugcagcugaggacuagucccuguucccagagcccacuuuuuuuucuuuuuuugaaauaaaauagccugucuuucagaucuaaaaaaaaaaaaaaaaaaaaaaaaaaaaaaaaaaaaaaaaaaaaaaaaaaaaaaaaaaaaaaaaugcaucccccccccccccccccccccccccccccccaaaggcucuuuucagagccaccagaauu

SEQ ID NO: 350 - RNA, 1254 nt, Artificial Sequence
  mRNA Design a-1 (A64-N5-C30-hSL-N5) comprising derived and/or modified sequence from Pf(3D7)__XP_001351122.1__HsALB_Pf-CSP(19-272)_L(G4S)_Pf-CSP(310-3 27)_Pf-CSP(346-375) (opt1) R8104
gggagagucccgcagucggcguccagcggcucugcuuguucgugugugugucguugcaggccuuauucaagcuuaccaugaagugggugaccuucaucagccugcucuuccuguucuccagcgccuacucccuguuccaggaguaccagugcuacggcuccagcuccaacacccgggugcucaacgagcugaacuacgacaacgcggggaccaaccuguacaacgagcucgagaugaacuacuacggcaagcaggagaacugguacagccugaagaagaacucccgcagccugggggagaacgacgacggcaacaacgaggacaacgagaagcuccggaagcccaagcacaagaagcugaagcagccggccgacgggaaccccgaccccaacgccaaccccaacguggacccgaacgccaaccccaacgucgaccccaacgccaaccccaacguggacccgaacgcgaaccccaacgccaaccccaacgccaaccccaacgccaacccgaacgcgaaccccaacgccaaccccaacgccaaccccaacgccaacccgaacgccaaccccaacgcgaaccccaacgccaaccccaacgccaacccgaacgccaaccccaacgccaaccccaacgcgaaccccaacgccaacccgaacgccaaccccaacguggaccccaacgccaaccccaacgccaacccgaacgcgaaccccaacgccaaccccaacgccaacccgaacgccaaccccaacgccaaccccaacgcgaaccccaacgccaacccgaacgccaaccccaacgccaaccccaacgcgaaccccaacgccaacccgaacgccaaccccaacgccaaccccaacgccaaccccaacgcgaacccgaacgccaaccccggaggcggaggaucugagccgagcgacaagcacaucaaggaguaccugaacaagauccagaacucccucaucaagcccggcuccgcgaacaagcccaaggacgagcuggacuacgccaacgacaucgagaagaagaucugcaagauggagaagugcagcugaggacuagucccuguucccagagcccacuuuuuuuucuuuuuuugaaauaaaauagccugucuuucagaucuaaaaaaaaaaaaaaaaaaaaaaaaaaaaaaaaaaaaaaaaaaaaaaaaaaaaaaaaaaaaaaaaugcaucccccccccccccccccccccccccccccccaaaggcucuuuucagagccaccagaauu

SEQ ID NO: 351 - RNA, 1254 nt, Artificial Sequence
  mRNA Design a-1 (A64-N5-C30-hSL-N5) comprising derived and/or modified sequence from Pf(3D7)__XP_001351122.1__HsALB_Pf-CSP(19-325) (opt1) R7643
gggagagucccgcagucggcguccagcggcucugcuuguucgugugugugucguugcaggccuuauucaagcuuaccaugaagugggugaccuucaucagccugcucuuccuguucuccagcgccuacucccuguuccaggaguaccagugcuacggcuccagcuccaacacccgggugcucaacgagcugaacuacgacaacgcggggaccaaccuguacaacgagcucgagaugaacuacuacggcaagcaggagaacugguacagccugaagaagaacucccgcagccugggggagaacgacgacggcaacaacgaggacaacgagaagcuccggaagcccaagcacaagaagcugaagcagccggccgacgggaaccccgaccccaacgccaaccccaacguggacccgaacgccaaccccaacgucgaccccaacgccaaccccaacguggacccgaacgcgaaccccaacgccaaccccaacgccaaccccaacgccaacccgaacgcgaaccccaacgccaaccccaacgccaaccccaacgccaacccgaacgccaaccccaacgcgaaccccaacgccaaccccaacgccaacccgaacgccaaccccaacgccaaccccaacgcgaaccccaacgccaacccgaacgccaaccccaacguggaccccaacgccaaccccaacgccaacccgaacgcgaaccccaacgccaaccccaacgccaacccgaacgccaaccccaacgccaaccccaacgcgaaccccaacgccaacccgaacgccaaccccaacgccaaccccaacgcgaaccccaacgccaacccgaacgccaaccccaacgccaaccccaacgccaaccccaacgcgaacccgaacgccaaccccaacaagaacaaccagggcaacggccaggggcacaacaugcccaacgaccccaaccgcaacgucgacgagaacgccaacgccaacuccgccgugaagaacaacaacaacgaggagccgagcgacaagcacaucaaggaguaccugaacaagauccagaacugaggacuagucccuguucccagagcccacuuuuuuuucuuuuuuugaaauaaaauagccugucuuucagaucuaaaaaaaaaaaaaaaaaaaaaaaaaaaaaaaaaaaaaaaaaaaaaaaaaaaaaaaaaaaaaaaaugcaucccccccccccccccccccccccccccccccaaaggcucuuuucagagccaccagaauu

SEQ ID NO: 352 - RNA, 1431 nt, Artificial Sequence
  mRNA Design a-1 (A64-N5-C30-hSL-N5) comprising derived and/or modified sequence from Pf(3D7)__XP_001351122.1__HsALB_Pf-CSP(19-384) (opt1) R7642
gggagagucccgcagucggcguccagcggcucugcuuguucgugugugugucguugcaggccuuauucaagcuuaccaugaagugggugaccuucaucagccugcucuuccuguucuccagcgccuacucccuguuccaggaguaccagugcuacggcuccagcuccaacacccgggugcucaacgagcugaacuacgacaacgcggggaccaaccuguacaacgagcucgagaugaacuacuacggcaagcaggagaacugguacagccugaagaagaacucccgcagccugggggagaacgacgacggcaacaacgaggacaacgagaagcuccggaagcccaagcacaagaagcugaagcagccggccgacgggaaccccgaccccaacgccaaccccaacguggacccgaacgccaaccccaacgucgaccccaacgccaaccccaacguggacccgaacgcgaaccccaacgccaaccccaacgccaaccccaacgccaacccgaacgcgaaccccaacgccaaccccaacgccaaccccaacgccaacccgaacgccaaccccaacgcgaaccccaacgccaaccccaacgccaacccgaacgccaaccccaacgccaaccccaacgcgaaccccaacgccaacccgaacgccaaccccaacguggaccccaacgccaaccccaacgccaacccgaacgcgaaccccaacgccaaccccaacgccaacccgaacgccaaccccaacgccaaccccaacgcgaaccccaacgccaacccgaacgccaaccccaacgccaaccccaacgcgaaccccaacgccaacccgaacgccaaccccaacgccaaccccaacgccaaccccaacgcgaacccgaacgccaaccccaacaagaacaaccagggcaacggccaggggcacaacaugcccaacgaccccaaccgcaacgucgacgagaacgccaacgccaacuccgccgugaagaacaacaacaacgaggagccgagcgacaagcacaucaaggaguaccugaacaagauccagaacucccucagcacggaguggucccccugcagcgugaccugcggcaacgggauccagguccggaucaagcccggcuccgcgaacaagcccaaggacgagcuggacuacgccaacgacaucgagaagaagaucugcaagauggagaagugcagcuccguguucaacguggucaacagcuccugaggacuagucccuguucccagagcccacuuuuuuuucuuuuuuugaaauaaaauagccugucuuucagaucuaaaaaaaaaaaaaaaaaaaaaaaaaaaaaaaaaaaaaaaaaaaaaaaaaaaaaaaaaaaaaaaaugcaucccccccccccccccccccccccccccccccaaaggcucuuuucagagccaccagaauu

SEQ ID NO: 353 - RNA, 1569 nt, Artificial Sequence
  mRNA Design a-1 (A64-N5-C30-hSL-N5) comprising derived and/or modified sequence from Pf(3D7)__XP_001351122.1__HsALB_Pf-CSP(19-384)_TM domain HA (opt1) R7641
gggagagucccgcagucggcguccagcggcucugcuuguucgugugugugucguugcaggccuuauucaagcuuaccaugaagugggugaccuucaucagccugcucuuccuguucuccagcgccuacucccuguuccaggaguaccagugcuacggcuccagcuccaacacccgggugcucaacgagcugaacuacgacaacgcggggaccaaccuguacaacgagcucgagaugaacuacuacggcaagcaggagaacugguacagccugaagaagaacucccgcagccugggggagaacgacgacggcaacaacgaggacaacgagaagcuccggaagcccaagcacaagaagcugaagcagccggccgacgggaaccccgaccccaacgccaaccccaacguggacccgaacgccaaccccaacgucgaccccaacgccaaccccaacguggacccgaacgcgaaccccaacgccaaccccaacgccaaccccaacgccaacccgaacgcgaaccccaacgccaaccccaacgccaaccccaacgccaacccgaacgccaaccccaacgcgaaccccaacgccaaccccaacgccaacccgaacgccaaccccaacgccaaccccaacgcgaaccccaacgccaacccgaacgccaaccccaacguggaccccaacgccaaccccaacgccaacccgaacgcgaaccccaacgccaaccccaacgccaacccgaacgccaaccccaacgccaaccccaacgcgaaccccaacgccaacccgaacgccaaccccaacgccaaccccaacgcgaaccccaacgccaacccgaacgccaaccccaacgccaaccccaacgccaaccccaacgcgaacccgaacgccaaccccaacaagaacaaccagggcaacggccaggggcacaacaugcccaacgaccccaaccgcaacgucgacgagaacgccaacgccaacuccgccgugaagaacaacaacaacgaggagccgagcgacaagcacaucaaggaguaccugaacaagauccagaacucccucagcacggaguggucccccugcagcgugaccugcggcaacgggauccagguccggaucaagcccggcuccgcgaacaagcccaaggacgagcuggacuacgccaacgacaucgagaagaagaucugcaagauggagaagugcagcuccguguucaacguggucaacagcuccaagcucgaguccacgcggaucuaccagauccuggcgaucuacagcaccgucgccagcucccuggugcucguggucagccugggggccaucuccuucuggaugugcagcaacggcucccugcagugccgcaucugcaucugaggacuagucccuguucccagagcccacuuuuuuuucuuuuuuugaaauaaaauagccugucuuucagaucuaaaaaaaaaaaaaaaaaaaaaaaaaaaaaaaaaaaaaaaaaaaaaaaaaaaaaaaaaaaaaaaaugcaucccccccccccccccccccccccccccccccaaaggcucuuuucagagccaccagaauu

SEQ ID NO: 354 - RNA, 1281 nt, Artificial Sequence
  mRNA Design a-1 (A64-N5-C30-hSL-N5) comprising derived and/or modified sequence from Pf(3D7)__XP_001351122.1__HsALB_Pf-CSP(82-397) (opt1) R8092
gggagagucccgcagucggcguccagcggcucugcuuguucgugugugugucguugcaggccuuauucaagcuuaccaugaagugggugaccuucaucagccugcucuuccuguucuccagcgccuacuccgacaacgagaagcuccggaagcccaagcacaagaagcugaagcagccggccgacgggaaccccgaccccaacgccaaccccaacguggacccgaacgccaaccccaacgucgaccccaacgccaaccccaacguggacccgaacgcgaaccccaacgccaaccccaacgccaaccccaacgccaacccgaacgcgaaccccaacgccaaccccaacgccaaccccaacgccaacccgaacgccaaccccaacgcgaaccccaacgccaaccccaacgccaacccgaacgccaaccccaacgccaaccccaacgcgaaccccaacgccaacccgaacgccaaccccaacguggaccccaacgccaaccccaacgccaacccgaacgcgaaccccaacgccaaccccaacgccaacccgaacgccaaccccaacgccaaccccaacgcgaaccccaacgccaacccgaacgccaaccccaacgccaaccccaacgcgaaccccaacgccaacccgaacgccaaccccaacgccaaccccaacgccaaccccaacgcgaacccgaacgccaaccccaacaagaacaaccagggcaacggccaggggcacaacaugcccaacgaccccaaccgcaacgucgacgagaacgccaacgccaacuccgccgugaagaacaacaacaacgaggagccgagcgacaagcacaucaaggaguaccugaacaagauccagaacucccucagcacggaguggucccccugcagcgugaccugcggcaacgggauccagguccggaucaagcccggcuccgcgaacaagcccaaggacgagcuggacuacgccaacgacaucgagaagaagaucugcaagauggagaagugcagcuccguguucaacguggucaacagcuccaucgggcugaucauggugcucagcuuccuguuccugaacugaggacuagucccuguucccagagcccacuuuuuuuucuuuuuuugaaauaaaauagccugucuuucagaucuaaaaaaaaaaaaaaaaaaaaaaaaaaaaaaaaaaaaaaaaaaaaaaaaaaaaaaaaaaaaaaaaugcaucccccccccccccccccccccccccccccccaaaggcucuuuucagagccaccagaauu

SEQ ID NO: 355 - RNA, 633 nt, Artificial Sequence
  mRNA Design a-1 (A64-N5-C30-hSL-N5) comprising derived and/or modified sequence from Pf(3D7)__XP_001351122.1__HsALB_Pf-CSP(93-192) (opt1) R7768
gggagagucccgcagucggcguccagcggcucugcuuguucgugugugugucguugcaggccuuauucaagcuuaccaugaagugggugaccuucaucagccugcucuuccuguucuccagcgccuacuccaagcugaagcagccggccgacgggaaccccgaccccaacgccaaccccaacguggacccgaacgccaaccccaacgucgaccccaacgccaaccccaacguggacccgaacgcgaaccccaacgccaaccccaacgccaaccccaacgccaacccgaacgcgaaccccaacgccaaccccaacgccaaccccaacgccaacccgaacgccaaccccaacgcgaaccccaacgccaaccccaacgccaacccgaacgccaaccccaacgccaaccccaacgcgaaccccaacgccaacccgugaggacuagucccuguucccagagcccacuuuuuuuucuuuuuuugaaauaaaauagccugucuuucagaucuaaaaaaaaaaaaaaaaaaaaaaaaaaaaaaaaaaaaaaaaaaaaaaaaaaaaaaaaaaaaaaaaugcaucccccccccccccccccccccccccccccccaaaggcucuuuucagagccaccagaauu

SEQ ID NO: 356 - RNA, 873 nt, Artificial Sequence
  mRNA Design a-1 (A64-N5-C30-hSL-N5) comprising derived and/or modified sequence from Pf(3D7)__XP_001351122.1__HsALB_Pf-CSP(93-272) (opt1) R7644
gggagagucccgcagucggcguccagcggcucugcuuguucgugugugugucguugcaggccuuauucaagcuuaccaugaagugggugaccuucaucagccugcucuuccuguucuccagcgccuacuccaagcugaagcagccggccgacgggaaccccgaccccaacgccaaccccaacguggacccgaacgccaaccccaacgucgaccccaacgccaaccccaacguggacccgaacgcgaaccccaacgccaaccccaacgccaaccccaacgccaacccgaacgcgaaccccaacgccaaccccaacgccaaccccaacgccaacccgaacgccaaccccaacgcgaaccccaacgccaaccccaacgccaacccgaacgccaaccccaacgccaaccccaacgcgaaccccaacgccaacccgaacgccaaccccaacguggaccccaacgccaaccccaacgccaacccgaacgcgaaccccaacgccaaccccaacgccaacccgaacgccaaccccaacgccaaccccaacgcgaaccccaacgccaacccgaacgccaaccccaacgccaaccccaacgcgaaccccaacgccaacccgaacgccaaccccaacgccaaccccaacgccaaccccaacgcgaacccgaacgccaaccccugaggacuagucccuguucccagagcccacuuuuuuuucuuuuuuugaaauaaaauagccugucuuucagaucuaaaaaaaaaaaaaaaaaaaaaaaaaaaaaaaaaaaaaaaaaaaaaaaaaaaaaaaaaaaaaaaaugcaucccccccccccccccccccccccccccccccaaaggcucuuuucagagccaccagaauu

SEQ ID NO: 357 - RNA, 1248 nt, Artificial Sequence
  mRNA Design a-1 (A64-N5-C30-hSL-N5) comprising derived and/or modified sequence from Pf(3D7)__XP_001351122.1__HsALB_Pf-CSP(93-397) (opt1) R8089
gggagagucccgcagucggcguccagcggcucugcuuguucgugugugugucguugcaggccuuauucaagcuuaccaugaagugggugaccuucaucagccugcucuuccuguucuccagcgccuacuccaagcugaagcagccggccgacgggaaccccgaccccaacgccaaccccaacguggacccgaacgccaaccccaacgucgaccccaacgccaaccccaacguggacccgaacgcgaaccccaacgccaaccccaacgccaaccccaacgccaacccgaacgcgaaccccaacgccaaccccaacgccaaccccaacgccaacccgaacgccaaccccaacgcgaaccccaacgccaaccccaacgccaacccgaacgccaaccccaacgccaaccccaacgcgaaccccaacgccaacccgaacgccaaccccaacguggaccccaacgccaaccccaacgccaacccgaacgcgaaccccaacgccaaccccaacgccaacccgaacgccaaccccaacgccaaccccaacgcgaaccccaacgccaacccgaacgccaaccccaacgccaaccccaacgcgaaccccaacgccaacccgaacgccaaccccaacgccaaccccaacgccaaccccaacgcgaacccgaacgccaaccccaacaagaacaaccagggcaacggccaggggcacaacaugcccaacgaccccaaccgcaacgucgacgagaacgccaacgccaacuccgccgugaagaacaacaacaacgaggagccgagcgacaagcacaucaaggaguaccugaacaagauccagaacucccucagcacggaguggucccccugcagcgugaccugcggcaacgggauccagguccggaucaagcccggcuccgcgaacaagcccaaggacgagcuggacuacgccaacgacaucgagaagaagaucugcaagauggagaagugcagcuccguguucaacguggucaacagcuccaucgggcugaucauggugcucagcuuccuguuccugaacugaggacuagucccuguucccagagcccacuuuuuuuucuuuuuuugaaauaaaauagccugucuuucagaucuaaaaaaaaaaaaaaaaaaaaaaaaaaaaaaaaaaaaaaaaaaaaaaaaaaaaaaaaaaaaaaaaugcaucccccccccccccccccccccccccccccccaaaggcucuuuucagagccaccagaauu

SEQ ID NO: 358 - RNA, 618 nt, Artificial Sequence
  mRNA Design a-1 (A64-N5-C30-hSL-N5) comprising derived and/or modified sequence from Pf(3D7)__XP_001351122.1__HsALB_Pf-CSP(98-192) (opt1) R7646
gggagagucccgcagucggcguccagcggcucugcuuguucgugugugugucguugcaggccuuauucaagcuuaccaugaagugggugaccuucaucagccugcucuuccuguucuccagcgccuacuccgccgacgggaaccccgaccccaacgccaaccccaacguggacccgaacgccaaccccaacgucgaccccaacgccaaccccaacguggacccgaacgcgaaccccaacgccaaccccaacgccaaccccaacgccaacccgaacgcgaaccccaacgccaaccccaacgccaaccccaacgccaacccgaacgccaaccccaacgcgaaccccaacgccaaccccaacgccaacccgaacgccaaccccaacgccaaccccaacgcgaaccccaacgccaacccgugaggacuagucccuguucccagagcccacuuuuuuuucuuuuuuugaaauaaaauagccugucuuucagaucuaaaaaaaaaaaaaaaaaaaaaaaaaaaaaaaaaaaaaaaaaaaaaaaaaaaaaaaaaaaaaaaaugcaucccccccccccccccccccccccccccccccaaaggcucuuuucagagccaccagaauu

SEQ ID NO: 359 - RNA, 858 nt, Artificial Sequence
  mRNA Design a-1 (A64-N5-C30-hSL-N5) comprising derived and/or modified sequence from Pf(3D7)__XP_001351122.1__HsALB_Pf-CSP(98-272) (opt1) R7645
gggagagucccgcagucggcguccagcggcucugcuuguucgugugugugucguugcaggccuuauucaagcuuaccaugaagugggugaccuucaucagccugcucuuccuguucuccagcgccuacuccgccgacgggaaccccgaccccaacgccaaccccaacguggacccgaacgccaaccccaacgucgaccccaacgccaaccccaacguggacccgaacgcgaaccccaacgccaaccccaacgccaaccccaacgccaacccgaacgcgaaccccaacgccaaccccaacgccaaccccaacgccaacccgaacgccaaccccaacgcgaaccccaacgccaaccccaacgccaacccgaacgccaaccccaacgccaaccccaacgcgaaccccaacgccaacccgaacgccaaccccaacguggaccccaacgccaaccccaacgccaacccgaacgcgaaccccaacgccaaccccaacgccaacccgaacgccaaccccaacgccaaccccaacgcgaaccccaacgccaacccgaacgccaaccccaacgccaaccccaacgcgaaccccaacgccaacccgaacgccaaccccaacgccaaccccaacgccaaccccaacgcgaacccgaacgccaaccccugaggacuagucccuguucccagagcccacuuuuuuuucuuuuuuugaaauaaaauagccugucuuucagaucuaaaaaaaaaaaaaaaaaaaaaaaaaaaaaaaaaaaaaaaaaaaaaaaaaaaaaaaaaaaaaaaaugcaucccccccccccccccccccccccccccccccaaaggcucuuuucagagccaccagaauu

SEQ ID NO: 360 - RNA, 1164 nt, Artificial Sequence
  mRNA Design a-1 (A64-N5-C30-hSL-N5) comprising derived and/or modified sequence from Pf(3D7)__XP_001351122.1__HsALB_Pf-CSP(98-374) (opt1) R7650
gggagagucccgcagucggcguccagcggcucugcuuguucgugugugugucguugcaggccuuauucaagcuuaccaugaagugggugaccuucaucagccugcucuuccuguucuccagcgccuacuccgccgacgggaaccccgaccccaacgccaaccccaacguggacccgaacgccaaccccaacgucgaccccaacgccaaccccaacguggacccgaacgcgaaccccaacgccaaccccaacgccaaccccaacgccaacccgaacgcgaaccccaacgccaaccccaacgccaaccccaacgccaacccgaacgccaaccccaacgcgaaccccaacgccaaccccaacgccaacccgaacgccaaccccaacgccaaccccaacgcgaaccccaacgccaacccgaacgccaaccccaacguggaccccaacgccaaccccaacgccaacccgaacgcgaaccccaacgccaaccccaacgccaacccgaacgccaaccccaacgccaaccccaacgcgaaccccaacgccaacccgaacgccaaccccaacgccaaccccaacgcgaaccccaacgccaacccgaacgccaaccccaacgccaaccccaacgccaaccccaacgcgaacccgaacgccaaccccaacaagaacaaccagggcaacggccaggggcacaacaugcccaacgaccccaaccgcaacgucgacgagaacgccaacgccaacuccgccgugaagaacaacaacaacgaggagccgagcgacaagcacaucaaggaguaccugaacaagauccagaacucccucagcacggaguggucccccugcagcgugaccugcggcaacgggauccagguccggaucaagcccggcuccgcgaacaagcccaaggacgagcuggacuacgccaacgacaucgagaagaagaucugcaagauggagaagugcugaggacuagucccuguucccagagcccacuuuuuuuucuuuuuuugaaauaaaauagccugucuuucagaucuaaaaaaaaaaaaaaaaaaaaaaaaaaaaaaaaaaaaaaaaaaaaaaaaaaaaaaaaaaaaaaaaugcaucccccccccccccccccccccccccccccccaaaggcucuuuucagagccaccagaauu

SEQ ID NO: 361 - RNA, 1233 nt, Artificial Sequence
  mRNA Design a-1 (A64-N5-C30-hSL-N5) comprising derived and/or modified sequence from Pf(3D7)__XP_001351122.1__HsALB_Pf-CSP(98-397) (opt1) R7649
gggagagucccgcagucggcguccagcggcucugcuuguucgugugugugucguugcaggccuuauucaagcuuaccaugaagugggugaccuucaucagccugcucuuccuguucuccagcgccuacuccgccgacgggaaccccgaccccaacgccaaccccaacguggacccgaacgccaaccccaacgucgaccccaacgccaaccccaacguggacccgaacgcgaaccccaacgccaaccccaacgccaaccccaacgccaacccgaacgcgaaccccaacgccaaccccaacgccaaccccaacgccaacccgaacgccaaccccaacgcgaaccccaacgccaaccccaacgccaacccgaacgccaaccccaacgccaaccccaacgcgaaccccaacgccaacccgaacgccaaccccaacguggaccccaacgccaaccccaacgccaacccgaacgcgaaccccaacgccaaccccaacgccaacccgaacgccaaccccaacgccaaccccaacgcgaaccccaacgccaacccgaacgccaaccccaacgccaaccccaacgcgaaccccaacgccaacccgaacgccaaccccaacgccaaccccaacgccaaccccaacgcgaacccgaacgccaaccccaacaagaacaaccagggcaacggccaggggcacaacaugcccaacgaccccaaccgcaacgucgacgagaacgccaacgccaacuccgccgugaagaacaacaacaacgaggagccgagcgacaagcacaucaaggaguaccugaacaagauccagaacucccucagcacggaguggucccccugcagcgugaccugcggcaacgggauccagguccggaucaagcccggcuccgcgaacaagcccaaggacgagcuggacuacgccaacgacaucgagaagaagaucugcaagauggagaagugcagcuccguguucaacguggucaacagcuccaucgggcugaucauggugcucagcuuccuguuccugaacugaggacuagucccuguucccagagcccacuuuuuuuucuuuuuuugaaauaaaauagccugucuuucagaucuaaaaaaaaaaaaaaaaaaaaaaaaaaaaaaaaaaaaaaaaaaaaaaaaaaaaaaaaaaaaaaaaugcaucccccccccccccccccccccccccccccccaaaggcucuuuucagagccaccagaauu

SEQ ID NO: 362 - RNA, 1560 nt, Artificial Sequence
  mRNA Design a-1 (A64-N5-C30-hSL-N5) comprising derived and/or modified sequence from Pf(3D7)__XP_001351122.1__HsALB_Pf-CSP(199-377)_L(PVTN)_HBsAg (opt1) R8031
gggagagucccgcagucggcguccagcggcucugcuuguucgugugugugucguugcaggccuuauucaagcuuaccaugaaguggguaaccuuuauuucccuucuuuuucucuuuagcucggcuuauuccgaccccaacgccaaccccaacgccaacccgaacgcgaaccccaacgccaaccccaacgccaacccgaacgccaaccccaacgccaaccccaacgcgaaccccaacgccaacccgaacgccaaccccaacgccaaccccaacgcgaaccccaacgccaacccgaacgccaaccccaacgccaaccccaacgccaaccccaacgcgaacccgaacgccaaccccaacaagaacaaccagggcaacggccaggggcacaacaugcccaacgaccccaaccgcaacgucgacgagaacgccaacgccaacuccgccgugaagaacaacaacaacgaggagccgagcgacaagcacaucaaggaguaccugaacaagauccagaacucccucagcacggaguggucccccugcagcgugaccugcggcaacgggauccagguccggaucaagcccggcuccgcgaacaagcccaaggacgagcuggacuacgccaacgacaucgagaagaagaucugcaagauggagaagugcagcuccgugccggugacgaacauggagaacaucaccagcggcuuccuggggccccuccuggugcugcaggccggcuucuuccuccugacccgcauccugaccaucccgcagucccucgacagcugguggaccucccugaacuuccucgggggcagccccgucugccuggggcagaacucccagagccccaccuccaaccacagccccaccuccugcccgcccaucugccccggcuaccgguggaugugccugcgccgguucaucaucuuccuguucauccuccugcugugccucaucuuccugcuggugcuccuggacuaccagggcaugcugcccgugugcccgcucauccccgggagcacgaccaccaacaccggccccugcaagacgugcaccacccccgcccaggggaacuccauguucccgagcugcugcugcaccaagcccacggacggcaacugcacgugcauccccauccccuccagcugggcguucgccaaguaccugugggagugggccuccguccgcuucagcuggcugucccuccuggugccguucgugcagugguucgucgggcugagccccaccguguggcucuccgccaucuggaugaugugguacuggggccccagccuguacagcaucgugucccccuucaucccgcugcuccccaucuucuucugccugugggucuacaucugaggacuagucccuguucccagagcccacuuuuuuuucuuuuuuugaaauaaaauagccugucuuucagaucuaaaaaaaaaaaaaaaaaaaaaaaaaaaaaaaaaaaaaaaaaaaaaaaaaaaaaaaaaaaaaaaaugcaucccccccccccccccccccccccccccccccaaaggcucuuuucagagccaccagaauu

SEQ ID NO: 363 - RNA, 1299 nt, Artificial Sequence
  mRNA Design a-1 (A64-N5-C30-hSL-N5) comprising derived and/or modified sequence from Pb(ANKA)__XP_022712148.1__Pb-CSP (opt1)
gggagagucccgcagucggcguccagcggcucugcuuguucgugugugugucguugcaggccuuauucaagcuuaccaugaagaagugcaccauccugguggucgccagccuccugcuggugaacucccuccugcccggcuacgggcagaacaagagcauccaggcccagcgcaaccugaacgagcucugcuacaacgagggcaacgacaacaagcuguaccacgugcugaacuccaagaacgggaagaucuacaaccggaacaccgucaaccgccuccuggcggacgccccggagggcaagaagaacgagaagaagaacgagaagaucgagcggaacaacaagcugaagcagccgcccccgccgcccaaccccaacgacccgccgccgcccaaccccaacgacccgcccccgcccaacccgaacgacccgcccccgccgaaccccaacgacccgcccccgcccaacgccaacgacccgcccccgcccaacgccaacgaccccgccccgcccaacgcgaacgaccccgccccgccgaacgccaacgaccccgccccgcccaacgcgaacgacccggccccgcccaacgccaacgacccgccgccgcccaaccccaacgacccggccccgcccaacgccaacgacccgccgcccccgaaccccaacgacccggcgccgccccaggggaacaacaacccgcagccccagccccgcccccagccgcagccccagccccagccccagccgcagccccagccccagccccagccgcggccccagccccagccccagccgggcggcaacaacaacaacaagaacaacaacaacgacgacagcuacauccccuccgccgagaagauccucgaguucgugaagcagauccgcgacagcaucacggaggaguggucccagugcaacgugaccugcgggagcggcauccggguccgcaagcggaagggguccaacaagaaggccgaggaccugacccuggaggacaucgacaccgagaucugcaagauggacaagugcagcuccaucuucaacaucgugagcaacucccucggcuucgugauccugcugguccucguguucuucaacugaggacuagucccuguucccagagcccacuuuuuuuucuuuuuuugaaauaaaauagccugucuuucagaucuaaaaaaaaaaaaaaaaaaaaaaaaaaaaaaaaaaaaaaaaaaaaaaaaaaaaaaaaaaaaaaaaugcaucccccccccccccccccccccccccccccccaaaggcucuuuucagagccaccagaauu

SEQ ID NO: 364 - RNA, 1464 nt, Artificial Sequence
  mRNA Design a-1 (A64-N5-C30-hSL-N5) comprising derived and/or modified sequence from Pb(ANKA)__XP_022712148.1__Pb-CSP_L(G4SG4)_TM domain HA (opt1)
gggagagucccgcagucggcguccagcggcucugcuuguucgugugugugucguugcaggccuuauucaagcuuaccaugaagaagugcaccauccugguggucgccagccuccugcuggugaacucccuccugcccggcuacgggcagaacaagagcauccaggcccagcgcaaccugaacgagcucugcuacaacgagggcaacgacaacaagcuguaccacgugcugaacuccaagaacgggaagaucuacaaccggaacaccgucaaccgccuccuggcggacgccccggagggcaagaagaacgagaagaagaacgagaagaucgagcggaacaacaagcugaagcagccgcccccgccgcccaaccccaacgacccgccgccgcccaaccccaacgacccgcccccgcccaacccgaacgacccgcccccgccgaaccccaacgacccgcccccgcccaacgccaacgacccgcccccgcccaacgccaacgaccccgccccgcccaacgcgaacgaccccgccccgccgaacgccaacgaccccgccccgcccaacgcgaacgacccggccccgcccaacgccaacgacccgccgccgcccaaccccaacgacccggccccgcccaacgccaacgacccgccgcccccgaaccccaacgacccggcgccgccccaggggaacaacaacccgcagccccagccccgcccccagccgcagccccagccccagccccagccgcagccccagccccagccccagccgcggccccagccccagccccagccgggcggcaacaacaacaacaagaacaacaacaacgacgacagcuacauccccuccgccgagaagauccucgaguucgugaagcagauccgcgacagcaucacggaggaguggucccagugcaacgugaccugcgggagcggcauccggguccgcaagcggaagggguccaacaagaaggccgaggaccugacccuggaggacaucgacaccgagaucugcaagauggacaagugcagcuccaucuucaacaucgugagcaacucccucggcuucgugauccugcugguccucguguucuucaacggcgggggcgggagcggcgggggcggcaagcucgaguccacgcggaucuaccagauccuggcgaucuacagcaccgucgccagcucccuggugcucguggucagccugggggccaucuccuucuggaugugcagcaacggcucccugcagugccgcaucugcaucugaggacuagucccuguucccagagcccacuuuuuuuucuuuuuuugaaauaaaauagccugucuuucagaucuaaaaaaaaaaaaaaaaaaaaaaaaaaaaaaaaaaaaaaaaaaaaaaaaaaaaaaaaaaaaaaaaugcaucccccccccccccccccccccccccccccccaaaggcucuuuucagagccaccagaauu

SEQ ID NO: 365 - RNA, 1284 nt, Artificial Sequence
  mRNA Design a-1 (A64-N5-C30-hSL-N5) comprising derived and/or modified sequence from Pb(ANKA)__XP_022712148.1__HsALB_Pb-CSP(24-340) (opt1)
gggagagucccgcagucggcguccagcggcucugcuuguucgugugugugucguugcaggccuuauucaagcuuaccaugaagugggugaccuucaucagccugcucuuccuguucuccagcgccuacucccagaacaagagcauccaggcccagcgcaaccugaacgagcucugcuacaacgagggcaacgacaacaagcuguaccacgugcugaacuccaagaacgggaagaucuacaaccggaacaccgucaaccgccuccuggcggacgccccggagggcaagaagaacgagaagaagaacgagaagaucgagcggaacaacaagcugaagcagccgcccccgccgcccaaccccaacgacccgccgccgcccaaccccaacgacccgcccccgcccaacccgaacgacccgcccccgccgaaccccaacgacccgcccccgcccaacgccaacgacccgcccccgcccaacgccaacgaccccgccccgcccaacgcgaacgaccccgccccgccgaacgccaacgaccccgccccgcccaacgcgaacgacccggccccgcccaacgccaacgacccgccgccgcccaaccccaacgacccggccccgcccaacgccaacgacccgccgcccccgaaccccaacgacccggcgccgccccaggggaacaacaacccgcagccccagccccgcccccagccgcagccccagccccagccccagccgcagccccagccccagccccagccgcggccccagccccagccccagccgggcggcaacaacaacaacaagaacaacaacaacgacgacagcuacauccccuccgccgagaagauccucgaguucgugaagcagauccgcgacagcaucacggaggaguggucccagugcaacgugaccugcgggagcggcauccggguccgcaagcggaagggguccaacaagaaggccgaggaccugacccuggaggacaucgacaccgagaucugcaagauggacaagugcagcuccaucuucaacaucgugagcaacucccucggcuucgugauccugcugguccucguguucuucaacugaggacuagucccuguucccagagcccacuuuuuuuucuuuuuuugaaauaaaauagccugucuuucagaucuaaaaaaaaaaaaaaaaaaaaaaaaaaaaaaaaaaaaaaaaaaaaaaaaaaaaaaaaaaaaaaaaugcaucccccccccccccccccccccccccccccccaaaggcucuuuucagagccaccagaauu

SEQ ID NO: 366 - RNA, 1302 nt, Artificial Sequence
  mRNA Design a-1 (A64-N5-C30-hSL-N5) comprising derived and/or modified sequence from Pb(ANKA)__XP_022712148.1__HsIns-iso1_Pb-CSP(24-340) (opt1)
gggagagucccgcagucggcguccagcggcucugcuuguucgugugugugucguugcaggccuuauucaagcuuaccauggcccuguggaugcgccuccugccccugcucgcccugcuggcgcucuggggcccggaccccgccgccgcccagaacaagagcauccaggcccagcgcaaccugaacgagcucugcuacaacgagggcaacgacaacaagcuguaccacgugcugaacuccaagaacgggaagaucuacaaccggaacaccgucaaccgccuccuggcggacgccccggagggcaagaagaacgagaagaagaacgagaagaucgagcggaacaacaagcugaagcagccgcccccgccgcccaaccccaacgacccgccgccgcccaaccccaacgacccgcccccgcccaacccgaacgacccgcccccgccgaaccccaacgacccgcccccgcccaacgccaacgacccgcccccgcccaacgccaacgaccccgccccgcccaacgcgaacgaccccgccccgccgaacgccaacgaccccgccccgcccaacgcgaacgacccggccccgcccaacgccaacgacccgccgccgcccaaccccaacgacccggccccgcccaacgccaacgacccgccgcccccgaaccccaacgacccggcgccgccccaggggaacaacaacccgcagccccagccccgcccccagccgcagccccagccccagccccagccgcagccccagccccagccccagccgcggccccagccccagccccagccgggcggcaacaacaacaacaagaacaacaacaacgacgacagcuacauccccuccgccgagaagauccucgaguucgugaagcagauccgcgacagcaucacggaggaguggucccagugcaacgugaccugcgggagcggcauccggguccgcaagcggaagggguccaacaagaaggccgaggaccugacccuggaggacaucgacaccgagaucugcaagauggacaagugcagcuccaucuucaacaucgugagcaacucccucggcuucgugauccugcugguccucguguucuucaacugaggacuagucccuguucccagagcccacuuuuuuuucuuuuuuugaaauaaaauagccugucuuucagaucuaaaaaaaaaaaaaaaaaaaaaaaaaaaaaaaaaaaaaaaaaaaaaaaaaaaaaaaaaaaaaaaaugcaucccccccccccccccccccccccccccccccaaaggcucuuuucagagccaccagaauu

SEQ ID NO: 367 - RNA, 1281 nt, Artificial Sequence
  mRNA Design a-1 (A64-N5-C30-hSL-N5) comprising derived and/or modified sequence from Pb(ANKA)__XP_022712148.1__HsSPARC_Pb-CSP(24-340) (opt1)
gggagagucccgcagucggcguccagcggcucugcuuguucgugugugugucguugcaggccuuauucaagcuuaccaugcgcgccuggaucuucuuccugcucugccuggccggccgggcccuggcccagaacaagagcauccaggcccagcgcaaccugaacgagcucugcuacaacgagggcaacgacaacaagcuguaccacgugcugaacuccaagaacgggaagaucuacaaccggaacaccgucaaccgccuccuggcggacgccccggagggcaagaagaacgagaagaagaacgagaagaucgagcggaacaacaagcugaagcagccgcccccgccgcccaaccccaacgacccgccgccgcccaaccccaacgacccgcccccgcccaacccgaacgacccgcccccgccgaaccccaacgacccgcccccgcccaacgccaacgacccgcccccgcccaacgccaacgaccccgccccgcccaacgcgaacgaccccgccccgccgaacgccaacgaccccgccccgcccaacgcgaacgacccggccccgcccaacgccaacgacccgccgccgcccaaccccaacgacccggccccgcccaacgccaacgacccgccgcccccgaaccccaacgacccggcgccgccccaggggaacaacaacccgcagccccagccccgcccccagccgcagccccagccccagccccagccgcagccccagccccagccccagccgcggccccagccccagccccagccgggcggcaacaacaacaacaagaacaacaacaacgacgacagcuacauccccuccgccgagaagauccucgaguucgugaagcagauccgcgacagcaucacggaggaguggucccagugcaacgugaccugcgggagcggcauccggguccgcaagcggaagggguccaacaagaaggccgaggaccugacccuggaggacaucgacaccgagaucugcaagauggacaagugcagcuccaucuucaacaucgugagcaacucccucggcuucgugauccugcugguccucguguucuucaacugaggacuagucccuguucccagagcccacuuuuuuuucuuuuuuugaaauaaaauagccugucuuucagaucuaaaaaaaaaaaaaaaaaaaaaaaaaaaaaaaaaaaaaaaaaaaaaaaaaaaaaaaaaaaaaaaaugcaucccccccccccccccccccccccccccccccaaaggcucuuuucagagccaccagaauu

SEQ ID NO: 368 - RNA, 1284 nt, Artificial Sequence
  mRNA Design a-1 (A64-N5-C30-hSL-N5) comprising derived and/or modified sequence from Pb(ANKA)__XP_022712148.1__IgE_Pb-CSP(24-340) (opt1)
gggagagucccgcagucggcguccagcggcucugcuuguucgugugugugucguugcaggccuuauucaagcuuaccauggacuggaccuggauccuguuccucguggccgccgcgacccgcguccacagccagaacaagagcauccaggcccagcgcaaccugaacgagcucugcuacaacgagggcaacgacaacaagcuguaccacgugcugaacuccaagaacgggaagaucuacaaccggaacaccgucaaccgccuccuggcggacgccccggagggcaagaagaacgagaagaagaacgagaagaucgagcggaacaacaagcugaagcagccgcccccgccgcccaaccccaacgacccgccgccgcccaaccccaacgacccgcccccgcccaacccgaacgacccgcccccgccgaaccccaacgacccgcccccgcccaacgccaacgacccgcccccgcccaacgccaacgaccccgccccgcccaacgcgaacgaccccgccccgccgaacgccaacgaccccgccccgcccaacgcgaacgacccggccccgcccaacgccaacgacccgccgccgcccaaccccaacgacccggccccgcccaacgccaacgacccgccgcccccgaaccccaacgacccggcgccgccccaggggaacaacaacccgcagccccagccccgcccccagccgcagccccagccccagccccagccgcagccccagccccagccccagccgcggccccagccccagccccagccgggcggcaacaacaacaacaagaacaacaacaacgacgacagcuacauccccuccgccgagaagauccucgaguucgugaagcagauccgcgacagcaucacggaggaguggucccagugcaacgugaccugcgggagcggcauccggguccgcaagcggaagggguccaacaagaaggccgaggaccugacccuggaggacaucgacaccgagaucugcaagauggacaagugcagcuccaucuucaacaucgugagcaacucccucggcuucgugauccugcugguccucguguucuucaacugaggacuagucccuguucccagagcccacuuuuuuuucuuuuuuugaaauaaaauagccugucuuucagaucuaaaaaaaaaaaaaaaaaaaaaaaaaaaaaaaaaaaaaaaaaaaaaaaaaaaaaaaaaaaaaaaaugcaucccccccccccccccccccccccccccccccaaaggcucuuuucagagccaccagaauu

SEQ ID NO: 369 - RNA, 1470 nt, Artificial Sequence; identical to SEQ ID NO: 333
  mRNA Design a-1 (A64-N5-C30-hSL-N5) comprising derived and/or modified sequence from Pf(3D7)__XP_001351122.1__Pf-CSP (opt1)

SEQ ID NO: 370 - RNA, 1401 nt, Artificial Sequence; identical to SEQ ID NO: 334
  mRNA Design a-1 (A64-N5-C30-hSL-N5) comprising derived and/or modified sequence from Pf(3D7)__XP_001351122.1__Pf-CSP(1-374) (opt1)

SEQ ID NO: 371 - RNA, 1254 nt, Artificial Sequence; identical to SEQ ID NO: 335
  mRNA Design a-1 (A64-N5-C30-hSL-N5) comprising derived and/or modified sequence from Pf(3D7)__XP_001351122.1__Pf-CSP(1-325) (opt1)

SEQ ID NO: 372 - RNA, 1470 nt, Artificial Sequence
  mRNA Design a-1 (A64-N5-C30-hSL-N5) comprising derived and/or modified sequence from Pf(3D7)__XP_001351122.1__HsALB_Pf-CSP(19-397) (opt1)
gggagagucccgcagucggcguccagcggcucugcuuguucgugugugugucguugcaggccuuauucaagcuuaccaugaagugggugaccuucaucagccuccuguuccuguucuccagcgccuacucccuguuccaggaguaccagugcuacggcagcuccagcaacacccgcguccucaacgagcugaacuacgacaacgccgggacgaaccuguacaacgagcucgagaugaacuacuacggcaagcaggagaacugguacucccugaagaagaacagccggucccugggggagaacgacgacggcaacaacgaggacaacgagaagcuccgcaagcccaagcacaagaagcugaagcagccggcggacgggaaccccgaccccaacgccaaccccaacguggacccgaacgccaaccccaacguggaccccaacgccaaccccaacgucgacccgaacgccaaccccaacgcgaaccccaacgccaaccccaacgccaacccgaacgccaaccccaacgcgaaccccaacgccaaccccaacgccaacccgaacgccaaccccaacgccaaccccaacgcgaaccccaacgccaacccgaacgccaaccccaacgccaaccccaacgccaaccccaacgcgaacccgaacgccaaccccaacguggaccccaacgccaaccccaacgccaacccgaacgccaaccccaacgcgaaccccaacgccaacccgaacgccaaccccaacgccaaccccaacgccaaccccaacgcgaacccgaacgccaaccccaacgccaaccccaacgccaaccccaacgcgaacccgaacgccaaccccaacgccaaccccaacgccaaccccaacgccaacccgaacgcgaaccccaacaagaacaaccagggcaacggccaggggcacaacaugcccaacgaccccaaccggaacguggacgagaacgccaacgccaacagcgccgucaagaacaacaacaacgaggagccguccgacaagcacaucaaggaguaccugaacaagauccagaacagccucuccaccgaguggagccccugcuccgugaccugcggcaacgggauccaggugcgcaucaagcccggcagcgccaacaagcccaaggacgagcuggacuacgcgaacgacaucgagaagaagaucugcaagauggagaagugcuccagcgucuucaacguggugaacuccagcaucgggcugaucaugguccucagcuuccuguuccugaacugaggacuagucccuguucccagagcccacuuuuuuuucuuuuuuugaaauaaaauagccugucuuucagaucuaaaaaaaaaaaaaaaaaaaaaaaaaaaaaaaaaaaaaaaaaaaaaaaaaaaaaaaaaaaaaaaaugcaucccccccccccccccccccccccccccccccaaaggcucuuuucagagccaccagaauu

SEQ ID NO: 373 - RNA, 1488 nt, Artificial Sequence
  mRNA Design a-1 (A64-N5-C30-hSL-N5) comprising derived and/or modified sequence from Pf(3D7)__XP_001351122.1__HsIns-iso1_Pf-CSP(19-397) (opt1)
gggagagucccgcagucggcguccagcggcucugcuuguucgugugugugucguugcaggccuuauucaagcuuaccauggcccuguggaugcgccuccugccccugcucgcccugcuggcgcucuggggcccggaccccgccgccgcccuguuccaggaguaccagugcuacgggagcuccagcaacacccgggugcugaacgagcucaacuacgacaacgccggcaccaaccuguacaacgagcuggagaugaacuacuacgggaagcaggagaacugguacucccucaagaagaacagccgcucccugggcgagaacgacgacgggaacaacgaggacaacgagaagcugcggaagcccaagcacaagaagcucaagcagcccgcggacggcaacccggaccccaacgccaaccccaacgucgaccccaacgccaacccgaacguggaccccaacgccaaccccaacguggaccccaacgcgaacccgaacgccaaccccaacgccaaccccaacgccaaccccaacgccaacccgaacgcgaaccccaacgccaaccccaacgccaaccccaacgccaacccgaacgccaaccccaacgcgaaccccaacgccaaccccaacgccaacccgaacgccaaccccaacgccaaccccaacgcgaaccccaacgccaacccgaacgucgaccccaacgccaaccccaacgccaacccgaacgccaaccccaacgcgaaccccaacgccaaccccaacgccaacccgaacgccaaccccaacgcgaaccccaacgccaaccccaacgccaacccgaacgccaaccccaacgccaaccccaacgcgaaccccaacgccaacccgaacgccaaccccaacgccaaccccaacgccaaccccaacgcgaacccgaacaagaacaaccagggcaacgggcagggccacaacaugcccaacgaccccaaccgcaacguggacgagaacgccaacgccaacagcgccgugaagaacaacaacaacgaggagcccuccgacaagcacaucaaggaguaccugaacaagauccagaacagccuguccacggaguggagcccgugcuccgugaccugcgggaacggcauccagguccggaucaagcccgggagcgccaacaagcccaaggacgagcucgacuacgcgaacgacaucgagaagaagaucugcaagauggagaagugcuccagcguguucaacgucgugaacuccagcaucggccugaucauggugcuguccuuccucuuccugaacugaggacuagucccuguucccagagcccacuuuuuuuucuuuuuuugaaauaaaauagccugucuuucagaucuaaaaaaaaaaaaaaaaaaaaaaaaaaaaaaaaaaaaaaaaaaaaaaaaaaaaaaaaaaaaaaaaugcaucccccccccccccccccccccccccccccccaaaggcucuuuucagagccaccagaauu

SEQ ID NO: 374 - RNA, 1467 nt, Artificial Sequence
  mRNA Design a-1 (A64-N5-C30-hSL-N5) comprising derived and/or modified sequence from Pf(3D7)__XP_001351122.1__HsSPARC_Pf-CSP(19-397) (opt1)
gggagagucccgcagucggcguccagcggcucugcuuguucgugugugugucguugcaggccuuauucaagcuuaccaugcgcgccuggaucuucuuccugcucugccuggccggccgggcgcuggcccucuuccaggaguaccagugcuacgggagcuccagcaacacccgcgugcugaacgagcugaacuacgacaacgccggcaccaaccucuacaacgagcuggagaugaacuacuacgggaagcaggagaacugguacucccugaagaagaacagccggucccucggcgagaacgacgacgggaacaacgaggacaacgagaagcugcgcaagcccaagcacaagaagcugaagcagccggccgacggcaaccccgaccccaacgccaaccccaacgucgacccgaacgcgaaccccaacguggaccccaacgccaaccccaacguggacccgaacgccaaccccaacgccaaccccaacgcgaaccccaacgccaacccgaacgccaaccccaacgccaaccccaacgccaaccccaacgcgaacccgaacgccaaccccaacgccaaccccaacgccaaccccaacgccaacccgaacgcgaaccccaacgccaaccccaacgccaaccccaacgccaacccgaacgccaaccccaacgucgaccccaacgcgaaccccaacgccaacccgaacgccaaccccaacgccaaccccaacgccaacccgaacgcgaaccccaacgccaaccccaacgccaaccccaacgccaacccgaacgcgaaccccaacgccaaccccaacgccaaccccaacgccaacccgaacgccaaccccaacgcgaaccccaacgccaaccccaacgccaacccgaacgccaaccccaacaagaacaaccagggcaacgggcagggccacaacaugcccaacgaccccaaccggaacguggacgagaacgccaacgcgaacagcgccgugaagaacaacaacaacgaggagccguccgacaagcacaucaaggaguaccucaacaagauccagaacagccuguccacggaguggagccccugcuccgugaccugcgggaacggcauccagguccgcaucaagcccgggagcgccaacaagcccaaggacgagcuggacuacgccaacgacaucgagaagaagaucugcaagauggagaagugcuccagcguguucaacgucgugaacuccagcaucggccucaucauggugcuguccuuccuguuccucaacugaggacuagucccuguucccagagcccacuuuuuuuucuuuuuuugaaauaaaauagccugucuuucagaucuaaaaaaaaaaaaaaaaaaaaaaaaaaaaaaaaaaaaaaaaaaaaaaaaaaaaaaaaaaaaaaaaugcaucccccccccccccccccccccccccccccccaaaggcucuuuucagagccaccagaauu

SEQ ID NO: 375 - RNA, 1470 nt, Artificial Sequence
  mRNA Design a-1 (A64-N5-C30-hSL-N5) comprising derived and/or modified sequence from Pf(3D7)__XP_001351122.1__IgE_Pf-CSP(19-397) (opt1)
gggagagucccgcagucggcguccagcggcucugcuuguucgugugugugucguugcaggccuuauucaagcuuaccauggacuggaccuggauccuguuccucguggccgccgcgacccgcguccacagccuguuccaggaguaccagugcuacggcuccagcuccaacacgcgggugcugaacgagcucaacuacgacaacgccgggaccaaccuguacaacgagcuggagaugaacuacuacggcaagcaggagaacugguacagccucaagaagaacucccgcagccugggggagaacgacgacggcaacaacgaggacaacgagaagcugcggaagcccaagcacaagaagcucaagcagccggccgacgggaaccccgaccccaacgccaaccccaacguggacccgaacgccaaccccaacgucgaccccaacgcgaaccccaacguggacccgaacgccaaccccaacgccaaccccaacgccaaccccaacgcgaacccgaacgccaaccccaacgccaaccccaacgccaaccccaacgccaacccgaacgcgaaccccaacgccaaccccaacgccaaccccaacgccaacccgaacgccaaccccaacgcgaaccccaacgccaaccccaacgccaacccgaacgccaaccccaacguggaccccaacgccaaccccaacgcgaacccgaacgccaaccccaacgccaaccccaacgccaacccgaacgccaaccccaacgcgaaccccaacgccaaccccaacgccaacccgaacgccaaccccaacgcgaaccccaacgccaaccccaacgccaacccgaacgccaaccccaacgccaaccccaacgcgaaccccaacgccaacccgaacgccaaccccaacaagaacaaccagggcaacggccaggggcacaacaugcccaacgaccccaaccgcaacgucgacgagaacgccaacgccaacuccgcggugaagaacaacaacaacgaggagccgagcgacaagcacaucaaggaguaccugaacaagauccagaacucccugagcaccgaguggucccccugcagcgugaccugcggcaacgggauccagguccggaucaagcccggcuccgccaacaagcccaaggacgagcucgacuacgccaacgacaucgagaagaagaucugcaagauggagaagugcagcuccguguucaacguggucaacagcuccaucgggcugaucauggugcugagcuuccucuuccugaacugaggacuagucccuguucccagagcccacuuuuuuuucuuuuuuugaaauaaaauagccugucuuucagaucuaaaaaaaaaaaaaaaaaaaaaaaaaaaaaaaaaaaaaaaaaaaaaaaaaaaaaaaaaaaaaaaaugcaucccccccccccccccccccccccccccccccaaaggcucuuuucagagccaccagaauu

SEQ ID NO: 376 - RNA, 1635 nt, Artificial Sequence
  mRNA Design a-1 (A64-N5-C30-hSL-N5) comprising derived and/or modified sequence from Pf(3D7)__XP_001351122.1__Pf-CSP_L(G4SG4)_TM domain HA (opt1)
gggagagucccgcagucggcguccagcggcucugcuuguucgugugugugucguugcaggccuuauucaagcuuaccaugaugcgcaagcuggccauccucagcguguccagcuuccuguucgucgaggcccuguuccaggaguaccagugcuacggcuccagcuccaacacccgggugcucaacgagcugaacuacgacaacgcggggaccaaccuguacaacgagcucgagaugaacuacuacggcaagcaggagaacugguacagccugaagaagaacucccgcagccugggggagaacgacgacggcaacaacgaggacaacgagaagcuccggaagcccaagcacaagaagcugaagcagccggccgacgggaaccccgaccccaacgccaaccccaacguggacccgaacgccaaccccaacgucgaccccaacgccaaccccaacguggacccgaacgcgaaccccaacgccaaccccaacgccaaccccaacgccaacccgaacgcgaaccccaacgccaaccccaacgccaaccccaacgccaacccgaacgccaaccccaacgcgaaccccaacgccaaccccaacgccaacccgaacgccaaccccaacgccaaccccaacgcgaaccccaacgccaacccgaacgccaaccccaacguggaccccaacgccaaccccaacgccaacccgaacgcgaaccccaacgccaaccccaacgccaacccgaacgccaaccccaacgccaaccccaacgcgaaccccaacgccaacccgaacgccaaccccaacgccaaccccaacgcgaaccccaacgccaacccgaacgccaaccccaacgccaaccccaacgccaaccccaacgcgaacccgaacgccaaccccaacaagaacaaccagggcaacggccaggggcacaacaugcccaacgaccccaaccgcaacgucgacgagaacgccaacgccaacuccgccgugaagaacaacaacaacgaggagccgagcgacaagcacaucaaggaguaccugaacaagauccagaacucccucagcacggaguggucccccugcagcgugaccugcggcaacgggauccagguccggaucaagcccggcuccgcgaacaagcccaaggacgagcuggacuacgccaacgacaucgagaagaagaucugcaagauggagaagugcagcuccguguucaacguggucaacagcuccaucgggcugaucauggugcucagcuuccuguuccugaacggcggcgggggcagcgggggcggcgggaagcucgaguccacccgcaucuaccagauccuggccaucuacagcaccguggccuccagccugguccucguggugucccugggcgccaucagcuucuggaugugcuccaacgggagccugcagugccggaucugcaucugaggacuagucccuguucccagagcccacuuuuuuuucuuuuuuugaaauaaaauagccugucuuucagaucuaaaaaaaaaaaaaaaaaaaaaaaaaaaaaaaaaaaaaaaaaaaaaaaaaaaaaaaaaaaaaaaaugcaucccccccccccccccccccccccccccccccaaaggcucuuuucagagccaccagaauu

SEQ ID NO: 377 - RNA, 1509 nt, Artificial Sequence
  mRNA Design a-1 (A64-N5-C30-hSL-N5) comprising derived and/or modified sequence from Pf(3D7)__XP_001351122.1__Pf-CSP(199-377)_L(PVTN)_HBsAg (opt1)
gggagagucccgcagucggcguccagcggcucugcuuguucgugugugugucguugcaggccuuauucaagcuuaccauggaccccaacgccaacccgaacgccaaccccaacgcgaaccccaacgccaaccccaacgccaacccgaacgccaaccccaacgccaaccccaacgcgaaccccaacgccaacccgaacgccaaccccaacgccaaccccaacgcgaaccccaacgccaacccgaacgccaaccccaacgccaaccccaacgccaaccccaacgcgaacccgaacgccaaccccaacaagaacaaccagggcaacgggcagggccacaacaugcccaacgaccccaaccgcaacguggacgagaacgccaacgccaacagcgccgucaagaacaacaacaacgaggagccguccgacaagcacaucaaggaguaccugaacaagauccagaacagccucuccaccgaguggagccccugcuccgugaccugcgggaacggcauccaggugcggaucaagcccgggagcgcgaacaagcccaaggacgagcuggacuacgccaacgacaucgagaagaagaucugcaagauggagaagugcuccagcgucccggugacgaacauggagaacaucaccuccggcuuccugggcccccuccuggugcugcaggccggguucuuccuccugacccgcauccugaccaucccccagagccucgacuccugguggacgagccugaacuuccugggcgggucccccgucugccucggccagaacagccaguccccgaccagcaaccacucccccaccagcugcccgcccaucugccccggguaccgguggaugugccugcgccgguucaucaucuuccuguucauccuccugcugugccucaucuuccugcuggugcuccuggacuaccagggcaugcugcccgugugcccccucaucccgggcuccaccacgaccaacaccgggcccugcaagaccugcacgacccccgcccagggcaacagcauguuccccagcugcugcugcaccaagccgaccgacgggaacugcacgugcauccccauccccuccagcugggccuucgcgaaguaccugugggagugggccuccguccgcuucagcuggcugucccuccuggugcccuucgugcagugguucgucggccugagcccgaccguguggcucuccgccaucuggaugaugugguacuggggccccagccuguacuccaucgugagccccuucaucccccugcucccgaucuucuucugccugugggucuacaucugaggacuagucccuguucccagagcccacuuuuuuuucuuuuuuugaaauaaaauagccugucuuucagaucuaaaaaaaaaaaaaaaaaaaaaaaaaaaaaaaaaaaaaaaaaaaaaaaaaaaaaaaaaaaaaaaaugcaucccccccccccccccccccccccccccccccaaaggcucuuuucagagccaccagaauu

SEQ ID NO: 378 - RNA, 1551 nt, Artificial Sequence
  mRNA Design a-1 (A64-N5-C30-hSL-N5) comprising derived and/or modified sequence from Pf(3D7)__XP_001351122.1__Pf-CSP(199-387)_L(PVTN)_HBsAg (opt1)
gggagagucccgcagucggcguccagcggcucugcuuguucgugugugugucguugcaggccuuauucaagcuuaccaugauggcccccgacccgaacgccaaccccaacgcgaaccccaacgccaaccccaacgccaacccgaacgccaaccccaacgccaaccccaacgcgaaccccaacgccaacccgaacgccaaccccaacgccaaccccaacgcgaaccccaacgccaacccgaacgccaaccccaacgccaaccccaacgccaaccccaacgcgaacccgaacgccaaccccaacgccaaccccaacaagaacaaccagggcaacgggcagggccacaacaugcccaacgacccgaaccgcaacguggacgagaacgccaacgccaacagcgcggucaagaacaacaacaacgaggagcccuccgacaagcacaucaaggaguaccugaacaagauccagaacagccucuccaccgaguggagccccugcuccgugaccugcgggaacggcauccaggugcggaucaagcccgggagcgccaacaagccgaaggacgagcuggacuacgccaacgacaucgagaagaagaucugcaagauggagaagugcuccagcgucuucaacguggugaacuccagcaucggccugggccccgucacgaacauggagaacaucaccuccggguuccucggcccccugcuggugcuccaggccggguucuuccugcugacccgcauccucaccaucccccagagccuggacuccugguggacgagccugaacuuccucggcggguccccggugugccugggccagaacagccagucccccaccagcaaccacucccccaccagcugcccgcccaucugccccggcuaccgguggaugugccugcgccgguucaucaucuuccucuucauccugcugcucugccugaucuuccugcucguccugcuggacuaccaggggaugcuccccgugugcccgcugauccccggcagcaccacgaccaacaccgggcccugcaagaccugcacgacccccgcccagggcaacuccauguucccgagcugcugcugcaccaagcccaccgacggcaacugcacgugcauccccauccccuccagcugggcguucgccaaguaccugugggagugggccuccgugcgcuucagcuggcucucccugcuggucccguucgugcagugguucguggggcucagccccaccgucuggcuguccgccaucuggaugaugugguacuggggccccagccuguacuccaucgugagccccuucaucccgcuccugcccaucuucuucugccuguggguguacaucugaggacuagucccuguucccagagcccacuuuuuuuucuuuuuuugaaauaaaauagccugucuuucagaucuaaaaaaaaaaaaaaaaaaaaaaaaaaaaaaaaaaaaaaaaaaaaaaaaaaaaaaaaaaaaaaaaugcaucccccccccccccccccccccccccccccccaaaggcucuuuucagagccaccagaauu

SEQ ID NO: 379 - RNA, 735 nt, Artificial Sequence
  mRNA Design a-1 (A64-N5-C30-hSL-N5) comprising derived and/or modified sequence from Pf(3D7)__XP_001351122.1__HsALB_Pf-CSP(19-152) (opt1)
gggagagucccgcagucggcguccagcggcucugcuuguucgugugugugucguugcaggccuuauucaagcuuaccaugaagugggugaccuucaucagccuccuguuccuguucuccagcgccuacucccuguuccaggaguaccagugcuacggcagcuccagcaacacccgcguccucaacgagcugaacuacgacaacgccgggacgaaccuguacaacgagcucgagaugaacuacuacggcaagcaggagaacugguacucccugaagaagaacagccggucccugggggagaacgacgacggcaacaacgaggacaacgagaagcuccgcaagcccaagcacaagaagcugaagcagccggcggacgggaaccccgaccccaacgccaaccccaacguggacccgaacgccaaccccaacguggaccccaacgccaaccccaacgucgacccgaacgccaaccccaacgcgaaccccaacgccaaccccaacgccaacccgaacgccaaccccaacgcgaaccccugaggacuagucccuguucccagagcccacuuuuuuuucuuuuuuugaaauaaaauagccugucuuucagaucuaaaaaaaaaaaaaaaaaaaaaaaaaaaaaaaaaaaaaaaaaaaaaaaaaaaaaaaaaaaaaaaaugcaucccccccccccccccccccccccccccccccaaaggcucuuuucagagccaccagaauu

SEQ ID NO: 380 - RNA, 855 nt, Artificial Sequence
  mRNA Design a-1 (A64-N5-C30-hSL-N5) comprising derived and/or modified sequence from Pf(3D7)__XP_001351122.1__HsALB_Pf-CSP(19-192) (opt1)
gggagagucccgcagucggcguccagcggcucugcuuguucgugugugugucguugcaggccuuauucaagcuuaccaugaagugggugaccuucaucagccuccuguuccuguucuccagcgccuacucccuguuccaggaguaccagugcuacggcagcuccagcaacacccgcguccucaacgagcugaacuacgacaacgccgggacgaaccuguacaacgagcucgagaugaacuacuacggcaagcaggagaacugguacucccugaagaagaacagccggucccugggggagaacgacgacggcaacaacgaggacaacgagaagcuccgcaagcccaagcacaagaagcugaagcagccggcggacgggaaccccgaccccaacgccaaccccaacguggacccgaacgccaaccccaacguggaccccaacgccaaccccaacgucgacccgaacgccaaccccaacgcgaaccccaacgccaaccccaacgccaacccgaacgccaaccccaacgcgaaccccaacgccaaccccaacgccaacccgaacgccaaccccaacgccaaccccaacgcgaaccccaacgccaacccgaacgccaaccccaacgccaaccccaacgccaaccccaacgcgaacccgugaggacuagucccuguucccagagcccacuuuuuuuucuuuuuuugaaauaaaauagccugucuuucagaucuaaaaaaaaaaaaaaaaaaaaaaaaaaaaaaaaaaaaaaaaaaaaaaaaaaaaaaaaaaaaaaaaugcaucccccccccccccccccccccccccccccccaaaggcucuuuucagagccaccagaauu

SEQ ID NO: 381 - RNA, 1095 nt, Artificial Sequence
  mRNA Design a-1 (A64-N5-C30-hSL-N5) comprising derived and/or modified sequence from Pf(3D7)__XP_001351122.1__HsALB_Pf-CSP(19-272) (opt1)
gggagagucccgcagucggcguccagcggcucugcuuguucgugugugugucguugcaggccuuauucaagcuuaccaugaagugggugaccuucaucagccuccuguuccuguucuccagcgccuacucccuguuccaggaguaccagugcuacggcagcuccagcaacacccgcguccucaacgagcugaacuacgacaacgccgggacgaaccuguacaacgagcucgagaugaacuacuacggcaagcaggagaacugguacucccugaagaagaacagccggucccugggggagaacgacgacggcaacaacgaggacaacgagaagcuccgcaagcccaagcacaagaagcugaagcagccggcggacgggaaccccgaccccaacgccaaccccaacguggacccgaacgccaaccccaacguggaccccaacgccaaccccaacgucgacccgaacgccaaccccaacgcgaaccccaacgccaaccccaacgccaacccgaacgccaaccccaacgcgaaccccaacgccaaccccaacgccaacccgaacgccaaccccaacgccaaccccaacgcgaaccccaacgccaacccgaacgccaaccccaacgccaaccccaacgccaaccccaacgcgaacccgaacgccaaccccaacguggaccccaacgccaaccccaacgccaacccgaacgccaaccccaacgcgaaccccaacgccaacccgaacgccaaccccaacgccaaccccaacgccaaccccaacgcgaacccgaacgccaaccccaacgccaaccccaacgccaaccccaacgcgaacccgaacgccaaccccaacgccaaccccaacgccaaccccaacgccaacccgaacgcgaaccccugaggacuagucccuguucccagagcccacuuuuuuuucuuuuuuugaaauaaaauagccugucuuucagaucuaaaaaaaaaaaaaaaaaaaaaaaaaaaaaaaaaaaaaaaaaaaaaaaaaaaaaaaaaaaaaaaaugcaucccccccccccccccccccccccccccccccaaaggcucuuuucagagccaccagaauu

SEQ ID NO: 382 - RNA, 1257 nt, Artificial Sequence
  mRNA Design a-1 (A64-N5-C30-hSL-N5) comprising derived and/or modified sequence from Pf(3D7)__XP_001351122.1__HsALB_Pf-CSP(19-272)_L(AAY)_Pf-CSP(310-3 27)_L(AAY)_Pf-CSP(346-375) (opt1)
gggagagucccgcagucggcguccagcggcucugcuuguucgugugugugucguugcaggccuuauucaagcuuaccaugaagugggugaccuucaucagccuccuguuccuguucuccagcgccuacucccuguuccaggaguaccagugcuacggcagcuccagcaacacccgcguccucaacgagcugaacuacgacaacgccgggacgaaccuguacaacgagcucgagaugaacuacuacggcaagcaggagaacugguacucccugaagaagaacagccggucccugggggagaacgacgacggcaacaacgaggacaacgagaagcuccgcaagcccaagcacaagaagcugaagcagccggcggacgggaaccccgaccccaacgccaaccccaacguggacccgaacgccaaccccaacguggaccccaacgccaaccccaacgucgacccgaacgccaaccccaacgcgaaccccaacgccaaccccaacgccaacccgaacgccaaccccaacgcgaaccccaacgccaaccccaacgccaacccgaacgccaaccccaacgccaaccccaacgcgaaccccaacgccaacccgaacgccaaccccaacgccaaccccaacgccaaccccaacgcgaacccgaacgccaaccccaacguggaccccaacgccaaccccaacgccaacccgaacgccaaccccaacgcgaaccccaacgccaacccgaacgccaaccccaacgccaaccccaacgccaaccccaacgcgaacccgaacgccaaccccaacgccaaccccaacgccaaccccaacgcgaacccgaacgccaaccccaacgccaaccccaacgccaaccccaacgccaacccgaacgcgaaccccgccgccuacgagcccagcgacaagcacaucaaggaguaccugaacaagauccagaacucccucgccgccuacaucaagcccggcagcgcgaacaagccgaaggacgagcuggacuacgccaacgacaucgagaagaagaucugcaagauggagaagugcuccugaggacuagucccuguucccagagcccacuuuuuuuucuuuuuuugaaauaaaauagccugucuuucagaucuaaaaaaaaaaaaaaaaaaaaaaaaaaaaaaaaaaaaaaaaaaaaaaaaaaaaaaaaaaaaaaaaugcaucccccccccccccccccccccccccccccccaaaggcucuuuucagagccaccagaauu

SEQ ID NO: 383 - RNA, 1218 nt, Artificial Sequence
  mRNA Design a-1 (A64-N5-C30-hSL-N5) comprising derived and/or modified sequence from Pf(3D7)__XP_001351122.1__HsALB_Pf-CSP(19-272)_L(AAY)_Pf-CSP(346-3 65)_L(AAY)_P2 (opt1)
gggagagucccgcagucggcguccagcggcucugcuuguucgugugugugucguugcaggccuuauucaagcuuaccaugaagugggugaccuucaucagccuccuguuccuguucuccagcgccuacucccuguuccaggaguaccagugcuacggcagcuccagcaacacccgcguccucaacgagcugaacuacgacaacgccgggacgaaccuguacaacgagcucgagaugaacuacuacggcaagcaggagaacugguacucccugaagaagaacagccggucccugggggagaacgacgacggcaacaacgaggacaacgagaagcuccgcaagcccaagcacaagaagcugaagcagccggcggacgggaaccccgaccccaacgccaaccccaacguggacccgaacgccaaccccaacguggaccccaacgccaaccccaacgucgacccgaacgccaaccccaacgcgaaccccaacgccaaccccaacgccaacccgaacgccaaccccaacgcgaaccccaacgccaaccccaacgccaacccgaacgccaaccccaacgccaaccccaacgcgaaccccaacgccaacccgaacgccaaccccaacgccaaccccaacgccaaccccaacgcgaacccgaacgccaaccccaacguggaccccaacgccaaccccaacgccaacccgaacgccaaccccaacgcgaaccccaacgccaacccgaacgccaaccccaacgccaaccccaacgccaaccccaacgcgaacccgaacgccaaccccaacgccaaccccaacgccaaccccaacgcgaacccgaacgccaaccccaacgccaaccccaacgccaaccccaacgccaacccgaacgcgaaccccgccgccuacaucaagcccggcagcgccaacaagcccaaggacgagcuggacuacgccaacgacaucgaggcggccuaccaguacaucaaggccaacuccaaguucaucggcaucaccgagcucugaggacuagucccuguucccagagcccacuuuuuuuucuuuuuuugaaauaaaauagccugucuuucagaucuaaaaaaaaaaaaaaaaaaaaaaaaaaaaaaaaaaaaaaaaaaaaaaaaaaaaaaaaaaaaaaaaugcaucccccccccccccccccccccccccccccccaaaggcucuuuucagagccaccagaauu

SEQ ID NO: 384 - RNA, 1212 nt, Artificial Sequence
  mRNA Design a-1 (A64-N5-C30-hSL-N5) comprising derived and/or modified sequence from Pf(3D7)__XP_001351122.1__HsALB_Pf-CSP(19-272)_L(AAY)_Pf-CSP(346-3 65)_L(AAY)_PADRE (opt1)
gggagagucccgcagucggcguccagcggcucugcuuguucgugugugugucguugcaggccuuauucaagcuuaccaugaagugggugaccuucaucagccuccuguuccuguucuccagcgccuacucccuguuccaggaguaccagugcuacggcagcuccagcaacacccgcguccucaacgagcugaacuacgacaacgccgggacgaaccuguacaacgagcucgagaugaacuacuacggcaagcaggagaacugguacucccugaagaagaacagccggucccugggggagaacgacgacggcaacaacgaggacaacgagaagcuccgcaagcccaagcacaagaagcugaagcagccggcggacgggaaccccgaccccaacgccaaccccaacguggacccgaacgccaaccccaacguggaccccaacgccaaccccaacgucgacccgaacgccaaccccaacgcgaaccccaacgccaaccccaacgccaacccgaacgccaaccccaacgcgaaccccaacgccaaccccaacgccaacccgaacgccaaccccaacgccaaccccaacgcgaaccccaacgccaacccgaacgccaaccccaacgccaaccccaacgccaaccccaacgcgaacccgaacgccaaccccaacguggaccccaacgccaaccccaacgccaacccgaacgccaaccccaacgcgaaccccaacgccaacccgaacgccaaccccaacgccaaccccaacgccaaccccaacgcgaacccgaacgccaaccccaacgccaaccccaacgccaaccccaacgcgaacccgaacgccaaccccaacgccaaccccaacgccaaccccaacgccaacccgaacgcgaaccccgccgccuacaucaagcccggcagcgccaacaagcccaaggacgagcuggacuacgccaacgacaucgaggcggccuacgccaaguucguggccgccuggacccucaaggcggccgccugaggacuagucccuguucccagagcccacuuuuuuuucuuuuuuugaaauaaaauagccugucuuucagaucuaaaaaaaaaaaaaaaaaaaaaaaaaaaaaaaaaaaaaaaaaaaaaaaaaaaaaaaaaaaaaaaaugcaucccccccccccccccccccccccccccccccaaaggcucuuuucagagccaccagaauu

SEQ ID NO: 385 - RNA, 1269 nt, Artificial Sequence
  mRNA Design a-1 (A64-N5-C30-hSL-N5) comprising derived and/or modified sequence from Pf(3D7)__XP_001351122.1__HsALB_Pf-CSP(19-272)_L(G4S)_Pf-CSP(310-3 27)_L(G4S)_Pf-CSP(346-375) (opt1)
gggagagucccgcagucggcguccagcggcucugcuuguucgugugugugucguugcaggccuuauucaagcuuaccaugaagugggugaccuucaucagccuccuguuccuguucuccagcgccuacucccuguuccaggaguaccagugcuacggcagcuccagcaacacccgcguccucaacgagcugaacuacgacaacgccgggacgaaccuguacaacgagcucgagaugaacuacuacggcaagcaggagaacugguacucccugaagaagaacagccggucccugggggagaacgacgacggcaacaacgaggacaacgagaagcuccgcaagcccaagcacaagaagcugaagcagccggcggacgggaaccccgaccccaacgccaaccccaacguggacccgaacgccaaccccaacguggaccccaacgccaaccccaacgucgacccgaacgccaaccccaacgcgaaccccaacgccaaccccaacgccaacccgaacgccaaccccaacgcgaaccccaacgccaaccccaacgccaacccgaacgccaaccccaacgccaaccccaacgcgaaccccaacgccaacccgaacgccaaccccaacgccaaccccaacgccaaccccaacgcgaacccgaacgccaaccccaacguggaccccaacgccaaccccaacgccaacccgaacgccaaccccaacgcgaaccccaacgccaacccgaacgccaaccccaacgccaaccccaacgccaaccccaacgcgaacccgaacgccaaccccaacgccaaccccaacgccaaccccaacgcgaacccgaacgccaaccccaacgccaaccccaacgccaaccccaacgccaacccgaacgcgaaccccggcggcgggggcagcgagcccuccgacaagcacaucaaggaguaccugaacaagauccagaacagccucgggggcgggggcuccaucaagcccggcagcgccaacaagccgaaggacgagcuggacuacgccaacgacaucgagaagaagaucugcaagauggagaagugcuccugaggacuagucccuguucccagagcccacuuuuuuuucuuuuuuugaaauaaaauagccugucuuucagaucuaaaaaaaaaaaaaaaaaaaaaaaaaaaaaaaaaaaaaaaaaaaaaaaaaaaaaaaaaaaaaaaaugcaucccccccccccccccccccccccccccccccaaaggcucuuuucagagccaccagaauu

SEQ ID NO: 386 - RNA, 1254 nt, Artificial Sequence
  mRNA Design a-1 (A64-N5-C30-hSL-N5) comprising derived and/or modified sequence from Pf(3D7)__XP_001351122.1__HsALB_Pf-CSP(19-272)_L(G4S)_Pf-CSP(310-3 27)_Pf-CSP(346-375) (opt1)
gggagagucccgcagucggcguccagcggcucugcuuguucgugugugugucguugcaggccuuauucaagcuuaccaugaagugggugaccuucaucagccuccuguuccuguucuccagcgccuacucccuguuccaggaguaccagugcuacggcagcuccagcaacacccgcguccucaacgagcugaacuacgacaacgccgggacgaaccuguacaacgagcucgagaugaacuacuacggcaagcaggagaacugguacucccugaagaagaacagccggucccugggggagaacgacgacggcaacaacgaggacaacgagaagcuccgcaagcccaagcacaagaagcugaagcagccggcggacgggaaccccgaccccaacgccaaccccaacguggacccgaacgccaaccccaacguggaccccaacgccaaccccaacgucgacccgaacgccaaccccaacgcgaaccccaacgccaaccccaacgccaacccgaacgccaaccccaacgcgaaccccaacgccaaccccaacgccaacccgaacgccaaccccaacgccaaccccaacgcgaaccccaacgccaacccgaacgccaaccccaacgccaaccccaacgccaaccccaacgcgaacccgaacgccaaccccaacguggaccccaacgccaaccccaacgccaacccgaacgccaaccccaacgcgaaccccaacgccaacccgaacgccaaccccaacgccaaccccaacgccaaccccaacgcgaacccgaacgccaaccccaacgccaaccccaacgccaaccccaacgcgaacccgaacgccaaccccaacgccaaccccaacgccaaccccaacgccaacccgaacgcgaaccccggcggcgggggcagcgagcccuccgacaagcacaucaaggaguaccugaacaagauccagaacagccucaucaagcccggguccgccaacaagccgaaggacgagcuggacuacgccaacgacaucgagaagaagaucugcaagauggagaagugcagcugaggacuagucccuguucccagagcccacuuuuuuuucuuuuuuugaaauaaaauagccugucuuucagaucuaaaaaaaaaaaaaaaaaaaaaaaaaaaaaaaaaaaaaaaaaaaaaaaaaaaaaaaaaaaaaaaaugcaucccccccccccccccccccccccccccccccaaaggcucuuuucagagccaccagaauu

SEQ ID NO: 387 - RNA, 1254 nt, Artificial Sequence
  mRNA Design a-1 (A64-N5-C30-hSL-N5) comprising derived and/or modified sequence from Pf(3D7)__XP_001351122.1__HsALB_Pf-CSP(19-325) (opt1)
gggagagucccgcagucggcguccagcggcucugcuuguucgugugugugucguugcaggccuuauucaagcuuaccaugaagugggugaccuucaucagccuccuguuccuguucuccagcgccuacucccuguuccaggaguaccagugcuacggcagcuccagcaacacccgcguccucaacgagcugaacuacgacaacgccgggacgaaccuguacaacgagcucgagaugaacuacuacggcaagcaggagaacugguacucccugaagaagaacagccggucccugggggagaacgacgacggcaacaacgaggacaacgagaagcuccgcaagcccaagcacaagaagcugaagcagccggcggacgggaaccccgaccccaacgccaaccccaacguggacccgaacgccaaccccaacguggaccccaacgccaaccccaacgucgacccgaacgccaaccccaacgcgaaccccaacgccaaccccaacgccaacccgaacgccaaccccaacgcgaaccccaacgccaaccccaacgccaacccgaacgccaaccccaacgccaaccccaacgcgaaccccaacgccaacccgaacgccaaccccaacgccaaccccaacgccaaccccaacgcgaacccgaacgccaaccccaacguggaccccaacgccaaccccaacgccaacccgaacgccaaccccaacgcgaaccccaacgccaacccgaacgccaaccccaacgccaaccccaacgccaaccccaacgcgaacccgaacgccaaccccaacgccaaccccaacgccaaccccaacgcgaacccgaacgccaaccccaacgccaaccccaacgccaaccccaacgccaacccgaacgcgaaccccaacaagaacaaccagggcaacggccaggggcacaacaugcccaacgaccccaaccggaacguggacgagaacgccaacgccaacagcgccgucaagaacaacaacaacgaggagccguccgacaagcacaucaaggaguaccugaacaagauccagaacugaggacuagucccuguucccagagcccacuuuuuuuucuuuuuuugaaauaaaauagccugucuuucagaucuaaaaaaaaaaaaaaaaaaaaaaaaaaaaaaaaaaaaaaaaaaaaaaaaaaaaaaaaaaaaaaaaugcaucccccccccccccccccccccccccccccccaaaggcucuuuucagagccaccagaauu

SEQ ID NO: 388 - RNA, 1431 nt, Artificial Sequence
  mRNA Design a-1 (A64-N5-C30-hSL-N5) comprising derived and/or modified sequence from Pf(3D7)__XP_001351122.1__HsALB_Pf-CSP(19-384) (opt1)
gggagagucccgcagucggcguccagcggcucugcuuguucgugugugugucguugcaggccuuauucaagcuuaccaugaagugggugaccuucaucagccuccuguuccuguucuccagcgccuacucccuguuccaggaguaccagugcuacggcagcuccagcaacacccgcguccucaacgagcugaacuacgacaacgccgggacgaaccuguacaacgagcucgagaugaacuacuacggcaagcaggagaacugguacucccugaagaagaacagccggucccugggggagaacgacgacggcaacaacgaggacaacgagaagcuccgcaagcccaagcacaagaagcugaagcagccggcggacgggaaccccgaccccaacgccaaccccaacguggacccgaacgccaaccccaacguggaccccaacgccaaccccaacgucgacccgaacgccaaccccaacgcgaaccccaacgccaaccccaacgccaacccgaacgccaaccccaacgcgaaccccaacgccaaccccaacgccaacccgaacgccaaccccaacgccaaccccaacgcgaaccccaacgccaacccgaacgccaaccccaacgccaaccccaacgccaaccccaacgcgaacccgaacgccaaccccaacguggaccccaacgccaaccccaacgccaacccgaacgccaaccccaacgcgaaccccaacgccaacccgaacgccaaccccaacgccaaccccaacgccaaccccaacgcgaacccgaacgccaaccccaacgccaaccccaacgccaaccccaacgcgaacccgaacgccaaccccaacgccaaccccaacgccaaccccaacgccaacccgaacgcgaaccccaacaagaacaaccagggcaacggccaggggcacaacaugcccaacgaccccaaccggaacguggacgagaacgccaacgccaacagcgccgucaagaacaacaacaacgaggagccguccgacaagcacaucaaggaguaccugaacaagauccagaacagccucuccaccgaguggagccccugcuccgugaccugcggcaacgggauccaggugcgcaucaagcccggcagcgccaacaagcccaaggacgagcuggacuacgcgaacgacaucgagaagaagaucugcaagauggagaagugcuccagcgucuucaacguggugaacuccagcugaggacuagucccuguucccagagcccacuuuuuuuucuuuuuuugaaauaaaauagccugucuuucagaucuaaaaaaaaaaaaaaaaaaaaaaaaaaaaaaaaaaaaaaaaaaaaaaaaaaaaaaaaaaaaaaaaugcaucccccccccccccccccccccccccccccccaaaggcucuuuucagagccaccagaauu

SEQ ID NO: 389 - RNA, 1569 nt, Artificial Sequence
  mRNA Design a-1 (A64-N5-C30-hSL-N5) comprising derived and/or modified sequence from Pf(3D7)__XP_001351122.1__HsALB_Pf-CSP(19-384)_TM domain HA (opt1)
gggagagucccgcagucggcguccagcggcucugcuuguucgugugugugucguugcaggccuuauucaagcuuaccaugaagugggugaccuucaucagccuccuguuccuguucuccagcgccuacucccuguuccaggaguaccagugcuacggcagcuccagcaacacccgcguccucaacgagcugaacuacgacaacgccgggacgaaccuguacaacgagcucgagaugaacuacuacggcaagcaggagaacugguacucccugaagaagaacagccggucccugggggagaacgacgacggcaacaacgaggacaacgagaagcuccgcaagcccaagcacaagaagcugaagcagccggcggacgggaaccccgaccccaacgccaaccccaacguggacccgaacgccaaccccaacguggaccccaacgccaaccccaacgucgacccgaacgccaaccccaacgcgaaccccaacgccaaccccaacgccaacccgaacgccaaccccaacgcgaaccccaacgccaaccccaacgccaacccgaacgccaaccccaacgccaaccccaacgcgaaccccaacgccaacccgaacgccaaccccaacgccaaccccaacgccaaccccaacgcgaacccgaacgccaaccccaacguggaccccaacgccaaccccaacgccaacccgaacgccaaccccaacgcgaaccccaacgccaacccgaacgccaaccccaacgccaaccccaacgccaaccccaacgcgaacccgaacgccaaccccaacgccaaccccaacgccaaccccaacgcgaacccgaacgccaaccccaacgccaaccccaacgccaaccccaacgccaacccgaacgcgaaccccaacaagaacaaccagggcaacggccaggggcacaacaugcccaacgaccccaaccggaacguggacgagaacgccaacgccaacagcgccgucaagaacaacaacaacgaggagccguccgacaagcacaucaaggaguaccugaacaagauccagaacagccucuccaccgaguggagccccugcuccgugaccugcggcaacgggauccaggugcgcaucaagcccggcagcgccaacaagcccaaggacgagcuggacuacgcgaacgacaucgagaagaagaucugcaagauggagaagugcuccagcgucuucaacguggugaacuccagcaagcuggagagcacccggaucuaccagauccucgccaucuacuccacggucgccagcucccuggugcugguggucagccucggggccaucuccuucuggaugugcagcaacggcucccugcagugccgcaucugcaucugaggacuagucccuguucccagagcccacuuuuuuuucuuuuuuugaaauaaaauagccugucuuucagaucuaaaaaaaaaaaaaaaaaaaaaaaaaaaaaaaaaaaaaaaaaaaaaaaaaaaaaaaaaaaaaaaaugcaucccccccccccccccccccccccccccccccaaaggcucuuuucagagccaccagaauu

SEQ ID NO: 390 - RNA, 1281 nt, Artificial Sequence
  mRNA Design a-1 (A64-N5-C30-hSL-N5) comprising derived and/or modified sequence from Pf(3D7)__XP_001351122.1__HsALB_Pf-CSP(82-397) (opt1)
gggagagucccgcagucggcguccagcggcucugcuuguucgugugugugucguugcaggccuuauucaagcuuaccaugaagugggugaccuucaucagccuccuguuccuguucuccagcgccuacuccgacaacgagaagcugcgcaagcccaagcacaagaagcucaagcagccggccgacggcaaccccgaccccaacgcgaaccccaacgucgacccgaacgccaaccccaacguggaccccaacgccaaccccaacguggacccgaacgccaaccccaacgccaaccccaacgcgaaccccaacgccaacccgaacgccaaccccaacgccaaccccaacgcgaaccccaacgccaacccgaacgccaaccccaacgccaaccccaacgccaaccccaacgcgaacccgaacgccaaccccaacgccaaccccaacgccaaccccaacgccaacccgaacgcgaaccccaacgucgaccccaacgccaaccccaacgccaacccgaacgccaaccccaacgccaaccccaacgcgaacccgaacgccaaccccaacgccaaccccaacgccaaccccaacgccaacccgaacgcgaaccccaacgccaaccccaacgccaaccccaacgccaacccgaacgcgaaccccaacgccaaccccaacgccaaccccaacgccaacccgaacgccaaccccaacaagaacaaccaggggaacggccaggggcacaacaugcccaacgaccccaaccggaacguggacgagaacgcgaacgccaacagcgccgugaagaacaacaacaacgaggagccguccgacaagcacaucaaggaguaccugaacaagauccagaacagccuguccaccgaguggagccccugcuccgucacgugcggcaacgggauccaggugcgcaucaagcccggcagcgccaacaagcccaaggacgagcucgacuacgccaacgacaucgagaagaagaucugcaagauggagaagugcuccagcguguucaacgucgugaacuccagcaucggccugaucauggugcuguccuuccucuuccugaacugaggacuagucccuguucccagagcccacuuuuuuuucuuuuuuugaaauaaaauagccugucuuucagaucuaaaaaaaaaaaaaaaaaaaaaaaaaaaaaaaaaaaaaaaaaaaaaaaaaaaaaaaaaaaaaaaaugcaucccccccccccccccccccccccccccccccaaaggcucuuuucagagccaccagaauu

SEQ ID NO: 391 - RNA, 633 nt, Artificial Sequence
  mRNA Design a-1 (A64-N5-C30-hSL-N5) comprising derived and/or modified sequence from Pf(3D7)__XP_001351122.1__HsALB_Pf-CSP(93-192) (opt1)
gggagagucccgcagucggcguccagcggcucugcuuguucgugugugugucguugcaggccuuauucaagcuuaccaugaagugggugaccuucaucagccuccuguuccuguucuccagcgccuacuccaagcugaagcagcccgccgacggcaacccggaccccaacgcgaaccccaacgucgaccccaacgccaacccgaacguggaccccaacgccaaccccaacguggaccccaacgccaacccgaacgccaaccccaacgcgaaccccaacgccaaccccaacgccaacccgaacgccaaccccaacgcgaaccccaacgccaaccccaacgccaacccgaacgccaaccccaacgccaaccccaacgcgaaccccaacgccaacccgaacgccaaccccaacgccaaccccaacgccaaccccugaggacuagucccuguucccagagcccacuuuuuuuucuuuuuuugaaauaaaauagccugucuuucagaucuaaaaaaaaaaaaaaaaaaaaaaaaaaaaaaaaaaaaaaaaaaaaaaaaaaaaaaaaaaaaaaaaugcaucccccccccccccccccccccccccccccccaaaggcucuuuucagagccaccagaauu

SEQ ID NO: 392 - RNA, 873 nt, Artificial Sequence
  mRNA Design a-1 (A64-N5-C30-hSL-N5) comprising derived and/or modified sequence from Pf(3D7)__XP_001351122.1__HsALB_Pf-CSP(93-272) (opt1)
gggagagucccgcagucggcguccagcggcucugcuuguucgugugugugucguugcaggccuuauucaagcuuaccaugaagugggugaccuucaucagccuccuguuccuguucuccagcgccuacuccaagcugaagcagcccgccgacggcaacccggaccccaacgcgaaccccaacgucgaccccaacgccaacccgaacguggaccccaacgccaaccccaacguggaccccaacgccaacccgaacgccaaccccaacgcgaaccccaacgccaaccccaacgccaacccgaacgccaaccccaacgcgaaccccaacgccaaccccaacgccaacccgaacgccaaccccaacgccaaccccaacgcgaaccccaacgccaacccgaacgccaaccccaacgccaaccccaacgccaaccccaacgcgaacccgaacgucgaccccaacgccaaccccaacgccaaccccaacgccaacccgaacgccaaccccaacgcgaaccccaacgccaacccgaacgccaaccccaacgccaaccccaacgccaaccccaacgcgaacccgaacgccaaccccaacgccaaccccaacgccaaccccaacgcgaacccgaacgccaaccccaacgccaaccccaacgccaaccccaacgccaacccgugaggacuagucccuguucccagagcccacuuuuuuuucuuuuuuugaaauaaaauagccugucuuucagaucuaaaaaaaaaaaaaaaaaaaaaaaaaaaaaaaaaaaaaaaaaaaaaaaaaaaaaaaaaaaaaaaaugcaucccccccccccccccccccccccccccccccaaaggcucuuuucagagccaccagaauu

SEQ ID NO: 393 - RNA, 1248 nt, Artificial Sequence
  mRNA Design a-1 (A64-N5-C30-hSL-N5) comprising derived and/or modified sequence from Pf(3D7)__XP_001351122.1__HsALB_Pf-CSP(93-397) (opt1)
gggagagucccgcagucggcguccagcggcucugcuuguucgugugugugucguugcaggccuuauucaagcuuaccaugaagugggugaccuucaucagccuccuguuccuguucuccagcgccuacuccaagcugaagcagcccgccgacggcaacccggaccccaacgcgaaccccaacgucgaccccaacgccaacccgaacguggaccccaacgccaaccccaacguggaccccaacgccaacccgaacgccaaccccaacgcgaaccccaacgccaaccccaacgccaacccgaacgccaaccccaacgcgaaccccaacgccaaccccaacgccaacccgaacgccaaccccaacgccaaccccaacgcgaaccccaacgccaacccgaacgccaaccccaacgccaaccccaacgccaaccccaacgcgaacccgaacgucgaccccaacgccaaccccaacgccaaccccaacgccaacccgaacgccaaccccaacgcgaaccccaacgccaacccgaacgccaaccccaacgccaaccccaacgccaaccccaacgcgaacccgaacgccaaccccaacgccaaccccaacgccaaccccaacgcgaacccgaacgccaaccccaacgccaaccccaacgccaaccccaacgccaacccgaacaagaacaaccaggggaacggccaggggcacaacaugcccaacgaccccaaccgcaacguggacgagaacgcgaacgccaacagcgccgugaagaacaacaacaacgaggagcccuccgacaagcacaucaaggaguaccucaacaagauccagaacagccuguccaccgaguggagcccgugcuccgucacgugcggcaacgggauccaggugcggaucaagcccggcagcgccaacaagcccaaggacgagcuggacuacgccaacgacaucgagaagaagaucugcaagauggagaagugcuccagcguguucaacgucgugaacuccagcaucggccucaucauggugcuguccuuccuguuccucaacugaggacuagucccuguucccagagcccacuuuuuuuucuuuuuuugaaauaaaauagccugucuuucagaucuaaaaaaaaaaaaaaaaaaaaaaaaaaaaaaaaaaaaaaaaaaaaaaaaaaaaaaaaaaaaaaaaugcaucccccccccccccccccccccccccccccccaaaggcucuuuucagagccaccagaauu

SEQ ID NO: 394 - RNA, 618 nt, Artificial Sequence
  mRNA Design a-1 (A64-N5-C30-hSL-N5) comprising derived and/or modified sequence from Pf(3D7)__XP_001351122.1__HsALB_Pf-CSP(98-192) (opt1)
gggagagucccgcagucggcguccagcggcucugcuuguucgugugugugucguugcaggccuuauucaagcuuaccaugaagugggugaccuucaucagccuccuguuccuguucuccagcgccuacuccgccgacggcaaccccgacccgaacgcgaaccccaacgucgaccccaacgccaaccccaacguggacccgaacgccaaccccaacguggaccccaacgccaaccccaacgccaacccgaacgcgaaccccaacgccaaccccaacgccaaccccaacgccaacccgaacgcgaaccccaacgccaaccccaacgccaaccccaacgccaacccgaacgccaaccccaacgcgaaccccaacgccaaccccaacgccaacccgaacgccaaccccaacgccaaccccugaggacuagucccuguucccagagcccacuuuuuuuucuuuuuuugaaauaaaauagccugucuuucagaucuaaaaaaaaaaaaaaaaaaaaaaaaaaaaaaaaaaaaaaaaaaaaaaaaaaaaaaaaaaaaaaaaugcaucccccccccccccccccccccccccccccccaaaggcucuuuucagagccaccagaauu

SEQ ID NO: 395 - RNA, 858 nt, Artificial Sequence
  mRNA Design a-1 (A64-N5-C30-hSL-N5) comprising derived and/or modified sequence from Pf(3D7)__XP_001351122.1__HsALB_Pf-CSP(98-272) (opt1)
gggagagucccgcagucggcguccagcggcucugcuuguucgugugugugucguugcaggccuuauucaagcuuaccaugaagugggugaccuucaucagccuccuguuccuguucuccagcgccuacuccgccgacggcaaccccgacccgaacgcgaaccccaacgucgaccccaacgccaaccccaacguggacccgaacgccaaccccaacguggaccccaacgccaaccccaacgccaacccgaacgcgaaccccaacgccaaccccaacgccaaccccaacgccaacccgaacgcgaaccccaacgccaaccccaacgccaaccccaacgccaacccgaacgccaaccccaacgcgaaccccaacgccaaccccaacgccaacccgaacgccaaccccaacgccaaccccaacgcgaaccccaacgucgacccgaacgccaaccccaacgccaaccccaacgccaaccccaacgccaacccgaacgcgaaccccaacgccaaccccaacgccaacccgaacgccaaccccaacgccaaccccaacgcgaaccccaacgccaacccgaacgccaaccccaacgccaaccccaacgcgaaccccaacgccaacccgaacgccaaccccaacgccaaccccaacgccaaccccugaggacuagucccuguucccagagcccacuuuuuuuucuuuuuuugaaauaaaauagccugucuuucagaucuaaaaaaaaaaaaaaaaaaaaaaaaaaaaaaaaaaaaaaaaaaaaaaaaaaaaaaaaaaaaaaaaugcaucccccccccccccccccccccccccccccccaaaggcucuuuucagagccaccagaauu

SEQ ID NO: 396 - RNA, 1164 nt, Artificial Sequence
  mRNA Design a-1 (A64-N5-C30-hSL-N5) comprising derived and/or modified sequence from Pf(3D7)__XP_001351122.1__HsALB_Pf-CSP(98-374) (opt1)
gggagagucccgcagucggcguccagcggcucugcuuguucgugugugugucguugcaggccuuauucaagcuuaccaugaagugggugaccuucaucagccuccuguuccuguucuccagcgccuacuccgccgacggcaaccccgacccgaacgcgaaccccaacgucgaccccaacgccaaccccaacguggacccgaacgccaaccccaacguggaccccaacgccaaccccaacgccaacccgaacgcgaaccccaacgccaaccccaacgccaaccccaacgccaacccgaacgcgaaccccaacgccaaccccaacgccaaccccaacgccaacccgaacgccaaccccaacgcgaaccccaacgccaaccccaacgccaacccgaacgccaaccccaacgccaaccccaacgcgaaccccaacgucgacccgaacgccaaccccaacgccaaccccaacgccaaccccaacgccaacccgaacgcgaaccccaacgccaaccccaacgccaacccgaacgccaaccccaacgccaaccccaacgcgaaccccaacgccaacccgaacgccaaccccaacgccaaccccaacgcgaaccccaacgccaacccgaacgccaaccccaacgccaaccccaacgccaaccccaacaagaacaaccaggggaacggccaggggcacaacaugccgaacgaccccaaccgcaacguggacgagaacgcgaacgccaacagcgccgugaagaacaacaacaacgaggagcccuccgacaagcacaucaaggaguaccugaacaagauccagaacagccucuccaccgaguggagccccugcuccgucacgugcggcaacgggauccaggugcggaucaagccgggcagcgccaacaagcccaaggacgagcuggacuacgccaacgacaucgagaagaagaucugcaagauggagaagugcugaggacuagucccuguucccagagcccacuuuuuuuucuuuuuuugaaauaaaauagccugucuuucagaucuaaaaaaaaaaaaaaaaaaaaaaaaaaaaaaaaaaaaaaaaaaaaaaaaaaaaaaaaaaaaaaaaugcaucccccccccccccccccccccccccccccccaaaggcucuuuucagagccaccagaauu

SEQ ID NO: 397 - RNA, 1233 nt, Artificial Sequence
  mRNA Design a-1 (A64-N5-C30-hSL-N5) comprising derived and/or modified sequence from Pf(3D7)__XP_001351122.1__HsALB_Pf-CSP(98-397) (opt1)
gggagagucccgcagucggcguccagcggcucugcuuguucgugugugugucguugcaggccuuauucaagcuuaccaugaagugggugaccuucaucagccuccuguuccuguucuccagcgccuacuccgccgacggcaaccccgacccgaacgcgaaccccaacgucgaccccaacgccaaccccaacguggacccgaacgccaaccccaacguggaccccaacgccaaccccaacgccaacccgaacgcgaaccccaacgccaaccccaacgccaaccccaacgccaacccgaacgcgaaccccaacgccaaccccaacgccaaccccaacgccaacccgaacgccaaccccaacgcgaaccccaacgccaaccccaacgccaacccgaacgccaaccccaacgccaaccccaacgcgaaccccaacgucgacccgaacgccaaccccaacgccaaccccaacgccaaccccaacgccaacccgaacgcgaaccccaacgccaaccccaacgccaacccgaacgccaaccccaacgccaaccccaacgcgaaccccaacgccaacccgaacgccaaccccaacgccaaccccaacgcgaaccccaacgccaacccgaacgccaaccccaacgccaaccccaacgccaaccccaacaagaacaaccaggggaacggccaggggcacaacaugccgaacgaccccaaccgcaacguggacgagaacgcgaacgccaacagcgccgugaagaacaacaacaacgaggagcccuccgacaagcacaucaaggaguaccugaacaagauccagaacagccucuccaccgaguggagccccugcuccgucacgugcggcaacgggauccaggugcggaucaagccgggcagcgccaacaagcccaaggacgagcuggacuacgccaacgacaucgagaagaagaucugcaagauggagaagugcuccagcguguucaacgucgugaacuccagcaucggccugaucauggugcucuccuuccuguuccugaacugaggacuagucccuguucccagagcccacuuuuuuuucuuuuuuugaaauaaaauagccugucuuucagaucuaaaaaaaaaaaaaaaaaaaaaaaaaaaaaaaaaaaaaaaaaaaaaaaaaaaaaaaaaaaaaaaaugcaucccccccccccccccccccccccccccccccaaaggcucuuuucagagccaccagaauu

SEQ ID NO: 398 - RNA, 1560 nt, Artificial Sequence
  mRNA Design a-1 (A64-N5-C30-hSL-N5) comprising derived and/or modified sequence from Pf(3D7)__XP_001351122.1__HsALB_Pf-CSP(199-377)_L(PVTN)_HBsAg (opt1)
gggagagucccgcagucggcguccagcggcucugcuuguucgugugugugucguugcaggccuuauucaagcuuaccaugaagugggugaccuucaucagccuccuguuccuguucuccagcgccuacuccgaccccaacgccaacccgaacgcgaaccccaacgccaaccccaacgccaaccccaacgccaacccgaacgccaaccccaacgcgaaccccaacgccaaccccaacgccaacccgaacgccaaccccaacgcgaaccccaacgccaaccccaacgccaacccgaacgccaaccccaacgccaaccccaacgcgaaccccaacgccaacccgaacgccaaccccaacaagaacaaccagggcaacgggcagggccacaacaugcccaacgaccccaaccgcaacgucgacgagaacgccaacgccaacagcgcggugaagaacaacaacaacgaggagccguccgacaagcacaucaaggaguaccugaacaagauccagaacagccucuccaccgaguggagccccugcuccgugaccugcgggaacggcauccagguccggaucaagcccgggagcgccaacaagcccaaggacgagcuggacuacgccaacgacaucgagaagaagaucugcaagauggagaagugcuccagcgugccggugaccaacauggagaacaucaccuccggcuuccugggcccccuccugguccugcaggccggguucuuccuccugacccgcauccugacgaucccccagagccucgacuccugguggaccagccugaacuuccugggcgggucccccgugugccucggccagaacagccaguccccgaccagcaaccacagccccaccuccugcccgcccaucugccccggguaccgguggaugugccugcgccgguucaucaucuuccuguucauccuccugcugugccucaucuuccugcuggugcuccuggacuaccagggcaugcugcccgucugcccccucaucccgggcagcacgaccaccaacaccgggcccugcaagacgugcaccacccccgcccagggcaacuccauguuccccagcugcugcugcaccaagccgacggacgggaacugcacgugcauccccauccccuccagcugggcguucgccaaguaccugugggagugggccuccgugcgcuucagcuggcugucccuccuggugcccuucguccagugguucgugggccugagcccgaccguguggcucuccgccaucuggaugaugugguacuggggccccagccuguacuccaucgucagccccuucaucccccugcucccgaucuucuucugccuguggguguacaucugaggacuagucccuguucccagagcccacuuuuuuuucuuuuuuugaaauaaaauagccugucuuucagaucuaaaaaaaaaaaaaaaaaaaaaaaaaaaaaaaaaaaaaaaaaaaaaaaaaaaaaaaaaaaaaaaaugcaucccccccccccccccccccccccccccccccaaaggcucuuuucagagccaccagaauu

SEQ ID NO: 399 - RNA, 1299 nt, Artificial Sequence
  mRNA Design a-1 (A64-N5-C30-hSL-N5) comprising derived and/or modified sequence from Pb(ANKA)__XP_022712148.1__Pb-CSP (opt1)
gggagagucccgcagucggcguccagcggcucugcuuguucgugugugugucguugcaggccuuauucaagcuuaccaugaagaagugcaccauccugguggucgccagccuccugcuggugaacucccuccugcccggcuacgggcagaacaagagcauccaggcccagcgcaaccugaacgagcucugcuacaacgagggcaacgacaacaagcuguaccacgugcugaacuccaagaacgggaagaucuacaaccggaacaccgucaaccgccuccuggcggacgccccggagggcaagaagaacgagaagaagaacgagaagaucgagcggaacaacaagcugaagcagcccccccccccgcccaaccccaacgaccccccgccccccaaccccaacgacccgcccccccccaacccgaacgaccccccccccccgaaccccaacgacccccccccgcccaacgccaacgacccccccccgcccaacgccaacgaccccgccccgcccaacgcgaacgaccccgcccccccgaacgccaacgaccccgccccccccaacgcgaacgacccggccccccccaacgccaacgaccccccgccccccaaccccaacgacccggccccccccaacgccaacgaccccccgccccccaaccccaacgacccggcgcccccccaggggaacaacaacccgcagccccagccccgcccccagccgcagccccagccccagccccagccgcagccccagccccagccccagccgcggccccagccccagccccagccgggcggcaacaacaacaacaagaacaacaacaacgacgacagcuacauccccuccgccgagaagauccucgaguucgugaagcagauccgcgacagcaucacggaggaguggucccagugcaacgugaccugcgggagcggcauccggguccgcaagcggaagggguccaacaagaaggccgaggaccugacccuggaggacaucgacaccgagaucugcaagauggacaagugcagcuccaucuucaacaucgugagcaacucccucggcuucgugauccugcugguccucguguucuucaacugaggacuagucccuguucccagagcccacuuuuuuuucuuuuuuugaaauaaaauagccugucuuucagaucuaaaaaaaaaaaaaaaaaaaaaaaaaaaaaaaaaaaaaaaaaaaaaaaaaaaaaaaaaaaaaaaaugcaucccccccccccccccccccccccccccccccaaaggcucuuuucagagccaccagaauu

SEQ ID NO: 400 - RNA, 1464 nt, Artificial Sequence
  mRNA Design a-1 (A64-N5-C30-hSL-N5) comprising derived and/or modified sequence from Pb(ANKA)__XP_022712148.1__Pb-CSP_L(G4SG4)_TM domain HA (opt1)
gggagagucccgcagucggcguccagcggcucugcuuguucgugugugugucguugcaggccuuauucaagcuuaccaugaagaagugcaccauccugguggucgccagccuccugcuggugaacucccuccugcccggcuacgggcagaacaagagcauccaggcccagcgcaaccugaacgagcucugcuacaacgagggcaacgacaacaagcuguaccacgugcugaacuccaagaacgggaagaucuacaaccggaacaccgucaaccgccuccuggcggacgccccggagggcaagaagaacgagaagaagaacgagaagaucgagcggaacaacaagcugaagcagcccccccccccgcccaaccccaacgaccccccgccccccaaccccaacgacccgcccccccccaacccgaacgaccccccccccccgaaccccaacgacccccccccgcccaacgccaacgacccccccccgcccaacgccaacgaccccgccccgcccaacgcgaacgaccccgcccccccgaacgccaacgaccccgccccccccaacgcgaacgacccggccccccccaacgccaacgaccccccgccccccaaccccaacgacccggccccccccaacgccaacgaccccccgccccccaaccccaacgacccggcgcccccccaggggaacaacaacccgcagccccagccccgcccccagccgcagccccagccccagccccagccgcagccccagccccagccccagccgcggccccagccccagccccagccgggcggcaacaacaacaacaagaacaacaacaacgacgacagcuacauccccuccgccgagaagauccucgaguucgugaagcagauccgcgacagcaucacggaggaguggucccagugcaacgugaccugcgggagcggcauccggguccgcaagcggaagggguccaacaagaaggccgaggaccugacccuggaggacaucgacaccgagaucugcaagauggacaagugcagcuccaucuucaacaucgugagcaacucccucggcuucgugauccugcugguccucguguucuucaacgggggcggcgggagcggcgggggcggcaagcuggaguccacgcgcaucuaccagauccuggccaucuacagcaccguggccuccagccucguccugguggugucccugggggcgaucagcuucuggaugugcagcaacggcucccuccagugccggaucugcaucugaggacuagucccuguucccagagcccacuuuuuuuucuuuuuuugaaauaaaauagccugucuuucagaucuaaaaaaaaaaaaaaaaaaaaaaaaaaaaaaaaaaaaaaaaaaaaaaaaaaaaaaaaaaaaaaaaugcaucccccccccccccccccccccccccccccccaaaggcucuuuucagagccaccagaauu

SEQ ID NO: 401 - RNA, 1284 nt, Artificial Sequence
  mRNA Design a-1 (A64-N5-C30-hSL-N5) comprising derived and/or modified sequence from Pb(ANKA)__XP_022712148.1__HsALB_Pb-CSP(24-340) (opt1)
gggagagucccgcagucggcguccagcggcucugcuuguucgugugugugucguugcaggccuuauucaagcuuaccaugaagugggugaccuucaucagccugcucuuccuguucuccagcgccuacucccagaacaagagcauccaggcccagcgcaaccugaacgagcucugcuacaacgagggcaacgacaacaagcuguaccacguccugaacuccaagaacgggaagaucuacaaccggaacaccgugaaccgccuccuggcggacgcccccgagggcaagaagaacgagaagaagaacgagaagaucgagcggaacaacaagcugaagcagccgcccccccccccgaaccccaacgacccccccccgcccaaccccaacgaccccccgccccccaaccccaacgacccgcccccccccaacccgaacgaccccccccccccgaacgccaacgaccccccccccccgaacgccaacgaccccgcccccccgaacgcgaacgaccccgccccccccaacgccaacgacccggccccccccaacgcgaacgaccccgccccgcccaacgccaacgacccccccccgcccaaccccaacgaccccgccccgcccaacgccaacgacccccccccgcccaaccccaacgaccccgcgccgccccaggggaacaacaacccccagccgcagccccgcccccagccccagccgcagccccagccccagccccagccgcagccccagccccagccccggccgcagccccagccccagcccggcgggaacaacaacaacaagaacaacaacaacgacgacagcuacaucccguccgccgagaagauccucgaguucgugaagcagauccgcgacagcaucacggaggaguggucccagugcaacgucaccugcggcagcggcauccgggugcgcaagcggaagggguccaacaagaaggccgaggaccugacccuggaggacaucgacaccgagaucugcaagauggacaagugcagcuccaucuucaacaucgugagcaacucccucggcuucgucauccugcuggugcucguguucuucaacugaggacuagucccuguucccagagcccacuuuuuuuucuuuuuuugaaauaaaauagccugucuuucagaucuaaaaaaaaaaaaaaaaaaaaaaaaaaaaaaaaaaaaaaaaaaaaaaaaaaaaaaaaaaaaaaaaugcaucccccccccccccccccccccccccccccccaaaggcucuuuucagagccaccagaauu

SEQ ID NO: 402 - RNA, 1302 nt, Artificial Sequence
  mRNA Design a-1 (A64-N5-C30-hSL-N5) comprising derived and/or modified sequence from Pb(ANKA)__XP_022712148.1__HsIns-iso1_Pb-CSP(24-340) (opt1)
gggagagucccgcagucggcguccagcggcucugcuuguucgugugugugucguugcaggccuuauucaagcuuaccauggcccuguggaugcgccuccugccccugcucgcccugcuggcgcucuggggcccggaccccgccgccgcccagaacaagagcauccaggcccagcggaaccugaacgagcugugcuacaacgaggggaacgacaacaagcucuaccacgugcugaacuccaagaacggcaagaucuacaaccgcaacaccgucaaccggcugcucgcggacgcccccgaggggaagaagaacgagaagaagaacgagaagaucgagcgcaacaacaagcugaagcagcccccgcccccccccaacccgaacgaccccccccccccgaaccccaacgacccccccccgcccaaccccaacgaccccccgccccccaaccccaacgacccgcccccccccaacgccaacgacccgccccccccgaacgccaacgaccccgcgccccccaacgccaacgacccggccccccccaacgccaacgaccccgccccgcccaacgcgaacgaccccgcccccccgaacgccaacgaccccccccccccgaaccccaacgaccccgcccccccgaacgccaacgaccccccccccccgaaccccaacgaccccgcgccgccccagggcaacaacaacccccagccccagccgcggccccagccccagccccagccgcagccccagccccagccccagccgcagccccagccccgcccccagccgcagccccagcccgggggcaacaacaacaacaagaacaacaacaacgacgacagcuacauccccuccgccgagaagauccuggaguucgugaagcagauccgggacagcaucaccgaggaguggucccagugcaacgugacgugcggcagcgggauccgcguccggaagcgcaagggcuccaacaagaaggccgaggaccucacccuggaggacaucgacaccgagaucugcaagauggacaagugcagcuccaucuucaacaucgugagcaacucccugggguucgugauccuccugguccugguguucuucaacugaggacuagucccuguucccagagcccacuuuuuuuucuuuuuuugaaauaaaauagccugucuuucagaucuaaaaaaaaaaaaaaaaaaaaaaaaaaaaaaaaaaaaaaaaaaaaaaaaaaaaaaaaaaaaaaaaugcaucccccccccccccccccccccccccccccccaaaggcucuuuucagagccaccagaauu

SEQ ID NO: 403 - RNA, 1281 nt, Artificial Sequence
  mRNA Design a-1 (A64-N5-C30-hSL-N5) comprising derived and/or modified sequence from Pb(ANKA)__XP_022712148.1__HsSPARC_Pb-CSP(24-340) (opt1)
gggagagucccgcagucggcguccagcggcucugcuuguucgugugugugucguugcaggccuuauucaagcuuaccaugcgcgccuggaucuucuuccugcucugccuggccggccgggcgcuggcccagaacaagagcauccaggcccagcgcaaccucaacgagcugugcuacaacgaggggaacgacaacaagcuguaccacgugcucaacuccaagaacggcaagaucuacaaccggaacaccgucaaccgccugcuggccgacgcccccgaggggaagaagaacgagaagaagaacgagaagaucgagcggaacaacaagcucaagcagccgcccccccccccgaaccccaacgacccccccccgcccaaccccaacgaccccccgccccccaaccccaacgacccgcccccccccaacccgaacgaccccccccccccgaacgcgaacgaccccccccccccgaacgccaacgaccccgcccccccgaacgccaacgaccccgcgccccccaacgccaacgacccggccccccccaacgccaacgaccccgccccgcccaacgcgaacgacccccccccgcccaaccccaacgaccccgccccgcccaacgccaacgacccccccccgcccaaccccaacgaccccgccccgccccagggcaacaacaacccccagccgcagccccgcccccagccccagccgcagccccagccccagccccagccgcagccccagccccagccccggccgcagccccagccccagcccgggggcaacaacaacaacaagaacaacaacaacgacgacagcuacaucccguccgccgagaagauccuggaguucgugaagcagauccgcgacagcaucaccgaggaguggucccagugcaacgugacgugcggcagcgggauccggguccgcaagcggaagggcuccaacaagaaggcggaggaccugacccucgaggacaucgacaccgagaucugcaagauggacaagugcagcuccaucuucaacaucgugagcaacucccugggguucgugauccugcucguccugguguucuucaacugaggacuagucccuguucccagagcccacuuuuuuuucuuuuuuugaaauaaaauagccugucuuucagaucuaaaaaaaaaaaaaaaaaaaaaaaaaaaaaaaaaaaaaaaaaaaaaaaaaaaaaaaaaaaaaaaaugcaucccccccccccccccccccccccccccccccaaaggcucuuuucagagccaccagaauu

SEQ ID NO: 404 - RNA, 1284 nt, Artificial Sequence
  mRNA Design a-1 (A64-N5-C30-hSL-N5) comprising derived and/or modified sequence from Pb(ANKA)__XP_022712148.1__IgE_Pb-CSP(24-340) (opt1)
gggagagucccgcagucggcguccagcggcucugcuuguucgugugugugucguugcaggccuuauucaagcuuaccauggacuggaccuggauccuguuccucguggccgccgcgacccgcguccacagccagaacaaguccauccaggcccagcggaaccugaacgagcugugcuacaacgagggcaacgacaacaagcucuaccacgugcugaacagcaagaacgggaagaucuacaaccgcaacacggugaaccggcugcucgccgacgcccccgagggcaagaagaacgagaagaagaacgagaagaucgagcgcaacaacaagcugaagcagccgcccccccccccgaaccccaacgacccccccccgcccaaccccaacgaccccccgccccccaaccccaacgacccgcccccccccaacccgaacgaccccccccccccgaacgccaacgaccccccccccccgaacgcgaacgaccccgcccccccgaacgccaacgaccccgccccccccaacgcgaacgacccggccccccccaacgccaacgaccccgccccgcccaacgccaacgacccccccccgcccaaccccaacgaccccgcgccgcccaacgccaacgacccccccccgcccaaccccaacgaccccgccccgccccaggggaacaacaacccccagccgcagccccggccccagccccagccgcagccccagccccagccccagccgcagccccagccccagccccgcccgcagccccagccccagcccggcgggaacaacaacaacaagaacaacaacaacgacgacuccuacaucccgagcgccgagaagauccuggaguucgucaagcagauccgggacuccaucaccgaggaguggagccagugcaacgugaccugcggcuccggcauccgcgugcggaagcgcaaggggagcaacaagaaggccgaggaccucacccuggaggacaucgacacggagaucugcaagauggacaagugcuccagcaucuucaacaucgucuccaacagccugggcuucgugauccuccuggugcuggucuucuucaacugaggacuagucccuguucccagagcccacuuuuuuuucuuuuuuugaaauaaaauagccugucuuucagaucuaaaaaaaaaaaaaaaaaaaaaaaaaaaaaaaaaaaaaaaaaaaaaaaaaaaaaaaaaaaaaaaaugcaucccccccccccccccccccccccccccccccaaaggcucuuuucagagccaccagaauu

SEQ ID NO: 405 - RNA, 1470 nt, Artificial Sequence
  mRNA Design a-1 (A64-N5-C30-hSL-N5) comprising derived and/or modified sequence from Pf(3D7)__XP_001351122.1__Pf-CSP (opt2)
gggagagucccgcagucggcguccagcggcucugcuuguucgugugugugucguugcaggccuuauucaagcuuaccaugaugcgcaagcucgccauccucuccgucuccuccuuccucuucgucgaggcccucuuccaggaguaccagugcuacggcuccuccuccaacacccgcguccucaacgagcucaacuacgacaacgccggcaccaaccucuacaacgagcucgagaugaacuacuacggcaagcaggagaacugguacucccucaagaagaacucccgcucccucggcgagaacgacgacggcaacaacgaggacaacgagaagcuccgcaagcccaagcacaagaagcucaagcagcccgccgacggcaaccccgaccccaacgccaaccccaacgucgaccccaacgccaaccccaacgucgaccccaacgccaaccccaacgucgaccccaacgccaaccccaacgccaaccccaacgccaaccccaacgccaaccccaacgccaaccccaacgccaaccccaacgccaaccccaacgccaaccccaacgccaaccccaacgccaaccccaacgccaaccccaacgccaaccccaacgccaaccccaacgccaaccccaacgccaaccccaacgccaaccccaacgccaaccccaacgucgaccccaacgccaaccccaacgccaaccccaacgccaaccccaacgccaaccccaacgccaaccccaacgccaaccccaacgccaaccccaacgccaaccccaacgccaaccccaacgccaaccccaacgccaaccccaacgccaaccccaacgccaaccccaacgccaaccccaacgccaaccccaacgccaaccccaacgccaaccccaacgccaaccccaacaagaacaaccagggcaacggccagggccacaacaugcccaacgaccccaaccgcaacgucgacgagaacgccaacgccaacuccgccgucaagaacaacaacaacgaggagcccuccgacaagcacaucaaggaguaccucaacaagauccagaacucccucuccaccgaguggucccccugcuccgucaccugcggcaacggcauccagguccgcaucaagcccggcuccgccaacaagcccaaggacgagcucgacuacgccaacgacaucgagaagaagaucugcaagauggagaagugcuccuccgucuucaacgucgucaacuccuccaucggccucaucaugguccucuccuuccucuuccucaacugaggacuagucccuguucccagagcccacuuuuuuuucuuuuuuugaaauaaaauagccugucuuucagaucuaaaaaaaaaaaaaaaaaaaaaaaaaaaaaaaaaaaaaaaaaaaaaaaaaaaaaaaaaaaaaaaaugcaucccccccccccccccccccccccccccccccaaaggcucuuuucagagccaccagaauu

SEQ ID NO: 406 - RNA, 1401 nt, Artificial Sequence
  mRNA Design a-1 (A64-N5-C30-hSL-N5) comprising derived and/or modified sequence from Pf(3D7)__XP_001351122.1__Pf-CSP(1-374) (opt2)
gggagagucccgcagucggcguccagcggcucugcuuguucgugugugugucguugcaggccuuauucaagcuuaccaugaugcgcaagcucgccauccucuccgucuccuccuuccucuucgucgaggcccucuuccaggaguaccagugcuacggcuccuccuccaacacccgcguccucaacgagcucaacuacgacaacgccggcaccaaccucuacaacgagcucgagaugaacuacuacggcaagcaggagaacugguacucccucaagaagaacucccgcucccucggcgagaacgacgacggcaacaacgaggacaacgagaagcuccgcaagcccaagcacaagaagcucaagcagcccgccgacggcaaccccgaccccaacgccaaccccaacgucgaccccaacgccaaccccaacgucgaccccaacgccaaccccaacgucgaccccaacgccaaccccaacgccaaccccaacgccaaccccaacgccaaccccaacgccaaccccaacgccaaccccaacgccaaccccaacgccaaccccaacgccaaccccaacgccaaccccaacgccaaccccaacgccaaccccaacgccaaccccaacgccaaccccaacgccaaccccaacgccaaccccaacgccaaccccaacgucgaccccaacgccaaccccaacgccaaccccaacgccaaccccaacgccaaccccaacgccaaccccaacgccaaccccaacgccaaccccaacgccaaccccaacgccaaccccaacgccaaccccaacgccaaccccaacgccaaccccaacgccaaccccaacgccaaccccaacgccaaccccaacgccaaccccaacgccaaccccaacgccaaccccaacaagaacaaccagggcaacggccagggccacaacaugcccaacgaccccaaccgcaacgucgacgagaacgccaacgccaacuccgccgucaagaacaacaacaacgaggagcccuccgacaagcacaucaaggaguaccucaacaagauccagaacucccucuccaccgaguggucccccugcuccgucaccugcggcaacggcauccagguccgcaucaagcccggcuccgccaacaagcccaaggacgagcucgacuacgccaacgacaucgagaagaagaucugcaagauggagaagugcugaggacuagucccuguucccagagcccacuuuuuuuucuuuuuuugaaauaaaauagccugucuuucagaucuaaaaaaaaaaaaaaaaaaaaaaaaaaaaaaaaaaaaaaaaaaaaaaaaaaaaaaaaaaaaaaaaugcaucccccccccccccccccccccccccccccccaaaggcucuuuucagagccaccagaauu

SEQ ID NO: 407 - RNA, 1254 nt, Artificial Sequence
  mRNA Design a-1 (A64-N5-C30-hSL-N5) comprising derived and/or modified sequence from Pf(3D7)__XP_001351122.1__Pf-CSP(1-325) (opt2)
gggagagucccgcagucggcguccagcggcucugcuuguucgugugugugucguugcaggccuuauucaagcuuaccaugaugcgcaagcucgccauccucuccgucuccuccuuccucuucgucgaggcccucuuccaggaguaccagugcuacggcuccuccuccaacacccgcguccucaacgagcucaacuacgacaacgccggcaccaaccucuacaacgagcucgagaugaacuacuacggcaagcaggagaacugguacucccucaagaagaacucccgcucccucggcgagaacgacgacggcaacaacgaggacaacgagaagcuccgcaagcccaagcacaagaagcucaagcagcccgccgacggcaaccccgaccccaacgccaaccccaacgucgaccccaacgccaaccccaacgucgaccccaacgccaaccccaacgucgaccccaacgccaaccccaacgccaaccccaacgccaaccccaacgccaaccccaacgccaaccccaacgccaaccccaacgccaaccccaacgccaaccccaacgccaaccccaacgccaaccccaacgccaaccccaacgccaaccccaacgccaaccccaacgccaaccccaacgccaaccccaacgccaaccccaacgccaaccccaacgucgaccccaacgccaaccccaacgccaaccccaacgccaaccccaacgccaaccccaacgccaaccccaacgccaaccccaacgccaaccccaacgccaaccccaacgccaaccccaacgccaaccccaacgccaaccccaacgccaaccccaacgccaaccccaacgccaaccccaacgccaaccccaacgccaaccccaacgccaaccccaacgccaaccccaacaagaacaaccagggcaacggccagggccacaacaugcccaacgaccccaaccgcaacgucgacgagaacgccaacgccaacuccgccgucaagaacaacaacaacgaggagcccuccgacaagcacaucaaggaguaccucaacaagauccagaacugaggacuagucccuguucccagagcccacuuuuuuuucuuuuuuugaaauaaaauagccugucuuucagaucuaaaaaaaaaaaaaaaaaaaaaaaaaaaaaaaaaaaaaaaaaaaaaaaaaaaaaaaaaaaaaaaaugcaucccccccccccccccccccccccccccccccaaaggcucuuuucagagccaccagaauu

SEQ ID NO: 408 - RNA, 1470 nt, Artificial Sequence
  mRNA Design a-1 (A64-N5-C30-hSL-N5) comprising derived and/or modified sequence from Pf(3D7)__XP_001351122.1__HsALB_Pf-CSP(19-397) (opt2)
gggagagucccgcagucggcguccagcggcucugcuuguucgugugugugucguugcaggccuuauucaagcuuaccaugaagugggucaccuucaucucccuccucuuccucuucuccuccgccuacucccucuuccaggaguaccagugcuacggcuccuccuccaacacccgcguccucaacgagcucaacuacgacaacgccggcaccaaccucuacaacgagcucgagaugaacuacuacggcaagcaggagaacugguacucccucaagaagaacucccgcucccucggcgagaacgacgacggcaacaacgaggacaacgagaagcuccgcaagcccaagcacaagaagcucaagcagcccgccgacggcaaccccgaccccaacgccaaccccaacgucgaccccaacgccaaccccaacgucgaccccaacgccaaccccaacgucgaccccaacgccaaccccaacgccaaccccaacgccaaccccaacgccaaccccaacgccaaccccaacgccaaccccaacgccaaccccaacgccaaccccaacgccaaccccaacgccaaccccaacgccaaccccaacgccaaccccaacgccaaccccaacgccaaccccaacgccaaccccaacgccaaccccaacgccaaccccaacgucgaccccaacgccaaccccaacgccaaccccaacgccaaccccaacgccaaccccaacgccaaccccaacgccaaccccaacgccaaccccaacgccaaccccaacgccaaccccaacgccaaccccaacgccaaccccaacgccaaccccaacgccaaccccaacgccaaccccaacgccaaccccaacgccaaccccaacgccaaccccaacgccaaccccaacaagaacaaccagggcaacggccagggccacaacaugcccaacgaccccaaccgcaacgucgacgagaacgccaacgccaacuccgccgucaagaacaacaacaacgaggagcccuccgacaagcacaucaaggaguaccucaacaagauccagaacucccucuccaccgaguggucccccugcuccgucaccugcggcaacggcauccagguccgcaucaagcccggcuccgccaacaagcccaaggacgagcucgacuacgccaacgacaucgagaagaagaucugcaagauggagaagugcuccuccgucuucaacgucgucaacuccuccaucggccucaucaugguccucuccuuccucuuccucaacugaggacuagucccuguucccagagcccacuuuuuuuucuuuuuuugaaauaaaauagccugucuuucagaucuaaaaaaaaaaaaaaaaaaaaaaaaaaaaaaaaaaaaaaaaaaaaaaaaaaaaaaaaaaaaaaaaugcaucccccccccccccccccccccccccccccccaaaggcucuuuucagagccaccagaauu

SEQ ID NO: 409 - RNA, 1488 nt, Artificial Sequence
  mRNA Design a-1 (A64-N5-C30-hSL-N5) comprising derived and/or modified sequence from Pf(3D7)__XP_001351122.1__HsIns-iso1_Pf-CSP(19-397) (opt2)
gggagagucccgcagucggcguccagcggcucugcuuguucgugugugugucguugcaggccuuauucaagcuuaccauggcccucuggaugcgccuccucccccuccucgcccuccucgcccucuggggccccgaccccgccgccgcccucuuccaggaguaccagugcuacggcuccuccuccaacacccgcguccucaacgagcucaacuacgacaacgccggcaccaaccucuacaacgagcucgagaugaacuacuacggcaagcaggagaacugguacucccucaagaagaacucccgcucccucggcgagaacgacgacggcaacaacgaggacaacgagaagcuccgcaagcccaagcacaagaagcucaagcagcccgccgacggcaaccccgaccccaacgccaaccccaacgucgaccccaacgccaaccccaacgucgaccccaacgccaaccccaacgucgaccccaacgccaaccccaacgccaaccccaacgccaaccccaacgccaaccccaacgccaaccccaacgccaaccccaacgccaaccccaacgccaaccccaacgccaaccccaacgccaaccccaacgccaaccccaacgccaaccccaacgccaaccccaacgccaaccccaacgccaaccccaacgccaaccccaacgccaaccccaacgucgaccccaacgccaaccccaacgccaaccccaacgccaaccccaacgccaaccccaacgccaaccccaacgccaaccccaacgccaaccccaacgccaaccccaacgccaaccccaacgccaaccccaacgccaaccccaacgccaaccccaacgccaaccccaacgccaaccccaacgccaaccccaacgccaaccccaacgccaaccccaacgccaaccccaacaagaacaaccagggcaacggccagggccacaacaugcccaacgaccccaaccgcaacgucgacgagaacgccaacgccaacuccgccgucaagaacaacaacaacgaggagcccuccgacaagcacaucaaggaguaccucaacaagauccagaacucccucuccaccgaguggucccccugcuccgucaccugcggcaacggcauccagguccgcaucaagcccggcuccgccaacaagcccaaggacgagcucgacuacgccaacgacaucgagaagaagaucugcaagauggagaagugcuccuccgucuucaacgucgucaacuccuccaucggccucaucaugguccucuccuuccucuuccucaacugaggacuagucccuguucccagagcccacuuuuuuuucuuuuuuugaaauaaaauagccugucuuucagaucuaaaaaaaaaaaaaaaaaaaaaaaaaaaaaaaaaaaaaaaaaaaaaaaaaaaaaaaaaaaaaaaaugcaucccccccccccccccccccccccccccccccaaaggcucuuuucagagccaccagaauu

SEQ ID NO: 410 - RNA, 1467 nt, Artificial Sequence
  mRNA Design a-1 (A64-N5-C30-hSL-N5) comprising derived and/or modified sequence from Pf(3D7)__XP_001351122.1__HsSPARC_Pf-CSP(19-397) (opt2)
gggagagucccgcagucggcguccagcggcucugcuuguucgugugugugucguugcaggccuuauucaagcuuaccaugcgcgccuggaucuucuuccuccucugccucgccggccgcgcccucgcccucuuccaggaguaccagugcuacggcuccuccuccaacacccgcguccucaacgagcucaacuacgacaacgccggcaccaaccucuacaacgagcucgagaugaacuacuacggcaagcaggagaacugguacucccucaagaagaacucccgcucccucggcgagaacgacgacggcaacaacgaggacaacgagaagcuccgcaagcccaagcacaagaagcucaagcagcccgccgacggcaaccccgaccccaacgccaaccccaacgucgaccccaacgccaaccccaacgucgaccccaacgccaaccccaacgucgaccccaacgccaaccccaacgccaaccccaacgccaaccccaacgccaaccccaacgccaaccccaacgccaaccccaacgccaaccccaacgccaaccccaacgccaaccccaacgccaaccccaacgccaaccccaacgccaaccccaacgccaaccccaacgccaaccccaacgccaaccccaacgccaaccccaacgccaaccccaacgucgaccccaacgccaaccccaacgccaaccccaacgccaaccccaacgccaaccccaacgccaaccccaacgccaaccccaacgccaaccccaacgccaaccccaacgccaaccccaacgccaaccccaacgccaaccccaacgccaaccccaacgccaaccccaacgccaaccccaacgccaaccccaacgccaaccccaacgccaaccccaacgccaaccccaacaagaacaaccagggcaacggccagggccacaacaugcccaacgaccccaaccgcaacgucgacgagaacgccaacgccaacuccgccgucaagaacaacaacaacgaggagcccuccgacaagcacaucaaggaguaccucaacaagauccagaacucccucuccaccgaguggucccccugcuccgucaccugcggcaacggcauccagguccgcaucaagcccggcuccgccaacaagcccaaggacgagcucgacuacgccaacgacaucgagaagaagaucugcaagauggagaagugcuccuccgucuucaacgucgucaacuccuccaucggccucaucaugguccucuccuuccucuuccucaacugaggacuagucccuguucccagagcccacuuuuuuuucuuuuuuugaaauaaaauagccugucuuucagaucuaaaaaaaaaaaaaaaaaaaaaaaaaaaaaaaaaaaaaaaaaaaaaaaaaaaaaaaaaaaaaaaaugcaucccccccccccccccccccccccccccccccaaaggcucuuuucagagccaccagaauu

SEQ ID NO: 411 - RNA, 1470 nt, Artificial Sequence
  mRNA Design a-1 (A64-N5-C30-hSL-N5) comprising derived and/or modified sequence from Pf(3D7)__XP_001351122.1__IgE_Pf-CSP(19-397) (opt2)
gggagagucccgcagucggcguccagcggcucugcuuguucgugugugugucguugcaggccuuauucaagcuuaccauggacuggaccuggauccucuuccucgucgccgccgccacccgcguccacucccucuuccaggaguaccagugcuacggcuccuccuccaacacccgcguccucaacgagcucaacuacgacaacgccggcaccaaccucuacaacgagcucgagaugaacuacuacggcaagcaggagaacugguacucccucaagaagaacucccgcucccucggcgagaacgacgacggcaacaacgaggacaacgagaagcuccgcaagcccaagcacaagaagcucaagcagcccgccgacggcaaccccgaccccaacgccaaccccaacgucgaccccaacgccaaccccaacgucgaccccaacgccaaccccaacgucgaccccaacgccaaccccaacgccaaccccaacgccaaccccaacgccaaccccaacgccaaccccaacgccaaccccaacgccaaccccaacgccaaccccaacgccaaccccaacgccaaccccaacgccaaccccaacgccaaccccaacgccaaccccaacgccaaccccaacgccaaccccaacgccaaccccaacgccaaccccaacgucgaccccaacgccaaccccaacgccaaccccaacgccaaccccaacgccaaccccaacgccaaccccaacgccaaccccaacgccaaccccaacgccaaccccaacgccaaccccaacgccaaccccaacgccaaccccaacgccaaccccaacgccaaccccaacgccaaccccaacgccaaccccaacgccaaccccaacgccaaccccaacgccaaccccaacaagaacaaccagggcaacggccagggccacaacaugcccaacgaccccaaccgcaacgucgacgagaacgccaacgccaacuccgccgucaagaacaacaacaacgaggagcccuccgacaagcacaucaaggaguaccucaacaagauccagaacucccucuccaccgaguggucccccugcuccgucaccugcggcaacggcauccagguccgcaucaagcccggcuccgccaacaagcccaaggacgagcucgacuacgccaacgacaucgagaagaagaucugcaagauggagaagugcuccuccgucuucaacgucgucaacuccuccaucggccucaucaugguccucuccuuccucuuccucaacugaggacuagucccuguucccagagcccacuuuuuuuucuuuuuuugaaauaaaauagccugucuuucagaucuaaaaaaaaaaaaaaaaaaaaaaaaaaaaaaaaaaaaaaaaaaaaaaaaaaaaaaaaaaaaaaaaugcaucccccccccccccccccccccccccccccccaaaggcucuuuucagagccaccagaauu

SEQ ID NO: 412 - RNA, 1635 nt, Artificial Sequence
  mRNA Design a-1 (A64-N5-C30-hSL-N5) comprising derived and/or modified sequence from Pf(3D7)__XP_001351122.1__Pf-CSP_L(G4SG4)_TM domain HA (opt2)
gggagagucccgcagucggcguccagcggcucugcuuguucgugugugugucguugcaggccuuauucaagcuuaccaugaugcgcaagcucgccauccucuccgucuccuccuuccucuucgucgaggcccucuuccaggaguaccagugcuacggcuccuccuccaacacccgcguccucaacgagcucaacuacgacaacgccggcaccaaccucuacaacgagcucgagaugaacuacuacggcaagcaggagaacugguacucccucaagaagaacucccgcucccucggcgagaacgacgacggcaacaacgaggacaacgagaagcuccgcaagcccaagcacaagaagcucaagcagcccgccgacggcaaccccgaccccaacgccaaccccaacgucgaccccaacgccaaccccaacgucgaccccaacgccaaccccaacgucgaccccaacgccaaccccaacgccaaccccaacgccaaccccaacgccaaccccaacgccaaccccaacgccaaccccaacgccaaccccaacgccaaccccaacgccaaccccaacgccaaccccaacgccaaccccaacgccaaccccaacgccaaccccaacgccaaccccaacgccaaccccaacgccaaccccaacgccaaccccaacgucgaccccaacgccaaccccaacgccaaccccaacgccaaccccaacgccaaccccaacgccaaccccaacgccaaccccaacgccaaccccaacgccaaccccaacgccaaccccaacgccaaccccaacgccaaccccaacgccaaccccaacgccaaccccaacgccaaccccaacgccaaccccaacgccaaccccaacgccaaccccaacgccaaccccaacaagaacaaccagggcaacggccagggccacaacaugcccaacgaccccaaccgcaacgucgacgagaacgccaacgccaacuccgccgucaagaacaacaacaacgaggagcccuccgacaagcacaucaaggaguaccucaacaagauccagaacucccucuccaccgaguggucccccugcuccgucaccugcggcaacggcauccagguccgcaucaagcccggcuccgccaacaagcccaaggacgagcucgacuacgccaacgacaucgagaagaagaucugcaagauggagaagugcuccuccgucuucaacgucgucaacuccuccaucggccucaucaugguccucuccuuccucuuccucaacggcggcggcggcuccggcggcggcggcaagcucgaguccacccgcaucuaccagauccucgccaucuacuccaccgucgccuccucccucguccucgucgucucccucggcgccaucuccuucuggaugugcuccaacggcucccuccagugccgcaucugcaucugaggacuagucccuguucccagagcccacuuuuuuuucuuuuuuugaaauaaaauagccugucuuucagaucuaaaaaaaaaaaaaaaaaaaaaaaaaaaaaaaaaaaaaaaaaaaaaaaaaaaaaaaaaaaaaaaaugcaucccccccccccccccccccccccccccccccaaaggcucuuuucagagccaccagaauu

SEQ ID NO: 413 - RNA, 1509 nt, Artificial Sequence
  mRNA Design a-1 (A64-N5-C30-hSL-N5) comprising derived and/or modified sequence from Pf(3D7)__XP_001351122.1__Pf-CSP(199-377)_L(PVTN)_HBsAg (opt2)
gggagagucccgcagucggcguccagcggcucugcuuguucgugugugugucguugcaggccuuauucaagcuuaccauggaccccaacgccaaccccaacgccaaccccaacgccaaccccaacgccaaccccaacgccaaccccaacgccaaccccaacgccaaccccaacgccaaccccaacgccaaccccaacgccaaccccaacgccaaccccaacgccaaccccaacgccaaccccaacgccaaccccaacgccaaccccaacgccaaccccaacgccaaccccaacgccaaccccaacaagaacaaccagggcaacggccagggccacaacaugcccaacgaccccaaccgcaacgucgacgagaacgccaacgccaacuccgccgucaagaacaacaacaacgaggagcccuccgacaagcacaucaaggaguaccucaacaagauccagaacucccucuccaccgaguggucccccugcuccgucaccugcggcaacggcauccagguccgcaucaagcccggcuccgccaacaagcccaaggacgagcucgacuacgccaacgacaucgagaagaagaucugcaagauggagaagugcuccuccguccccgucaccaacauggagaacaucaccuccggcuuccucggcccccuccucguccuccaggccggcuucuuccuccucacccgcauccucaccaucccccagucccucgacuccugguggaccucccucaacuuccucggcggcucccccgucugccucggccagaacucccagucccccaccuccaaccacucccccaccuccugcccccccaucugccccggcuaccgcuggaugugccuccgccgcuucaucaucuuccucuucauccuccuccucugccucaucuuccuccucguccuccucgacuaccagggcaugcuccccgucugcccccucauccccggcuccaccaccaccaacaccggccccugcaagaccugcaccacccccgcccagggcaacuccauguuccccuccugcugcugcaccaagcccaccgacggcaacugcaccugcauccccauccccuccuccugggccuucgccaaguaccucugggagugggccuccguccgcuucuccuggcucucccuccucguccccuucguccagugguucgucggccucucccccaccgucuggcucuccgccaucuggaugaugugguacuggggccccucccucuacuccaucgucucccccuucaucccccuccuccccaucuucuucugccucugggucuacaucugaggacuagucccuguucccagagcccacuuuuuuuucuuuuuuugaaauaaaauagccugucuuucagaucuaaaaaaaaaaaaaaaaaaaaaaaaaaaaaaaaaaaaaaaaaaaaaaaaaaaaaaaaaaaaaaaaugcaucccccccccccccccccccccccccccccccaaaggcucuuuucagagccaccagaauu

SEQ ID NO: 414 - RNA, 1551 nt, Artificial Sequence
  mRNA Design a-1 (A64-N5-C30-hSL-N5) comprising derived and/or modified sequence from Pf(3D7)__XP_001351122.1__Pf-CSP(199-387)_L(PVTN)_HBsAg (opt2)
gggagagucccgcagucggcguccagcggcucugcuuguucgugugugugucguugcaggccuuauucaagcuuaccaugauggcccccgaccccaacgccaaccccaacgccaaccccaacgccaaccccaacgccaaccccaacgccaaccccaacgccaaccccaacgccaaccccaacgccaaccccaacgccaaccccaacgccaaccccaacgccaaccccaacgccaaccccaacgccaaccccaacgccaaccccaacgccaaccccaacgccaaccccaacgccaaccccaacgccaaccccaacaagaacaaccagggcaacggccagggccacaacaugcccaacgaccccaaccgcaacgucgacgagaacgccaacgccaacuccgccgucaagaacaacaacaacgaggagcccuccgacaagcacaucaaggaguaccucaacaagauccagaacucccucuccaccgaguggucccccugcuccgucaccugcggcaacggcauccagguccgcaucaagcccggcuccgccaacaagcccaaggacgagcucgacuacgccaacgacaucgagaagaagaucugcaagauggagaagugcuccuccgucuucaacgucgucaacuccuccaucggccucggccccgucaccaacauggagaacaucaccuccggcuuccucggcccccuccucguccuccaggccggcuucuuccuccucacccgcauccucaccaucccccagucccucgacuccugguggaccucccucaacuuccucggcggcucccccgucugccucggccagaacucccagucccccaccuccaaccacucccccaccuccugcccccccaucugccccggcuaccgcuggaugugccuccgccgcuucaucaucuuccucuucauccuccuccucugccucaucuuccuccucguccuccucgacuaccagggcaugcuccccgucugcccccucauccccggcuccaccaccaccaacaccggccccugcaagaccugcaccacccccgcccagggcaacuccauguuccccuccugcugcugcaccaagcccaccgacggcaacugcaccugcauccccauccccuccuccugggccuucgccaaguaccucugggagugggccuccguccgcuucuccuggcucucccuccucguccccuucguccagugguucgucggccucucccccaccgucuggcucuccgccaucuggaugaugugguacuggggccccucccucuacuccaucgucucccccuucaucccccuccuccccaucuucuucugccucugggucuacaucugaggacuagucccuguucccagagcccacuuuuuuuucuuuuuuugaaauaaaauagccugucuuucagaucuaaaaaaaaaaaaaaaaaaaaaaaaaaaaaaaaaaaaaaaaaaaaaaaaaaaaaaaaaaaaaaaaugcaucccccccccccccccccccccccccccccccaaaggcucuuuucagagccaccagaauu

SEQ ID NO: 415 - RNA, 735 nt, Artificial Sequence
  mRNA Design a-1 (A64-N5-C30-hSL-N5) comprising derived and/or modified sequence from Pf(3D7)__XP_001351122.1__HsALB_Pf-CSP(19-152) (opt2)
gggagagucccgcagucggcguccagcggcucugcuuguucgugugugugucguugcaggccuuauucaagcuuaccaugaagugggucaccuucaucucccuccucuuccucuucuccuccgccuacucccucuuccaggaguaccagugcuacggcuccuccuccaacacccgcguccucaacgagcucaacuacgacaacgccggcaccaaccucuacaacgagcucgagaugaacuacuacggcaagcaggagaacugguacucccucaagaagaacucccgcucccucggcgagaacgacgacggcaacaacgaggacaacgagaagcuccgcaagcccaagcacaagaagcucaagcagcccgccgacggcaaccccgaccccaacgccaaccccaacgucgaccccaacgccaaccccaacgucgaccccaacgccaaccccaacgucgaccccaacgccaaccccaacgccaaccccaacgccaaccccaacgccaaccccaacgccaaccccaacgccaaccccugaggacuagucccuguucccagagcccacuuuuuuuucuuuuuuugaaauaaaauagccugucuuucagaucuaaaaaaaaaaaaaaaaaaaaaaaaaaaaaaaaaaaaaaaaaaaaaaaaaaaaaaaaaaaaaaaaugcaucccccccccccccccccccccccccccccccaaaggcucuuuucagagccaccagaauu

SEQ ID NO: 416 - RNA, 855 nt, Artificial Sequence
  mRNA Design a-1 (A64-N5-C30-hSL-N5) comprising derived and/or modified sequence from Pf(3D7)__XP_001351122.1__HsALB_Pf-CSP(19-192) (opt2)
gggagagucccgcagucggcguccagcggcucugcuuguucgugugugugucguugcaggccuuauucaagcuuaccaugaagugggucaccuucaucucccuccucuuccucuucuccuccgccuacucccucuuccaggaguaccagugcuacggcuccuccuccaacacccgcguccucaacgagcucaacuacgacaacgccggcaccaaccucuacaacgagcucgagaugaacuacuacggcaagcaggagaacugguacucccucaagaagaacucccgcucccucggcgagaacgacgacggcaacaacgaggacaacgagaagcuccgcaagcccaagcacaagaagcucaagcagcccgccgacggcaaccccgaccccaacgccaaccccaacgucgaccccaacgccaaccccaacgucgaccccaacgccaaccccaacgucgaccccaacgccaaccccaacgccaaccccaacgccaaccccaacgccaaccccaacgccaaccccaacgccaaccccaacgccaaccccaacgccaaccccaacgccaaccccaacgccaaccccaacgccaaccccaacgccaaccccaacgccaaccccaacgccaaccccaacgccaaccccaacgccaaccccugaggacuagucccuguucccagagcccacuuuuuuuucuuuuuuugaaauaaaauagccugucuuucagaucuaaaaaaaaaaaaaaaaaaaaaaaaaaaaaaaaaaaaaaaaaaaaaaaaaaaaaaaaaaaaaaaaugcaucccccccccccccccccccccccccccccccaaaggcucuuuucagagccaccagaauu

SEQ ID NO: 417 - RNA, 1095 nt, Artificial Sequence
  mRNA Design a-1 (A64-N5-C30-hSL-N5) comprising derived and/or modified sequence from Pf(3D7)__XP_001351122.1__HsALB_Pf-CSP(19-272) (opt2)
gggagagucccgcagucggcguccagcggcucugcuuguucgugugugugucguugcaggccuuauucaagcuuaccaugaagugggucaccuucaucucccuccucuuccucuucuccuccgccuacucccucuuccaggaguaccagugcuacggcuccuccuccaacacccgcguccucaacgagcucaacuacgacaacgccggcaccaaccucuacaacgagcucgagaugaacuacuacggcaagcaggagaacugguacucccucaagaagaacucccgcucccucggcgagaacgacgacggcaacaacgaggacaacgagaagcuccgcaagcccaagcacaagaagcucaagcagcccgccgacggcaaccccgaccccaacgccaaccccaacgucgaccccaacgccaaccccaacgucgaccccaacgccaaccccaacgucgaccccaacgccaaccccaacgccaaccccaacgccaaccccaacgccaaccccaacgccaaccccaacgccaaccccaacgccaaccccaacgccaaccccaacgccaaccccaacgccaaccccaacgccaaccccaacgccaaccccaacgccaaccccaacgccaaccccaacgccaaccccaacgccaaccccaacgccaaccccaacgucgaccccaacgccaaccccaacgccaaccccaacgccaaccccaacgccaaccccaacgccaaccccaacgccaaccccaacgccaaccccaacgccaaccccaacgccaaccccaacgccaaccccaacgccaaccccaacgccaaccccaacgccaaccccaacgccaaccccaacgccaaccccaacgccaaccccaacgccaaccccaacgccaaccccugaggacuagucccuguucccagagcccacuuuuuuuucuuuuuuugaaauaaaauagccugucuuucagaucuaaaaaaaaaaaaaaaaaaaaaaaaaaaaaaaaaaaaaaaaaaaaaaaaaaaaaaaaaaaaaaaaugcaucccccccccccccccccccccccccccccccaaaggcucuuuucagagccaccagaauu

SEQ ID NO: 418 - RNA, 1257 nt, Artificial Sequence
  mRNA Design a-1 (A64-N5-C30-hSL-N5) comprising derived and/or modified sequence from Pf(3D7)__XP_001351122.1__HsALB_Pf-CSP(19-272)_L(AAY)_Pf-CSP(310-3 27)_L(AAY)_Pf-CSP(346-375) (opt2)
gggagagucccgcagucggcguccagcggcucugcuuguucgugugugugucguugcaggccuuauucaagcuuaccaugaagugggucaccuucaucucccuccucuuccucuucuccuccgccuacucccucuuccaggaguaccagugcuacggcuccuccuccaacacccgcguccucaacgagcucaacuacgacaacgccggcaccaaccucuacaacgagcucgagaugaacuacuacggcaagcaggagaacugguacucccucaagaagaacucccgcucccucggcgagaacgacgacggcaacaacgaggacaacgagaagcuccgcaagcccaagcacaagaagcucaagcagcccgccgacggcaaccccgaccccaacgccaaccccaacgucgaccccaacgccaaccccaacgucgaccccaacgccaaccccaacgucgaccccaacgccaaccccaacgccaaccccaacgccaaccccaacgccaaccccaacgccaaccccaacgccaaccccaacgccaaccccaacgccaaccccaacgccaaccccaacgccaaccccaacgccaaccccaacgccaaccccaacgccaaccccaacgccaaccccaacgccaaccccaacgccaaccccaacgccaaccccaacgucgaccccaacgccaaccccaacgccaaccccaacgccaaccccaacgccaaccccaacgccaaccccaacgccaaccccaacgccaaccccaacgccaaccccaacgccaaccccaacgccaaccccaacgccaaccccaacgccaaccccaacgccaaccccaacgccaaccccaacgccaaccccaacgccaaccccaacgccaaccccaacgccaaccccgccgccuacgagcccuccgacaagcacaucaaggaguaccucaacaagauccagaacucccucgccgccuacaucaagcccggcuccgccaacaagcccaaggacgagcucgacuacgccaacgacaucgagaagaagaucugcaagauggagaagugcuccugaggacuagucccuguucccagagcccacuuuuuuuucuuuuuuugaaauaaaauagccugucuuucagaucuaaaaaaaaaaaaaaaaaaaaaaaaaaaaaaaaaaaaaaaaaaaaaaaaaaaaaaaaaaaaaaaaugcaucccccccccccccccccccccccccccccccaaaggcucuuuucagagccaccagaauu

SEQ ID NO: 419 - RNA, 1218 nt, Artificial Sequence
  mRNA Design a-1 (A64-N5-C30-hSL-N5) comprising derived and/or modified sequence from Pf(3D7)__XP_001351122.1__HsALB_Pf-CSP(19-272)_L(AAY)_Pf-CSP(346-3 65)_L(AAY)_P2 (opt2)
gggagagucccgcagucggcguccagcggcucugcuuguucgugugugugucguugcaggccuuauucaagcuuaccaugaagugggucaccuucaucucccuccucuuccucuucuccuccgccuacucccucuuccaggaguaccagugcuacggcuccuccuccaacacccgcguccucaacgagcucaacuacgacaacgccggcaccaaccucuacaacgagcucgagaugaacuacuacggcaagcaggagaacugguacucccucaagaagaacucccgcucccucggcgagaacgacgacggcaacaacgaggacaacgagaagcuccgcaagcccaagcacaagaagcucaagcagcccgccgacggcaaccccgaccccaacgccaaccccaacgucgaccccaacgccaaccccaacgucgaccccaacgccaaccccaacgucgaccccaacgccaaccccaacgccaaccccaacgccaaccccaacgccaaccccaacgccaaccccaacgccaaccccaacgccaaccccaacgccaaccccaacgccaaccccaacgccaaccccaacgccaaccccaacgccaaccccaacgccaaccccaacgccaaccccaacgccaaccccaacgccaaccccaacgccaaccccaacgucgaccccaacgccaaccccaacgccaaccccaacgccaaccccaacgccaaccccaacgccaaccccaacgccaaccccaacgccaaccccaacgccaaccccaacgccaaccccaacgccaaccccaacgccaaccccaacgccaaccccaacgccaaccccaacgccaaccccaacgccaaccccaacgccaaccccaacgccaaccccaacgccaaccccgccgccuacaucaagcccggcuccgccaacaagcccaaggacgagcucgacuacgccaacgacaucgaggccgccuaccaguacaucaaggccaacuccaaguucaucggcaucaccgagcucugaggacuagucccuguucccagagcccacuuuuuuuucuuuuuuugaaauaaaauagccugucuuucagaucuaaaaaaaaaaaaaaaaaaaaaaaaaaaaaaaaaaaaaaaaaaaaaaaaaaaaaaaaaaaaaaaaugcaucccccccccccccccccccccccccccccccaaaggcucuuuucagagccaccagaauu

SEQ ID NO: 420 - RNA, 1212 nt, Artificial Sequence
  mRNA Design a-1 (A64-N5-C30-hSL-N5) comprising derived and/or modified sequence from Pf(3D7)__XP_001351122.1__HsALB_Pf-CSP(19-272)_L(AAY)_Pf-CSP(346-3 65)_L(AAY)_PADRE (opt2)
gggagagucccgcagucggcguccagcggcucugcuuguucgugugugugucguugcaggccuuauucaagcuuaccaugaagugggucaccuucaucucccuccucuuccucuucuccuccgccuacucccucuuccaggaguaccagugcuacggcuccuccuccaacacccgcguccucaacgagcucaacuacgacaacgccggcaccaaccucuacaacgagcucgagaugaacuacuacggcaagcaggagaacugguacucccucaagaagaacucccgcucccucggcgagaacgacgacggcaacaacgaggacaacgagaagcuccgcaagcccaagcacaagaagcucaagcagcccgccgacggcaaccccgaccccaacgccaaccccaacgucgaccccaacgccaaccccaacgucgaccccaacgccaaccccaacgucgaccccaacgccaaccccaacgccaaccccaacgccaaccccaacgccaaccccaacgccaaccccaacgccaaccccaacgccaaccccaacgccaaccccaacgccaaccccaacgccaaccccaacgccaaccccaacgccaaccccaacgccaaccccaacgccaaccccaacgccaaccccaacgccaaccccaacgccaaccccaacgucgaccccaacgccaaccccaacgccaaccccaacgccaaccccaacgccaaccccaacgccaaccccaacgccaaccccaacgccaaccccaacgccaaccccaacgccaaccccaacgccaaccccaacgccaaccccaacgccaaccccaacgccaaccccaacgccaaccccaacgccaaccccaacgccaaccccaacgccaaccccaacgccaaccccgccgccuacaucaagcccggcuccgccaacaagcccaaggacgagcucgacuacgccaacgacaucgaggccgccuacgccaaguucgucgccgccuggacccucaaggccgccgccugaggacuagucccuguucccagagcccacuuuuuuuucuuuuuuugaaauaaaauagccugucuuucagaucuaaaaaaaaaaaaaaaaaaaaaaaaaaaaaaaaaaaaaaaaaaaaaaaaaaaaaaaaaaaaaaaaugcaucccccccccccccccccccccccccccccccaaaggcucuuuucagagccaccagaauu

SEQ ID NO: 421 - RNA, 1269 nt, Artificial Sequence
  mRNA Design a-1 (A64-N5-C30-hSL-N5) comprising derived and/or modified sequence from Pf(3D7)__XP_001351122.1__HsALB_Pf-CSP(19-272)_L(G4S)_Pf-CSP(310-3 27)_L(G4S)_Pf-CSP(346-375) (opt2)
gggagagucccgcagucggcguccagcggcucugcuuguucgugugugugucguugcaggccuuauucaagcuuaccaugaagugggucaccuucaucucccuccucuuccucuucuccuccgccuacucccucuuccaggaguaccagugcuacggcuccuccuccaacacccgcguccucaacgagcucaacuacgacaacgccggcaccaaccucuacaacgagcucgagaugaacuacuacggcaagcaggagaacugguacucccucaagaagaacucccgcucccucggcgagaacgacgacggcaacaacgaggacaacgagaagcuccgcaagcccaagcacaagaagcucaagcagcccgccgacggcaaccccgaccccaacgccaaccccaacgucgaccccaacgccaaccccaacgucgaccccaacgccaaccccaacgucgaccccaacgccaaccccaacgccaaccccaacgccaaccccaacgccaaccccaacgccaaccccaacgccaaccccaacgccaaccccaacgccaaccccaacgccaaccccaacgccaaccccaacgccaaccccaacgccaaccccaacgccaaccccaacgccaaccccaacgccaaccccaacgccaaccccaacgccaaccccaacgucgaccccaacgccaaccccaacgccaaccccaacgccaaccccaacgccaaccccaacgccaaccccaacgccaaccccaacgccaaccccaacgccaaccccaacgccaaccccaacgccaaccccaacgccaaccccaacgccaaccccaacgccaaccccaacgccaaccccaacgccaaccccaacgccaaccccaacgccaaccccaacgccaaccccggcggcggcggcuccgagcccuccgacaagcacaucaaggaguaccucaacaagauccagaacucccucggcggcggcggcuccaucaagcccggcuccgccaacaagcccaaggacgagcucgacuacgccaacgacaucgagaagaagaucugcaagauggagaagugcuccugaggacuagucccuguucccagagcccacuuuuuuuucuuuuuuugaaauaaaauagccugucuuucagaucuaaaaaaaaaaaaaaaaaaaaaaaaaaaaaaaaaaaaaaaaaaaaaaaaaaaaaaaaaaaaaaaaugcaucccccccccccccccccccccccccccccccaaaggcucuuuucagagccaccagaauu

SEQ ID NO: 422 - RNA, 1254 nt, Artificial Sequence
  mRNA Design a-1 (A64-N5-C30-hSL-N5) comprising derived and/or modified sequence from Pf(3D7)__XP_001351122.1__HsALB_Pf-CSP(19-272)_L(G4S)_Pf-CSP(310-3 27)_Pf-CSP(346-375) (opt2)
gggagagucccgcagucggcguccagcggcucugcuuguucgugugugugucguugcaggccuuauucaagcuuaccaugaagugggucaccuucaucucccuccucuuccucuucuccuccgccuacucccucuuccaggaguaccagugcuacggcuccuccuccaacacccgcguccucaacgagcucaacuacgacaacgccggcaccaaccucuacaacgagcucgagaugaacuacuacggcaagcaggagaacugguacucccucaagaagaacucccgcucccucggcgagaacgacgacggcaacaacgaggacaacgagaagcuccgcaagcccaagcacaagaagcucaagcagcccgccgacggcaaccccgaccccaacgccaaccccaacgucgaccccaacgccaaccccaacgucgaccccaacgccaaccccaacgucgaccccaacgccaaccccaacgccaaccccaacgccaaccccaacgccaaccccaacgccaaccccaacgccaaccccaacgccaaccccaacgccaaccccaacgccaaccccaacgccaaccccaacgccaaccccaacgccaaccccaacgccaaccccaacgccaaccccaacgccaaccccaacgccaaccccaacgccaaccccaacgucgaccccaacgccaaccccaacgccaaccccaacgccaaccccaacgccaaccccaacgccaaccccaacgccaaccccaacgccaaccccaacgccaaccccaacgccaaccccaacgccaaccccaacgccaaccccaacgccaaccccaacgccaaccccaacgccaaccccaacgccaaccccaacgccaaccccaacgccaaccccaacgccaaccccggcggcggcggcuccgagcccuccgacaagcacaucaaggaguaccucaacaagauccagaacucccucaucaagcccggcuccgccaacaagcccaaggacgagcucgacuacgccaacgacaucgagaagaagaucugcaagauggagaagugcuccugaggacuagucccuguucccagagcccacuuuuuuuucuuuuuuugaaauaaaauagccugucuuucagaucuaaaaaaaaaaaaaaaaaaaaaaaaaaaaaaaaaaaaaaaaaaaaaaaaaaaaaaaaaaaaaaaaugcaucccccccccccccccccccccccccccccccaaaggcucuuuucagagccaccagaauu

SEQ ID NO: 423 - RNA, 1254 nt, Artificial Sequence
  mRNA Design a-1 (A64-N5-C30-hSL-N5) comprising derived and/or modified sequence from Pf(3D7)__XP_001351122.1__HsALB_Pf-CSP(19-325) (opt2)
gggagagucccgcagucggcguccagcggcucugcuuguucgugugugugucguugcaggccuuauucaagcuuaccaugaagugggucaccuucaucucccuccucuuccucuucuccuccgccuacucccucuuccaggaguaccagugcuacggcuccuccuccaacacccgcguccucaacgagcucaacuacgacaacgccggcaccaaccucuacaacgagcucgagaugaacuacuacggcaagcaggagaacugguacucccucaagaagaacucccgcucccucggcgagaacgacgacggcaacaacgaggacaacgagaagcuccgcaagcccaagcacaagaagcucaagcagcccgccgacggcaaccccgaccccaacgccaaccccaacgucgaccccaacgccaaccccaacgucgaccccaacgccaaccccaacgucgaccccaacgccaaccccaacgccaaccccaacgccaaccccaacgccaaccccaacgccaaccccaacgccaaccccaacgccaaccccaacgccaaccccaacgccaaccccaacgccaaccccaacgccaaccccaacgccaaccccaacgccaaccccaacgccaaccccaacgccaaccccaacgccaaccccaacgccaaccccaacgucgaccccaacgccaaccccaacgccaaccccaacgccaaccccaacgccaaccccaacgccaaccccaacgccaaccccaacgccaaccccaacgccaaccccaacgccaaccccaacgccaaccccaacgccaaccccaacgccaaccccaacgccaaccccaacgccaaccccaacgccaaccccaacgccaaccccaacgccaaccccaacgccaaccccaacaagaacaaccagggcaacggccagggccacaacaugcccaacgaccccaaccgcaacgucgacgagaacgccaacgccaacuccgccgucaagaacaacaacaacgaggagcccuccgacaagcacaucaaggaguaccucaacaagauccagaacugaggacuagucccuguucccagagcccacuuuuuuuucuuuuuuugaaauaaaauagccugucuuucagaucuaaaaaaaaaaaaaaaaaaaaaaaaaaaaaaaaaaaaaaaaaaaaaaaaaaaaaaaaaaaaaaaaugcaucccccccccccccccccccccccccccccccaaaggcucuuuucagagccaccagaauu

SEQ ID NO: 424 - RNA, 1431 nt, Artificial Sequence
  mRNA Design a-1 (A64-N5-C30-hSL-N5) comprising derived and/or modified sequence from Pf(3D7)__XP_001351122.1__HsALB_Pf-CSP(19-384) (opt2)
gggagagucccgcagucggcguccagcggcucugcuuguucgugugugugucguugcaggccuuauucaagcuuaccaugaagugggucaccuucaucucccuccucuuccucuucuccuccgccuacucccucuuccaggaguaccagugcuacggcuccuccuccaacacccgcguccucaacgagcucaacuacgacaacgccggcaccaaccucuacaacgagcucgagaugaacuacuacggcaagcaggagaacugguacucccucaagaagaacucccgcucccucggcgagaacgacgacggcaacaacgaggacaacgagaagcuccgcaagcccaagcacaagaagcucaagcagcccgccgacggcaaccccgaccccaacgccaaccccaacgucgaccccaacgccaaccccaacgucgaccccaacgccaaccccaacgucgaccccaacgccaaccccaacgccaaccccaacgccaaccccaacgccaaccccaacgccaaccccaacgccaaccccaacgccaaccccaacgccaaccccaacgccaaccccaacgccaaccccaacgccaaccccaacgccaaccccaacgccaaccccaacgccaaccccaacgccaaccccaacgccaaccccaacgccaaccccaacgucgaccccaacgccaaccccaacgccaaccccaacgccaaccccaacgccaaccccaacgccaaccccaacgccaaccccaacgccaaccccaacgccaaccccaacgccaaccccaacgccaaccccaacgccaaccccaacgccaaccccaacgccaaccccaacgccaaccccaacgccaaccccaacgccaaccccaacgccaaccccaacgccaaccccaacaagaacaaccagggcaacggccagggccacaacaugcccaacgaccccaaccgcaacgucgacgagaacgccaacgccaacuccgccgucaagaacaacaacaacgaggagcccuccgacaagcacaucaaggaguaccucaacaagauccagaacucccucuccaccgaguggucccccugcuccgucaccugcggcaacggcauccagguccgcaucaagcccggcuccgccaacaagcccaaggacgagcucgacuacgccaacgacaucgagaagaagaucugcaagauggagaagugcuccuccgucuucaacgucgucaacuccuccugaggacuagucccuguucccagagcccacuuuuuuuucuuuuuuugaaauaaaauagccugucuuucagaucuaaaaaaaaaaaaaaaaaaaaaaaaaaaaaaaaaaaaaaaaaaaaaaaaaaaaaaaaaaaaaaaaugcaucccccccccccccccccccccccccccccccaaaggcucuuuucagagccaccagaauu

SEQ ID NO: 425 - RNA, 1569 nt, Artificial Sequence
  mRNA Design a-1 (A64-N5-C30-hSL-N5) comprising derived and/or modified sequence from Pf(3D7)__XP_001351122.1__HsALB_Pf-CSP(19-384)_TM domain HA (opt2)
gggagagucccgcagucggcguccagcggcucugcuuguucgugugugugucguugcaggccuuauucaagcuuaccaugaagugggucaccuucaucucccuccucuuccucuucuccuccgccuacucccucuuccaggaguaccagugcuacggcuccuccuccaacacccgcguccucaacgagcucaacuacgacaacgccggcaccaaccucuacaacgagcucgagaugaacuacuacggcaagcaggagaacugguacucccucaagaagaacucccgcucccucggcgagaacgacgacggcaacaacgaggacaacgagaagcuccgcaagcccaagcacaagaagcucaagcagcccgccgacggcaaccccgaccccaacgccaaccccaacgucgaccccaacgccaaccccaacgucgaccccaacgccaaccccaacgucgaccccaacgccaaccccaacgccaaccccaacgccaaccccaacgccaaccccaacgccaaccccaacgccaaccccaacgccaaccccaacgccaaccccaacgccaaccccaacgccaaccccaacgccaaccccaacgccaaccccaacgccaaccccaacgccaaccccaacgccaaccccaacgccaaccccaacgccaaccccaacgucgaccccaacgccaaccccaacgccaaccccaacgccaaccccaacgccaaccccaacgccaaccccaacgccaaccccaacgccaaccccaacgccaaccccaacgccaaccccaacgccaaccccaacgccaaccccaacgccaaccccaacgccaaccccaacgccaaccccaacgccaaccccaacgccaaccccaacgccaaccccaacgccaaccccaacaagaacaaccagggcaacggccagggccacaacaugcccaacgaccccaaccgcaacgucgacgagaacgccaacgccaacuccgccgucaagaacaacaacaacgaggagcccuccgacaagcacaucaaggaguaccucaacaagauccagaacucccucuccaccgaguggucccccugcuccgucaccugcggcaacggcauccagguccgcaucaagcccggcuccgccaacaagcccaaggacgagcucgacuacgccaacgacaucgagaagaagaucugcaagauggagaagugcuccuccgucuucaacgucgucaacuccuccaagcucgaguccacccgcaucuaccagauccucgccaucuacuccaccgucgccuccucccucguccucgucgucucccucggcgccaucuccuucuggaugugcuccaacggcucccuccagugccgcaucugcaucugaggacuagucccuguucccagagcccacuuuuuuuucuuuuuuugaaauaaaauagccugucuuucagaucuaaaaaaaaaaaaaaaaaaaaaaaaaaaaaaaaaaaaaaaaaaaaaaaaaaaaaaaaaaaaaaaaugcaucccccccccccccccccccccccccccccccaaaggcucuuuucagagccaccagaauu

SEQ ID NO: 426 - RNA, 1281 nt, Artificial Sequence
  mRNA Design a-1 (A64-N5-C30-hSL-N5) comprising derived and/or modified sequence from Pf(3D7)__XP_001351122.1__HsALB_Pf-CSP(82-397) (opt2)
gggagagucccgcagucggcguccagcggcucugcuuguucgugugugugucguugcaggccuuauucaagcuuaccaugaagugggucaccuucaucucccuccucuuccucuucuccuccgccuacuccgacaacgagaagcuccgcaagcccaagcacaagaagcucaagcagcccgccgacggcaaccccgaccccaacgccaaccccaacgucgaccccaacgccaaccccaacgucgaccccaacgccaaccccaacgucgaccccaacgccaaccccaacgccaaccccaacgccaaccccaacgccaaccccaacgccaaccccaacgccaaccccaacgccaaccccaacgccaaccccaacgccaaccccaacgccaaccccaacgccaaccccaacgccaaccccaacgccaaccccaacgccaaccccaacgccaaccccaacgccaaccccaacgccaaccccaacgucgaccccaacgccaaccccaacgccaaccccaacgccaaccccaacgccaaccccaacgccaaccccaacgccaaccccaacgccaaccccaacgccaaccccaacgccaaccccaacgccaaccccaacgccaaccccaacgccaaccccaacgccaaccccaacgccaaccccaacgccaaccccaacgccaaccccaacgccaaccccaacgccaaccccaacaagaacaaccagggcaacggccagggccacaacaugcccaacgaccccaaccgcaacgucgacgagaacgccaacgccaacuccgccgucaagaacaacaacaacgaggagcccuccgacaagcacaucaaggaguaccucaacaagauccagaacucccucuccaccgaguggucccccugcuccgucaccugcggcaacggcauccagguccgcaucaagcccggcuccgccaacaagcccaaggacgagcucgacuacgccaacgacaucgagaagaagaucugcaagauggagaagugcuccuccgucuucaacgucgucaacuccuccaucggccucaucaugguccucuccuuccucuuccucaacugaggacuagucccuguucccagagcccacuuuuuuuucuuuuuuugaaauaaaauagccugucuuucagaucuaaaaaaaaaaaaaaaaaaaaaaaaaaaaaaaaaaaaaaaaaaaaaaaaaaaaaaaaaaaaaaaaugcaucccccccccccccccccccccccccccccccaaaggcucuuuucagagccaccagaauu

SEQ ID NO: 427 - RNA, 633 nt, Artificial Sequence
  mRNA Design a-1 (A64-N5-C30-hSL-N5) comprising derived and/or modified sequence from Pf(3D7)__XP_001351122.1__HsALB_Pf-CSP(93-192) (opt2)
gggagagucccgcagucggcguccagcggcucugcuuguucgugugugugucguugcaggccuuauucaagcuuaccaugaagugggucaccuucaucucccuccucuuccucuucuccuccgccuacuccaagcucaagcagcccgccgacggcaaccccgaccccaacgccaaccccaacgucgaccccaacgccaaccccaacgucgaccccaacgccaaccccaacgucgaccccaacgccaaccccaacgccaaccccaacgccaaccccaacgccaaccccaacgccaaccccaacgccaaccccaacgccaaccccaacgccaaccccaacgccaaccccaacgccaaccccaacgccaaccccaacgccaaccccaacgccaaccccaacgccaaccccaacgccaaccccaacgccaaccccugaggacuagucccuguucccagagcccacuuuuuuuucuuuuuuugaaauaaaauagccugucuuucagaucuaaaaaaaaaaaaaaaaaaaaaaaaaaaaaaaaaaaaaaaaaaaaaaaaaaaaaaaaaaaaaaaaugcaucccccccccccccccccccccccccccccccaaaggcucuuuucagagccaccagaauu

SEQ ID NO: 428 - RNA, 873 nt, Artificial Sequence
  mRNA Design a-1 (A64-N5-C30-hSL-N5) comprising derived and/or modified sequence from Pf(3D7)__XP_001351122.1__HsALB_Pf-CSP(93-272) (opt2)
gggagagucccgcagucggcguccagcggcucugcuuguucgugugugugucguugcaggccuuauucaagcuuaccaugaagugggucaccuucaucucccuccucuuccucuucuccuccgccuacuccaagcucaagcagcccgccgacggcaaccccgaccccaacgccaaccccaacgucgaccccaacgccaaccccaacgucgaccccaacgccaaccccaacgucgaccccaacgccaaccccaacgccaaccccaacgccaaccccaacgccaaccccaacgccaaccccaacgccaaccccaacgccaaccccaacgccaaccccaacgccaaccccaacgccaaccccaacgccaaccccaacgccaaccccaacgccaaccccaacgccaaccccaacgccaaccccaacgccaaccccaacgccaaccccaacgucgaccccaacgccaaccccaacgccaaccccaacgccaaccccaacgccaaccccaacgccaaccccaacgccaaccccaacgccaaccccaacgccaaccccaacgccaaccccaacgccaaccccaacgccaaccccaacgccaaccccaacgccaaccccaacgccaaccccaacgccaaccccaacgccaaccccaacgccaaccccaacgccaaccccugaggacuagucccuguucccagagcccacuuuuuuuucuuuuuuugaaauaaaauagccugucuuucagaucuaaaaaaaaaaaaaaaaaaaaaaaaaaaaaaaaaaaaaaaaaaaaaaaaaaaaaaaaaaaaaaaaugcaucccccccccccccccccccccccccccccccaaaggcucuuuucagagccaccagaauu

SEQ ID NO: 429 - RNA, 1248 nt, Artificial Sequence
  mRNA Design a-1 (A64-N5-C30-hSL-N5) comprising derived and/or modified sequence from Pf(3D7)__XP_001351122.1__HsALB_Pf-CSP(93-397) (opt2)
gggagagucccgcagucggcguccagcggcucugcuuguucgugugugugucguugcaggccuuauucaagcuuaccaugaagugggucaccuucaucucccuccucuuccucuucuccuccgccuacuccaagcucaagcagcccgccgacggcaaccccgaccccaacgccaaccccaacgucgaccccaacgccaaccccaacgucgaccccaacgccaaccccaacgucgaccccaacgccaaccccaacgccaaccccaacgccaaccccaacgccaaccccaacgccaaccccaacgccaaccccaacgccaaccccaacgccaaccccaacgccaaccccaacgccaaccccaacgccaaccccaacgccaaccccaacgccaaccccaacgccaaccccaacgccaaccccaacgccaaccccaacgccaaccccaacgucgaccccaacgccaaccccaacgccaaccccaacgccaaccccaacgccaaccccaacgccaaccccaacgccaaccccaacgccaaccccaacgccaaccccaacgccaaccccaacgccaaccccaacgccaaccccaacgccaaccccaacgccaaccccaacgccaaccccaacgccaaccccaacgccaaccccaacgccaaccccaacgccaaccccaacaagaacaaccagggcaacggccagggccacaacaugcccaacgaccccaaccgcaacgucgacgagaacgccaacgccaacuccgccgucaagaacaacaacaacgaggagcccuccgacaagcacaucaaggaguaccucaacaagauccagaacucccucuccaccgaguggucccccugcuccgucaccugcggcaacggcauccagguccgcaucaagcccggcuccgccaacaagcccaaggacgagcucgacuacgccaacgacaucgagaagaagaucugcaagauggagaagugcuccuccgucuucaacgucgucaacuccuccaucggccucaucaugguccucuccuuccucuuccucaacugaggacuagucccuguucccagagcccacuuuuuuuucuuuuuuugaaauaaaauagccugucuuucagaucuaaaaaaaaaaaaaaaaaaaaaaaaaaaaaaaaaaaaaaaaaaaaaaaaaaaaaaaaaaaaaaaaugcaucccccccccccccccccccccccccccccccaaaggcucuuuucagagccaccagaauu

SEQ ID NO: 430 - RNA, 618 nt, Artificial Sequence
  mRNA Design a-1 (A64-N5-C30-hSL-N5) comprising derived and/or modified sequence from Pf(3D7)__XP_001351122.1__HsALB_Pf-CSP(98-192) (opt2)
gggagagucccgcagucggcguccagcggcucugcuuguucgugugugugucguugcaggccuuauucaagcuuaccaugaagugggucaccuucaucucccuccucuuccucuucuccuccgccuacuccgccgacggcaaccccgaccccaacgccaaccccaacgucgaccccaacgccaaccccaacgucgaccccaacgccaaccccaacgucgaccccaacgccaaccccaacgccaaccccaacgccaaccccaacgccaaccccaacgccaaccccaacgccaaccccaacgccaaccccaacgccaaccccaacgccaaccccaacgccaaccccaacgccaaccccaacgccaaccccaacgccaaccccaacgccaaccccaacgccaaccccaacgccaaccccugaggacuagucccuguucccagagcccacuuuuuuuucuuuuuuugaaauaaaauagccugucuuucagaucuaaaaaaaaaaaaaaaaaaaaaaaaaaaaaaaaaaaaaaaaaaaaaaaaaaaaaaaaaaaaaaaaugcaucccccccccccccccccccccccccccccccaaaggcucuuuucagagccaccagaauu

SEQ ID NO: 431 - RNA, 858 nt, Artificial Sequence
  mRNA Design a-1 (A64-N5-C30-hSL-N5) comprising derived and/or modified sequence from Pf(3D7)__XP_001351122.1__HsALB_Pf-CSP(98-272) (opt2)
gggagagucccgcagucggcguccagcggcucugcuuguucgugugugugucguugcaggccuuauucaagcuuaccaugaagugggucaccuucaucucccuccucuuccucuucuccuccgccuacuccgccgacggcaaccccgaccccaacgccaaccccaacgucgaccccaacgccaaccccaacgucgaccccaacgccaaccccaacgucgaccccaacgccaaccccaacgccaaccccaacgccaaccccaacgccaaccccaacgccaaccccaacgccaaccccaacgccaaccccaacgccaaccccaacgccaaccccaacgccaaccccaacgccaaccccaacgccaaccccaacgccaaccccaacgccaaccccaacgccaaccccaacgccaaccccaacgccaaccccaacgucgaccccaacgccaaccccaacgccaaccccaacgccaaccccaacgccaaccccaacgccaaccccaacgccaaccccaacgccaaccccaacgccaaccccaacgccaaccccaacgccaaccccaacgccaaccccaacgccaaccccaacgccaaccccaacgccaaccccaacgccaaccccaacgccaaccccaacgccaaccccaacgccaaccccugaggacuagucccuguucccagagcccacuuuuuuuucuuuuuuugaaauaaaauagccugucuuucagaucuaaaaaaaaaaaaaaaaaaaaaaaaaaaaaaaaaaaaaaaaaaaaaaaaaaaaaaaaaaaaaaaaugcaucccccccccccccccccccccccccccccccaaaggcucuuuucagagccaccagaauu

SEQ ID NO: 432 - RNA, 1164 nt, Artificial Sequence
  mRNA Design a-1 (A64-N5-C30-hSL-N5) comprising derived and/or modified sequence from Pf(3D7)__XP_001351122.1__HsALB_Pf-CSP(98-374) (opt2)
gggagagucccgcagucggcguccagcggcucugcuuguucgugugugugucguugcaggccuuauucaagcuuaccaugaagugggucaccuucaucucccuccucuuccucuucuccuccgccuacuccgccgacggcaaccccgaccccaacgccaaccccaacgucgaccccaacgccaaccccaacgucgaccccaacgccaaccccaacgucgaccccaacgccaaccccaacgccaaccccaacgccaaccccaacgccaaccccaacgccaaccccaacgccaaccccaacgccaaccccaacgccaaccccaacgccaaccccaacgccaaccccaacgccaaccccaacgccaaccccaacgccaaccccaacgccaaccccaacgccaaccccaacgccaaccccaacgccaaccccaacgucgaccccaacgccaaccccaacgccaaccccaacgccaaccccaacgccaaccccaacgccaaccccaacgccaaccccaacgccaaccccaacgccaaccccaacgccaaccccaacgccaaccccaacgccaaccccaacgccaaccccaacgccaaccccaacgccaaccccaacgccaaccccaacgccaaccccaacgccaaccccaacgccaaccccaacaagaacaaccagggcaacggccagggccacaacaugcccaacgaccccaaccgcaacgucgacgagaacgccaacgccaacuccgccgucaagaacaacaacaacgaggagcccuccgacaagcacaucaaggaguaccucaacaagauccagaacucccucuccaccgaguggucccccugcuccgucaccugcggcaacggcauccagguccgcaucaagcccggcuccgccaacaagcccaaggacgagcucgacuacgccaacgacaucgagaagaagaucugcaagauggagaagugcugaggacuagucccuguucccagagcccacuuuuuuuucuuuuuuugaaauaaaauagccugucuuucagaucuaaaaaaaaaaaaaaaaaaaaaaaaaaaaaaaaaaaaaaaaaaaaaaaaaaaaaaaaaaaaaaaaugcaucccccccccccccccccccccccccccccccaaaggcucuuuucagagccaccagaauu

SEQ ID NO: 433 - RNA, 1233 nt, Artificial Sequence
  mRNA Design a-1 (A64-N5-C30-hSL-N5) comprising derived and/or modified sequence from Pf(3D7)__XP_001351122.1__HsALB_Pf-CSP(98-397) (opt2)
gggagagucccgcagucggcguccagcggcucugcuuguucgugugugugucguugcaggccuuauucaagcuuaccaugaagugggucaccuucaucucccuccucuuccucuucuccuccgccuacuccgccgacggcaaccccgaccccaacgccaaccccaacgucgaccccaacgccaaccccaacgucgaccccaacgccaaccccaacgucgaccccaacgccaaccccaacgccaaccccaacgccaaccccaacgccaaccccaacgccaaccccaacgccaaccccaacgccaaccccaacgccaaccccaacgccaaccccaacgccaaccccaacgccaaccccaacgccaaccccaacgccaaccccaacgccaaccccaacgccaaccccaacgccaaccccaacgccaaccccaacgucgaccccaacgccaaccccaacgccaaccccaacgccaaccccaacgccaaccccaacgccaaccccaacgccaaccccaacgccaaccccaacgccaaccccaacgccaaccccaacgccaaccccaacgccaaccccaacgccaaccccaacgccaaccccaacgccaaccccaacgccaaccccaacgccaaccccaacgccaaccccaacgccaaccccaacaagaacaaccagggcaacggccagggccacaacaugcccaacgaccccaaccgcaacgucgacgagaacgccaacgccaacuccgccgucaagaacaacaacaacgaggagcccuccgacaagcacaucaaggaguaccucaacaagauccagaacucccucuccaccgaguggucccccugcuccgucaccugcggcaacggcauccagguccgcaucaagcccggcuccgccaacaagcccaaggacgagcucgacuacgccaacgacaucgagaagaagaucugcaagauggagaagugcuccuccgucuucaacgucgucaacuccuccaucggccucaucaugguccucuccuuccucuuccucaacugaggacuagucccuguucccagagcccacuuuuuuuucuuuuuuugaaauaaaauagccugucuuucagaucuaaaaaaaaaaaaaaaaaaaaaaaaaaaaaaaaaaaaaaaaaaaaaaaaaaaaaaaaaaaaaaaaugcaucccccccccccccccccccccccccccccccaaaggcucuuuucagagccaccagaauu

SEQ ID NO: 434 - RNA, 1560 nt, Artificial Sequence
  mRNA Design a-1 (A64-N5-C30-hSL-N5) comprising derived and/or modified sequence from Pf(3D7)__XP_001351122.1__HsALB_Pf-CSP(199-377)_L(PVTN)_HBsAg (opt2)
gggagagucccgcagucggcguccagcggcucugcuuguucgugugugugucguugcaggccuuauucaagcuuaccaugaagugggucaccuucaucucccuccucuuccucuucuccuccgccuacuccgaccccaacgccaaccccaacgccaaccccaacgccaaccccaacgccaaccccaacgccaaccccaacgccaaccccaacgccaaccccaacgccaaccccaacgccaaccccaacgccaaccccaacgccaaccccaacgccaaccccaacgccaaccccaacgccaaccccaacgccaaccccaacgccaaccccaacgccaaccccaacgccaaccccaacaagaacaaccagggcaacggccagggccacaacaugcccaacgaccccaaccgcaacgucgacgagaacgccaacgccaacuccgccgucaagaacaacaacaacgaggagcccuccgacaagcacaucaaggaguaccucaacaagauccagaacucccucuccaccgaguggucccccugcuccgucaccugcggcaacggcauccagguccgcaucaagcccggcuccgccaacaagcccaaggacgagcucgacuacgccaacgacaucgagaagaagaucugcaagauggagaagugcuccuccguccccgucaccaacauggagaacaucaccuccggcuuccucggcccccuccucguccuccaggccggcuucuuccuccucacccgcauccucaccaucccccagucccucgacuccugguggaccucccucaacuuccucggcggcucccccgucugccucggccagaacucccagucccccaccuccaaccacucccccaccuccugcccccccaucugccccggcuaccgcuggaugugccuccgccgcuucaucaucuuccucuucauccuccuccucugccucaucuuccuccucguccuccucgacuaccagggcaugcuccccgucugcccccucauccccggcuccaccaccaccaacaccggccccugcaagaccugcaccacccccgcccagggcaacuccauguuccccuccugcugcugcaccaagcccaccgacggcaacugcaccugcauccccauccccuccuccugggccuucgccaaguaccucugggagugggccuccguccgcuucuccuggcucucccuccucguccccuucguccagugguucgucggccucucccccaccgucuggcucuccgccaucuggaugaugugguacuggggccccucccucuacuccaucgucucccccuucaucccccuccuccccaucuucuucugccucugggucuacaucugaggacuagucccuguucccagagcccacuuuuuuuucuuuuuuugaaauaaaauagccugucuuucagaucuaaaaaaaaaaaaaaaaaaaaaaaaaaaaaaaaaaaaaaaaaaaaaaaaaaaaaaaaaaaaaaaaugcaucccccccccccccccccccccccccccccccaaaggcucuuuucagagccaccagaauu

SEQ ID NO: 435 - RNA, 1299 nt, Artificial Sequence
  mRNA Design a-1 (A64-N5-C30-hSL-N5) comprising derived and/or modified sequence from Pb(ANKA)__XP_022712148.1__Pb-CSP (opt2)
gggagagucccgcagucggcguccagcggcucugcuuguucgugugugugucguugcaggccuuauucaagcuuaccaugaagaagugcaccauccucgucgucgccucccuccuccucgucaacucccuccuccccggcuacggccagaacaaguccauccaggcccagcgcaaccucaacgagcucugcuacaacgagggcaacgacaacaagcucuaccacguccucaacuccaagaacggcaagaucuacaaccgcaacaccgucaaccgccuccucgccgacgcccccgagggcaagaagaacgagaagaagaacgagaagaucgagcgcaacaacaagcucaagcagcccccccccccccccaaccccaacgacccccccccccccaaccccaacgacccccccccccccaaccccaacgacccccccccccccaaccccaacgacccccccccccccaacgccaacgacccccccccccccaacgccaacgaccccgccccccccaacgccaacgaccccgccccccccaacgccaacgaccccgccccccccaacgccaacgaccccgccccccccaacgccaacgacccccccccccccaaccccaacgaccccgccccccccaacgccaacgacccccccccccccaaccccaacgaccccgcccccccccagggcaacaacaacccccagccccagccccgcccccagccccagccccagccccagccccagccccagccccagccccagccccagccccgcccccagccccagccccagcccggcggcaacaacaacaacaagaacaacaacaacgacgacuccuacauccccuccgccgagaagauccucgaguucgucaagcagauccgcgacuccaucaccgaggaguggucccagugcaacgucaccugcggcuccggcauccgcguccgcaagcgcaagggcuccaacaagaaggccgaggaccucacccucgaggacaucgacaccgagaucugcaagauggacaagugcuccuccaucuucaacaucgucuccaacucccucggcuucgucauccuccucguccucgucuucuucaacugaggacuagucccuguucccagagcccacuuuuuuuucuuuuuuugaaauaaaauagccugucuuucagaucuaaaaaaaaaaaaaaaaaaaaaaaaaaaaaaaaaaaaaaaaaaaaaaaaaaaaaaaaaaaaaaaaugcaucccccccccccccccccccccccccccccccaaaggcucuuuucagagccaccagaauu

SEQ ID NO: 436 - RNA, 1464 nt, Artificial Sequence
  mRNA Design a-1 (A64-N5-C30-hSL-N5) comprising derived and/or modified sequence from Pb(ANKA)__XP_022712148.1__Pb-CSP_L(G4SG4)_TM domain HA (opt2)
gggagagucccgcagucggcguccagcggcucugcuuguucgugugugugucguugcaggccuuauucaagcuuaccaugaagaagugcaccauccucgucgucgccucccuccuccucgucaacucccuccuccccggcuacggccagaacaaguccauccaggcccagcgcaaccucaacgagcucugcuacaacgagggcaacgacaacaagcucuaccacguccucaacuccaagaacggcaagaucuacaaccgcaacaccgucaaccgccuccucgccgacgcccccgagggcaagaagaacgagaagaagaacgagaagaucgagcgcaacaacaagcucaagcagcccccccccccccccaaccccaacgacccccccccccccaaccccaacgacccccccccccccaaccccaacgacccccccccccccaaccccaacgacccccccccccccaacgccaacgacccccccccccccaacgccaacgaccccgccccccccaacgccaacgaccccgccccccccaacgccaacgaccccgccccccccaacgccaacgaccccgccccccccaacgccaacgacccccccccccccaaccccaacgaccccgccccccccaacgccaacgacccccccccccccaaccccaacgaccccgcccccccccagggcaacaacaacccccagccccagccccgcccccagccccagccccagccccagccccagccccagccccagccccagccccagccccgcccccagccccagccccagcccggcggcaacaacaacaacaagaacaacaacaacgacgacuccuacauccccuccgccgagaagauccucgaguucgucaagcagauccgcgacuccaucaccgaggaguggucccagugcaacgucaccugcggcuccggcauccgcguccgcaagcgcaagggcuccaacaagaaggccgaggaccucacccucgaggacaucgacaccgagaucugcaagauggacaagugcuccuccaucuucaacaucgucuccaacucccucggcuucgucauccuccucguccucgucuucuucaacggcggcggcggcuccggcggcggcggcaagcucgaguccacccgcaucuaccagauccucgccaucuacuccaccgucgccuccucccucguccucgucgucucccucggcgccaucuccuucuggaugugcuccaacggcucccuccagugccgcaucugcaucugaggacuagucccuguucccagagcccacuuuuuuuucuuuuuuugaaauaaaauagccugucuuucagaucuaaaaaaaaaaaaaaaaaaaaaaaaaaaaaaaaaaaaaaaaaaaaaaaaaaaaaaaaaaaaaaaaugcaucccccccccccccccccccccccccccccccaaaggcucuuuucagagccaccagaauu

SEQ ID NO: 437 - RNA, 1284 nt, Artificial Sequence
  mRNA Design a-1 (A64-N5-C30-hSL-N5) comprising derived and/or modified sequence from Pb(ANKA)__XP_022712148.1__HsALB_Pb-CSP(24-340) (opt2)
gggagagucccgcagucggcguccagcggcucugcuuguucgugugugugucguugcaggccuuauucaagcuuaccaugaagugggucaccuucaucucccuccucuuccucuucuccuccgccuacucccagaacaaguccauccaggcccagcgcaaccucaacgagcucugcuacaacgagggcaacgacaacaagcucuaccacguccucaacuccaagaacggcaagaucuacaaccgcaacaccgucaaccgccuccucgccgacgcccccgagggcaagaagaacgagaagaagaacgagaagaucgagcgcaacaacaagcucaagcagcccccccccccccccaaccccaacgacccccccccccccaaccccaacgacccccccccccccaaccccaacgacccccccccccccaaccccaacgacccccccccccccaacgccaacgacccccccccccccaacgccaacgaccccgccccccccaacgccaacgaccccgccccccccaacgccaacgaccccgccccccccaacgccaacgaccccgccccccccaacgccaacgacccccccccccccaaccccaacgaccccgccccccccaacgccaacgacccccccccccccaaccccaacgaccccgcccccccccagggcaacaacaacccccagccccagccccgcccccagccccagccccagccccagccccagccccagccccagccccagccccagccccgcccccagccccagccccagcccggcggcaacaacaacaacaagaacaacaacaacgacgacuccuacauccccuccgccgagaagauccucgaguucgucaagcagauccgcgacuccaucaccgaggaguggucccagugcaacgucaccugcggcuccggcauccgcguccgcaagcgcaagggcuccaacaagaaggccgaggaccucacccucgaggacaucgacaccgagaucugcaagauggacaagugcuccuccaucuucaacaucgucuccaacucccucggcuucgucauccuccucguccucgucuucuucaacugaggacuagucccuguucccagagcccacuuuuuuuucuuuuuuugaaauaaaauagccugucuuucagaucuaaaaaaaaaaaaaaaaaaaaaaaaaaaaaaaaaaaaaaaaaaaaaaaaaaaaaaaaaaaaaaaaugcaucccccccccccccccccccccccccccccccaaaggcucuuuucagagccaccagaauu

SEQ ID NO: 438 - RNA, 1302 nt, Artificial Sequence
  mRNA Design a-1 (A64-N5-C30-hSL-N5) comprising derived and/or modified sequence from Pb(ANKA)__XP_022712148.1__HsIns-iso1_Pb-CSP(24-340) (opt2)
gggagagucccgcagucggcguccagcggcucugcuuguucgugugugugucguugcaggccuuauucaagcuuaccauggcccucuggaugcgccuccucccccuccucgcccuccucgcccucuggggccccgaccccgccgccgcccagaacaaguccauccaggcccagcgcaaccucaacgagcucugcuacaacgagggcaacgacaacaagcucuaccacguccucaacuccaagaacggcaagaucuacaaccgcaacaccgucaaccgccuccucgccgacgcccccgagggcaagaagaacgagaagaagaacgagaagaucgagcgcaacaacaagcucaagcagcccccccccccccccaaccccaacgacccccccccccccaaccccaacgacccccccccccccaaccccaacgacccccccccccccaaccccaacgacccccccccccccaacgccaacgacccccccccccccaacgccaacgaccccgccccccccaacgccaacgaccccgccccccccaacgccaacgaccccgccccccccaacgccaacgaccccgccccccccaacgccaacgacccccccccccccaaccccaacgaccccgccccccccaacgccaacgacccccccccccccaaccccaacgaccccgcccccccccagggcaacaacaacccccagccccagccccgcccccagccccagccccagccccagccccagccccagccccagccccagccccagccccgcccccagccccagccccagcccggcggcaacaacaacaacaagaacaacaacaacgacgacuccuacauccccuccgccgagaagauccucgaguucgucaagcagauccgcgacuccaucaccgaggaguggucccagugcaacgucaccugcggcuccggcauccgcguccgcaagcgcaagggcuccaacaagaaggccgaggaccucacccucgaggacaucgacaccgagaucugcaagauggacaagugcuccuccaucuucaacaucgucuccaacucccucggcuucgucauccuccucguccucgucuucuucaacugaggacuagucccuguucccagagcccacuuuuuuuucuuuuuuugaaauaaaauagccugucuuucagaucuaaaaaaaaaaaaaaaaaaaaaaaaaaaaaaaaaaaaaaaaaaaaaaaaaaaaaaaaaaaaaaaaugcaucccccccccccccccccccccccccccccccaaaggcucuuuucagagccaccagaauu

SEQ ID NO: 439 - RNA, 1281 nt, Artificial Sequence
  mRNA Design a-1 (A64-N5-C30-hSL-N5) comprising derived and/or modified sequence from Pb(ANKA)__XP_022712148.1__HsSPARC_Pb-CSP(24-340) (opt2)
gggagagucccgcagucggcguccagcggcucugcuuguucgugugugugucguugcaggccuuauucaagcuuaccaugcgcgccuggaucuucuuccuccucugccucgccggccgcgcccucgcccagaacaaguccauccaggcccagcgcaaccucaacgagcucugcuacaacgagggcaacgacaacaagcucuaccacguccucaacuccaagaacggcaagaucuacaaccgcaacaccgucaaccgccuccucgccgacgcccccgagggcaagaagaacgagaagaagaacgagaagaucgagcgcaacaacaagcucaagcagcccccccccccccccaaccccaacgacccccccccccccaaccccaacgacccccccccccccaaccccaacgacccccccccccccaaccccaacgacccccccccccccaacgccaacgacccccccccccccaacgccaacgaccccgccccccccaacgccaacgaccccgccccccccaacgccaacgaccccgccccccccaacgccaacgaccccgccccccccaacgccaacgacccccccccccccaaccccaacgaccccgccccccccaacgccaacgacccccccccccccaaccccaacgaccccgcccccccccagggcaacaacaacccccagccccagccccgcccccagccccagccccagccccagccccagccccagccccagccccagccccagccccgcccccagccccagccccagcccggcggcaacaacaacaacaagaacaacaacaacgacgacuccuacauccccuccgccgagaagauccucgaguucgucaagcagauccgcgacuccaucaccgaggaguggucccagugcaacgucaccugcggcuccggcauccgcguccgcaagcgcaagggcuccaacaagaaggccgaggaccucacccucgaggacaucgacaccgagaucugcaagauggacaagugcuccuccaucuucaacaucgucuccaacucccucggcuucgucauccuccucguccucgucuucuucaacugaggacuagucccuguucccagagcccacuuuuuuuucuuuuuuugaaauaaaauagccugucuuucagaucuaaaaaaaaaaaaaaaaaaaaaaaaaaaaaaaaaaaaaaaaaaaaaaaaaaaaaaaaaaaaaaaaugcaucccccccccccccccccccccccccccccccaaaggcucuuuucagagccaccagaauu

SEQ ID NO: 440 - RNA, 1284 nt, Artificial Sequence
  mRNA Design a-1 (A64-N5-C30-hSL-N5) comprising derived and/or modified sequence from Pb(ANKA)__XP_022712148.1__IgE_Pb-CSP(24-340) (opt2)
gggagagucccgcagucggcguccagcggcucugcuuguucgugugugugucguugcaggccuuauucaagcuuaccauggacuggaccuggauccucuuccucgucgccgccgccacccgcguccacucccagaacaaguccauccaggcccagcgcaaccucaacgagcucugcuacaacgagggcaacgacaacaagcucuaccacguccucaacuccaagaacggcaagaucuacaaccgcaacaccgucaaccgccuccucgccgacgcccccgagggcaagaagaacgagaagaagaacgagaagaucgagcgcaacaacaagcucaagcagcccccccccccccccaaccccaacgacccccccccccccaaccccaacgacccccccccccccaaccccaacgacccccccccccccaaccccaacgacccccccccccccaacgccaacgacccccccccccccaacgccaacgaccccgccccccccaacgccaacgaccccgccccccccaacgccaacgaccccgccccccccaacgccaacgaccccgccccccccaacgccaacgacccccccccccccaaccccaacgaccccgccccccccaacgccaacgacccccccccccccaaccccaacgaccccgcccccccccagggcaacaacaacccccagccccagccccgcccccagccccagccccagccccagccccagccccagccccagccccagccccagccccgcccccagccccagccccagcccggcggcaacaacaacaacaagaacaacaacaacgacgacuccuacauccccuccgccgagaagauccucgaguucgucaagcagauccgcgacuccaucaccgaggaguggucccagugcaacgucaccugcggcuccggcauccgcguccgcaagcgcaagggcuccaacaagaaggccgaggaccucacccucgaggacaucgacaccgagaucugcaagauggacaagugcuccuccaucuucaacaucgucuccaacucccucggcuucgucauccuccucguccucgucuucuucaacugaggacuagucccuguucccagagcccacuuuuuuuucuuuuuuugaaauaaaauagccugucuuucagaucuaaaaaaaaaaaaaaaaaaaaaaaaaaaaaaaaaaaaaaaaaaaaaaaaaaaaaaaaaaaaaaaaugcaucccccccccccccccccccccccccccccccaaaggcucuuuucagagccaccagaauu

SEQ ID NO: 441 - RNA, 1470 nt, Artificial Sequence
  mRNA Design a-1 (A64-N5-C30-hSL-N5) comprising derived and/or modified sequence from Pf(3D7)__XP_001351122.1__Pf-CSP (opt3)
gggagagucccgcagucggcguccagcggcucugcuuguucgugugugugucguugcaggccuuauucaagcuuaccaugaugagaaagcuggccauccucagcguguccucuuuccuuuuugucgaggcucuguuccaggaauaccaaugcuauggcucaaguagcaacaccaggguuuugaaugaguuaaacuacgacaaugcagggacaaaccuguauaaugaacuagagaugaacuacuauggaaaacaggaaaauugguacucccucaagaaaaacucucggucgcugggugagaaugaugacggcaacaaugaggauaacgaaaaacuucgcaagcccaagcacaagaaacugaagcagccugccgacgggaauccagauccgaacgcgaaucccaacguggacccuaacgcuaauccaaacguagaucccaaugccaacccuaauguggacccaaacgcaaaucccaacgccaauccuaacgcuaauccaaacgcaaauccgaacgccaaucccaacgcuaacccuaaugccaacccaaaugcgaaccccaaugcaaacccuaaugccaacccaaaugcuaaccccaaugccaacccgaaugcaaacccuaaugcuaaccccaacgccaauccaaacgcgaauccuaacgccaaucccaacgucgauccaaaugcaaaccccaaugcuaacccuaaugccaacccaaaugcuaacccgaaugccaaccccaacgcaaauccuaacgccaauccaaacgcuaaucccaacgcgaauccuaacgcaaauccaaacgccaaucccaacgcuaauccgaacgccaauccuaacgcaaauccaaacgccaaccccaaugcuaacccuaaugccaaccccaaugcaaacccaaauaaaaacaaucagggaaacggccaaggucauaauaugccuaacgaccccaaucgaaacguggaugagaaugcgaacgcuaacucagccguuaagaauaacaauaacgaggaaccaagcgacaaacacauuaaggaguauuugaauaagauacagaacagucucuccacugaauggucuccguguagcgugacgugcgggaauggaauccagguccguauuaaaccuggcuccgcaaacaagcccaaagaugagcuggacuacgccaaugacaucgaaaagaaaauuuguaagauggagaaaugcucaaguguguuuaacguaguuaauagcucuaucggccugauaauggugcucuccuucuuauuucugaacugaggacuagucccuguucccagagcccacuuuuuuuucuuuuuuugaaauaaaauagccugucuuucagaucuaaaaaaaaaaaaaaaaaaaaaaaaaaaaaaaaaaaaaaaaaaaaaaaaaaaaaaaaaaaaaaaaugcaucccccccccccccccccccccccccccccccaaaggcucuuuucagagccaccagaauu

SEQ ID NO: 442 - RNA, 1401 nt, Artificial Sequence
  mRNA Design a-1 (A64-N5-C30-hSL-N5) comprising derived and/or modified sequence from Pf(3D7)__XP_001351122.1__Pf-CSP(1-374) (opt3)
gggagagucccgcagucggcguccagcggcucugcuuguucgugugugugucguugcaggccuuauucaagcuuaccaugaugagaaagcuggccauccucagcguguccucuuuccuuuuugucgaggcucuguuccaggaauaccaaugcuauggcucaaguagcaacaccaggguuuugaaugaguuaaacuacgacaaugcagggacaaaccuguauaaugaacuagagaugaacuacuauggaaaacaggaaaauugguacucccucaagaaaaacucucggucgcugggugagaaugaugacggcaacaaugaggauaacgaaaaacuucgcaagcccaagcacaagaaacugaagcagccugccgacgggaauccagauccgaacgcgaaucccaacguggacccuaacgcuaauccaaacguagaucccaaugccaacccuaauguggacccaaacgcaaaucccaacgccaauccuaacgcuaauccaaacgcaaauccgaacgccaaucccaacgcuaacccuaaugccaacccaaaugcgaaccccaaugcaaacccuaaugccaacccaaaugcuaaccccaaugccaacccgaaugcaaacccuaaugcuaaccccaacgccaauccaaacgcgaauccuaacgccaaucccaacgucgauccaaaugcaaaccccaaugcuaacccuaaugccaacccaaaugcuaacccgaaugccaaccccaacgcaaauccuaacgccaauccaaacgcuaaucccaacgcgaauccuaacgcaaauccaaacgccaaucccaacgcuaauccgaacgccaauccuaacgcaaauccaaacgccaaccccaaugcuaacccuaaugccaaccccaaugcaaacccaaauaaaaacaaucagggaaacggccaaggucauaauaugccuaacgaccccaaucgaaacguggaugagaaugcgaacgcuaacucagccguuaagaauaacaauaacgaggaaccaagcgacaaacacauuaaggaguauuugaauaagauacagaacagucucuccacugaauggucuccguguagcgugacgugcgggaauggaauccagguccguauuaaaccuggcuccgcaaacaagcccaaagaugagcuggacuacgccaaugacaucgaaaagaaaauuuguaagauggagaaaugcugaggacuagucccuguucccagagcccacuuuuuuuucuuuuuuugaaauaaaauagccugucuuucagaucuaaaaaaaaaaaaaaaaaaaaaaaaaaaaaaaaaaaaaaaaaaaaaaaaaaaaaaaaaaaaaaaaugcaucccccccccccccccccccccccccccccccaaaggcucuuuucagagccaccagaauu

SEQ ID NO: 443 - RNA, 1254 nt, Artificial Sequence
  mRNA Design a-1 (A64-N5-C30-hSL-N5) comprising derived and/or modified sequence from Pf(3D7)__XP_001351122.1__Pf-CSP(1-325) (opt3)
gggagagucccgcagucggcguccagcggcucugcuuguucgugugugugucguugcaggccuuauucaagcuuaccaugaugagaaagcuggccauccucagcguguccucuuuccuuuuugucgaggcucuguuccaggaauaccaaugcuauggcucaaguagcaacaccaggguuuugaaugaguuaaacuacgacaaugcagggacaaaccuguauaaugaacuagagaugaacuacuauggaaaacaggaaaauugguacucccucaagaaaaacucucggucgcugggugagaaugaugacggcaacaaugaggauaacgaaaaacuucgcaagcccaagcacaagaaacugaagcagccugccgacgggaauccagauccgaacgcgaaucccaacguggacccuaacgcuaauccaaacguagaucccaaugccaacccuaauguggacccaaacgcaaaucccaacgccaauccuaacgcuaauccaaacgcaaauccgaacgccaaucccaacgcuaacccuaaugccaacccaaaugcgaaccccaaugcaaacccuaaugccaacccaaaugcuaaccccaaugccaacccgaaugcaaacccuaaugcuaaccccaacgccaauccaaacgcgaauccuaacgccaaucccaacgucgauccaaaugcaaaccccaaugcuaacccuaaugccaacccaaaugcuaacccgaaugccaaccccaacgcaaauccuaacgccaauccaaacgcuaaucccaacgcgaauccuaacgcaaauccaaacgccaaucccaacgcuaauccgaacgccaauccuaacgcaaauccaaacgccaaccccaaugcuaacccuaaugccaaccccaaugcaaacccaaauaaaaacaaucagggaaacggccaaggucauaauaugccuaacgaccccaaucgaaacguggaugagaaugcgaacgcuaacucagccguuaagaauaacaauaacgaggaaccaagcgacaaacacauuaaggaguauuugaauaagauacagaacugaggacuagucccuguucccagagcccacuuuuuuuucuuuuuuugaaauaaaauagccugucuuucagaucuaaaaaaaaaaaaaaaaaaaaaaaaaaaaaaaaaaaaaaaaaaaaaaaaaaaaaaaaaaaaaaaaugcaucccccccccccccccccccccccccccccccaaaggcucuuuucagagccaccagaauu

SEQ ID NO: 444 - RNA, 1470 nt, Artificial Sequence
  mRNA Design a-1 (A64-N5-C30-hSL-N5) comprising derived and/or modified sequence from Pf(3D7)__XP_001351122.1__HsALB_Pf-CSP(19-397) (opt3)
gggagagucccgcagucggcguccagcggcucugcuuguucgugugugugucguugcaggccuuauucaagcuuaccaugaagugggugaccuucaucagccugcucuuucuuuucuccucugccuacucacuguuucaggaguaucaaugcuacggcaguagcuccaacacaagagucuugaaugaauuaaacuaugacaaugcugggacuaaccuguacaaugagcuagaaaugaacuauuacggaaaacaggagaauugguauucucucaagaaaaacucgaggucacugggugaaaaugaugacggcaacaaugaggauaacgagaaacuucggaagcccaagcacaagaaacugaagcagccugcagacgggaauccagauccgaacgccaaucccaacguugacccuaacgcgaauccaaacguggaucccaaugcuaacccuaauguagacccaaacgccaaucccaacgcaaauccuaacgccaauccaaacgcuaauccgaacgcaaaucccaacgccaacccuaaugcuaacccaaaugccaaccccaaugcgaacccuaaugcaaacccaaaugccaaccccaaugcuaacccgaaugccaacccuaaugcaaaccccaacgcuaauccaaacgccaauccuaacgcgaaucccaacguggauccaaaugccaaccccaaugcaaacccuaaugcuaacccaaaugccaacccgaaugcuaaccccaacgccaauccuaacgcaaauccaaacgccaaucccaacgcuaauccuaacgcgaauccaaacgcaaaucccaacgccaauccgaacgcuaauccuaacgccaauccaaacgcaaaccccaaugccaacccuaaugcuaaccccaaugccaacccaaauaaaaacaaucagggaaacggccaaggucauaauaugccuaacgaccccaaucgcaacgucgaugaaaaugcaaacgcgaacagcgcugugaagaauaacaauaacgaggaaccaagugacaaacacauuaaggaguacuugaauaagauacagaacucccucucuacggaguggagcccguguuccguuaccugcgggaauggaauccaggugcgaauuaaaccuggcucagccaacaagcccaaagaugaacuggacuacgcaaaugacaucgagaagaaaauuuguaagauggaaaaaugcaguagcgucuucaacgugguaaauucuuccaucggccugauaaugguucucucauuuuuauuccugaacugaggacuagucccuguucccagagcccacuuuuuuuucuuuuuuugaaauaaaauagccugucuuucagaucuaaaaaaaaaaaaaaaaaaaaaaaaaaaaaaaaaaaaaaaaaaaaaaaaaaaaaaaaaaaaaaaaugcaucccccccccccccccccccccccccccccccaaaggcucuuuucagagccaccagaauu

SEQ ID NO: 445 - RNA, 1488 nt, Artificial Sequence
  mRNA Design a-1 (A64-N5-C30-hSL-N5) comprising derived and/or modified sequence from Pf(3D7)__XP_001351122.1__HsIns-iso1_Pf-CSP(19-397) (opt3)
gggagagucccgcagucggcguccagcggcucugcuuguucgugugugugucguugcaggccuuauucaagcuuaccauggcccuguggaugagacuccuuccccuguuggcuuuacuggcacuauggggcccugacccagccgcggcucucuuccaggaguaccaaugcuaugggagcuccucuaacaccagggugcugaaugaacuuaacuacgauaaugccggaacaaaccuguauaaugaguuggaaaugaacuacuaugguaagcaggagaauugguacucacucaaaaagaacagucggagccugggcgaaaaugacgaugggaacaaugaggacaacgagaaacugcgcaagccgaaacacaagaagcucaaacagcccgcagauggaaauccugacccaaacgccaaucccaacgucgauccuaacgcuaauccaaacguugaccccaaugcaaacccuaauguggauccaaacgccaauccgaacgcuaaucccaacgccaauccuaacgcgaauccaaacgcaaaucccaacgccaacccuaaugcuaacccaaaugccaaccccaaugcaaacccgaaugcuaacccuaaugccaaccccaaugcgaacccaaaugccaacccuaaugcaaaccccaacgcuaauccaaacgccaaucccaacgcuaauccuaacguagacccaaaugccaacccgaaugcaaaccccaaugccaacccuaaugcuaacccaaaugcgaaccccaacgcaaauccuaacgccaauccaaacgcuaaucccaacgccaauccgaacgcaaauccuaacgccaauccaaacgcuaaucccaacgccaauccuaacgcaaaucccaacgcgaacccaaaugcuaacccuaaugccaaccccaaugcaaacccaaauaagaacaaucagggcaacggucaagggcauaauaugccgaacgauccuaaucgaaacguggacgaaaaugccaacgcuaacuccgccgucaaaaauaacaauaacgaggaacccucugauaagcacaucaaagaguauuuaaauaagauucagaacucgcugucaacugaguggagcccauguagugugacgugcggaaauggcauacagguucguaucaagcccggcuccgcaaacaaaccuaaggacgaacuugacuacgcuaaugauauugagaaaaagaucuguaaaauggaaaagugcucuagcguguuuaacgucguaaauuccucaauuggguugaucauggugcugaguuuccuauuucucaacugaggacuagucccuguucccagagcccacuuuuuuuucuuuuuuugaaauaaaauagccugucuuucagaucuaaaaaaaaaaaaaaaaaaaaaaaaaaaaaaaaaaaaaaaaaaaaaaaaaaaaaaaaaaaaaaaaugcaucccccccccccccccccccccccccccccccaaaggcucuuuucagagccaccagaauu

SEQ ID NO: 446 - RNA, 1467 nt, Artificial Sequence
  mRNA Design a-1 (A64-N5-C30-hSL-N5) comprising derived and/or modified sequence from Pf(3D7)__XP_001351122.1__HsSPARC_Pf-CSP(19-397) (opt3)
gggagagucccgcagucggcguccagcggcucugcuuguucgugugugugucguugcaggccuuauucaagcuuaccaugagagccuggaucuucuuucugcucugccuugcuggcagggcacuggccuuguuccaggaguaccaauguuaugggagcuccucuaacacccggguguuaaaugaacugaacuacgacaaugcgggaacaaaccuauauaaugagcucgaaaugaacuacuaugguaagcaggagaauugguacucacugaaaaagaacagucgcagccuuggcgaaaaugaugacgggaacaaugaggauaacgagaaacugcgaaagcccaaacacaagaaguugaaacagccugcugacggaaauccagauccgaacgccaaucccaacgucgacccuaacgcaaauccaaacguugaucccaaugccaacccuaauguggacccaaacgcuaaucccaacgcaaauccuaacgccaauccaaacgcuaauccgaacgccaaucccaacgcgaacccuaaugcaaacccaaaugccaaccccaaugcuaacccuaaugccaacccaaaugcaaaccccaaugcuaacccgaaugccaacccuaaugcgaaccccaacgccaauccaaacgcaaauccuaacgcuaaucccaacguagauccaaaugccaaccccaaugcuaacccuaaugccaacccaaaugcaaacccgaaugccaaccccaacgcuaauccuaacgcgaauccaaacgcaaaucccaacgccaauccuaacgcuaauccaaacgccaaucccaacgcaaauccgaacgccaauccuaacgcuaauccaaacgccaaccccaaugcaaacccuaaugcgaaccccaaugcuaacccaaauaagaacaaucagggcaacggucaagggcauaauaugccuaacgaccccaaucguaacguggaugaaaaugccaacgcaaacuccgccgucaaaaauaacaauaacgaggaaccaucugacaagcacauuaaagaguaucucaauaagauacagaacucgcugucaacugaguggagcccgugcagugugacguguggaaauggcauccagguuagaauuaagccuggcuccgcuaacaaacccaaggaugaacuggacuacgccaaugacaucgagaaaaagauuugcaaaauggaaaaguguucuagcguguuuaacgucguaaauuccucaaucgggcucauaaugguguuaaguuuccuguuucuuaacugaggacuagucccuguucccagagcccacuuuuuuuucuuuuuuugaaauaaaauagccugucuuucagaucuaaaaaaaaaaaaaaaaaaaaaaaaaaaaaaaaaaaaaaaaaaaaaaaaaaaaaaaaaaaaaaaaugcaucccccccccccccccccccccccccccccccaaaggcucuuuucagagccaccagaauu

SEQ ID NO: 447 - RNA, 1470 nt, Artificial Sequence
  mRNA Design a-1 (A64-N5-C30-hSL-N5) comprising derived and/or modified sequence from Pf(3D7)__XP_001351122.1__IgE_Pf-CSP(19-397) (opt3)
gggagagucccgcagucggcguccagcggcucugcuuguucgugugugugucguugcaggccuuauucaagcuuaccauggacuggaccuggauccuguuccucguggccgcugcaacaagaguccacagccuuuuucaggaguaccaaugcuauggcuccucuucaaacacuaggguucugaaugaauugaacuacgauaaugccgggacgaacuuauauaaugagcuggaaaugaacuacuauggaaagcaggagaauugguacagucuaaagaagaacagccggucccucggugaaaaugacgauggcaacaaugaggacaacgagaaacugcgcaagcccaaacauaagaaacuuaaacagccugcggaugggaauccagacccgaacgcuaaucccaacguggauccuaacgccaauccaaacguagaccccaaugcaaacccuaauguggauccaaacgccaaucccaacgcuaauccuaacgcaaauccaaacgccaauccgaacgcuaaucccaacgccaacccuaaugcgaacccaaaugcaaaccccaaugccaacccuaaugcuaacccaaaugccaaccccaaugcaaacccgaaugcuaacccuaaugccaaccccaacgcgaauccaaacgccaauccuaacgcaaaucccaacgucgacccaaaugcuaaccccaaugccaacccuaaugcuaacccaaaugccaacccgaaugcaaaccccaacgccaauccuaacgcuaauccaaacgcgaaucccaacgcaaauccuaacgccaauccaaacgcuaaucccaacgccaauccgaacgcaaauccuaacgccaauccaaacgcuaaccccaaugccaacccuaaugcaaaccccaaugcgaacccaaauaagaacaaucagggaaacggccaaggucacaauaugccuaacgaucccaaucgaaacguggacgaaaaugcuaacgccaacucugcaguuaaaaauaacaauaacgaggaaccaucggauaagcauauuaaagaguaucugaauaagauacagaacucauugagcaccgaguggaguccguguuccgugacaugcgggaauggaauccagguccguauuaagccuggcucugccaacaaacccaaggacgaacucgacuacgcuaaugauaucgagaaaaagauuuguaaaauggaaaagugcagcuccguguucaacguaguuaauucaaguaucggccugauaauggugcugagcuuucucuucuuaaacugaggacuagucccuguucccagagcccacuuuuuuuucuuuuuuugaaauaaaauagccugucuuucagaucuaaaaaaaaaaaaaaaaaaaaaaaaaaaaaaaaaaaaaaaaaaaaaaaaaaaaaaaaaaaaaaaaugcaucccccccccccccccccccccccccccccccaaaggcucuuuucagagccaccagaauu

SEQ ID NO: 448 - RNA, 1635 nt, Artificial Sequence
  mRNA Design a-1 (A64-N5-C30-hSL-N5) comprising derived and/or modified sequence from Pf(3D7)__XP_001351122.1__Pf-CSP_L(G4SG4)_TM domain HA (opt3)
gggagagucccgcagucggcguccagcggcucugcuuguucgugugugugucguugcaggccuuauucaagcuuaccaugaugagaaagcuggccauccucagcguguccucuuuccuuuuugucgaggcucuguuccaggaauaccaaugcuauggcucaaguagcaacaccaggguuuugaaugaguuaaacuacgacaaugcagggacaaaccuguauaaugaacuagagaugaacuacuauggaaagcaggaaaauugguacucccucaagaaaaacucucggucgcugggugagaaugaugacggcaacaaugaggauaacgaaaaacuucgcaagcccaagcacaagaaacugaagcagccugccgacgggaauccagauccgaacgcgaaucccaacguggacccuaacgcuaauccaaacguagaucccaaugccaacccuaauguggacccaaacgcaaaucccaacgccaauccuaacgcuaauccaaacgcaaauccgaacgccaaucccaacgcuaacccuaaugccaacccaaaugcgaaccccaaugcaaacccuaaugccaacccaaaugcuaaccccaaugccaacccgaaugcaaacccuaaugcuaaccccaacgccaauccaaacgcgaauccuaacgccaaucccaacgucgauccaaaugcaaaccccaaugcuaacccuaaugccaacccaaaugcuaacccgaaugccaaccccaacgcaaauccuaacgccaauccaaacgcuaaucccaacgcgaauccuaacgcaaauccaaacgccaaucccaacgcuaauccgaacgccaauccuaacgcaaauccaaacgccaaccccaaugcuaacccuaaugccaaccccaaugcaaacccaaauaaaaacaaucagggaaacggccaaggucauaauaugccuaacgaccccaaucgaaacguggaugagaaugcgaacgcuaacucagccguuaagaauaacaauaacgaggaaccaagcgacaaacacauuaaggaguauuugaauaagauacagaacagucucuccacugaauggucuccguguagcgugacgugcgggaauggaauccagguccguauuaaaccuggcuccgcaaacaagcccaaagaugagcuggacuacgccaaugacaucgaaaagaaaauuuguaagauggagaaaugcucaaguguguuuaacguaguuaauagcucuaucggccugauaauggugcucuccuucuuauuucugaacgggggagguggcucagggggaggcgguaaacuugaaagcaccagaaucuaccagauuuuggcuaucuauaguacagucgccucuucccuggugcuaguggucagccucggggcaauuucguucuggauguguucuaauggaucccugcaaugcaggaucuguauaugaggacuagucccuguucccagagcccacuuuuuuuucuuuuuuugaaauaaaauagccugucuuucagaucuaaaaaaaaaaaaaaaaaaaaaaaaaaaaaaaaaaaaaaaaaaaaaaaaaaaaaaaaaaaaaaaaugcaucccccccccccccccccccccccccccccccaaaggcucuuuucagagccaccagaauu

SEQ ID NO: 449 - RNA, 1509 nt, Artificial Sequence
  mRNA Design a-1 (A64-N5-C30-hSL-N5) comprising derived and/or modified sequence from Pf(3D7)__XP_001351122.1__Pf-CSP(199-377)_L(PVTN)_HBsAg (opt3)
gggagagucccgcagucggcguccagcggcucugcuuguucgugugugugucguugcaggccuuauucaagcuuaccauggaccccaacgccaauccuaacgcuaauccaaacgcaaauccgaacgccaaucccaacgcgaauccuaacgcuaauccaaacgccaaucccaacgcaaauccuaacgccaacccaaaugcuaaccccaaugcaaacccuaaugccaacccaaaugcuaacccgaaugccaaccccaaugcgaacccuaaugcaaacccaaaugccaaccccaacgcuaauccuaacaagaauaaccagggcaaugggcaaggacacaacaugccaaaugaucccaacagaaauguggacgagaacgccaaugcaaacagcgcugucaaaaauaacaauaacgaggaaccguccgauaagcauaucaaagaauaccugaacaagauucaaaauucucucucaaccgaguggaguccuugcagcguuacaugugguaacggcauacaggugaggaucaaacccggguccgccaauaagccaaaggacgaacuugauuaugcgaacgacauugagaaaaagaucugcaaaauggagaaguguucuucgguaccugugacuaauauggaaaacauuacgucaggauuccugggccccuuguuaguccugcaggccggguuuuuccuacucacccggauccugacaauaccacagagccuugauaguugguggacuucccugaauuuucucgguggaucucccgugugcuugggccagaacagccaguccccuaccucaaaucacaguccaacaagcuguccgcccaucugcccuggcuaccgcuggaugugucugcgacguuucauuaucuuucuguucauucucuuacugugccuuaucuuuuugcugguucuacucgacuaucaggggaugcugccaguguguccccuuauaccuggaucuaccacuacaaacaccgguccaugcaaaacguguacuacccccgcacaaggcaauuccauguucccgucaugcugcuguacaaagccuacugaugggaacugcaccuguauuccaauccccagcaguugggcuuuugccaaguaccugugggagugggcuucugucagauucuccugguugagccuccuggugccuuuuguacagugguucguuggauuaucgcccacaguguggcugucugccauuuggaugaugugguauuggggcccaucccucuacucaaucgucaguccuuuuaucccccuucugccaauuuucuucugcuuguggguguauauaugaggacuagucccuguucccagagcccacuuuuuuuucuuuuuuugaaauaaaauagccugucuuucagaucuaaaaaaaaaaaaaaaaaaaaaaaaaaaaaaaaaaaaaaaaaaaaaaaaaaaaaaaaaaaaaaaaugcaucccccccccccccccccccccccccccccccaaaggcucuuuucagagccaccagaauu

SEQ ID NO: 450 - RNA, 1551 nt, Artificial Sequence
  mRNA Design a-1 (A64-N5-C30-hSL-N5) comprising derived and/or modified sequence from Pf(3D7)__XP_001351122.1__Pf-CSP(199-387)_L(PVTN)_HBsAg (opt3)
gggagagucccgcagucggcguccagcggcucugcuuguucgugugugugucguugcaggccuuauucaagcuuaccaugauggcccccgacccuaacgcuaauccaaacgcaaauccgaacgccaaucccaacgcgaauccuaacgcuaauccaaacgccaaucccaacgcaaauccuaacgccaauccaaacgcuaaccccaaugcaaacccuaaugccaacccaaaugcuaacccgaaugccaaccccaaugcgaacccuaaugcaaacccaaaugccaaccccaaugcuaacccuaacgccaauccaaacaagaauaaccagggcaaugggcaaggacacaacaugcccaaugauccgaacagaaauguggacgagaacgcaaaugcuaacagcgccgucaaaaauaacaauaacgaggaaccuuccgauaagcauaucaaagaauaccugaacaagauucaaaauucucucucaaccgaguggagucccugcagcguuacaugugguaacggcauacaggugaggaucaaaccaggguccgcgaauaagccuaaggacgaacuugauuaugccaacgacauugagaaaaagaucugcaaaauggagaaguguucuucgguauucaauguggucaacucaagcauuggacugggccccgugacuaauauggaaaacaucacgaguggguuuuuggguccauuacugguucuacaggcaggauucuuucuccugacccggauacuuacaaucccccagucccuggauucuugguggacuagcuugaauuuccucggcggcuccccugugugccuggggcagaacucacagaguccaaccagcaaucacucuccgacauccugucccccuauuugcccaggauaccgcuggaugugucugcgacguuuuaucauuuuccucuuuaucuuacugcuuugcuugauauuccugcuaguccuccuggacuaucaggguaugcuucccguguguccucugauuccaggcucaaccacuacaaacaccgggcccugcaaaacguguacuaccccggcucaaggaaauagcauguuuccuaguugcugcuguacaaagccaacugauggcaacugcaccuguauccccauuccuucuuccugggccuucgcuaaguacuugugggagugggccagcguaagauuuucguggcucucucuguuaguucccuucgugcagugguuugucggucuguccccaacaguguggcucucagcaaucuggaugaugugguauugggggccuagucuuuacagcaucgugucccccuucauuccacuguugccgauauucuuuugccuaugggucuauaucugaggacuagucccuguucccagagcccacuuuuuuuucuuuuuuugaaauaaaauagccugucuuucagaucuaaaaaaaaaaaaaaaaaaaaaaaaaaaaaaaaaaaaaaaaaaaaaaaaaaaaaaaaaaaaaaaaugcaucccccccccccccccccccccccccccccccaaaggcucuuuucagagccaccagaauu

SEQ ID NO: 451 - RNA, 735 nt, Artificial Sequence
  mRNA Design a-1 (A64-N5-C30-hSL-N5) comprising derived and/or modified sequence from Pf(3D7)__XP_001351122.1__HsALB_Pf-CSP(19-152) (opt3)
gggagagucccgcagucggcguccagcggcucugcuuguucgugugugugucguugcaggccuuauucaagcuuaccaugaagugggugaccuucaucagccugcucuuucuuuucuccucugccuacucacuguuucaggaguaucaaugcuacggcaguagcuccaacacaagagucuugaaugaauuaaacuaugacaaugcugggacuaaccuguacaaugagcuagaaaugaacuauuacggaaaacaggagaauugguauucucucaagaaaaacucgaggucacugggugaaaaugaugacggcaacaaugaggauaacgagaaacuucggaagcccaagcacaagaaacugaagcagccugcagacgggaauccagauccgaacgccaaucccaacguugacccuaacgcgaauccaaacguggaucccaaugcuaacccuaauguagacccaaacgccaaucccaacgcaaauccuaacgccaauccaaacgcuaauccgaacgcaaaucccaacgccaacccuugaggacuagucccuguucccagagcccacuuuuuuuucuuuuuuugaaauaaaauagccugucuuucagaucuaaaaaaaaaaaaaaaaaaaaaaaaaaaaaaaaaaaaaaaaaaaaaaaaaaaaaaaaaaaaaaaaugcaucccccccccccccccccccccccccccccccaaaggcucuuuucagagccaccagaauu

SEQ ID NO: 452 - RNA, 855 nt, Artificial Sequence
  mRNA Design a-1 (A64-N5-C30-hSL-N5) comprising derived and/or modified sequence from Pf(3D7)__XP_001351122.1__HsALB_Pf-CSP(19-192) (opt3)
gggagagucccgcagucggcguccagcggcucugcuuguucgugugugugucguugcaggccuuauucaagcuuaccaugaagugggugaccuucaucagccugcucuuucuuuucuccucugccuacucacuguuucaggaguaucaaugcuacggcaguagcuccaacacaagagucuugaaugaauuaaacuaugacaaugcugggacuaaccuguacaaugagcuagaaaugaacuauuacggaaaacaggagaauugguauucucucaagaaaaacucgaggucacugggugaaaaugaugacggcaacaaugaggauaacgagaaacuucggaagcccaagcacaagaaacugaagcagccugcagacgggaauccagauccgaacgccaaucccaacguugacccuaacgcgaauccaaacguggaucccaaugcuaacccuaauguagacccaaacgccaaucccaacgcaaauccuaacgccaauccaaacgcuaauccgaacgcaaaucccaacgccaacccuaaugcuaacccaaaugccaaccccaaugcgaacccuaaugcaaacccaaaugccaaccccaaugcuaacccgaaugccaacccuaaugcaaaccccaacgcuaauccaaacgccaauccuugaggacuagucccuguucccagagcccacuuuuuuuucuuuuuuugaaauaaaauagccugucuuucagaucuaaaaaaaaaaaaaaaaaaaaaaaaaaaaaaaaaaaaaaaaaaaaaaaaaaaaaaaaaaaaaaaaugcaucccccccccccccccccccccccccccccccaaaggcucuuuucagagccaccagaauu

SEQ ID NO: 453 - RNA, 1095 nt, Artificial Sequence
  mRNA Design a-1 (A64-N5-C30-hSL-N5) comprising derived and/or modified sequence from Pf(3D7)__XP_001351122.1__HsALB_Pf-CSP(19-272) (opt3)
gggagagucccgcagucggcguccagcggcucugcuuguucgugugugugucguugcaggccuuauucaagcuuaccaugaagugggugaccuucaucagccugcucuuucuuuucuccucugccuacucacuguuucaggaguaucaaugcuacggcaguagcuccaacacaagagucuugaaugaauuaaacuaugacaaugcugggacuaaccuguacaaugagcuagaaaugaacuauuacggaaaacaggagaauugguauucucucaagaaaaacucgaggucacugggugaaaaugaugacggcaacaaugaggauaacgagaaacuucggaagcccaagcacaagaaacugaagcagccugcagacgggaauccagauccgaacgccaaucccaacguugacccuaacgcgaauccaaacguggaucccaaugcuaacccuaauguagacccaaacgccaaucccaacgcaaauccuaacgccaauccaaacgcuaauccgaacgcaaaucccaacgccaacccuaaugcuaacccaaaugccaaccccaaugcgaacccuaaugcaaacccaaaugccaaccccaaugcuaacccgaaugccaacccuaaugcaaaccccaacgcuaauccaaacgccaauccuaacgcgaaucccaacguggauccaaaugccaaccccaaugcaaacccuaaugcuaacccaaaugccaacccgaaugcuaaccccaacgccaauccuaacgcaaauccaaacgccaaucccaacgcuaauccuaacgcgaauccaaacgcaaaucccaacgccaauccgaacgcuaauccuaacgccaauccaaacgcaaaccccaaugccaacccuaaugcuaaccccaaugccaacccaugaggacuagucccuguucccagagcccacuuuuuuuucuuuuuuugaaauaaaauagccugucuuucagaucuaaaaaaaaaaaaaaaaaaaaaaaaaaaaaaaaaaaaaaaaaaaaaaaaaaaaaaaaaaaaaaaaugcaucccccccccccccccccccccccccccccccaaaggcucuuuucagagccaccagaauu

SEQ ID NO: 454 - RNA, 1257 nt, Artificial Sequence
  mRNA Design a-1 (A64-N5-C30-hSL-N5) comprising derived and/or modified sequence from Pf(3D7)__XP_001351122.1__HsALB_Pf-CSP(19-272)_L(AAY)_Pf-CSP(310-3 27)_L(AAY)_Pf-CSP(346-375) (opt3)
gggagagucccgcagucggcguccagcggcucugcuuguucgugugugugucguugcaggccuuauucaagcuuaccaugaagugggugaccuucaucagccugcucuuucuuuucuccucugccuacucacuguuucaggaguaucaaugcuacggcaguagcuccaacacaagagucuugaaugaauuaaacuaugacaaugcugggacuaaccuguacaaugagcuagaaaugaacuauuacggaaaacaggagaauugguauucucucaagaaaaacucgaggucacugggugaaaaugaugacggcaacaaugaggauaacgagaaacuucggaagcccaagcacaagaaacugaagcagccugcagacgggaauccagauccgaacgccaaucccaacguugacccuaacgcgaauccaaacguggaucccaaugcuaacccuaauguagacccaaacgccaaucccaacgcaaauccuaacgccaauccaaacgcuaauccgaacgcaaaucccaacgccaacccuaaugcuaacccaaaugccaaccccaaugcgaacccuaaugcaaacccaaaugccaaccccaaugcuaacccgaaugccaacccuaaugcaaaccccaacgcuaauccaaacgccaauccuaacgcgaaucccaacguggauccaaaugccaaccccaaugcaaacccuaaugcuaacccaaaugccaacccgaaugcuaaccccaacgccaauccuaacgcaaauccaaacgccaaucccaacgcuaauccuaacgcgaauccaaacgcaaaucccaacgccaauccgaacgcuaauccuaacgccaauccaaacgcaaaccccaaugccaacccuaaugcuaaccccaaugccaacccagcagcguacgaaccuagcgacaaacauauuaaggaguacuugaauaaaauacagaacagucucgcugccuauaucaagcccggauccgcaaauaagccaaaagaugaacuggacuacgccaacgauauugagaagaaaaucuguaagauggagaaaugcucuugaggacuagucccuguucccagagcccacuuuuuuuucuuuuuuugaaauaaaauagccugucuuucagaucuaaaaaaaaaaaaaaaaaaaaaaaaaaaaaaaaaaaaaaaaaaaaaaaaaaaaaaaaaaaaaaaaugcaucccccccccccccccccccccccccccccccaaaggcucuuuucagagccaccagaauu

SEQ ID NO: 455 - RNA, 1218 nt, Artificial Sequence
  mRNA Design a-1 (A64-N5-C30-hSL-N5) comprising derived and/or modified sequence from Pf(3D7)__XP_001351122.1__HsALB_Pf-CSP(19-272)_L(AAY)_Pf-CSP(346-3 65)_L(AAY)_P2 (opt3)
gggagagucccgcagucggcguccagcggcucugcuuguucgugugugugucguugcaggccuuauucaagcuuaccaugaagugggugaccuucaucagccugcucuuucuuuucuccucugccuacucacuguuucaggaguaucaaugcuacggcaguagcuccaacacaagagucuugaaugaauuaaacuaugacaaugcugggacuaaccuguacaaugagcuagaaaugaacuauuacggaaaacaggagaauugguauucucucaagaaaaacucgaggucacugggugaaaaugaugacggcaacaaugaggauaacgagaaacuucggaagcccaagcacaagaaacugaagcagccugcagacgggaauccagauccgaacgccaaucccaacguugacccuaacgcgaauccaaacguggaucccaaugcuaacccuaauguagacccaaacgccaaucccaacgcaaauccuaacgccaauccaaacgcuaauccgaacgcaaaucccaacgccaacccuaaugcuaacccaaaugccaaccccaaugcgaacccuaaugcaaacccaaaugccaaccccaaugcuaacccgaaugccaacccuaaugcaaaccccaacgcuaauccaaacgccaauccuaacgcgaaucccaacguggauccaaaugccaaccccaaugcaaacccuaaugcuaacccaaaugccaacccgaaugcuaaccccaacgccaauccuaacgcaaauccaaacgccaaucccaacgcuaauccuaacgcgaauccaaacgcaaaucccaacgccaauccgaacgcuaauccuaacgccaauccaaacgcaaaccccaaugccaacccuaaugcuaaccccaaugccaacccagcagcguacauuaaaccuggaagcgcuaauaagcccaaagacgaauuggauuacgccaacgacauagaggcagccuaucaguacaucaaggcuaauaguaaguucauuggcaucacggaacucugaggacuagucccuguucccagagcccacuuuuuuuucuuuuuuugaaauaaaauagccugucuuucagaucuaaaaaaaaaaaaaaaaaaaaaaaaaaaaaaaaaaaaaaaaaaaaaaaaaaaaaaaaaaaaaaaaugcaucccccccccccccccccccccccccccccccaaaggcucuuuucagagccaccagaauu

SEQ ID NO: 456 - RNA, 1212 nt, Artificial Sequence
  mRNA Design a-1 (A64-N5-C30-hSL-N5) comprising derived and/or modified sequence from Pf(3D7)__XP_001351122.1__HsALB_Pf-CSP(19-272)_L(AAY)_Pf-CSP(346-3 65)_L(AAY)_PADRE (opt3)
gggagagucccgcagucggcguccagcggcucugcuuguucgugugugugucguugcaggccuuauucaagcuuaccaugaagugggugaccuucaucagccugcucuuucuuuucuccucugccuacucacuguuucaggaguaucaaugcuacggcaguagcuccaacacaagagucuugaaugaauuaaacuaugacaaugcugggacuaaccuguacaaugagcuagaaaugaacuauuacggaaaacaggagaauugguauucucucaagaaaaacucgaggucacugggugaaaaugaugacggcaacaaugaggauaacgagaaacuucggaagcccaagcacaagaaacugaagcagccugcagacgggaauccagauccgaacgccaaucccaacguugacccuaacgcgaauccaaacguggaucccaaugcuaacccuaauguagacccaaacgccaaucccaacgcaaauccuaacgccaauccaaacgcuaauccgaacgcaaaucccaacgccaacccuaaugcuaacccaaaugccaaccccaaugcgaacccuaaugcaaacccaaaugccaaccccaaugcuaacccgaaugccaacccuaaugcaaaccccaacgcuaauccaaacgccaauccuaacgcgaaucccaacguggauccaaaugccaaccccaaugcaaacccuaaugcuaacccaaaugccaacccgaaugcuaaccccaacgccaauccuaacgcaaauccaaacgccaaucccaacgcuaauccuaacgcgaauccaaacgcaaaucccaacgccaauccgaacgcuaauccuaacgccaauccaaacgcaaaccccaaugccaacccuaaugcuaaccccaaugccaacccagcagcguacauuaaaccuggaagcgcuaauaagcccaaagacgaauuggauuacgccaacgacauagaggcagccuaugcuaaguucgucgccgcauggacgcucaaggcugccgcgugaggacuagucccuguucccagagcccacuuuuuuuucuuuuuuugaaauaaaauagccugucuuucagaucuaaaaaaaaaaaaaaaaaaaaaaaaaaaaaaaaaaaaaaaaaaaaaaaaaaaaaaaaaaaaaaaaugcaucccccccccccccccccccccccccccccccaaaggcucuuuucagagccaccagaauu

SEQ ID NO: 457 - RNA, 1269 nt, Artificial Sequence
  mRNA Design a-1 (A64-N5-C30-hSL-N5) comprising derived and/or modified sequence from Pf(3D7)__XP_001351122.1__HsALB_Pf-CSP(19-272)_L(G4S)_Pf-CSP(310-3 27)_L(G4S)_Pf-CSP(346-375) (opt3)
gggagagucccgcagucggcguccagcggcucugcuuguucgugugugugucguugcaggccuuauucaagcuuaccaugaagugggugaccuucaucagccugcucuuucuuuucuccucugccuacucacuguuucaggaguaucaaugcuacggcaguagcuccaacacaagagucuugaaugaauuaaacuaugacaaugcugggacuaaccuguacaaugagcuagaaaugaacuauuacggaaaacaggagaauugguauucucucaagaaaaacucgaggucacugggugaaaaugaugacggcaacaaugaggauaacgagaaacuucggaagcccaagcacaagaaacugaagcagccugcagacgggaauccagauccgaacgccaaucccaacguugacccuaacgcgaauccaaacguggaucccaaugcuaacccuaauguagacccaaacgccaaucccaacgcaaauccuaacgccaauccaaacgcuaauccgaacgcaaaucccaacgccaacccuaaugcuaacccaaaugccaaccccaaugcgaacccuaaugcaaacccaaaugccaaccccaaugcuaacccgaaugccaacccuaaugcaaaccccaacgcuaauccaaacgccaauccuaacgcgaaucccaacguggauccaaaugccaaccccaaugcaaacccuaaugcuaacccaaaugccaacccgaaugcuaaccccaacgccaauccuaacgcaaauccaaacgccaaucccaacgcuaauccuaacgcgaauccaaacgcaaaucccaacgccaauccgaacgcuaauccuaacgccaauccaaacgcaaaccccaaugccaacccuaaugcuaaccccaaugccaacccaggaggcggugggagcgaaccuagugacaaacauauuaaggaguacuugaauaaaauacagaacucccucggaggcggcgggucuaucaagcccggaagcgcaaauaagccaaaagaugaacuggacuacgcgaacgauauugagaagaaaaucuguaagauggagaaaugcuccugaggacuagucccuguucccagagcccacuuuuuuuucuuuuuuugaaauaaaauagccugucuuucagaucuaaaaaaaaaaaaaaaaaaaaaaaaaaaaaaaaaaaaaaaaaaaaaaaaaaaaaaaaaaaaaaaaugcaucccccccccccccccccccccccccccccccaaaggcucuuuucagagccaccagaauu

SEQ ID NO: 458 - RNA, 1254 nt, Artificial Sequence
  mRNA Design a-1 (A64-N5-C30-hSL-N5) comprising derived and/or modified sequence from Pf(3D7)__XP_001351122.1__HsALB_Pf-CSP(19-272)_L(G4S)_Pf-CSP(310-3 27)_Pf-CSP(346-375) (opt3)
gggagagucccgcagucggcguccagcggcucugcuuguucgugugugugucguugcaggccuuauucaagcuuaccaugaagugggugaccuucaucagccugcucuuucuuuucuccucugccuacucacuguuucaggaguaucaaugcuacggcaguagcuccaacacaagagucuugaaugaauuaaacuaugacaaugcugggacuaaccuguacaaugagcuagaaaugaacuauuacggaaaacaggagaauugguauucucucaagaaaaacucgaggucacugggugaaaaugaugacggcaacaaugaggauaacgagaaacuucggaagcccaagcacaagaaacugaagcagccugcagacgggaauccagauccgaacgccaaucccaacguugacccuaacgcgaauccaaacguggaucccaaugcuaacccuaauguagacccaaacgccaaucccaacgcaaauccuaacgccaauccaaacgcuaauccgaacgcaaaucccaacgccaacccuaaugcuaacccaaaugccaaccccaaugcgaacccuaaugcaaacccaaaugccaaccccaaugcuaacccgaaugccaacccuaaugcaaaccccaacgcuaauccaaacgccaauccuaacgcgaaucccaacguggauccaaaugccaaccccaaugcaaacccuaaugcuaacccaaaugccaacccgaaugcuaaccccaacgccaauccuaacgcaaauccaaacgccaaucccaacgcuaauccuaacgcgaauccaaacgcaaaucccaacgccaauccgaacgcuaauccuaacgccaauccaaacgcaaaccccaaugccaacccuaaugcuaaccccaaugccaacccaggaggcggugggagcgaaccuagugacaaacauauuaaggaguacuugaauaaaauacagaacucccucaucaagcccggaucugcaaauaagccaaaagaugaacuggacuacgcgaacgauauugagaagaaaaucuguaagauggagaaaugcagcugaggacuagucccuguucccagagcccacuuuuuuuucuuuuuuugaaauaaaauagccugucuuucagaucuaaaaaaaaaaaaaaaaaaaaaaaaaaaaaaaaaaaaaaaaaaaaaaaaaaaaaaaaaaaaaaaaugcaucccccccccccccccccccccccccccccccaaaggcucuuuucagagccaccagaauu

SEQ ID NO: 459 - RNA, 1254 nt, Artificial Sequence
  mRNA Design a-1 (A64-N5-C30-hSL-N5) comprising derived and/or modified sequence from Pf(3D7)__XP_001351122.1__HsALB_Pf-CSP(19-325) (opt3)
gggagagucccgcagucggcguccagcggcucugcuuguucgugugugugucguugcaggccuuauucaagcuuaccaugaagugggugaccuucaucagccugcucuuucuuuucuccucugccuacucacuguuucaggaguaucaaugcuacggcaguagcuccaacacaagagucuugaaugaauuaaacuaugacaaugcugggacuaaccuguacaaugagcuagaaaugaacuauuacggaaaacaggagaauugguauucucucaagaaaaacucgaggucacugggugaaaaugaugacggcaacaaugaggauaacgagaaacuucggaagcccaagcacaagaaacugaagcagccugcagacgggaauccagauccgaacgccaaucccaacguugacccuaacgcgaauccaaacguggaucccaaugcuaacccuaauguagacccaaacgccaaucccaacgcaaauccuaacgccaauccaaacgcuaauccgaacgcaaaucccaacgccaacccuaaugcuaacccaaaugccaaccccaaugcgaacccuaaugcaaacccaaaugccaaccccaaugcuaacccgaaugccaacccuaaugcaaaccccaacgcuaauccaaacgccaauccuaacgcgaaucccaacguggauccaaaugccaaccccaaugcaaacccuaaugcuaacccaaaugccaacccgaaugcuaaccccaacgccaauccuaacgcaaauccaaacgccaaucccaacgcuaauccuaacgcgaauccaaacgcaaaucccaacgccaauccgaacgcuaauccuaacgccaauccaaacgcaaaccccaaugccaacccuaaugcuaaccccaaugccaacccaaauaaaaacaaucagggaaacggccaaggucauaauaugccuaacgaccccaaucgcaacgucgaugaaaaugcaaacgcgaacagcgcugugaagaauaacaauaacgaggaaccaagugacaaacacauuaaggaguacuugaauaagauacagaacugaggacuagucccuguucccagagcccacuuuuuuuucuuuuuuugaaauaaaauagccugucuuucagaucuaaaaaaaaaaaaaaaaaaaaaaaaaaaaaaaaaaaaaaaaaaaaaaaaaaaaaaaaaaaaaaaaugcaucccccccccccccccccccccccccccccccaaaggcucuuuucagagccaccagaauu

SEQ ID NO: 460 - RNA, 1431 nt, Artificial Sequence
  mRNA Design a-1 (A64-N5-C30-hSL-N5) comprising derived and/or modified sequence from Pf(3D7)__XP_001351122.1__HsALB_Pf-CSP(19-384) (opt3)
gggagagucccgcagucggcguccagcggcucugcuuguucgugugugugucguugcaggccuuauucaagcuuaccaugaagugggugaccuucaucagccugcucuuucuuuucuccucugccuacucacuguuucaggaguaucaaugcuacggcaguagcuccaacacaagagucuugaaugaauuaaacuaugacaaugcugggacuaaccuguacaaugagcuagaaaugaacuauuacggaaaacaggagaauugguauucucucaagaaaaacucgaggucacugggugaaaaugaugacggcaacaaugaggauaacgagaaacuucggaagcccaagcacaagaaacugaagcagccugcagacgggaauccagauccgaacgccaaucccaacguugacccuaacgcgaauccaaacguggaucccaaugcuaacccuaauguagacccaaacgccaaucccaacgcaaauccuaacgccaauccaaacgcuaauccgaacgcaaaucccaacgccaacccuaaugcuaacccaaaugccaaccccaaugcgaacccuaaugcaaacccaaaugccaaccccaaugcuaacccgaaugccaacccuaaugcaaaccccaacgcuaauccaaacgccaauccuaacgcgaaucccaacguggauccaaaugccaaccccaaugcaaacccuaaugcuaacccaaaugccaacccgaaugcuaaccccaacgccaauccuaacgcaaauccaaacgccaaucccaacgcuaauccuaacgcgaauccaaacgcaaaucccaacgccaauccgaacgcuaauccuaacgccaauccaaacgcaaaccccaaugccaacccuaaugcuaaccccaaugccaacccaaauaaaaacaaucagggaaacggccaaggucauaauaugccuaacgaccccaaucgcaacgucgaugaaaaugcaaacgcgaacagcgcugugaagaauaacaauaacgaggaaccaagugacaaacacauuaaggaguacuugaauaagauacagaacucccucucuacggaguggagcccguguuccguuaccugcgggaauggaauccaggugcgaauuaaaccuggcucagccaacaagcccaaagaugaacuggacuacgcaaaugacaucgagaagaaaauuuguaagauggaaaaaugcaguagcgucuucaacgugguaaauucuuccugaggacuagucccuguucccagagcccacuuuuuuuucuuuuuuugaaauaaaauagccugucuuucagaucuaaaaaaaaaaaaaaaaaaaaaaaaaaaaaaaaaaaaaaaaaaaaaaaaaaaaaaaaaaaaaaaaugcaucccccccccccccccccccccccccccccccaaaggcucuuuucagagccaccagaauu

SEQ ID NO: 461 - RNA, 1569 nt, Artificial Sequence
  mRNA Design a-1 (A64-N5-C30-hSL-N5) comprising derived and/or modified sequence from Pf(3D7)__XP_001351122.1__HsALB_Pf-CSP(19-384)_TM domain HA (opt3)
gggagagucccgcagucggcguccagcggcucugcuuguucgugugugugucguugcaggccuuauucaagcuuaccaugaagugggugaccuucaucagccugcucuuucuuuucuccucugccuacucacuguuucaggaguaucaaugcuacggcaguagcuccaacacaagagucuugaaugaauuaaacuaugacaaugcugggacuaaccuguacaaugagcuagaaaugaacuauuacggaaaacaggagaauugguauucucucaagaaaaacucgaggucacugggugaaaaugaugacggcaacaaugaggauaacgagaaacuucggaagcccaagcacaagaaacugaagcagccugcagacgggaauccagauccgaacgccaaucccaacguugacccuaacgcgaauccaaacguggaucccaaugcuaacccuaauguagacccaaacgccaaucccaacgcaaauccuaacgccaauccaaacgcuaauccgaacgcaaaucccaacgccaacccuaaugcuaacccaaaugccaaccccaaugcgaacccuaaugcaaacccaaaugccaaccccaaugcuaacccgaaugccaacccuaaugcaaaccccaacgcuaauccaaacgccaauccuaacgcgaaucccaacguggauccaaaugccaaccccaaugcaaacccuaaugcuaacccaaaugccaacccgaaugcuaaccccaacgccaauccuaacgcaaauccaaacgccaaucccaacgcuaauccuaacgcgaauccaaacgcaaaucccaacgccaauccgaacgcuaauccuaacgccaauccaaacgcaaaccccaaugccaacccuaaugcuaaccccaaugccaacccaaauaaaaacaaucagggaaacggccaaggucauaauaugccuaacgaccccaaucgcaacgucgaugaaaaugcaaacgcgaacagcgcugugaagaauaacaauaacgaggaaccaagugacaaacacauuaaggaguacuugaauaagauacagaacucccucucuacggaguggagcccguguuccguuaccugcgggaauggaauccaggugcgaauuaaaccuggcucagccaacaagcccaaagaugaacuggacuacgcaaaugacaucgagaagaaaauuuguaagauggaaaaaugcaguagcgucuucaacgugguaaauucuuccaagcuggagucaacacguaucuaucagauacucgccaucuacagcacuguugcuaguucuuuagugcuggucgugucccuuggcgccauuagcuuuuggauguguucgaacgggucuuugcaaugcagaaucuguauuugaggacuagucccuguucccagagcccacuuuuuuuucuuuuuuugaaauaaaauagccugucuuucagaucuaaaaaaaaaaaaaaaaaaaaaaaaaaaaaaaaaaaaaaaaaaaaaaaaaaaaaaaaaaaaaaaaugcaucccccccccccccccccccccccccccccccaaaggcucuuuucagagccaccagaauu

SEQ ID NO: 462 - RNA, 1281 nt, Artificial Sequence
  mRNA Design a-1 (A64-N5-C30-hSL-N5) comprising derived and/or modified sequence from Pf(3D7)__XP_001351122.1__HsALB_Pf-CSP(82-397) (opt3)
gggagagucccgcagucggcguccagcggcucugcuuguucgugugugugucguugcaggccuuauucaagcuuaccaugaagugggugaccuucaucagccugcucuuucuuuucuccucugccuacucagacaacgagaaacugagaaagcccaaacacaagaaauugaagcagccugcugauggcaauccagacccgaacgcaaaucccaacgucgauccuaaugccaacccaaauguugaccccaacgcgaauccuaacguggauccaaaugcuaaccccaaugccaacccuaaugcaaacccaaacgccaauccgaacgcuaaucccaacgcaaauccuaacgccaauccaaacgcuaaucccaacgccaauccuaacgcgaauccaaacgcaaaucccaacgccaacccgaaugcuaacccuaaugccaaccccaaugcaaacccaaaugcuaacccuaaugccaaccccaauguagacccaaacgcgaaucccaacgccaauccuaacgcaaacccaaaugcuaacccgaaugccaaccccaaugcuaacccuaaugccaacccaaaugcaaaccccaaugccaacccuaaugcuaacccaaaugcgaaccccaacgcaaauccgaacgccaauccuaacgcuaauccaaacgccaaucccaacgcaaauccuaacgccaaucccaacgcuaauccaaacaagaauaaccaggggaauggacagggucauaacaugccuaacgaucccaauaggaacguggacgaaaaugccaacgcaaauagugcggucaaaaacaauaacaaugaggaaccaagcgauaagcacauuaaagaguauuuaaacaagauacaaaauucccugucuacagaauggucgccgugcucagugacuuguggcaacgggauccagguucggauuaaaccuggaagcgcuaauaagcccaaggacgagcuagauuacgccaacgacaucgagaaaaagauuugcaaaauggaaaaguguaguuccguguuuaaugucgugaacucuagcaucggccucauaaugguacuguccuuccuuuuucugaacugaggacuagucccuguucccagagcccacuuuuuuuucuuuuuuugaaauaaaauagccugucuuucagaucuaaaaaaaaaaaaaaaaaaaaaaaaaaaaaaaaaaaaaaaaaaaaaaaaaaaaaaaaaaaaaaaaugcaucccccccccccccccccccccccccccccccaaaggcucuuuucagagccaccagaauu

SEQ ID NO: 463 - RNA, 633 nt, Artificial Sequence
  mRNA Design a-1 (A64-N5-C30-hSL-N5) comprising derived and/or modified sequence from Pf(3D7)__XP_001351122.1__HsALB_Pf-CSP(93-192) (opt3)
gggagagucccgcagucggcguccagcggcucugcuuguucgugugugugucguugcaggccuuauucaagcuuaccaugaagugggugaccuucaucagccugcucuuucuuuucuccucugccuacucaaaacugaagcagcccgcugacggcaacccugauccaaaugcaaacccgaaugucgaccccaacgccaauccuaacguugauccaaaugcgaaccccaauguggacccuaacgcuaauccaaacgccaaucccaacgcaaauccuaacgccaacccaaaugcuaacccgaaugcaaaccccaaugccaacccuaaugcuaacccaaaugccaaccccaaugcgaacccuaaugcaaacccaaaugccaaccccaacgcuaauccgaacgccaauccuaacgcaaaucccaacgcuaauccaugaggacuagucccuguucccagagcccacuuuuuuuucuuuuuuugaaauaaaauagccugucuuucagaucuaaaaaaaaaaaaaaaaaaaaaaaaaaaaaaaaaaaaaaaaaaaaaaaaaaaaaaaaaaaaaaaaugcaucccccccccccccccccccccccccccccccaaaggcucuuuucagagccaccagaauu

SEQ ID NO: 464 - RNA, 873 nt, Artificial Sequence
  mRNA Design a-1 (A64-N5-C30-hSL-N5) comprising derived and/or modified sequence from Pf(3D7)__XP_001351122.1__HsALB_Pf-CSP(93-272) (opt3)
gggagagucccgcagucggcguccagcggcucugcuuguucgugugugugucguugcaggccuuauucaagcuuaccaugaagugggugaccuucaucagccugcucuuucuuuucuccucugccuacucaaaacugaagcagcccgcugacggcaacccugauccaaaugcaaacccgaaugucgaccccaacgccaauccuaacguugauccaaaugcgaaccccaauguggacccuaacgcuaauccaaacgccaaucccaacgcaaauccuaacgccaacccaaaugcuaacccgaaugcaaaccccaaugccaacccuaaugcuaacccaaaugccaaccccaaugcgaacccuaaugcaaacccaaaugccaaccccaacgcuaauccgaacgccaauccuaacgcaaaucccaacgcuaauccaaacgccaauccuaacguagaucccaaugcgaacccaaaugccaaccccaaugcaaacccuaacgcuaauccaaacgccaauccgaacgcuaaucccaacgccaauccuaacgcaaauccaaacgccaaucccaacgcuaauccuaacgcgaauccaaacgcaaaccccaaugccaacccgaaugcuaacccuaaugccaacccaaaugcaaaccccaaugccaacccuaaugcuaaccccugaggacuagucccuguucccagagcccacuuuuuuuucuuuuuuugaaauaaaauagccugucuuucagaucuaaaaaaaaaaaaaaaaaaaaaaaaaaaaaaaaaaaaaaaaaaaaaaaaaaaaaaaaaaaaaaaaugcaucccccccccccccccccccccccccccccccaaaggcucuuuucagagccaccagaauu

SEQ ID NO: 465 - RNA, 1248 nt, Artificial Sequence
  mRNA Design a-1 (A64-N5-C30-hSL-N5) comprising derived and/or modified sequence from Pf(3D7)__XP_001351122.1__HsALB_Pf-CSP(93-397) (opt3)
gggagagucccgcagucggcguccagcggcucugcuuguucgugugugugucguugcaggccuuauucaagcuuaccaugaagugggugaccuucaucagccugcucuuucuuuucuccucugccuacucaaaacugaagcagcccgcugacggcaacccugauccaaaugcaaacccgaaugucgaccccaacgccaauccuaacguugauccaaaugcgaaccccaauguggacccuaacgcuaauccaaacgccaaucccaacgcaaauccuaacgccaacccaaaugcuaacccgaaugcaaaccccaaugccaacccuaaugcuaacccaaaugccaaccccaaugcgaacccuaaugcaaacccaaaugccaaccccaacgcuaauccgaacgccaauccuaacgcaaaucccaacgcuaauccaaacgccaauccuaacguagaucccaaugcgaacccaaaugccaaccccaaugcaaacccuaacgcuaauccaaacgccaauccgaacgcuaaucccaacgccaauccuaacgcaaauccaaacgccaaucccaacgcuaauccuaacgcgaauccaaacgcaaaccccaaugccaacccgaaugcuaacccuaaugccaacccaaaugcaaaccccaaugccaacccuaaugcuaaccccaauaaaaacaaucaagggaacggacagggucacaauaugccaaacgacccuaacagaaauguggaugagaacgccaaugcaaacagugcggucaagaauaacaauaacgaggaacccagcgacaaacauauuaaggaauauuugaauaagauacagaacuccuuaucuacagaguggucgccaugcucagugacuuguggcaaugggauccagguuaggauuaaaccgggaagcgcuaacaagccuaaagaugaacuggacuacgccaaugauaucgagaagaaaauuugcaagauggagaaguguaguuccguguuuaacgucguaaauucuagcaucggccuaauaauggugcucuccuuccuguuucuuaacugaggacuagucccuguucccagagcccacuuuuuuuucuuuuuuugaaauaaaauagccugucuuucagaucuaaaaaaaaaaaaaaaaaaaaaaaaaaaaaaaaaaaaaaaaaaaaaaaaaaaaaaaaaaaaaaaaugcaucccccccccccccccccccccccccccccccaaaggcucuuuucagagccaccagaauu

SEQ ID NO: 466 - RNA, 618 nt, Artificial Sequence
  mRNA Design a-1 (A64-N5-C30-hSL-N5) comprising derived and/or modified sequence from Pf(3D7)__XP_001351122.1__HsALB_Pf-CSP(98-192) (opt3)
gggagagucccgcagucggcguccagcggcucugcuuguucgugugugugucguugcaggccuuauucaagcuuaccaugaagugggugaccuucaucagccugcucuuucuuuucuccucugccuacucagcugacggcaaccccgauccuaaugcaaacccaaaugucgacccgaacgccaaucccaacguugauccuaaugcgaacccaaauguggaccccaacgcuaauccuaacgccaauccaaacgcaaaucccaacgccaacccuaaugcuaacccaaaugcaaacccgaaugccaaccccaaugcuaacccuaaugccaacccaaaugcgaaccccaaugcaaacccuaaugccaacccaaacgcuaaucccaacgccaauccgaacgcaaauccuaacgcuaaucccugaggacuagucccuguucccagagcccacuuuuuuuucuuuuuuugaaauaaaauagccugucuuucagaucuaaaaaaaaaaaaaaaaaaaaaaaaaaaaaaaaaaaaaaaaaaaaaaaaaaaaaaaaaaaaaaaaugcaucccccccccccccccccccccccccccccccaaaggcucuuuucagagccaccagaauu

SEQ ID NO: 467 - RNA, 858 nt, Artificial Sequence
  mRNA Design a-1 (A64-N5-C30-hSL-N5) comprising derived and/or modified sequence from Pf(3D7)__XP_001351122.1__HsALB_Pf-CSP(98-272) (opt3)
gggagagucccgcagucggcguccagcggcucugcuuguucgugugugugucguugcaggccuuauucaagcuuaccaugaagugggugaccuucaucagccugcucuuucuuuucuccucugccuacucagcugacggcaaccccgauccuaaugcaaacccaaaugucgacccgaacgccaaucccaacguugauccuaaugcgaacccaaauguggaccccaacgcuaauccuaacgccaauccaaacgcaaaucccaacgccaacccuaaugcuaacccaaaugcaaacccgaaugccaaccccaaugcuaacccuaaugccaacccaaaugcgaaccccaaugcaaacccuaaugccaacccaaacgcuaaucccaacgccaauccgaacgcaaauccuaacgcuaaucccaacgccaauccaaacguagauccuaaugcgaaccccaaugccaacccaaaugcaaaccccaacgcuaauccuaacgccaauccaaacgcuaauccgaacgccaaucccaacgcaaauccuaacgccaauccaaacgcuaaucccaacgcgaauccuaacgcaaacccaaaugccaaccccaaugcuaacccgaaugccaacccuaaugcaaacccaaaugccaaccccaaugcuaacccuugaggacuagucccuguucccagagcccacuuuuuuuucuuuuuuugaaauaaaauagccugucuuucagaucuaaaaaaaaaaaaaaaaaaaaaaaaaaaaaaaaaaaaaaaaaaaaaaaaaaaaaaaaaaaaaaaaugcaucccccccccccccccccccccccccccccccaaaggcucuuuucagagccaccagaauu

SEQ ID NO: 468 - RNA, 1164 nt, Artificial Sequence
  mRNA Design a-1 (A64-N5-C30-hSL-N5) comprising derived and/or modified sequence from Pf(3D7)__XP_001351122.1__HsALB_Pf-CSP(98-374) (opt3)
gggagagucccgcagucggcguccagcggcucugcuuguucgugugugugucguugcaggccuuauucaagcuuaccaugaagugggugaccuucaucagccugcucuuucuuuucuccucugccuacucagcugacggcaaccccgauccuaaugcaaacccaaaugucgacccgaacgccaaucccaacguugauccuaaugcgaacccaaauguggaccccaacgcuaauccuaacgccaauccaaacgcaaaucccaacgccaacccuaaugcuaacccaaaugcaaacccgaaugccaaccccaaugcuaacccuaaugccaacccaaaugcgaaccccaaugcaaacccuaaugccaacccaaacgcuaaucccaacgccaauccgaacgcaaauccuaacgcuaaucccaacgccaauccaaacguagauccuaaugcgaaccccaaugccaacccaaaugcaaaccccaacgcuaauccuaacgccaauccaaacgcuaauccgaacgccaaucccaacgcaaauccuaacgccaauccaaacgcuaaucccaacgcgaauccuaacgcaaacccaaaugccaaccccaaugcuaacccgaaugccaacccuaaugcaaacccaaaugccaaccccaaugcuaacccuaauaaaaacaaucaggggaacggacaaggucacaauaugcccaacgacccaaacagaaauguggaugagaacgccaaugcaaacagugcggucaagaauaacaauaacgaggaaccuagcgacaaacauauuaaggaauaucugaauaaaauacagaacuccuugucuacagaguggucgcccugcucagugacuuguggcaaugggauccagguuaggauuaagccaggaagcgcuaacaagccgaaagaugaauuagacuacgccaaugauaucgagaagaaaauuugcaagauggagaaauguugaggacuagucccuguucccagagcccacuuuuuuuucuuuuuuugaaauaaaauagccugucuuucagaucuaaaaaaaaaaaaaaaaaaaaaaaaaaaaaaaaaaaaaaaaaaaaaaaaaaaaaaaaaaaaaaaaugcaucccccccccccccccccccccccccccccccaaaggcucuuuucagagccaccagaauu

SEQ ID NO: 469 - RNA, 1233 nt, Artificial Sequence
  mRNA Design a-1 (A64-N5-C30-hSL-N5) comprising derived and/or modified sequence from Pf(3D7)__XP_001351122.1__HsALB_Pf-CSP(98-397) (opt3)
gggagagucccgcagucggcguccagcggcucugcuuguucgugugugugucguugcaggccuuauucaagcuuaccaugaagugggugaccuucaucagccugcucuuucuuuucuccucugccuacucagcugacggcaaccccgauccuaaugcaaacccaaaugucgacccgaacgccaaucccaacguugauccuaaugcgaacccaaauguggaccccaacgcuaauccuaacgccaauccaaacgcaaaucccaacgccaacccuaaugcuaacccaaaugcaaacccgaaugccaaccccaaugcuaacccuaaugccaacccaaaugcgaaccccaaugcaaacccuaaugccaacccaaacgcuaaucccaacgccaauccgaacgcaaauccuaacgcuaaucccaacgccaauccaaacguagauccuaaugcgaaccccaaugccaacccaaaugcaaaccccaacgcuaauccuaacgccaauccaaacgcuaauccgaacgccaaucccaacgcaaauccuaacgccaauccaaacgcuaaucccaacgcgaauccuaacgcaaacccaaaugccaaccccaaugcuaacccgaaugccaacccuaaugcaaacccaaaugccaaccccaaugcuaacccuaauaaaaacaaucaggggaacggacaaggucacaauaugcccaacgacccaaacagaaauguggaugagaacgccaaugcaaacagugcggucaagaauaacaauaacgaggaaccuagcgacaaacauauuaaggaauaucugaauaaaauacagaacuccuugucuacagaguggucgcccugcucagugacuuguggcaaugggauccagguuaggauuaagccaggaagcgcuaacaagccgaaagaugaauuagacuacgccaaugauaucgagaagaaaauuugcaagauggagaaauguaguuccguguuuaacgucguaaauucuagcaucggccugauaauggugcuauccuuccucuuucugaacugaggacuagucccuguucccagagcccacuuuuuuuucuuuuuuugaaauaaaauagccugucuuucagaucuaaaaaaaaaaaaaaaaaaaaaaaaaaaaaaaaaaaaaaaaaaaaaaaaaaaaaaaaaaaaaaaaugcaucccccccccccccccccccccccccccccccaaaggcucuuuucagagccaccagaauu

SEQ ID NO: 470 - RNA, 1560 nt, Artificial Sequence
  mRNA Design a-1 (A64-N5-C30-hSL-N5) comprising derived and/or modified sequence from Pf(3D7)__XP_001351122.1__HsALB_Pf-CSP(199-377)_L(PVTN)_HBsAg (opt3)
gggagagucccgcagucggcguccagcggcucugcuuguucgugugugugucguugcaggccuuauucaagcuuaccaugaagugggugaccuucaucagccugcucuuucuuuucuccucugccuacucagaccccaacgcuaauccuaacgcaaauccaaacgccaauccgaacgcgaaucccaacgcuaauccuaacgccaauccaaacgcaaaucccaacgccaauccuaacgcuaacccaaaugcaaaccccaaugccaacccuaaugcuaacccaaaugccaacccgaaugcgaaccccaaugcaaacccuaaugccaacccaaaugcuaaccccaacgccaauccuaacaaaaauaaccagggcaaugggcaaggacacaacaugccaaaugaucccaacagaaaugucgacgagaacgcaaaugcuaacagugccguuaagaauaacaauaacgaggaaccgagcgauaaacauauuaaggaauaucugaacaaaauacaaaauuccuugucuacagaguggucgccuugcucagugacuugugguaacggcauccagguaaggauuaagcccgggagcgcgaauaagccaaaagacgaauuagauuacgccaacgacaucgagaagaaaauuugcaagauggagaaauguaguuccgugccugucacgaauauggaaaacaucaccucuggauuucugggcccccuacucgugcugcaggcagguuucuuucuucugacacggauauugacuaucccacagagccucgauuccugguggaccucacugaauuuccucgggggaagucccguuugccugggccagaacagccagucuccuacauccaaucacucaccaaccagcuguccgcccauuugcccuggcuaucgcuggauguguuuacgacguuuuaucauuuuccuguuuauccuuuugcugugccuaauauuccuccuggugcuucuggacuaccaggggauguugccagucuguccccucauuccuggaaguacuacaaccaacacggguccaugcaagacuuguaccacacccgcucaaggcaauucuauguuuccguccugcugcuguacuaagccuaccgaugggaacugcacauguaucccaauucccagcucgugggccuucgcuaaauaucugugggagugggccucugugagauuuuccugguuaucacugcucguaccuuucguucagugguucgugggacuuagucccaccgucuggcugagcgcaaucuggaugaugugguacuggggcccauccuuguauucuaucgugagcccuuuuauuccccuacugccaauauucuuuugccucuggguguacaucugaggacuagucccuguucccagagcccacuuuuuuuucuuuuuuugaaauaaaauagccugucuuucagaucuaaaaaaaaaaaaaaaaaaaaaaaaaaaaaaaaaaaaaaaaaaaaaaaaaaaaaaaaaaaaaaaaugcaucccccccccccccccccccccccccccccccaaaggcucuuuucagagccaccagaauu

SEQ ID NO: 471 - RNA, 1299 nt, Artificial Sequence
  mRNA Design a-1 (A64-N5-C30-hSL-N5) comprising derived and/or modified sequence from Pb(ANKA)__XP_022712148.1__Pb-CSP (opt3)
gggagagucccgcagucggcguccagcggcucugcuuguucgugugugugucguugcaggccuuauucaagcuuaccaugaagaaaugcaccauccugguggucgccagccuccuucugguuaacuccuuguuacccggcuacgggcagaauaagucuauucaagcucagagaaaccugaaugagcuauguuauaacgaaggaaaugacaacaaacucuaccacgugcuuaauucaaagaacgguaaaauauauaauaggaacacaguaaaucggcugcuggcagaugccccugagggcaagaagaacgaaaagaaaaaugagaaaaucgaacgcaacaauaaguugaaacagccaccgcccccuccaaaccccaacgacccuccacccccuaauccaaacgauccgcccccuccaaaucccaacgacccuccacccccgaauccuaacgaucccccaccucccaaugcgaacgacccacccccuccaaaugcuaacgauccggcacccccuaaugccaacgacccagcucccccuaaugccaacgauccagcacccccgaaugccaacgacccugcuccacccaacgccaaugauccucccccaccuaaccccaaugacccagcgccgccuaacgcaaaugaucccccacccccuaacccaaaugaccccgccccuccgcaggggaacaauaacccacaaccccagccucgaccacagccccagccucaaccgcagccccagccacagccucaaccccagccacagccucguccccaaccacagccgcagccuggaggcaauaacaauaacaagaauaacaacaaugacgauaguuacauucccagcgcugagaagauccucgaguucgugaaacagauuagagacuccaucacugaagaguggucucaaugcaacgucacgugugguucggggauaagggugcggaagcgcaaaggaucaaauaagaaagccgaagaucugacccuggaggacaucgauacagagauuugcaagauggacaaauguagcaguaucuuuaacauuguuuccaauucucucggcuucgugaucuuacugguccuuguguuuuucaacugaggacuagucccuguucccagagcccacuuuuuuuucuuuuuuugaaauaaaauagccugucuuucagaucuaaaaaaaaaaaaaaaaaaaaaaaaaaaaaaaaaaaaaaaaaaaaaaaaaaaaaaaaaaaaaaaaugcaucccccccccccccccccccccccccccccccaaaggcucuuuucagagccaccagaauu

SEQ ID NO: 472 - RNA, 1464 nt, Artificial Sequence
  mRNA Design a-1 (A64-N5-C30-hSL-N5) comprising derived and/or modified sequence from Pb(ANKA)__XP_022712148.1__Pb-CSP_L(G4SG4)_TM domain HA (opt3)
gggagagucccgcagucggcguccagcggcucugcuuguucgugugugugucguugcaggccuuauucaagcuuaccaugaagaaaugcaccauccugguggucgccagccuccuucugguuaacuccuuguuacccggcuacgggcagaauaagucuauucaagcucagagaaaccugaaugagcuauguuauaacgaaggaaaugacaacaaacucuaccacgugcuuaauucaaagaacgguaaaauauauaauaggaacacaguaaaucggcugcuggcagaugccccugagggcaagaagaacgaaaagaaaaaugagaaaaucgaacgcaacaauaaguugaaacagccaccgcccccuccaaaccccaacgacccuccacccccuaauccaaacgauccgcccccuccaaaucccaacgacccuccacccccgaauccuaacgaucccccaccucccaaugcgaacgacccacccccuccaaaugcuaacgauccggcacccccuaaugccaacgacccagcucccccuaaugccaacgauccagcacccccgaaugccaacgacccugcuccacccaacgccaaugauccucccccaccuaaccccaaugacccagcgccgccuaacgcaaaugaucccccacccccuaacccaaaugaccccgccccuccgcaggggaacaauaacccacaaccccagccucgaccacagccccagccucaaccgcagccccagccacagccucaaccccagccacagccucguccccaaccacagccgcagccuggaggcaauaacaauaacaagaauaacaacaaugacgauaguuacauucccagcgcugagaagauccucgaguucgugaaacagauuagagacuccaucacugaagaguggucucaaugcaacgucacgugugguucggggauaagggugcggaagcgcaaaggaucaaauaagaaagccgaagaucugacccuggaggacaucgauacagagauuugcaagauggacaaauguagcaguaucuuuaacauuguuuccaauucucucggcuucgugaucuuacugguccuuguguuuuucaacggcgggggagguagcggcgggggaggcaaguuggaauccacuagaauauaucagauucuggcaaucuacucaaccguagcuaguagccuaguucucguggucucucugggugccauuuccuuuuggaugugcucaaaugggagccuucaguguaggaucugcaucugaggacuagucccuguucccagagcccacuuuuuuuucuuuuuuugaaauaaaauagccugucuuucagaucuaaaaaaaaaaaaaaaaaaaaaaaaaaaaaaaaaaaaaaaaaaaaaaaaaaaaaaaaaaaaaaaaugcaucccccccccccccccccccccccccccccccaaaggcucuuuucagagccaccagaauu

SEQ ID NO: 473 - RNA, 1284 nt, Artificial Sequence
  mRNA Design a-1 (A64-N5-C30-hSL-N5) comprising derived and/or modified sequence from Pb(ANKA)__XP_022712148.1__HsALB_Pb-CSP(24-340) (opt3)
gggagagucccgcagucggcguccagcggcucugcuuguucgugugugugucguugcaggccuuauucaagcuuaccaugaagugggugaccuucaucagccugcucuuucuuuucuccucugccuacucacagaacaaaaguauucaagcucagagaaaucugaacgaguugugcuauaaugaaggcaacgacaauaaguuauaccacguccugaacagcaaaaaugggaagauauauaacaggaauacaguuaaccggcuacucgcagaugcccccgaggguaaaaagaaugaaaagaaaaacgagaagaucgaacgcaauaacaaacugaagcagccuccaccgcccccuaauccaaacgaucccccuccacccaacccuaaugacccaccgcccccuaacccaaaugaucccccuccacccaacccgaaugacccucccccaccuaacgcgaaugaucccccacccccuaacgcuaaugacccagccccgcccaacgcaaaugacccugccccacccaacgcuaaugauccugcaccacccaacgccaaugacccggcuccuccaaacgccaacgaucccccucccccaaauccuaacgaccccgcgccaccgaaugcaaacgauccucccccacccaauccuaacgacccagcucccccucagggaaauaacaauccgcaaccacagccccgaccucagccacagccccaaccucagccgcagccccagccacaaccucagccccagccacguccucaaccccagccacagccgggcgggaacaauaacaauaaaaacaauaacaacgacgauuccuacauuccuucugccgagaagauccuugaguuugugaagcagauuagagacucgaucacugaagaguggucacaauguaauguaacgugcggaagcggcauaagggugcggaaacgcaaggguaguaacaaaaaggccgaagaucugaccuuggaggacaucgauacagagauuuguaaaauggacaagugcuccucuaucuucaauauugucagcaacucccucggguuugugauccugcugguucucguguucuuuaauugaggacuagucccuguucccagagcccacuuuuuuuucuuuuuuugaaauaaaauagccugucuuucagaucuaaaaaaaaaaaaaaaaaaaaaaaaaaaaaaaaaaaaaaaaaaaaaaaaaaaaaaaaaaaaaaaaugcaucccccccccccccccccccccccccccccccaaaggcucuuuucagagccaccagaauu

SEQ ID NO: 474 - RNA, 1302 nt, Artificial Sequence
  mRNA Design a-1 (A64-N5-C30-hSL-N5) comprising derived and/or modified sequence from Pb(ANKA)__XP_022712148.1__HsIns-iso1_Pb-CSP(24-340) (opt3)
gggagagucccgcagucggcguccagcggcucugcuuguucgugugugugucguugcaggccuuauucaagcuuaccauggcccuguggaugagacuccuuccccuguuggcuuuacuggcacuauggggcccugacccagccgcggcucagaacaagagcauccaagcccagaggaaucucaacgagcugugcuacaaugaagggaacgauaauaaacuuuaucacguucugaacuccaagaauggaaaaauuuacaaccggaauaccgucaaccgcuugcucgcagacgccccggaggguaagaaaaaugaaaagaagaacgagaaaauagaacgaaauaacaagcugaaacagcccccuccacccccuaauccaaacgaucccccuccaccgaaccccaaugacccuccacccccuaacccaaaugaucccccgccucccaacccaaaugacccucccccacccaacgcuaaugauccuccaccgcccaacgcaaaugacccugccccacccaacgcuaaugauccugccccacccaacgcgaaugacccggcaccuccaaacgccaaugaucccgcuccucccaacgccaacgacccaccucccccaaauccgaacgauccugcacccccaaaugcuaacgaucccccuccacccaauccuaacgacccggccccaccccagggcaauaacaauccucaaccacagccccguccucagccgcagccccaaccacagccucagccccagccacaaccucagccccagccaagaccgcaaccucagccccagccagggggaaacaauaacaauaagaacaauaacaacgacgacucuuauauccccucagcggagaaaauucuggaguucguuaagcagaucagggauaguauuacagaagaguggagccaauguaaugugacuugcggcuccgguauccggguacgcaagagaaaagggucuaacaagaaagccgaagaccucacguuagaggauauagacaccgagaucuguaagauggauaaaugcucgucaauuuuuaauaucgugagcaacagucugggauucgucauucuuuuggugcugguguuuuucaauugaggacuagucccuguucccagagcccacuuuuuuuucuuuuuuugaaauaaaauagccugucuuucagaucuaaaaaaaaaaaaaaaaaaaaaaaaaaaaaaaaaaaaaaaaaaaaaaaaaaaaaaaaaaaaaaaaugcaucccccccccccccccccccccccccccccccaaaggcucuuuucagagccaccagaauu

SEQ ID NO: 475 - RNA, 1281 nt, Artificial Sequence
  mRNA Design a-1 (A64-N5-C30-hSL-N5) comprising derived and/or modified sequence from Pb(ANKA)__XP_022712148.1__HsSPARC_Pb-CSP(24-340) (opt3)
gggagagucccgcagucggcguccagcggcucugcuuguucgugugugugucguugcaggccuuauucaagcuuaccaugagagccuggaucuucuuucugcucugccuugcuggcagggcacuggcccagaacaagagcauucaagcgcagcggaauuugaacgaguuauguuacaaugaagggaacgacaauaaacuguaucacguucuaaacuccaagaauggaaaaauauacaaccgcaauaccgucaaccgacuccuggcugaugcccccgaggguaagaaaaaugaaaagaagaacgagaaaaucgaacguaauaacaaacuuaagcagccuccaccgcccccuaauccaaacgacccgccuccacccaacccuaaugauccaccgcccccuaacccaaaugaucccccuccacccaacccgaaugacccucccccaccuaacgcaaaugaucccccacccccuaacgccaaugacccagcuccgcccaacgcaaaugacccugccccacccaacgcuaaugauccugccccacccaacgcgaaugacccggcaccuccaaacgccaacgaucccccucccccaaauccuaacgaccccgcuccaccgaaugccaacgauccucccccacccaauccuaacgacccagcacccccucagggcaauaacaauccgcaaccacagcccagaccucagccacagccccaaccucagccgcagccccagccacaaccucagccccagccaaggccucaaccccagccacagcccgggggaaacaauaacaauaagaacaauaacaacgacgauucuuauauuccuucagcugagaaaauccuggaguucguuaagcagauucgggacaguaucacagaagaguggagccaaugcaaugugacuuguggcuccgguauacgcguaagaaagaggaaagggucuaacaagaaagccgaagauuugacgcucgaggacaucgauaccgagauuugcaagauggacaaauguucgucaaucuuuaauauugugagcaacagucugggauucgucauccugcucguguuaguguuuuucaauugaggacuagucccuguucccagagcccacuuuuuuuucuuuuuuugaaauaaaauagccugucuuucagaucuaaaaaaaaaaaaaaaaaaaaaaaaaaaaaaaaaaaaaaaaaaaaaaaaaaaaaaaaaaaaaaaaugcaucccccccccccccccccccccccccccccccaaaggcucuuuucagagccaccagaauu

SEQ ID NO: 476 - RNA, 1284 nt, Artificial Sequence
  mRNA Design a-1 (A64-N5-C30-hSL-N5) comprising derived and/or modified sequence from Pb(ANKA)__XP_022712148.1__IgE_Pb-CSP(24-340) (opt3)
gggagagucccgcagucggcguccagcggcucugcuuguucgugugugugucguugcaggccuuauucaagcuuaccauggacuggaccuggauccuguuccucguggccgcugcaacaagaguccacagccagaacaaguccauucaagcccagaggaaucuuaacgagcugugcuacaaugaaggcaacgauaauaaauuguaucauguuuuaaacucuaagaaugggaaaauauacaaccggaauacugugaaccgccugcuagcggacgcucccgagggaaagaaaaaugaaaagaagaacgagaaaaucgaacgaaauaacaagcucaaacagccuccaccgcccccuaauccaaacgaucccccuccacccaacccuaaugacccaccgcccccuaacccaaaugaucccccuccacccaacccgaaugacccucccccaccuaacgccaaugaucccccacccccuaacgcaaaugacccagccccgcccaacgcuaaugauccugcaccacccaacgccaaugacccugcuccacccaacgccaaugauccggcgccuccaaacgcaaacgaucccccucccccaaauccuaacgaccccgccccaccgaaugcuaacgacccucccccacccaauccuaacgacccagcacccccucaggguaauaacaauccgcaaccacagccccguccucagccacagccccaaccucagccgcagccccagccacaaccucagccccagccaagaccucaaccccagccacagccgggcgggaacaauaacaauaagaacaauaacaacgaugacucauauauuccuagugccgagaaaauccuggaguuuguaaagcagauuagggauagcaucacggaagaguggucccaauguaaugugaccugcggaucuggcauacggguccgcaagagaaaagguucgaacaagaaagcugaagaccuuacacuggaggauaucgacacugagauuuguaagauggauaaaugcucaagcaucuucaauauugugaguaacuccuugggguuuguuauccuccuggugcuggucuucuuuaauugaggacuagucccuguucccagagcccacuuuuuuuucuuuuuuugaaauaaaauagccugucuuucagaucuaaaaaaaaaaaaaaaaaaaaaaaaaaaaaaaaaaaaaaaaaaaaaaaaaaaaaaaaaaaaaaaaugcaucccccccccccccccccccccccccccccccaaaggcucuuuucagagccaccagaauu

SEQ ID NO: 477 - RNA, 1470 nt, Artificial Sequence
  mRNA Design a-1 (A64-N5-C30-hSL-N5) comprising derived and/or modified sequence from Pf(3D7)__XP_001351122.1__Pf-CSP (opt4)
gggagagucccgcagucggcguccagcggcucugcuuguucgugugugugucguugcaggccuuauucaagcuuaccaugaugagaaagcuggccauccugagcgugagcagcuuccuguucguggaggcccuguuccaggaguaccagugcuacggcagcagcagcaacaccagagugcugaacgagcugaacuacgacaacgccggcaccaaccuguacaacgagcuggagaugaacuacuacggcaagcaggagaacugguacagccugaagaagaacagcagaagccugggcgagaacgacgacggcaacaacgaggacaacgagaagcugagaaagcccaagcacaagaagcugaagcagcccgccgacggcaaccccgaccccaacgccaaccccaacguggaccccaacgccaaccccaacguggaccccaacgccaaccccaacguggaccccaacgccaaccccaacgccaaccccaacgccaaccccaacgccaaccccaacgccaaccccaacgccaaccccaacgccaaccccaacgccaaccccaacgccaaccccaacgccaaccccaacgccaaccccaacgccaaccccaacgccaaccccaacgccaaccccaacgccaaccccaacgccaaccccaacgccaaccccaacguggaccccaacgccaaccccaacgccaaccccaacgccaaccccaacgccaaccccaacgccaaccccaacgccaaccccaacgccaaccccaacgccaaccccaacgccaaccccaacgccaaccccaacgccaaccccaacgccaaccccaacgccaaccccaacgccaaccccaacgccaaccccaacgccaaccccaacgccaaccccaacgccaaccccaacaagaacaaccagggcaacggccagggccacaacaugcccaacgaccccaacagaaacguggacgagaacgccaacgccaacagcgccgugaagaacaacaacaacgaggagcccagcgacaagcacaucaaggaguaccugaacaagauccagaacagccugagcaccgaguggagccccugcagcgugaccugcggcaacggcauccaggugagaaucaagcccggcagcgccaacaagcccaaggacgagcuggacuacgccaacgacaucgagaagaagaucugcaagauggagaagugcagcagcguguucaacguggugaacagcagcaucggccugaucauggugcugagcuuccuguuccugaacugaggacuagucccuguucccagagcccacuuuuuuuucuuuuuuugaaauaaaauagccugucuuucagaucuaaaaaaaaaaaaaaaaaaaaaaaaaaaaaaaaaaaaaaaaaaaaaaaaaaaaaaaaaaaaaaaaugcaucccccccccccccccccccccccccccccccaaaggcucuuuucagagccaccagaauu

SEQ ID NO: 478 - RNA, 1401 nt, Artificial Sequence
  mRNA Design a-1 (A64-N5-C30-hSL-N5) comprising derived and/or modified sequence from Pf(3D7)__XP_001351122.1__Pf-CSP(1-374) (opt4)
gggagagucccgcagucggcguccagcggcucugcuuguucgugugugugucguugcaggccuuauucaagcuuaccaugaugagaaagcuggccauccugagcgugagcagcuuccuguucguggaggcccuguuccaggaguaccagugcuacggcagcagcagcaacaccagagugcugaacgagcugaacuacgacaacgccggcaccaaccuguacaacgagcuggagaugaacuacuacggcaagcaggagaacugguacagccugaagaagaacagcagaagccugggcgagaacgacgacggcaacaacgaggacaacgagaagcugagaaagcccaagcacaagaagcugaagcagcccgccgacggcaaccccgaccccaacgccaaccccaacguggaccccaacgccaaccccaacguggaccccaacgccaaccccaacguggaccccaacgccaaccccaacgccaaccccaacgccaaccccaacgccaaccccaacgccaaccccaacgccaaccccaacgccaaccccaacgccaaccccaacgccaaccccaacgccaaccccaacgccaaccccaacgccaaccccaacgccaaccccaacgccaaccccaacgccaaccccaacgccaaccccaacgccaaccccaacguggaccccaacgccaaccccaacgccaaccccaacgccaaccccaacgccaaccccaacgccaaccccaacgccaaccccaacgccaaccccaacgccaaccccaacgccaaccccaacgccaaccccaacgccaaccccaacgccaaccccaacgccaaccccaacgccaaccccaacgccaaccccaacgccaaccccaacgccaaccccaacgccaaccccaacaagaacaaccagggcaacggccagggccacaacaugcccaacgaccccaacagaaacguggacgagaacgccaacgccaacagcgccgugaagaacaacaacaacgaggagcccagcgacaagcacaucaaggaguaccugaacaagauccagaacagccugagcaccgaguggagccccugcagcgugaccugcggcaacggcauccaggugagaaucaagcccggcagcgccaacaagcccaaggacgagcuggacuacgccaacgacaucgagaagaagaucugcaagauggagaagugcugaggacuagucccuguucccagagcccacuuuuuuuucuuuuuuugaaauaaaauagccugucuuucagaucuaaaaaaaaaaaaaaaaaaaaaaaaaaaaaaaaaaaaaaaaaaaaaaaaaaaaaaaaaaaaaaaaugcaucccccccccccccccccccccccccccccccaaaggcucuuuucagagccaccagaauu

SEQ ID NO: 479 - RNA, 1254 nt, Artificial Sequence
  mRNA Design a-1 (A64-N5-C30-hSL-N5) comprising derived and/or modified sequence from Pf(3D7)__XP_001351122.1__Pf-CSP(1-325) (opt4)
gggagagucccgcagucggcguccagcggcucugcuuguucgugugugugucguugcaggccuuauucaagcuuaccaugaugagaaagcuggccauccugagcgugagcagcuuccuguucguggaggcccuguuccaggaguaccagugcuacggcagcagcagcaacaccagagugcugaacgagcugaacuacgacaacgccggcaccaaccuguacaacgagcuggagaugaacuacuacggcaagcaggagaacugguacagccugaagaagaacagcagaagccugggcgagaacgacgacggcaacaacgaggacaacgagaagcugagaaagcccaagcacaagaagcugaagcagcccgccgacggcaaccccgaccccaacgccaaccccaacguggaccccaacgccaaccccaacguggaccccaacgccaaccccaacguggaccccaacgccaaccccaacgccaaccccaacgccaaccccaacgccaaccccaacgccaaccccaacgccaaccccaacgccaaccccaacgccaaccccaacgccaaccccaacgccaaccccaacgccaaccccaacgccaaccccaacgccaaccccaacgccaaccccaacgccaaccccaacgccaaccccaacgccaaccccaacguggaccccaacgccaaccccaacgccaaccccaacgccaaccccaacgccaaccccaacgccaaccccaacgccaaccccaacgccaaccccaacgccaaccccaacgccaaccccaacgccaaccccaacgccaaccccaacgccaaccccaacgccaaccccaacgccaaccccaacgccaaccccaacgccaaccccaacgccaaccccaacgccaaccccaacaagaacaaccagggcaacggccagggccacaacaugcccaacgaccccaacagaaacguggacgagaacgccaacgccaacagcgccgugaagaacaacaacaacgaggagcccagcgacaagcacaucaaggaguaccugaacaagauccagaacugaggacuagucccuguucccagagcccacuuuuuuuucuuuuuuugaaauaaaauagccugucuuucagaucuaaaaaaaaaaaaaaaaaaaaaaaaaaaaaaaaaaaaaaaaaaaaaaaaaaaaaaaaaaaaaaaaugcaucccccccccccccccccccccccccccccccaaaggcucuuuucagagccaccagaauu

SEQ ID NO: 480 - RNA, 1470 nt, Artificial Sequence
  mRNA Design a-1 (A64-N5-C30-hSL-N5) comprising derived and/or modified sequence from Pf(3D7)__XP_001351122.1__HsALB_Pf-CSP(19-397) (opt4)
gggagagucccgcagucggcguccagcggcucugcuuguucgugugugugucguugcaggccuuauucaagcuuaccaugaagugggugaccuucaucagccugcuguuccuguucagcagcgccuacagccuguuccaggaguaccagugcuacggcagcagcagcaacaccagagugcugaacgagcugaacuacgacaacgccggcaccaaccuguacaacgagcuggagaugaacuacuacggcaagcaggagaacugguacagccugaagaagaacagcagaagccugggcgagaacgacgacggcaacaacgaggacaacgagaagcugagaaagcccaagcacaagaagcugaagcagcccgccgacggcaaccccgaccccaacgccaaccccaacguggaccccaacgccaaccccaacguggaccccaacgccaaccccaacguggaccccaacgccaaccccaacgccaaccccaacgccaaccccaacgccaaccccaacgccaaccccaacgccaaccccaacgccaaccccaacgccaaccccaacgccaaccccaacgccaaccccaacgccaaccccaacgccaaccccaacgccaaccccaacgccaaccccaacgccaaccccaacgccaaccccaacgccaaccccaacguggaccccaacgccaaccccaacgccaaccccaacgccaaccccaacgccaaccccaacgccaaccccaacgccaaccccaacgccaaccccaacgccaaccccaacgccaaccccaacgccaaccccaacgccaaccccaacgccaaccccaacgccaaccccaacgccaaccccaacgccaaccccaacgccaaccccaacgccaaccccaacgccaaccccaacaagaacaaccagggcaacggccagggccacaacaugcccaacgaccccaacagaaacguggacgagaacgccaacgccaacagcgccgugaagaacaacaacaacgaggagcccagcgacaagcacaucaaggaguaccugaacaagauccagaacagccugagcaccgaguggagccccugcagcgugaccugcggcaacggcauccaggugagaaucaagcccggcagcgccaacaagcccaaggacgagcuggacuacgccaacgacaucgagaagaagaucugcaagauggagaagugcagcagcguguucaacguggugaacagcagcaucggccugaucauggugcugagcuuccuguuccugaacugaggacuagucccuguucccagagcccacuuuuuuuucuuuuuuugaaauaaaauagccugucuuucagaucuaaaaaaaaaaaaaaaaaaaaaaaaaaaaaaaaaaaaaaaaaaaaaaaaaaaaaaaaaaaaaaaaugcaucccccccccccccccccccccccccccccccaaaggcucuuuucagagccaccagaauu

SEQ ID NO: 481 - RNA, 1488 nt, Artificial Sequence
  mRNA Design a-1 (A64-N5-C30-hSL-N5) comprising derived and/or modified sequence from Pf(3D7)__XP_001351122.1__HsIns-iso1_Pf-CSP(19-397) (opt4)
gggagagucccgcagucggcguccagcggcucugcuuguucgugugugugucguugcaggccuuauucaagcuuaccauggcccuguggaugagacugcugccccugcuggcccugcuggcccuguggggccccgaccccgccgccgcccuguuccaggaguaccagugcuacggcagcagcagcaacaccagagugcugaacgagcugaacuacgacaacgccggcaccaaccuguacaacgagcuggagaugaacuacuacggcaagcaggagaacugguacagccugaagaagaacagcagaagccugggcgagaacgacgacggcaacaacgaggacaacgagaagcugagaaagcccaagcacaagaagcugaagcagcccgccgacggcaaccccgaccccaacgccaaccccaacguggaccccaacgccaaccccaacguggaccccaacgccaaccccaacguggaccccaacgccaaccccaacgccaaccccaacgccaaccccaacgccaaccccaacgccaaccccaacgccaaccccaacgccaaccccaacgccaaccccaacgccaaccccaacgccaaccccaacgccaaccccaacgccaaccccaacgccaaccccaacgccaaccccaacgccaaccccaacgccaaccccaacgccaaccccaacguggaccccaacgccaaccccaacgccaaccccaacgccaaccccaacgccaaccccaacgccaaccccaacgccaaccccaacgccaaccccaacgccaaccccaacgccaaccccaacgccaaccccaacgccaaccccaacgccaaccccaacgccaaccccaacgccaaccccaacgccaaccccaacgccaaccccaacgccaaccccaacgccaaccccaacaagaacaaccagggcaacggccagggccacaacaugcccaacgaccccaacagaaacguggacgagaacgccaacgccaacagcgccgugaagaacaacaacaacgaggagcccagcgacaagcacaucaaggaguaccugaacaagauccagaacagccugagcaccgaguggagccccugcagcgugaccugcggcaacggcauccaggugagaaucaagcccggcagcgccaacaagcccaaggacgagcuggacuacgccaacgacaucgagaagaagaucugcaagauggagaagugcagcagcguguucaacguggugaacagcagcaucggccugaucauggugcugagcuuccuguuccugaacugaggacuagucccuguucccagagcccacuuuuuuuucuuuuuuugaaauaaaauagccugucuuucagaucuaaaaaaaaaaaaaaaaaaaaaaaaaaaaaaaaaaaaaaaaaaaaaaaaaaaaaaaaaaaaaaaaugcaucccccccccccccccccccccccccccccccaaaggcucuuuucagagccaccagaauu

SEQ ID NO: 482 - RNA, 1467 nt, Artificial Sequence
  mRNA Design a-1 (A64-N5-C30-hSL-N5) comprising derived and/or modified sequence from Pf(3D7)__XP_001351122.1__HsSPARC_Pf-CSP(19-397) (opt4)
gggagagucccgcagucggcguccagcggcucugcuuguucgugugugugucguugcaggccuuauucaagcuuaccaugagagccuggaucuucuuccugcugugccuggccggcagagcccuggcccuguuccaggaguaccagugcuacggcagcagcagcaacaccagagugcugaacgagcugaacuacgacaacgccggcaccaaccuguacaacgagcuggagaugaacuacuacggcaagcaggagaacugguacagccugaagaagaacagcagaagccugggcgagaacgacgacggcaacaacgaggacaacgagaagcugagaaagcccaagcacaagaagcugaagcagcccgccgacggcaaccccgaccccaacgccaaccccaacguggaccccaacgccaaccccaacguggaccccaacgccaaccccaacguggaccccaacgccaaccccaacgccaaccccaacgccaaccccaacgccaaccccaacgccaaccccaacgccaaccccaacgccaaccccaacgccaaccccaacgccaaccccaacgccaaccccaacgccaaccccaacgccaaccccaacgccaaccccaacgccaaccccaacgccaaccccaacgccaaccccaacgccaaccccaacguggaccccaacgccaaccccaacgccaaccccaacgccaaccccaacgccaaccccaacgccaaccccaacgccaaccccaacgccaaccccaacgccaaccccaacgccaaccccaacgccaaccccaacgccaaccccaacgccaaccccaacgccaaccccaacgccaaccccaacgccaaccccaacgccaaccccaacgccaaccccaacgccaaccccaacaagaacaaccagggcaacggccagggccacaacaugcccaacgaccccaacagaaacguggacgagaacgccaacgccaacagcgccgugaagaacaacaacaacgaggagcccagcgacaagcacaucaaggaguaccugaacaagauccagaacagccugagcaccgaguggagccccugcagcgugaccugcggcaacggcauccaggugagaaucaagcccggcagcgccaacaagcccaaggacgagcuggacuacgccaacgacaucgagaagaagaucugcaagauggagaagugcagcagcguguucaacguggugaacagcagcaucggccugaucauggugcugagcuuccuguuccugaacugaggacuagucccuguucccagagcccacuuuuuuuucuuuuuuugaaauaaaauagccugucuuucagaucuaaaaaaaaaaaaaaaaaaaaaaaaaaaaaaaaaaaaaaaaaaaaaaaaaaaaaaaaaaaaaaaaugcaucccccccccccccccccccccccccccccccaaaggcucuuuucagagccaccagaauu

SEQ ID NO: 483 - RNA, 1470 nt, Artificial Sequence
  mRNA Design a-1 (A64-N5-C30-hSL-N5) comprising derived and/or modified sequence from Pf(3D7)__XP_001351122.1__IgE_Pf-CSP(19-397) (opt4)
gggagagucccgcagucggcguccagcggcucugcuuguucgugugugugucguugcaggccuuauucaagcuuaccauggacuggaccuggauccuguuccugguggccgccgccaccagagugcacagccuguuccaggaguaccagugcuacggcagcagcagcaacaccagagugcugaacgagcugaacuacgacaacgccggcaccaaccuguacaacgagcuggagaugaacuacuacggcaagcaggagaacugguacagccugaagaagaacagcagaagccugggcgagaacgacgacggcaacaacgaggacaacgagaagcugagaaagcccaagcacaagaagcugaagcagcccgccgacggcaaccccgaccccaacgccaaccccaacguggaccccaacgccaaccccaacguggaccccaacgccaaccccaacguggaccccaacgccaaccccaacgccaaccccaacgccaaccccaacgccaaccccaacgccaaccccaacgccaaccccaacgccaaccccaacgccaaccccaacgccaaccccaacgccaaccccaacgccaaccccaacgccaaccccaacgccaaccccaacgccaaccccaacgccaaccccaacgccaaccccaacgccaaccccaacguggaccccaacgccaaccccaacgccaaccccaacgccaaccccaacgccaaccccaacgccaaccccaacgccaaccccaacgccaaccccaacgccaaccccaacgccaaccccaacgccaaccccaacgccaaccccaacgccaaccccaacgccaaccccaacgccaaccccaacgccaaccccaacgccaaccccaacgccaaccccaacgccaaccccaacaagaacaaccagggcaacggccagggccacaacaugcccaacgaccccaacagaaacguggacgagaacgccaacgccaacagcgccgugaagaacaacaacaacgaggagcccagcgacaagcacaucaaggaguaccugaacaagauccagaacagccugagcaccgaguggagccccugcagcgugaccugcggcaacggcauccaggugagaaucaagcccggcagcgccaacaagcccaaggacgagcuggacuacgccaacgacaucgagaagaagaucugcaagauggagaagugcagcagcguguucaacguggugaacagcagcaucggccugaucauggugcugagcuuccuguuccugaacugaggacuagucccuguucccagagcccacuuuuuuuucuuuuuuugaaauaaaauagccugucuuucagaucuaaaaaaaaaaaaaaaaaaaaaaaaaaaaaaaaaaaaaaaaaaaaaaaaaaaaaaaaaaaaaaaaugcaucccccccccccccccccccccccccccccccaaaggcucuuuucagagccaccagaauu

SEQ ID NO: 484 - RNA, 1635 nt, Artificial Sequence
  mRNA Design a-1 (A64-N5-C30-hSL-N5) comprising derived and/or modified sequence from Pf(3D7)__XP_001351122.1__Pf-CSP_L(G4SG4)_TM domain HA (opt4)
gggagagucccgcagucggcguccagcggcucugcuuguucgugugugugucguugcaggccuuauucaagcuuaccaugaugagaaagcuggccauccugagcgugagcagcuuccuguucguggaggcccuguuccaggaguaccagugcuacggcagcagcagcaacaccagagugcugaacgagcugaacuacgacaacgccggcaccaaccuguacaacgagcuggagaugaacuacuacggcaagcaggagaacugguacagccugaagaagaacagcagaagccugggcgagaacgacgacggcaacaacgaggacaacgagaagcugagaaagcccaagcacaagaagcugaagcagcccgccgacggcaaccccgaccccaacgccaaccccaacguggaccccaacgccaaccccaacguggaccccaacgccaaccccaacguggaccccaacgccaaccccaacgccaaccccaacgccaaccccaacgccaaccccaacgccaaccccaacgccaaccccaacgccaaccccaacgccaaccccaacgccaaccccaacgccaaccccaacgccaaccccaacgccaaccccaacgccaaccccaacgccaaccccaacgccaaccccaacgccaaccccaacgccaaccccaacguggaccccaacgccaaccccaacgccaaccccaacgccaaccccaacgccaaccccaacgccaaccccaacgccaaccccaacgccaaccccaacgccaaccccaacgccaaccccaacgccaaccccaacgccaaccccaacgccaaccccaacgccaaccccaacgccaaccccaacgccaaccccaacgccaaccccaacgccaaccccaacgccaaccccaacaagaacaaccagggcaacggccagggccacaacaugcccaacgaccccaacagaaacguggacgagaacgccaacgccaacagcgccgugaagaacaacaacaacgaggagcccagcgacaagcacaucaaggaguaccugaacaagauccagaacagccugagcaccgaguggagccccugcagcgugaccugcggcaacggcauccaggugagaaucaagcccggcagcgccaacaagcccaaggacgagcuggacuacgccaacgacaucgagaagaagaucugcaagauggagaagugcagcagcguguucaacguggugaacagcagcaucggccugaucauggugcugagcuuccuguuccugaacggcggcggcggcagcggcggcggcggcaagcuggagagcaccagaaucuaccagauccuggccaucuacagcaccguggccagcagccuggugcugguggugagccugggcgccaucagcuucuggaugugcagcaacggcagccugcagugcagaaucugcaucugaggacuagucccuguucccagagcccacuuuuuuuucuuuuuuugaaauaaaauagccugucuuucagaucuaaaaaaaaaaaaaaaaaaaaaaaaaaaaaaaaaaaaaaaaaaaaaaaaaaaaaaaaaaaaaaaaugcaucccccccccccccccccccccccccccccccaaaggcucuuuucagagccaccagaauu

SEQ ID NO: 485 - RNA, 1509 nt, Artificial Sequence
  mRNA Design a-1 (A64-N5-C30-hSL-N5) comprising derived and/or modified sequence from Pf(3D7)__XP_001351122.1__Pf-CSP(199-377)_L(PVTN)_HBsAg (opt4)
gggagagucccgcagucggcguccagcggcucugcuuguucgugugugugucguugcaggccuuauucaagcuuaccauggaccccaacgccaaccccaacgccaaccccaacgccaaccccaacgccaaccccaacgccaaccccaacgccaaccccaacgccaaccccaacgccaaccccaacgccaaccccaacgccaaccccaacgccaaccccaacgccaaccccaacgccaaccccaacgccaaccccaacgccaaccccaacgccaaccccaacgccaaccccaacgccaaccccaacaagaacaaccagggcaacggccagggccacaacaugcccaacgaccccaacagaaacguggacgagaacgccaacgccaacagcgccgugaagaacaacaacaacgaggagcccagcgacaagcacaucaaggaguaccugaacaagauccagaacagccugagcaccgaguggagccccugcagcgugaccugcggcaacggcauccaggugagaaucaagcccggcagcgccaacaagcccaaggacgagcuggacuacgccaacgacaucgagaagaagaucugcaagauggagaagugcagcagcgugcccgugaccaacauggagaacaucaccagcggcuuccugggcccccugcuggugcugcaggccggcuucuuccugcugaccagaauccugaccaucccccagagccuggacagcugguggaccagccugaacuuccugggcggcagccccgugugccugggccagaacagccagagccccaccagcaaccacagccccaccagcugcccccccaucugccccggcuacagauggaugugccugagaagauucaucaucuuccuguucauccugcugcugugccugaucuuccugcuggugcugcuggacuaccagggcaugcugcccgugugcccccugauccccggcagcaccaccaccaacaccggccccugcaagaccugcaccacccccgcccagggcaacagcauguuccccagcugcugcugcaccaagcccaccgacggcaacugcaccugcauccccauccccagcagcugggccuucgccaaguaccugugggagugggccagcgugagauucagcuggcugagccugcuggugcccuucgugcagugguucgugggccugagccccaccguguggcugagcgccaucuggaugaugugguacuggggccccagccuguacagcaucgugagccccuucaucccccugcugcccaucuucuucugccuguggguguacaucugaggacuagucccuguucccagagcccacuuuuuuuucuuuuuuugaaauaaaauagccugucuuucagaucuaaaaaaaaaaaaaaaaaaaaaaaaaaaaaaaaaaaaaaaaaaaaaaaaaaaaaaaaaaaaaaaaugcaucccccccccccccccccccccccccccccccaaaggcucuuuucagagccaccagaauu

SEQ ID NO: 486 - RNA, 1551 nt, Artificial Sequence
  mRNA Design a-1 (A64-N5-C30-hSL-N5) comprising derived and/or modified sequence from Pf(3D7)__XP_001351122.1__Pf-CSP(199-387)_L(PVTN)_HBsAg (opt4)
gggagagucccgcagucggcguccagcggcucugcuuguucgugugugugucguugcaggccuuauucaagcuuaccaugauggcccccgaccccaacgccaaccccaacgccaaccccaacgccaaccccaacgccaaccccaacgccaaccccaacgccaaccccaacgccaaccccaacgccaaccccaacgccaaccccaacgccaaccccaacgccaaccccaacgccaaccccaacgccaaccccaacgccaaccccaacgccaaccccaacgccaaccccaacgccaaccccaacgccaaccccaacaagaacaaccagggcaacggccagggccacaacaugcccaacgaccccaacagaaacguggacgagaacgccaacgccaacagcgccgugaagaacaacaacaacgaggagcccagcgacaagcacaucaaggaguaccugaacaagauccagaacagccugagcaccgaguggagccccugcagcgugaccugcggcaacggcauccaggugagaaucaagcccggcagcgccaacaagcccaaggacgagcuggacuacgccaacgacaucgagaagaagaucugcaagauggagaagugcagcagcguguucaacguggugaacagcagcaucggccugggccccgugaccaacauggagaacaucaccagcggcuuccugggcccccugcuggugcugcaggccggcuucuuccugcugaccagaauccugaccaucccccagagccuggacagcugguggaccagccugaacuuccugggcggcagccccgugugccugggccagaacagccagagccccaccagcaaccacagccccaccagcugcccccccaucugccccggcuacagauggaugugccugagaagauucaucaucuuccuguucauccugcugcugugccugaucuuccugcuggugcugcuggacuaccagggcaugcugcccgugugcccccugauccccggcagcaccaccaccaacaccggccccugcaagaccugcaccacccccgcccagggcaacagcauguuccccagcugcugcugcaccaagcccaccgacggcaacugcaccugcauccccauccccagcagcugggccuucgccaaguaccugugggagugggccagcgugagauucagcuggcugagccugcuggugcccuucgugcagugguucgugggccugagccccaccguguggcugagcgccaucuggaugaugugguacuggggccccagccuguacagcaucgugagccccuucaucccccugcugcccaucuucuucugccuguggguguacaucugaggacuagucccuguucccagagcccacuuuuuuuucuuuuuuugaaauaaaauagccugucuuucagaucuaaaaaaaaaaaaaaaaaaaaaaaaaaaaaaaaaaaaaaaaaaaaaaaaaaaaaaaaaaaaaaaaugcaucccccccccccccccccccccccccccccccaaaggcucuuuucagagccaccagaauu

SEQ ID NO: 487 - RNA, 735 nt, Artificial Sequence
  mRNA Design a-1 (A64-N5-C30-hSL-N5) comprising derived and/or modified sequence from Pf(3D7)__XP_001351122.1__HsALB_Pf-CSP(19-152) (opt4)
gggagagucccgcagucggcguccagcggcucugcuuguucgugugugugucguugcaggccuuauucaagcuuaccaugaagugggugaccuucaucagccugcuguuccuguucagcagcgccuacagccuguuccaggaguaccagugcuacggcagcagcagcaacaccagagugcugaacgagcugaacuacgacaacgccggcaccaaccuguacaacgagcuggagaugaacuacuacggcaagcaggagaacugguacagccugaagaagaacagcagaagccugggcgagaacgacgacggcaacaacgaggacaacgagaagcugagaaagcccaagcacaagaagcugaagcagcccgccgacggcaaccccgaccccaacgccaaccccaacguggaccccaacgccaaccccaacguggaccccaacgccaaccccaacguggaccccaacgccaaccccaacgccaaccccaacgccaaccccaacgccaaccccaacgccaaccccaacgccaaccccugaggacuagucccuguucccagagcccacuuuuuuuucuuuuuuugaaauaaaauagccugucuuucagaucuaaaaaaaaaaaaaaaaaaaaaaaaaaaaaaaaaaaaaaaaaaaaaaaaaaaaaaaaaaaaaaaaugcaucccccccccccccccccccccccccccccccaaaggcucuuuucagagccaccagaauu

SEQ ID NO: 488 - RNA, 855 nt, Artificial Sequence
  mRNA Design a-1 (A64-N5-C30-hSL-N5) comprising derived and/or modified sequence from Pf(3D7)__XP_001351122.1__HsALB_Pf-CSP(19-192) (opt4)
gggagagucccgcagucggcguccagcggcucugcuuguucgugugugugucguugcaggccuuauucaagcuuaccaugaagugggugaccuucaucagccugcuguuccuguucagcagcgccuacagccuguuccaggaguaccagugcuacggcagcagcagcaacaccagagugcugaacgagcugaacuacgacaacgccggcaccaaccuguacaacgagcuggagaugaacuacuacggcaagcaggagaacugguacagccugaagaagaacagcagaagccugggcgagaacgacgacggcaacaacgaggacaacgagaagcugagaaagcccaagcacaagaagcugaagcagcccgccgacggcaaccccgaccccaacgccaaccccaacguggaccccaacgccaaccccaacguggaccccaacgccaaccccaacguggaccccaacgccaaccccaacgccaaccccaacgccaaccccaacgccaaccccaacgccaaccccaacgccaaccccaacgccaaccccaacgccaaccccaacgccaaccccaacgccaaccccaacgccaaccccaacgccaaccccaacgccaaccccaacgccaaccccaacgccaaccccaacgccaaccccugaggacuagucccuguucccagagcccacuuuuuuuucuuuuuuugaaauaaaauagccugucuuucagaucuaaaaaaaaaaaaaaaaaaaaaaaaaaaaaaaaaaaaaaaaaaaaaaaaaaaaaaaaaaaaaaaaugcaucccccccccccccccccccccccccccccccaaaggcucuuuucagagccaccagaauu

SEQ ID NO: 489 - RNA, 1095 nt, Artificial Sequence
  mRNA Design a-1 (A64-N5-C30-hSL-N5) comprising derived and/or modified sequence from Pf(3D7)__XP_001351122.1__HsALB_Pf-CSP(19-272) (opt4)
gggagagucccgcagucggcguccagcggcucugcuuguucgugugugugucguugcaggccuuauucaagcuuaccaugaagugggugaccuucaucagccugcuguuccuguucagcagcgccuacagccuguuccaggaguaccagugcuacggcagcagcagcaacaccagagugcugaacgagcugaacuacgacaacgccggcaccaaccuguacaacgagcuggagaugaacuacuacggcaagcaggagaacugguacagccugaagaagaacagcagaagccugggcgagaacgacgacggcaacaacgaggacaacgagaagcugagaaagcccaagcacaagaagcugaagcagcccgccgacggcaaccccgaccccaacgccaaccccaacguggaccccaacgccaaccccaacguggaccccaacgccaaccccaacguggaccccaacgccaaccccaacgccaaccccaacgccaaccccaacgccaaccccaacgccaaccccaacgccaaccccaacgccaaccccaacgccaaccccaacgccaaccccaacgccaaccccaacgccaaccccaacgccaaccccaacgccaaccccaacgccaaccccaacgccaaccccaacgccaaccccaacgccaaccccaacguggaccccaacgccaaccccaacgccaaccccaacgccaaccccaacgccaaccccaacgccaaccccaacgccaaccccaacgccaaccccaacgccaaccccaacgccaaccccaacgccaaccccaacgccaaccccaacgccaaccccaacgccaaccccaacgccaaccccaacgccaaccccaacgccaaccccaacgccaaccccaacgccaaccccugaggacuagucccuguucccagagcccacuuuuuuuucuuuuuuugaaauaaaauagccugucuuucagaucuaaaaaaaaaaaaaaaaaaaaaaaaaaaaaaaaaaaaaaaaaaaaaaaaaaaaaaaaaaaaaaaaugcaucccccccccccccccccccccccccccccccaaaggcucuuuucagagccaccagaauu

SEQ ID NO: 490 - RNA, 1257 nt, Artificial Sequence
  mRNA Design a-1 (A64-N5-C30-hSL-N5) comprising derived and/or modified sequence from Pf(3D7)__XP_001351122.1__HsALB_Pf-CSP(19-272)_L(AAY)_Pf-CSP(310-3 27)_L(AAY)_Pf-CSP(346-375) (opt4)
gggagagucccgcagucggcguccagcggcucugcuuguucgugugugugucguugcaggccuuauucaagcuuaccaugaagugggugaccuucaucagccugcuguuccuguucagcagcgccuacagccuguuccaggaguaccagugcuacggcagcagcagcaacaccagagugcugaacgagcugaacuacgacaacgccggcaccaaccuguacaacgagcuggagaugaacuacuacggcaagcaggagaacugguacagccugaagaagaacagcagaagccugggcgagaacgacgacggcaacaacgaggacaacgagaagcugagaaagcccaagcacaagaagcugaagcagcccgccgacggcaaccccgaccccaacgccaaccccaacguggaccccaacgccaaccccaacguggaccccaacgccaaccccaacguggaccccaacgccaaccccaacgccaaccccaacgccaaccccaacgccaaccccaacgccaaccccaacgccaaccccaacgccaaccccaacgccaaccccaacgccaaccccaacgccaaccccaacgccaaccccaacgccaaccccaacgccaaccccaacgccaaccccaacgccaaccccaacgccaaccccaacgccaaccccaacguggaccccaacgccaaccccaacgccaaccccaacgccaaccccaacgccaaccccaacgccaaccccaacgccaaccccaacgccaaccccaacgccaaccccaacgccaaccccaacgccaaccccaacgccaaccccaacgccaaccccaacgccaaccccaacgccaaccccaacgccaaccccaacgccaaccccaacgccaaccccaacgccaaccccgccgccuacgagcccagcgacaagcacaucaaggaguaccugaacaagauccagaacagccuggccgccuacaucaagcccggcagcgccaacaagcccaaggacgagcuggacuacgccaacgacaucgagaagaagaucugcaagauggagaagugcagcugaggacuagucccuguucccagagcccacuuuuuuuucuuuuuuugaaauaaaauagccugucuuucagaucuaaaaaaaaaaaaaaaaaaaaaaaaaaaaaaaaaaaaaaaaaaaaaaaaaaaaaaaaaaaaaaaaugcaucccccccccccccccccccccccccccccccaaaggcucuuuucagagccaccagaauu

SEQ ID NO: 491 - RNA, 1218 nt, Artificial Sequence
  mRNA Design a-1 (A64-N5-C30-hSL-N5) comprising derived and/or modified sequence from Pf(3D7)__XP_001351122.1__HsALB_Pf-CSP(19-272)_L(AAY)_Pf-CSP(346-3 65)_L(AAY)_P2 (opt4)
gggagagucccgcagucggcguccagcggcucugcuuguucgugugugugucguugcaggccuuauucaagcuuaccaugaagugggugaccuucaucagccugcuguuccuguucagcagcgccuacagccuguuccaggaguaccagugcuacggcagcagcagcaacaccagagugcugaacgagcugaacuacgacaacgccggcaccaaccuguacaacgagcuggagaugaacuacuacggcaagcaggagaacugguacagccugaagaagaacagcagaagccugggcgagaacgacgacggcaacaacgaggacaacgagaagcugagaaagcccaagcacaagaagcugaagcagcccgccgacggcaaccccgaccccaacgccaaccccaacguggaccccaacgccaaccccaacguggaccccaacgccaaccccaacguggaccccaacgccaaccccaacgccaaccccaacgccaaccccaacgccaaccccaacgccaaccccaacgccaaccccaacgccaaccccaacgccaaccccaacgccaaccccaacgccaaccccaacgccaaccccaacgccaaccccaacgccaaccccaacgccaaccccaacgccaaccccaacgccaaccccaacgccaaccccaacguggaccccaacgccaaccccaacgccaaccccaacgccaaccccaacgccaaccccaacgccaaccccaacgccaaccccaacgccaaccccaacgccaaccccaacgccaaccccaacgccaaccccaacgccaaccccaacgccaaccccaacgccaaccccaacgccaaccccaacgccaaccccaacgccaaccccaacgccaaccccaacgccaaccccgccgccuacaucaagcccggcagcgccaacaagcccaaggacgagcuggacuacgccaacgacaucgaggccgccuaccaguacaucaaggccaacagcaaguucaucggcaucaccgagcugugaggacuagucccuguucccagagcccacuuuuuuuucuuuuuuugaaauaaaauagccugucuuucagaucuaaaaaaaaaaaaaaaaaaaaaaaaaaaaaaaaaaaaaaaaaaaaaaaaaaaaaaaaaaaaaaaaugcaucccccccccccccccccccccccccccccccaaaggcucuuuucagagccaccagaauu

SEQ ID NO: 492 - RNA, 1212 nt, Artificial Sequence
  mRNA Design a-1 (A64-N5-C30-hSL-N5) comprising derived and/or modified sequence from Pf(3D7)__XP_001351122.1__HsALB_Pf-CSP(19-272)_L(AAY)_Pf-CSP(346-3 65)_L(AAY)_PADRE (opt4)
gggagagucccgcagucggcguccagcggcucugcuuguucgugugugugucguugcaggccuuauucaagcuuaccaugaagugggugaccuucaucagccugcuguuccuguucagcagcgccuacagccuguuccaggaguaccagugcuacggcagcagcagcaacaccagagugcugaacgagcugaacuacgacaacgccggcaccaaccuguacaacgagcuggagaugaacuacuacggcaagcaggagaacugguacagccugaagaagaacagcagaagccugggcgagaacgacgacggcaacaacgaggacaacgagaagcugagaaagcccaagcacaagaagcugaagcagcccgccgacggcaaccccgaccccaacgccaaccccaacguggaccccaacgccaaccccaacguggaccccaacgccaaccccaacguggaccccaacgccaaccccaacgccaaccccaacgccaaccccaacgccaaccccaacgccaaccccaacgccaaccccaacgccaaccccaacgccaaccccaacgccaaccccaacgccaaccccaacgccaaccccaacgccaaccccaacgccaaccccaacgccaaccccaacgccaaccccaacgccaaccccaacgccaaccccaacguggaccccaacgccaaccccaacgccaaccccaacgccaaccccaacgccaaccccaacgccaaccccaacgccaaccccaacgccaaccccaacgccaaccccaacgccaaccccaacgccaaccccaacgccaaccccaacgccaaccccaacgccaaccccaacgccaaccccaacgccaaccccaacgccaaccccaacgccaaccccaacgccaaccccgccgccuacaucaagcccggcagcgccaacaagcccaaggacgagcuggacuacgccaacgacaucgaggccgccuacgccaaguucguggccgccuggacccugaaggccgccgccugaggacuagucccuguucccagagcccacuuuuuuuucuuuuuuugaaauaaaauagccugucuuucagaucuaaaaaaaaaaaaaaaaaaaaaaaaaaaaaaaaaaaaaaaaaaaaaaaaaaaaaaaaaaaaaaaaugcaucccccccccccccccccccccccccccccccaaaggcucuuuucagagccaccagaauu

SEQ ID NO: 493 - RNA, 1269 nt, Artificial Sequence
  mRNA Design a-1 (A64-N5-C30-hSL-N5) comprising derived and/or modified sequence from Pf(3D7)__XP_001351122.1__HsALB_Pf-CSP(19-272)_L(G4S)_Pf-CSP(310-3 27)_L(G4S)_Pf-CSP(346-375) (opt4)
gggagagucccgcagucggcguccagcggcucugcuuguucgugugugugucguugcaggccuuauucaagcuuaccaugaagugggugaccuucaucagccugcuguuccuguucagcagcgccuacagccuguuccaggaguaccagugcuacggcagcagcagcaacaccagagugcugaacgagcugaacuacgacaacgccggcaccaaccuguacaacgagcuggagaugaacuacuacggcaagcaggagaacugguacagccugaagaagaacagcagaagccugggcgagaacgacgacggcaacaacgaggacaacgagaagcugagaaagcccaagcacaagaagcugaagcagcccgccgacggcaaccccgaccccaacgccaaccccaacguggaccccaacgccaaccccaacguggaccccaacgccaaccccaacguggaccccaacgccaaccccaacgccaaccccaacgccaaccccaacgccaaccccaacgccaaccccaacgccaaccccaacgccaaccccaacgccaaccccaacgccaaccccaacgccaaccccaacgccaaccccaacgccaaccccaacgccaaccccaacgccaaccccaacgccaaccccaacgccaaccccaacgccaaccccaacguggaccccaacgccaaccccaacgccaaccccaacgccaaccccaacgccaaccccaacgccaaccccaacgccaaccccaacgccaaccccaacgccaaccccaacgccaaccccaacgccaaccccaacgccaaccccaacgccaaccccaacgccaaccccaacgccaaccccaacgccaaccccaacgccaaccccaacgccaaccccaacgccaaccccggcggcggcggcagcgagcccagcgacaagcacaucaaggaguaccugaacaagauccagaacagccugggcggcggcggcagcaucaagcccggcagcgccaacaagcccaaggacgagcuggacuacgccaacgacaucgagaagaagaucugcaagauggagaagugcagcugaggacuagucccuguucccagagcccacuuuuuuuucuuuuuuugaaauaaaauagccugucuuucagaucuaaaaaaaaaaaaaaaaaaaaaaaaaaaaaaaaaaaaaaaaaaaaaaaaaaaaaaaaaaaaaaaaugcaucccccccccccccccccccccccccccccccaaaggcucuuuucagagccaccagaauu

SEQ ID NO: 494 - RNA, 1254 nt, Artificial Sequence
  mRNA Design a-1 (A64-N5-C30-hSL-N5) comprising derived and/or modified sequence from Pf(3D7)__XP_001351122.1__HsALB_Pf-CSP(19-272)_L(G4S)_Pf-CSP(310-3 27)_Pf-CSP(346-375) (opt4)
gggagagucccgcagucggcguccagcggcucugcuuguucgugugugugucguugcaggccuuauucaagcuuaccaugaagugggugaccuucaucagccugcuguuccuguucagcagcgccuacagccuguuccaggaguaccagugcuacggcagcagcagcaacaccagagugcugaacgagcugaacuacgacaacgccggcaccaaccuguacaacgagcuggagaugaacuacuacggcaagcaggagaacugguacagccugaagaagaacagcagaagccugggcgagaacgacgacggcaacaacgaggacaacgagaagcugagaaagcccaagcacaagaagcugaagcagcccgccgacggcaaccccgaccccaacgccaaccccaacguggaccccaacgccaaccccaacguggaccccaacgccaaccccaacguggaccccaacgccaaccccaacgccaaccccaacgccaaccccaacgccaaccccaacgccaaccccaacgccaaccccaacgccaaccccaacgccaaccccaacgccaaccccaacgccaaccccaacgccaaccccaacgccaaccccaacgccaaccccaacgccaaccccaacgccaaccccaacgccaaccccaacgccaaccccaacguggaccccaacgccaaccccaacgccaaccccaacgccaaccccaacgccaaccccaacgccaaccccaacgccaaccccaacgccaaccccaacgccaaccccaacgccaaccccaacgccaaccccaacgccaaccccaacgccaaccccaacgccaaccccaacgccaaccccaacgccaaccccaacgccaaccccaacgccaaccccaacgccaaccccggcggcggcggcagcgagcccagcgacaagcacaucaaggaguaccugaacaagauccagaacagccugaucaagcccggcagcgccaacaagcccaaggacgagcuggacuacgccaacgacaucgagaagaagaucugcaagauggagaagugcagcugaggacuagucccuguucccagagcccacuuuuuuuucuuuuuuugaaauaaaauagccugucuuucagaucuaaaaaaaaaaaaaaaaaaaaaaaaaaaaaaaaaaaaaaaaaaaaaaaaaaaaaaaaaaaaaaaaugcaucccccccccccccccccccccccccccccccaaaggcucuuuucagagccaccagaauu

SEQ ID NO: 495 - RNA, 1254 nt, Artificial Sequence
  mRNA Design a-1 (A64-N5-C30-hSL-N5) comprising derived and/or modified sequence from Pf(3D7)__XP_001351122.1__HsALB_Pf-CSP(19-325) (opt4)
gggagagucccgcagucggcguccagcggcucugcuuguucgugugugugucguugcaggccuuauucaagcuuaccaugaagugggugaccuucaucagccugcuguuccuguucagcagcgccuacagccuguuccaggaguaccagugcuacggcagcagcagcaacaccagagugcugaacgagcugaacuacgacaacgccggcaccaaccuguacaacgagcuggagaugaacuacuacggcaagcaggagaacugguacagccugaagaagaacagcagaagccugggcgagaacgacgacggcaacaacgaggacaacgagaagcugagaaagcccaagcacaagaagcugaagcagcccgccgacggcaaccccgaccccaacgccaaccccaacguggaccccaacgccaaccccaacguggaccccaacgccaaccccaacguggaccccaacgccaaccccaacgccaaccccaacgccaaccccaacgccaaccccaacgccaaccccaacgccaaccccaacgccaaccccaacgccaaccccaacgccaaccccaacgccaaccccaacgccaaccccaacgccaaccccaacgccaaccccaacgccaaccccaacgccaaccccaacgccaaccccaacgccaaccccaacguggaccccaacgccaaccccaacgccaaccccaacgccaaccccaacgccaaccccaacgccaaccccaacgccaaccccaacgccaaccccaacgccaaccccaacgccaaccccaacgccaaccccaacgccaaccccaacgccaaccccaacgccaaccccaacgccaaccccaacgccaaccccaacgccaaccccaacgccaaccccaacgccaaccccaacaagaacaaccagggcaacggccagggccacaacaugcccaacgaccccaacagaaacguggacgagaacgccaacgccaacagcgccgugaagaacaacaacaacgaggagcccagcgacaagcacaucaaggaguaccugaacaagauccagaacugaggacuagucccuguucccagagcccacuuuuuuuucuuuuuuugaaauaaaauagccugucuuucagaucuaaaaaaaaaaaaaaaaaaaaaaaaaaaaaaaaaaaaaaaaaaaaaaaaaaaaaaaaaaaaaaaaugcaucccccccccccccccccccccccccccccccaaaggcucuuuucagagccaccagaauu

SEQ ID NO: 496 - RNA, 1431 nt, Artificial Sequence
  mRNA Design a-1 (A64-N5-C30-hSL-N5) comprising derived and/or modified sequence from Pf(3D7)__XP_001351122.1__HsALB_Pf-CSP(19-384) (opt4)
gggagagucccgcagucggcguccagcggcucugcuuguucgugugugugucguugcaggccuuauucaagcuuaccaugaagugggugaccuucaucagccugcuguuccuguucagcagcgccuacagccuguuccaggaguaccagugcuacggcagcagcagcaacaccagagugcugaacgagcugaacuacgacaacgccggcaccaaccuguacaacgagcuggagaugaacuacuacggcaagcaggagaacugguacagccugaagaagaacagcagaagccugggcgagaacgacgacggcaacaacgaggacaacgagaagcugagaaagcccaagcacaagaagcugaagcagcccgccgacggcaaccccgaccccaacgccaaccccaacguggaccccaacgccaaccccaacguggaccccaacgccaaccccaacguggaccccaacgccaaccccaacgccaaccccaacgccaaccccaacgccaaccccaacgccaaccccaacgccaaccccaacgccaaccccaacgccaaccccaacgccaaccccaacgccaaccccaacgccaaccccaacgccaaccccaacgccaaccccaacgccaaccccaacgccaaccccaacgccaaccccaacgccaaccccaacguggaccccaacgccaaccccaacgccaaccccaacgccaaccccaacgccaaccccaacgccaaccccaacgccaaccccaacgccaaccccaacgccaaccccaacgccaaccccaacgccaaccccaacgccaaccccaacgccaaccccaacgccaaccccaacgccaaccccaacgccaaccccaacgccaaccccaacgccaaccccaacgccaaccccaacaagaacaaccagggcaacggccagggccacaacaugcccaacgaccccaacagaaacguggacgagaacgccaacgccaacagcgccgugaagaacaacaacaacgaggagcccagcgacaagcacaucaaggaguaccugaacaagauccagaacagccugagcaccgaguggagccccugcagcgugaccugcggcaacggcauccaggugagaaucaagcccggcagcgccaacaagcccaaggacgagcuggacuacgccaacgacaucgagaagaagaucugcaagauggagaagugcagcagcguguucaacguggugaacagcagcugaggacuagucccuguucccagagcccacuuuuuuuucuuuuuuugaaauaaaauagccugucuuucagaucuaaaaaaaaaaaaaaaaaaaaaaaaaaaaaaaaaaaaaaaaaaaaaaaaaaaaaaaaaaaaaaaaugcaucccccccccccccccccccccccccccccccaaaggcucuuuucagagccaccagaauu

SEQ ID NO: 497 - RNA, 1569 nt, Artificial Sequence
  mRNA Design a-1 (A64-N5-C30-hSL-N5) comprising derived and/or modified sequence from Pf(3D7)__XP_001351122.1__HsALB_Pf-CSP(19-384)_TM domain HA (opt4)
gggagagucccgcagucggcguccagcggcucugcuuguucgugugugugucguugcaggccuuauucaagcuuaccaugaagugggugaccuucaucagccugcuguuccuguucagcagcgccuacagccuguuccaggaguaccagugcuacggcagcagcagcaacaccagagugcugaacgagcugaacuacgacaacgccggcaccaaccuguacaacgagcuggagaugaacuacuacggcaagcaggagaacugguacagccugaagaagaacagcagaagccugggcgagaacgacgacggcaacaacgaggacaacgagaagcugagaaagcccaagcacaagaagcugaagcagcccgccgacggcaaccccgaccccaacgccaaccccaacguggaccccaacgccaaccccaacguggaccccaacgccaaccccaacguggaccccaacgccaaccccaacgccaaccccaacgccaaccccaacgccaaccccaacgccaaccccaacgccaaccccaacgccaaccccaacgccaaccccaacgccaaccccaacgccaaccccaacgccaaccccaacgccaaccccaacgccaaccccaacgccaaccccaacgccaaccccaacgccaaccccaacgccaaccccaacguggaccccaacgccaaccccaacgccaaccccaacgccaaccccaacgccaaccccaacgccaaccccaacgccaaccccaacgccaaccccaacgccaaccccaacgccaaccccaacgccaaccccaacgccaaccccaacgccaaccccaacgccaaccccaacgccaaccccaacgccaaccccaacgccaaccccaacgccaaccccaacgccaaccccaacaagaacaaccagggcaacggccagggccacaacaugcccaacgaccccaacagaaacguggacgagaacgccaacgccaacagcgccgugaagaacaacaacaacgaggagcccagcgacaagcacaucaaggaguaccugaacaagauccagaacagccugagcaccgaguggagccccugcagcgugaccugcggcaacggcauccaggugagaaucaagcccggcagcgccaacaagcccaaggacgagcuggacuacgccaacgacaucgagaagaagaucugcaagauggagaagugcagcagcguguucaacguggugaacagcagcaagcuggagagcaccagaaucuaccagauccuggccaucuacagcaccguggccagcagccuggugcugguggugagccugggcgccaucagcuucuggaugugcagcaacggcagccugcagugcagaaucugcaucugaggacuagucccuguucccagagcccacuuuuuuuucuuuuuuugaaauaaaauagccugucuuucagaucuaaaaaaaaaaaaaaaaaaaaaaaaaaaaaaaaaaaaaaaaaaaaaaaaaaaaaaaaaaaaaaaaugcaucccccccccccccccccccccccccccccccaaaggcucuuuucagagccaccagaauu

SEQ ID NO: 498 - RNA, 1281 nt, Artificial Sequence
  mRNA Design a-1 (A64-N5-C30-hSL-N5) comprising derived and/or modified sequence from Pf(3D7)__XP_001351122.1__HsALB_Pf-CSP(82-397) (opt4)
gggagagucccgcagucggcguccagcggcucugcuuguucgugugugugucguugcaggccuuauucaagcuuaccaugaagugggugaccuucaucagccugcuguuccuguucagcagcgccuacagcgacaacgagaagcugagaaagcccaagcacaagaagcugaagcagcccgccgacggcaaccccgaccccaacgccaaccccaacguggaccccaacgccaaccccaacguggaccccaacgccaaccccaacguggaccccaacgccaaccccaacgccaaccccaacgccaaccccaacgccaaccccaacgccaaccccaacgccaaccccaacgccaaccccaacgccaaccccaacgccaaccccaacgccaaccccaacgccaaccccaacgccaaccccaacgccaaccccaacgccaaccccaacgccaaccccaacgccaaccccaacgccaaccccaacguggaccccaacgccaaccccaacgccaaccccaacgccaaccccaacgccaaccccaacgccaaccccaacgccaaccccaacgccaaccccaacgccaaccccaacgccaaccccaacgccaaccccaacgccaaccccaacgccaaccccaacgccaaccccaacgccaaccccaacgccaaccccaacgccaaccccaacgccaaccccaacgccaaccccaacaagaacaaccagggcaacggccagggccacaacaugcccaacgaccccaacagaaacguggacgagaacgccaacgccaacagcgccgugaagaacaacaacaacgaggagcccagcgacaagcacaucaaggaguaccugaacaagauccagaacagccugagcaccgaguggagccccugcagcgugaccugcggcaacggcauccaggugagaaucaagcccggcagcgccaacaagcccaaggacgagcuggacuacgccaacgacaucgagaagaagaucugcaagauggagaagugcagcagcguguucaacguggugaacagcagcaucggccugaucauggugcugagcuuccuguuccugaacugaggacuagucccuguucccagagcccacuuuuuuuucuuuuuuugaaauaaaauagccugucuuucagaucuaaaaaaaaaaaaaaaaaaaaaaaaaaaaaaaaaaaaaaaaaaaaaaaaaaaaaaaaaaaaaaaaugcaucccccccccccccccccccccccccccccccaaaggcucuuuucagagccaccagaauu

SEQ ID NO: 499 - RNA, 633 nt, Artificial Sequence
  mRNA Design a-1 (A64-N5-C30-hSL-N5) comprising derived and/or modified sequence from Pf(3D7)__XP_001351122.1__HsALB_Pf-CSP(93-192) (opt4)
gggagagucccgcagucggcguccagcggcucugcuuguucgugugugugucguugcaggccuuauucaagcuuaccaugaagugggugaccuucaucagccugcuguuccuguucagcagcgccuacagcaagcugaagcagcccgccgacggcaaccccgaccccaacgccaaccccaacguggaccccaacgccaaccccaacguggaccccaacgccaaccccaacguggaccccaacgccaaccccaacgccaaccccaacgccaaccccaacgccaaccccaacgccaaccccaacgccaaccccaacgccaaccccaacgccaaccccaacgccaaccccaacgccaaccccaacgccaaccccaacgccaaccccaacgccaaccccaacgccaaccccaacgccaaccccaacgccaaccccugaggacuagucccuguucccagagcccacuuuuuuuucuuuuuuugaaauaaaauagccugucuuucagaucuaaaaaaaaaaaaaaaaaaaaaaaaaaaaaaaaaaaaaaaaaaaaaaaaaaaaaaaaaaaaaaaaugcaucccccccccccccccccccccccccccccccaaaggcucuuuucagagccaccagaauu

SEQ ID NO: 500 - RNA, 873 nt, Artificial Sequence
  mRNA Design a-1 (A64-N5-C30-hSL-N5) comprising derived and/or modified sequence from Pf(3D7)__XP_001351122.1__HsALB_Pf-CSP(93-272) (opt4)
gggagagucccgcagucggcguccagcggcucugcuuguucgugugugugucguugcaggccuuauucaagcuuaccaugaagugggugaccuucaucagccugcuguuccuguucagcagcgccuacagcaagcugaagcagcccgccgacggcaaccccgaccccaacgccaaccccaacguggaccccaacgccaaccccaacguggaccccaacgccaaccccaacguggaccccaacgccaaccccaacgccaaccccaacgccaaccccaacgccaaccccaacgccaaccccaacgccaaccccaacgccaaccccaacgccaaccccaacgccaaccccaacgccaaccccaacgccaaccccaacgccaaccccaacgccaaccccaacgccaaccccaacgccaaccccaacgccaaccccaacgccaaccccaacguggaccccaacgccaaccccaacgccaaccccaacgccaaccccaacgccaaccccaacgccaaccccaacgccaaccccaacgccaaccccaacgccaaccccaacgccaaccccaacgccaaccccaacgccaaccccaacgccaaccccaacgccaaccccaacgccaaccccaacgccaaccccaacgccaaccccaacgccaaccccaacgccaaccccugaggacuagucccuguucccagagcccacuuuuuuuucuuuuuuugaaauaaaauagccugucuuucagaucuaaaaaaaaaaaaaaaaaaaaaaaaaaaaaaaaaaaaaaaaaaaaaaaaaaaaaaaaaaaaaaaaugcaucccccccccccccccccccccccccccccccaaaggcucuuuucagagccaccagaauu

SEQ ID NO: 501 - RNA, 1248 nt, Artificial Sequence
  mRNA Design a-1 (A64-N5-C30-hSL-N5) comprising derived and/or modified sequence from Pf(3D7)__XP_001351122.1__HsALB_Pf-CSP(93-397) (opt4)
gggagagucccgcagucggcguccagcggcucugcuuguucgugugugugucguugcaggccuuauucaagcuuaccaugaagugggugaccuucaucagccugcuguuccuguucagcagcgccuacagcaagcugaagcagcccgccgacggcaaccccgaccccaacgccaaccccaacguggaccccaacgccaaccccaacguggaccccaacgccaaccccaacguggaccccaacgccaaccccaacgccaaccccaacgccaaccccaacgccaaccccaacgccaaccccaacgccaaccccaacgccaaccccaacgccaaccccaacgccaaccccaacgccaaccccaacgccaaccccaacgccaaccccaacgccaaccccaacgccaaccccaacgccaaccccaacgccaaccccaacgccaaccccaacguggaccccaacgccaaccccaacgccaaccccaacgccaaccccaacgccaaccccaacgccaaccccaacgccaaccccaacgccaaccccaacgccaaccccaacgccaaccccaacgccaaccccaacgccaaccccaacgccaaccccaacgccaaccccaacgccaaccccaacgccaaccccaacgccaaccccaacgccaaccccaacgccaaccccaacaagaacaaccagggcaacggccagggccacaacaugcccaacgaccccaacagaaacguggacgagaacgccaacgccaacagcgccgugaagaacaacaacaacgaggagcccagcgacaagcacaucaaggaguaccugaacaagauccagaacagccugagcaccgaguggagccccugcagcgugaccugcggcaacggcauccaggugagaaucaagcccggcagcgccaacaagcccaaggacgagcuggacuacgccaacgacaucgagaagaagaucugcaagauggagaagugcagcagcguguucaacguggugaacagcagcaucggccugaucauggugcugagcuuccuguuccugaacugaggacuagucccuguucccagagcccacuuuuuuuucuuuuuuugaaauaaaauagccugucuuucagaucuaaaaaaaaaaaaaaaaaaaaaaaaaaaaaaaaaaaaaaaaaaaaaaaaaaaaaaaaaaaaaaaaugcaucccccccccccccccccccccccccccccccaaaggcucuuuucagagccaccagaauu

SEQ ID NO: 502 - RNA, 618 nt, Artificial Sequence
  mRNA Design a-1 (A64-N5-C30-hSL-N5) comprising derived and/or modified sequence from Pf(3D7)__XP_001351122.1__HsALB_Pf-CSP(98-192) (opt4)
gggagagucccgcagucggcguccagcggcucugcuuguucgugugugugucguugcaggccuuauucaagcuuaccaugaagugggugaccuucaucagccugcuguuccuguucagcagcgccuacagcgccgacggcaaccccgaccccaacgccaaccccaacguggaccccaacgccaaccccaacguggaccccaacgccaaccccaacguggaccccaacgccaaccccaacgccaaccccaacgccaaccccaacgccaaccccaacgccaaccccaacgccaaccccaacgccaaccccaacgccaaccccaacgccaaccccaacgccaaccccaacgccaaccccaacgccaaccccaacgccaaccccaacgccaaccccaacgccaaccccaacgccaaccccugaggacuagucccuguucccagagcccacuuuuuuuucuuuuuuugaaauaaaauagccugucuuucagaucuaaaaaaaaaaaaaaaaaaaaaaaaaaaaaaaaaaaaaaaaaaaaaaaaaaaaaaaaaaaaaaaaugcaucccccccccccccccccccccccccccccccaaaggcucuuuucagagccaccagaauu

SEQ ID NO: 503 - RNA, 858 nt, Artificial Sequence
  mRNA Design a-1 (A64-N5-C30-hSL-N5) comprising derived and/or modified sequence from Pf(3D7)__XP_001351122.1__HsALB_Pf-CSP(98-272) (opt4)
gggagagucccgcagucggcguccagcggcucugcuuguucgugugugugucguugcaggccuuauucaagcuuaccaugaagugggugaccuucaucagccugcuguuccuguucagcagcgccuacagcgccgacggcaaccccgaccccaacgccaaccccaacguggaccccaacgccaaccccaacguggaccccaacgccaaccccaacguggaccccaacgccaaccccaacgccaaccccaacgccaaccccaacgccaaccccaacgccaaccccaacgccaaccccaacgccaaccccaacgccaaccccaacgccaaccccaacgccaaccccaacgccaaccccaacgccaaccccaacgccaaccccaacgccaaccccaacgccaaccccaacgccaaccccaacgccaaccccaacguggaccccaacgccaaccccaacgccaaccccaacgccaaccccaacgccaaccccaacgccaaccccaacgccaaccccaacgccaaccccaacgccaaccccaacgccaaccccaacgccaaccccaacgccaaccccaacgccaaccccaacgccaaccccaacgccaaccccaacgccaaccccaacgccaaccccaacgccaaccccaacgccaaccccugaggacuagucccuguucccagagcccacuuuuuuuucuuuuuuugaaauaaaauagccugucuuucagaucuaaaaaaaaaaaaaaaaaaaaaaaaaaaaaaaaaaaaaaaaaaaaaaaaaaaaaaaaaaaaaaaaugcaucccccccccccccccccccccccccccccccaaaggcucuuuucagagccaccagaauu

SEQ ID NO: 504 - RNA, 1164 nt, Artificial Sequence
  mRNA Design a-1 (A64-N5-C30-hSL-N5) comprising derived and/or modified sequence from Pf(3D7)__XP_001351122.1__HsALB_Pf-CSP(98-374) (opt4)
gggagagucccgcagucggcguccagcggcucugcuuguucgugugugugucguugcaggccuuauucaagcuuaccaugaagugggugaccuucaucagccugcuguuccuguucagcagcgccuacagcgccgacggcaaccccgaccccaacgccaaccccaacguggaccccaacgccaaccccaacguggaccccaacgccaaccccaacguggaccccaacgccaaccccaacgccaaccccaacgccaaccccaacgccaaccccaacgccaaccccaacgccaaccccaacgccaaccccaacgccaaccccaacgccaaccccaacgccaaccccaacgccaaccccaacgccaaccccaacgccaaccccaacgccaaccccaacgccaaccccaacgccaaccccaacgccaaccccaacguggaccccaacgccaaccccaacgccaaccccaacgccaaccccaacgccaaccccaacgccaaccccaacgccaaccccaacgccaaccccaacgccaaccccaacgccaaccccaacgccaaccccaacgccaaccccaacgccaaccccaacgccaaccccaacgccaaccccaacgccaaccccaacgccaaccccaacgccaaccccaacgccaaccccaacaagaacaaccagggcaacggccagggccacaacaugcccaacgaccccaacagaaacguggacgagaacgccaacgccaacagcgccgugaagaacaacaacaacgaggagcccagcgacaagcacaucaaggaguaccugaacaagauccagaacagccugagcaccgaguggagccccugcagcgugaccugcggcaacggcauccaggugagaaucaagcccggcagcgccaacaagcccaaggacgagcuggacuacgccaacgacaucgagaagaagaucugcaagauggagaagugcugaggacuagucccuguucccagagcccacuuuuuuuucuuuuuuugaaauaaaauagccugucuuucagaucuaaaaaaaaaaaaaaaaaaaaaaaaaaaaaaaaaaaaaaaaaaaaaaaaaaaaaaaaaaaaaaaaugcaucccccccccccccccccccccccccccccccaaaggcucuuuucagagccaccagaauu

SEQ ID NO: 505 - RNA, 1233 nt, Artificial Sequence
  mRNA Design a-1 (A64-N5-C30-hSL-N5) comprising derived and/or modified sequence from Pf(3D7)__XP_001351122.1__HsALB_Pf-CSP(98-397) (opt4)
gggagagucccgcagucggcguccagcggcucugcuuguucgugugugugucguugcaggccuuauucaagcuuaccaugaagugggugaccuucaucagccugcuguuccuguucagcagcgccuacagcgccgacggcaaccccgaccccaacgccaaccccaacguggaccccaacgccaaccccaacguggaccccaacgccaaccccaacguggaccccaacgccaaccccaacgccaaccccaacgccaaccccaacgccaaccccaacgccaaccccaacgccaaccccaacgccaaccccaacgccaaccccaacgccaaccccaacgccaaccccaacgccaaccccaacgccaaccccaacgccaaccccaacgccaaccccaacgccaaccccaacgccaaccccaacgccaaccccaacguggaccccaacgccaaccccaacgccaaccccaacgccaaccccaacgccaaccccaacgccaaccccaacgccaaccccaacgccaaccccaacgccaaccccaacgccaaccccaacgccaaccccaacgccaaccccaacgccaaccccaacgccaaccccaacgccaaccccaacgccaaccccaacgccaaccccaacgccaaccccaacgccaaccccaacaagaacaaccagggcaacggccagggccacaacaugcccaacgaccccaacagaaacguggacgagaacgccaacgccaacagcgccgugaagaacaacaacaacgaggagcccagcgacaagcacaucaaggaguaccugaacaagauccagaacagccugagcaccgaguggagccccugcagcgugaccugcggcaacggcauccaggugagaaucaagcccggcagcgccaacaagcccaaggacgagcuggacuacgccaacgacaucgagaagaagaucugcaagauggagaagugcagcagcguguucaacguggugaacagcagcaucggccugaucauggugcugagcuuccuguuccugaacugaggacuagucccuguucccagagcccacuuuuuuuucuuuuuuugaaauaaaauagccugucuuucagaucuaaaaaaaaaaaaaaaaaaaaaaaaaaaaaaaaaaaaaaaaaaaaaaaaaaaaaaaaaaaaaaaaugcaucccccccccccccccccccccccccccccccaaaggcucuuuucagagccaccagaauu

SEQ ID NO: 506 - RNA, 1560 nt, Artificial Sequence
  mRNA Design a-1 (A64-N5-C30-hSL-N5) comprising derived and/or modified sequence from Pf(3D7)__XP_001351122.1__HsALB_Pf-CSP(199-377)_L(PVTN)_HBsAg (opt4)
gggagagucccgcagucggcguccagcggcucugcuuguucgugugugugucguugcaggccuuauucaagcuuaccaugaagugggugaccuucaucagccugcuguuccuguucagcagcgccuacagcgaccccaacgccaaccccaacgccaaccccaacgccaaccccaacgccaaccccaacgccaaccccaacgccaaccccaacgccaaccccaacgccaaccccaacgccaaccccaacgccaaccccaacgccaaccccaacgccaaccccaacgccaaccccaacgccaaccccaacgccaaccccaacgccaaccccaacgccaaccccaacgccaaccccaacaagaacaaccagggcaacggccagggccacaacaugcccaacgaccccaacagaaacguggacgagaacgccaacgccaacagcgccgugaagaacaacaacaacgaggagcccagcgacaagcacaucaaggaguaccugaacaagauccagaacagccugagcaccgaguggagccccugcagcgugaccugcggcaacggcauccaggugagaaucaagcccggcagcgccaacaagcccaaggacgagcuggacuacgccaacgacaucgagaagaagaucugcaagauggagaagugcagcagcgugcccgugaccaacauggagaacaucaccagcggcuuccugggcccccugcuggugcugcaggccggcuucuuccugcugaccagaauccugaccaucccccagagccuggacagcugguggaccagccugaacuuccugggcggcagccccgugugccugggccagaacagccagagccccaccagcaaccacagccccaccagcugcccccccaucugccccggcuacagauggaugugccugagaagauucaucaucuuccuguucauccugcugcugugccugaucuuccugcuggugcugcuggacuaccagggcaugcugcccgugugcccccugauccccggcagcaccaccaccaacaccggccccugcaagaccugcaccacccccgcccagggcaacagcauguuccccagcugcugcugcaccaagcccaccgacggcaacugcaccugcauccccauccccagcagcugggccuucgccaaguaccugugggagugggccagcgugagauucagcuggcugagccugcuggugcccuucgugcagugguucgugggccugagccccaccguguggcugagcgccaucuggaugaugugguacuggggccccagccuguacagcaucgugagccccuucaucccccugcugcccaucuucuucugccuguggguguacaucugaggacuagucccuguucccagagcccacuuuuuuuucuuuuuuugaaauaaaauagccugucuuucagaucuaaaaaaaaaaaaaaaaaaaaaaaaaaaaaaaaaaaaaaaaaaaaaaaaaaaaaaaaaaaaaaaaugcaucccccccccccccccccccccccccccccccaaaggcucuuuucagagccaccagaauu

SEQ ID NO: 507 - RNA, 1299 nt, Artificial Sequence
  mRNA Design a-1 (A64-N5-C30-hSL-N5) comprising derived and/or modified sequence from Pb(ANKA)__XP_022712148.1__Pb-CSP (opt4)
gggagagucccgcagucggcguccagcggcucugcuuguucgugugugugucguugcaggccuuauucaagcuuaccaugaagaagugcaccauccuggugguggccagccugcugcuggugaacagccugcugcccggcuacggccagaacaagagcauccaggcccagagaaaccugaacgagcugugcuacaacgagggcaacgacaacaagcuguaccacgugcugaacagcaagaacggcaagaucuacaacagaaacaccgugaacagacugcuggccgacgcccccgagggcaagaagaacgagaagaagaacgagaagaucgagagaaacaacaagcugaagcagcccccccccccccccaaccccaacgacccccccccccccaaccccaacgacccccccccccccaaccccaacgacccccccccccccaaccccaacgacccccccccccccaacgccaacgacccccccccccccaacgccaacgaccccgccccccccaacgccaacgaccccgccccccccaacgccaacgaccccgccccccccaacgccaacgaccccgccccccccaacgccaacgacccccccccccccaaccccaacgaccccgccccccccaacgccaacgacccccccccccccaaccccaacgaccccgcccccccccagggcaacaacaacccccagccccagcccagaccccagccccagccccagccccagccccagccccagccccagccccagccccagcccagaccccagccccagccccagcccggcggcaacaacaacaacaagaacaacaacaacgacgacagcuacauccccagcgccgagaagauccuggaguucgugaagcagaucagagacagcaucaccgaggaguggagccagugcaacgugaccugcggcagcggcaucagagugagaaagagaaagggcagcaacaagaaggccgaggaccugacccuggaggacaucgacaccgagaucugcaagauggacaagugcagcagcaucuucaacaucgugagcaacagccugggcuucgugauccugcuggugcugguguucuucaacugaggacuagucccuguucccagagcccacuuuuuuuucuuuuuuugaaauaaaauagccugucuuucagaucuaaaaaaaaaaaaaaaaaaaaaaaaaaaaaaaaaaaaaaaaaaaaaaaaaaaaaaaaaaaaaaaaugcaucccccccccccccccccccccccccccccccaaaggcucuuuucagagccaccagaauu

SEQ ID NO: 508 - RNA, 1464 nt, Artificial Sequence
  mRNA Design a-1 (A64-N5-C30-hSL-N5) comprising derived and/or modified sequence from Pb(ANKA)__XP_022712148.1__Pb-CSP_L(G4SG4)_TM domain HA (opt4)
gggagagucccgcagucggcguccagcggcucugcuuguucgugugugugucguugcaggccuuauucaagcuuaccaugaagaagugcaccauccuggugguggccagccugcugcuggugaacagccugcugcccggcuacggccagaacaagagcauccaggcccagagaaaccugaacgagcugugcuacaacgagggcaacgacaacaagcuguaccacgugcugaacagcaagaacggcaagaucuacaacagaaacaccgugaacagacugcuggccgacgcccccgagggcaagaagaacgagaagaagaacgagaagaucgagagaaacaacaagcugaagcagcccccccccccccccaaccccaacgacccccccccccccaaccccaacgacccccccccccccaaccccaacgacccccccccccccaaccccaacgacccccccccccccaacgccaacgacccccccccccccaacgccaacgaccccgccccccccaacgccaacgaccccgccccccccaacgccaacgaccccgccccccccaacgccaacgaccccgccccccccaacgccaacgacccccccccccccaaccccaacgaccccgccccccccaacgccaacgacccccccccccccaaccccaacgaccccgcccccccccagggcaacaacaacccccagccccagcccagaccccagccccagccccagccccagccccagccccagccccagccccagccccagcccagaccccagccccagccccagcccggcggcaacaacaacaacaagaacaacaacaacgacgacagcuacauccccagcgccgagaagauccuggaguucgugaagcagaucagagacagcaucaccgaggaguggagccagugcaacgugaccugcggcagcggcaucagagugagaaagagaaagggcagcaacaagaaggccgaggaccugacccuggaggacaucgacaccgagaucugcaagauggacaagugcagcagcaucuucaacaucgugagcaacagccugggcuucgugauccugcuggugcugguguucuucaacggcggcggcggcagcggcggcggcggcaagcuggagagcaccagaaucuaccagauccuggccaucuacagcaccguggccagcagccuggugcugguggugagccugggcgccaucagcuucuggaugugcagcaacggcagccugcagugcagaaucugcaucugaggacuagucccuguucccagagcccacuuuuuuuucuuuuuuugaaauaaaauagccugucuuucagaucuaaaaaaaaaaaaaaaaaaaaaaaaaaaaaaaaaaaaaaaaaaaaaaaaaaaaaaaaaaaaaaaaugcaucccccccccccccccccccccccccccccccaaaggcucuuuucagagccaccagaauu

SEQ ID NO: 509 - RNA, 1284 nt, Artificial Sequence
  mRNA Design a-1 (A64-N5-C30-hSL-N5) comprising derived and/or modified sequence from Pb(ANKA)__XP_022712148.1__HsALB_Pb-CSP(24-340) (opt4)
gggagagucccgcagucggcguccagcggcucugcuuguucgugugugugucguugcaggccuuauucaagcuuaccaugaagugggugaccuucaucagccugcuguuccuguucagcagcgccuacagccagaacaagagcauccaggcccagagaaaccugaacgagcugugcuacaacgagggcaacgacaacaagcuguaccacgugcugaacagcaagaacggcaagaucuacaacagaaacaccgugaacagacugcuggccgacgcccccgagggcaagaagaacgagaagaagaacgagaagaucgagagaaacaacaagcugaagcagcccccccccccccccaaccccaacgacccccccccccccaaccccaacgacccccccccccccaaccccaacgacccccccccccccaaccccaacgacccccccccccccaacgccaacgacccccccccccccaacgccaacgaccccgccccccccaacgccaacgaccccgccccccccaacgccaacgaccccgccccccccaacgccaacgaccccgccccccccaacgccaacgacccccccccccccaaccccaacgaccccgccccccccaacgccaacgacccccccccccccaaccccaacgaccccgcccccccccagggcaacaacaacccccagccccagcccagaccccagccccagccccagccccagccccagccccagccccagccccagccccagcccagaccccagccccagccccagcccggcggcaacaacaacaacaagaacaacaacaacgacgacagcuacauccccagcgccgagaagauccuggaguucgugaagcagaucagagacagcaucaccgaggaguggagccagugcaacgugaccugcggcagcggcaucagagugagaaagagaaagggcagcaacaagaaggccgaggaccugacccuggaggacaucgacaccgagaucugcaagauggacaagugcagcagcaucuucaacaucgugagcaacagccugggcuucgugauccugcuggugcugguguucuucaacugaggacuagucccuguucccagagcccacuuuuuuuucuuuuuuugaaauaaaauagccugucuuucagaucuaaaaaaaaaaaaaaaaaaaaaaaaaaaaaaaaaaaaaaaaaaaaaaaaaaaaaaaaaaaaaaaaugcaucccccccccccccccccccccccccccccccaaaggcucuuuucagagccaccagaauu

SEQ ID NO: 510 - RNA, 1302 nt, Artificial Sequence
  mRNA Design a-1 (A64-N5-C30-hSL-N5) comprising derived and/or modified sequence from Pb(ANKA)__XP_022712148.1__HsIns-iso1_Pb-CSP(24-340) (opt4)
gggagagucccgcagucggcguccagcggcucugcuuguucgugugugugucguugcaggccuuauucaagcuuaccauggcccuguggaugagacugcugccccugcuggcccugcuggcccuguggggccccgaccccgccgccgcccagaacaagagcauccaggcccagagaaaccugaacgagcugugcuacaacgagggcaacgacaacaagcuguaccacgugcugaacagcaagaacggcaagaucuacaacagaaacaccgugaacagacugcuggccgacgcccccgagggcaagaagaacgagaagaagaacgagaagaucgagagaaacaacaagcugaagcagcccccccccccccccaaccccaacgacccccccccccccaaccccaacgacccccccccccccaaccccaacgacccccccccccccaaccccaacgacccccccccccccaacgccaacgacccccccccccccaacgccaacgaccccgccccccccaacgccaacgaccccgccccccccaacgccaacgaccccgccccccccaacgccaacgaccccgccccccccaacgccaacgacccccccccccccaaccccaacgaccccgccccccccaacgccaacgacccccccccccccaaccccaacgaccccgcccccccccagggcaacaacaacccccagccccagcccagaccccagccccagccccagccccagccccagccccagccccagccccagccccagcccagaccccagccccagccccagcccggcggcaacaacaacaacaagaacaacaacaacgacgacagcuacauccccagcgccgagaagauccuggaguucgugaagcagaucagagacagcaucaccgaggaguggagccagugcaacgugaccugcggcagcggcaucagagugagaaagagaaagggcagcaacaagaaggccgaggaccugacccuggaggacaucgacaccgagaucugcaagauggacaagugcagcagcaucuucaacaucgugagcaacagccugggcuucgugauccugcuggugcugguguucuucaacugaggacuagucccuguucccagagcccacuuuuuuuucuuuuuuugaaauaaaauagccugucuuucagaucuaaaaaaaaaaaaaaaaaaaaaaaaaaaaaaaaaaaaaaaaaaaaaaaaaaaaaaaaaaaaaaaaugcaucccccccccccccccccccccccccccccccaaaggcucuuuucagagccaccagaauu

SEQ ID NO: 511 - RNA, 1281 nt, Artificial Sequence
  mRNA Design a-1 (A64-N5-C30-hSL-N5) comprising derived and/or modified sequence from Pb(ANKA)__XP_022712148.1__HsSPARC_Pb-CSP(24-340) (opt4)
gggagagucccgcagucggcguccagcggcucugcuuguucgugugugugucguugcaggccuuauucaagcuuaccaugagagccuggaucuucuuccugcugugccuggccggcagagcccuggcccagaacaagagcauccaggcccagagaaaccugaacgagcugugcuacaacgagggcaacgacaacaagcuguaccacgugcugaacagcaagaacggcaagaucuacaacagaaacaccgugaacagacugcuggccgacgcccccgagggcaagaagaacgagaagaagaacgagaagaucgagagaaacaacaagcugaagcagcccccccccccccccaaccccaacgacccccccccccccaaccccaacgacccccccccccccaaccccaacgacccccccccccccaaccccaacgacccccccccccccaacgccaacgacccccccccccccaacgccaacgaccccgccccccccaacgccaacgaccccgccccccccaacgccaacgaccccgccccccccaacgccaacgaccccgccccccccaacgccaacgacccccccccccccaaccccaacgaccccgccccccccaacgccaacgacccccccccccccaaccccaacgaccccgcccccccccagggcaacaacaacccccagccccagcccagaccccagccccagccccagccccagccccagccccagccccagccccagccccagcccagaccccagccccagccccagcccggcggcaacaacaacaacaagaacaacaacaacgacgacagcuacauccccagcgccgagaagauccuggaguucgugaagcagaucagagacagcaucaccgaggaguggagccagugcaacgugaccugcggcagcggcaucagagugagaaagagaaagggcagcaacaagaaggccgaggaccugacccuggaggacaucgacaccgagaucugcaagauggacaagugcagcagcaucuucaacaucgugagcaacagccugggcuucgugauccugcuggugcugguguucuucaacugaggacuagucccuguucccagagcccacuuuuuuuucuuuuuuugaaauaaaauagccugucuuucagaucuaaaaaaaaaaaaaaaaaaaaaaaaaaaaaaaaaaaaaaaaaaaaaaaaaaaaaaaaaaaaaaaaugcaucccccccccccccccccccccccccccccccaaaggcucuuuucagagccaccagaauu

SEQ ID NO: 512 - RNA, 1284 nt, Artificial Sequence
  mRNA Design a-1 (A64-N5-C30-hSL-N5) comprising derived and/or modified sequence from Pb(ANKA)__XP_022712148.1__IgE_Pb-CSP(24-340) (opt4)
gggagagucccgcagucggcguccagcggcucugcuuguucgugugugugucguugcaggccuuauucaagcuuaccauggacuggaccuggauccuguuccugguggccgccgccaccagagugcacagccagaacaagagcauccaggcccagagaaaccugaacgagcugugcuacaacgagggcaacgacaacaagcuguaccacgugcugaacagcaagaacggcaagaucuacaacagaaacaccgugaacagacugcuggccgacgcccccgagggcaagaagaacgagaagaagaacgagaagaucgagagaaacaacaagcugaagcagcccccccccccccccaaccccaacgacccccccccccccaaccccaacgacccccccccccccaaccccaacgacccccccccccccaaccccaacgacccccccccccccaacgccaacgacccccccccccccaacgccaacgaccccgccccccccaacgccaacgaccccgccccccccaacgccaacgaccccgccccccccaacgccaacgaccccgccccccccaacgccaacgacccccccccccccaaccccaacgaccccgccccccccaacgccaacgacccccccccccccaaccccaacgaccccgcccccccccagggcaacaacaacccccagccccagcccagaccccagccccagccccagccccagccccagccccagccccagccccagccccagcccagaccccagccccagccccagcccggcggcaacaacaacaacaagaacaacaacaacgacgacagcuacauccccagcgccgagaagauccuggaguucgugaagcagaucagagacagcaucaccgaggaguggagccagugcaacgugaccugcggcagcggcaucagagugagaaagagaaagggcagcaacaagaaggccgaggaccugacccuggaggacaucgacaccgagaucugcaagauggacaagugcagcagcaucuucaacaucgugagcaacagccugggcuucgugauccugcuggugcugguguucuucaacugaggacuagucccuguucccagagcccacuuuuuuuucuuuuuuugaaauaaaauagccugucuuucagaucuaaaaaaaaaaaaaaaaaaaaaaaaaaaaaaaaaaaaaaaaaaaaaaaaaaaaaaaaaaaaaaaaugcaucccccccccccccccccccccccccccccccaaaggcucuuuucagagccaccagaauu

SEQ ID NO: 513 - RNA, 1470 nt, Artificial Sequence
  mRNA Design a-1 (A64-N5-C30-hSL-N5) comprising derived and/or modified sequence from Pf(3D7)__XP_001351122.1__Pf-CSP (opt5)
gggagagucccgcagucggcguccagcggcucugcuuguucgugugugugucguugcaggccuuauucaagcuuaccaugaugagaaagcuggccauccucagcguguccucuuuccuguuugucgaggcucuuuuccaggaauaccaaugcuauggcagcuccucuaacacccggguucugaaugagcucaacuacgacaaugccgggacaaaccuguauaaugaacuugagaugaacuacuauggaaaacaggaaaauugguacagccugaagaaaaacucccgcucucucggcgagaaugaugacgggaacaaugaggauaacgaaaagcugagaaaacccaagcacaagaaacugaagcagccugcggacggaaauccggaucccaacgcuaauccuaacguggaccccaacgccaauccuaacguggaucccaaugccaacccuaaugucgacccgaacgcuaaucccaacgccaauccuaacgcuaaucccaacgccaauccuaacgcgaaucccaacgccaacccgaaugcuaacccuaaugccaaccccaaugcuaacccuaaugccaaccccaaugcgaaccccaaugccaacccuaaugcuaacccgaaugccaaccccaacgcuaauccuaacgccaaucccaacgccaauccuaacguggaucccaaugcuaacccgaaugcgaacccuaaugccaaccccaaugcuaacccuaaugccaaccccaacgccaauccuaacgcuaaucccaacgccaauccgaacgcgaauccuaacgcuaaucccaacgccaaucccaacgccaauccuaacgcuaauccgaacgccaaucccaacgcuaacccuaaugccaaccccaaugcgaacccuaaugccaaccccaauaaaaacaaucagggcaacgggcaaggacauaauaugccuaacgaccccaaucggaacguugaugagaaugcuaacgccaacagcgcugugaagaauaacaauaacgaggaaccguccgacaaacacauuaaggaguaucucaauaagauccagaacagccugucuacggaaugguccccuuguagcgugaccugcggcaauggcauucagguccgcaucaaacccgggucugccaacaagccuaaagaugagcuugacuacgcgaaugacauugaaaagaaaaucuguaagauggagaaaugcuccagcguuuuuaacguggucaauucuuccaucggacugauuauggugcucagcuuccuguuucuuaacugaggacuagucccuguucccagagcccacuuuuuuuucuuuuuuugaaauaaaauagccugucuuucagaucuaaaaaaaaaaaaaaaaaaaaaaaaaaaaaaaaaaaaaaaaaaaaaaaaaaaaaaaaaaaaaaaaugcaucccccccccccccccccccccccccccccccaaaggcucuuuucagagccaccagaauu

SEQ ID NO: 514 - RNA, 1401 nt, Artificial Sequence
  mRNA Design a-1 (A64-N5-C30-hSL-N5) comprising derived and/or modified sequence from Pf(3D7)__XP_001351122.1__Pf-CSP(1-374) (opt5)
gggagagucccgcagucggcguccagcggcucugcuuguucgugugugugucguugcaggccuuauucaagcuuaccaugaugagaaagcuggccauccucagcguguccucuuuccuguuugucgaggcucuuuuccaggaauaccaaugcuauggcagcuccucuaacacccggguucugaaugagcucaacuacgacaaugccgggacaaaccuguauaaugaacuugagaugaacuacuauggaaaacaggaaaauugguacagccugaagaaaaacucccgcucucucggcgagaaugaugacgggaacaaugaggauaacgaaaagcugagaaaacccaagcacaagaaacugaagcagccugcggacggaaauccggaucccaacgcuaauccuaacguggaccccaacgccaauccuaacguggaucccaaugccaacccuaaugucgacccgaacgcuaaucccaacgccaauccuaacgcuaaucccaacgccaauccuaacgcgaaucccaacgccaacccgaaugcuaacccuaaugccaaccccaaugcuaacccuaaugccaaccccaaugcgaaccccaaugccaacccuaaugcuaacccgaaugccaaccccaacgcuaauccuaacgccaaucccaacgccaauccuaacguggaucccaaugcuaacccgaaugcgaacccuaaugccaaccccaaugcuaacccuaaugccaaccccaacgccaauccuaacgcuaaucccaacgccaauccgaacgcgaauccuaacgcuaaucccaacgccaaucccaacgccaauccuaacgcuaauccgaacgccaaucccaacgcuaacccuaaugccaaccccaaugcgaacccuaaugccaaccccaauaaaaacaaucagggcaacgggcaaggacauaauaugccuaacgaccccaaucggaacguugaugagaaugcuaacgccaacagcgcugugaagaauaacaauaacgaggaaccguccgacaaacacauuaaggaguaucucaauaagauccagaacagccugucuacggaaugguccccuuguagcgugaccugcggcaauggcauucagguccgcaucaaacccgggucugccaacaagccuaaagaugagcuugacuacgcgaaugacauugaaaagaaaaucuguaagauggagaaaugcugaggacuagucccuguucccagagcccacuuuuuuuucuuuuuuugaaauaaaauagccugucuuucagaucuaaaaaaaaaaaaaaaaaaaaaaaaaaaaaaaaaaaaaaaaaaaaaaaaaaaaaaaaaaaaaaaaugcaucccccccccccccccccccccccccccccccaaaggcucuuuucagagccaccagaauu

SEQ ID NO: 515 - RNA, 1254 nt, Artificial Sequence
  mRNA Design a-1 (A64-N5-C30-hSL-N5) comprising derived and/or modified sequence from Pf(3D7)__XP_001351122.1__Pf-CSP(1-325) (opt5)
gggagagucccgcagucggcguccagcggcucugcuuguucgugugugugucguugcaggccuuauucaagcuuaccaugaugagaaagcuggccauccucagcguguccucuuuccuguuugucgaggcucuuuuccaggaauaccaaugcuauggcagcuccucuaacacccggguucugaaugagcucaacuacgacaaugccgggacaaaccuguauaaugaacuugagaugaacuacuauggaaaacaggaaaauugguacagccugaagaaaaacucccgcucucucggcgagaaugaugacgggaacaaugaggauaacgaaaagcugagaaaacccaagcacaagaaacugaagcagccugcggacggaaauccggaucccaacgcuaauccuaacguggaccccaacgccaauccuaacguggaucccaaugccaacccuaaugucgacccgaacgcuaaucccaacgccaauccuaacgcuaaucccaacgccaauccuaacgcgaaucccaacgccaacccgaaugcuaacccuaaugccaaccccaaugcuaacccuaaugccaaccccaaugcgaaccccaaugccaacccuaaugcuaacccgaaugccaaccccaacgcuaauccuaacgccaaucccaacgccaauccuaacguggaucccaaugcuaacccgaaugcgaacccuaaugccaaccccaaugcuaacccuaaugccaaccccaacgccaauccuaacgcuaaucccaacgccaauccgaacgcgaauccuaacgcuaaucccaacgccaaucccaacgccaauccuaacgcuaauccgaacgccaaucccaacgcuaacccuaaugccaaccccaaugcgaacccuaaugccaaccccaauaaaaacaaucagggcaacgggcaaggacauaauaugccuaacgaccccaaucggaacguugaugagaaugcuaacgccaacagcgcugugaagaauaacaauaacgaggaaccguccgacaaacacauuaaggaguaucucaauaagauccagaacugaggacuagucccuguucccagagcccacuuuuuuuucuuuuuuugaaauaaaauagccugucuuucagaucuaaaaaaaaaaaaaaaaaaaaaaaaaaaaaaaaaaaaaaaaaaaaaaaaaaaaaaaaaaaaaaaaugcaucccccccccccccccccccccccccccccccaaaggcucuuuucagagccaccagaauu

SEQ ID NO: 516 - RNA, 1470 nt, Artificial Sequence
  mRNA Design a-1 (A64-N5-C30-hSL-N5) comprising derived and/or modified sequence from Pf(3D7)__XP_001351122.1__HsALB_Pf-CSP(19-397) (opt5)
gggagagucccgcagucggcguccagcggcucugcuuguucgugugugugucguugcaggccuuauucaagcuuaccaugaagugggugaccuucaucagccugcucuuucuguucuccucugccuacagccuuuuucaggaguaucaaugcuacggcuccucuagcaacacaagaguccugaaugaacucaacuaugacaaugcugggacgaaccuguacaaugagcuugaaaugaacuauuacggaaaacaggagaauugguauucccugaagaaaaacucucggagccucggcgaaaaugaugacgggaacaaugaggauaacgagaagcugcgcaaacccaagcacaagaaacugaagcagccugccgacggaaauccggaucccaacgcgaauccuaacguugaccccaacgcuaauccuaacguggaucccaaugccaacccuaauguggacccgaacgccaaucccaacgcuaauccuaacgccaaucccaacgcuaauccuaacgccaaucccaacgcgaacccgaaugccaacccuaaugcuaaccccaaugccaacccuaaugcuaaccccaaugccaaccccaaugcgaacccuaaugccaacccgaaugcuaaccccaacgccaauccuaacgcuaaucccaacgccaauccuaacgucgaucccaaugccaacccgaaugcuaacccuaaugcgaaccccaaugccaacccuaaugcuaaccccaacgccaauccuaacgccaaucccaacgcuaauccgaacgccaauccuaacgcgaaucccaacgcuaaucccaacgccaauccuaacgccaauccgaacgcuaaucccaacgccaacccuaaugcuaaccccaaugccaacccuaaugcgaaccccaauaaaaacaaucagggcaacgggcaaggacauaauaugccuaacgaccccaauagaaacguggaugaaaaugccaacgcuaacuccgccguuaagaauaacaauaacgaggaaccgagcgacaaacacauuaaggaguaccucaauaagauccagaacucucuguccaccgaguggagcccuuguucugugacaugcggcaauggcauucagguccggaucaaacccggguccgcuaacaagccuaaagaugaacuugacuacgccaaugacauugagaagaaaaucuguaagauggaaaaaugcagcucuguguucaacguugucaauuccagcaucggacugauuauggugcucuccuuucuguuccuuaacugaggacuagucccuguucccagagcccacuuuuuuuucuuuuuuugaaauaaaauagccugucuuucagaucuaaaaaaaaaaaaaaaaaaaaaaaaaaaaaaaaaaaaaaaaaaaaaaaaaaaaaaaaaaaaaaaaugcaucccccccccccccccccccccccccccccccaaaggcucuuuucagagccaccagaauu

SEQ ID NO: 517 - RNA, 1488 nt, Artificial Sequence
  mRNA Design a-1 (A64-N5-C30-hSL-N5) comprising derived and/or modified sequence from Pf(3D7)__XP_001351122.1__HsIns-iso1_Pf-CSP(19-397) (opt5)
gggagagucccgcagucggcguccagcggcucugcuuguucgugugugugucguugcaggccuuauucaagcuuaccauggcccuguggaugagacuccugccccuucuggcucuccuggcccuuuggggcccugacccggcggcugcccuguuccaggaguaccaaugcuaugggagcuccucuaacacccgggugcucaaugaacugaacuacgauaaugccggaacaaaccuguauaaugagcucgaaaugaacuacuauggcaagcaggagaauugguacagccugaaaaagaacucccgcucucuuggggaaaaugacgauggaaacaaugaggacaacgagaaacugagaaagcccaaacacaagaagcucaaacagccugcugauggcaaucccgacccuaacgccaaucccaacgucgauccuaacgcuaauccgaacguugaccccaaugccaacccuaauguggaucccaacgcgaauccuaacgccaaucccaacgcuaauccgaacgccaauccuaacgcuaaucccaacgccaacccuaaugcgaaccccaaugccaaccccaaugcuaacccuaaugccaacccgaaugcuaaccccaaugccaacccuaaugccaaccccaaugcuaacccuaacgcgaaucccaacgccaauccgaacgcuaauccuaacguggaccccaaugccaacccuaaugccaaccccaaugcuaacccuaaugccaaccccaaugcgaacccgaacgcuaauccuaacgccaaucccaacgccaaucccaacgcuaauccuaacgccaauccgaacgcuaaucccaacgccaauccuaacgcgaaucccaacgccaauccuaacgcuaaccccaaugccaacccuaaugcuaaccccaaugccaacccgaauaagaacaaucaggggaacggacaaggccauaauaugccuaacgaucccaaucggaacgucgacgaaaaugcgaacgccaacagcgcugugaaaaauaacaauaacgaggaaccuuccgauaagcacaucaaagaguaucugaauaagauucagaacucucuuagcacggaguggucccccuguagcguuaccugcggcaaugggauccaggugcgcauuaagccgggaucugccaacaaaccuaaggacgaacuggacuacgcuaaugauaucgagaaaaagauuuguaaaauggaaaagugcuccagcgucuuuaacgugguuaauucuuccaucggccucaucauggugcugagcuuccuguuucucaacugaggacuagucccuguucccagagcccacuuuuuuuucuuuuuuugaaauaaaauagccugucuuucagaucuaaaaaaaaaaaaaaaaaaaaaaaaaaaaaaaaaaaaaaaaaaaaaaaaaaaaaaaaaaaaaaaaugcaucccccccccccccccccccccccccccccccaaaggcucuuuucagagccaccagaauu

SEQ ID NO: 518 - RNA, 1467 nt, Artificial Sequence
  mRNA Design a-1 (A64-N5-C30-hSL-N5) comprising derived and/or modified sequence from Pf(3D7)__XP_001351122.1__HsSPARC_Pf-CSP(19-397) (opt5)
gggagagucccgcagucggcguccagcggcucugcuuguucgugugugugucguugcaggccuuauucaagcuuaccaugagagccuggaucuucuuucugcucugccuggcuggccgggcccuugcgcuguuccaggaguaccaauguuaugggagcuccucuaacacccgcgugcucaaugaacugaacuacgacaaugcuggaacaaaccuuuauaaugagcuggaaaugaacuacuauggcaagcaggagaauugguacagccucaaaaagaacuccagaucucugggggaaaaugaugacggaaacaaugaggauaacgagaaacugcggaagcccaaacacaagaagcucaaacagccugccgacggcaauccggaucccaacgccaauccuaacgucgaccccaacgcuaauccuaacguugaucccaaugccaacccuaauguggacccgaacgcuaaucccaacgccaauccuaacgcgaaucccaacgccaauccuaacgcuaaucccaacgccaacccgaaugcuaacccuaaugccaaccccaaugcgaacccuaaugccaaccccaaugcuaaccccaaugccaacccuaaugcuaacccgaaugccaaccccaacgccaauccuaacgcuaaucccaacgcgaauccuaacguggaucccaaugccaacccgaaugcuaacccuaaugccaaccccaaugccaacccuaaugcuaaccccaacgccaauccuaacgcgaaucccaacgcuaauccgaacgccaauccuaacgccaaucccaacgcuaaucccaacgccaauccuaacgcuaauccgaacgccaaucccaacgcgaacccuaaugccaaccccaaugcuaacccuaaugccaaccccaauaagaacaaucaggggaacggacaaggccauaauaugccuaacgaccccaaucgcaacgucgaugaaaaugcuaacgccaacagcgcggugaaaaauaacaauaacgaggaaccguccgacaagcacauuaaagaguaucugaauaagauccagaacucucuuagcacggagugguccccuugcagcguuaccuguggcaaugggauucaggugagaaucaagcccggaucugccaacaaaccuaaggaugaacuggacuacgcuaaugacauugagaaaaagaucugcaaaauggaaaaguguuccagcgucuuuaacgugguuaauucuuccaucggccucauuauggugcugagcuuccuuuuucugaacugaggacuagucccuguucccagagcccacuuuuuuuucuuuuuuugaaauaaaauagccugucuuucagaucuaaaaaaaaaaaaaaaaaaaaaaaaaaaaaaaaaaaaaaaaaaaaaaaaaaaaaaaaaaaaaaaaugcaucccccccccccccccccccccccccccccccaaaggcucuuuucagagccaccagaauu

SEQ ID NO: 519 - RNA, 1470 nt, Artificial Sequence
  mRNA Design a-1 (A64-N5-C30-hSL-N5) comprising derived and/or modified sequence from Pf(3D7)__XP_001351122.1__IgE_Pf-CSP(19-397) (opt5)
gggagagucccgcagucggcguccagcggcucugcuuguucgugugugugucguugcaggccuuauucaagcuuaccauggacuggaccuggauccuguuccucguggccgcugccacaagaguccacagccuguuucaggaguaccaaugcuauggcuccucuagcaacacgcggguucuuaaugaacugaacuacgauaaugcggggaccaaccucuauaaugagcuggaaaugaacuacuauggaaagcaggagaauugguacucccuuaaaaagaacucucgcagccugggcgaaaaugacgaugggaacaaugaggacaacgagaaacucagaaagcccaaacauaagaagcugaaacagccugcugauggaaauccggaccccaacgccaauccuaacguggaucccaacgccaauccuaacguggaccccaaugcuaacccuaaugucgauccgaacgccaaucccaacgcuaauccuaacgccaaucccaacgcgaauccuaacgccaaucccaacgcuaacccgaaugccaacccuaaugcuaaccccaaugccaacccuaaugcgaaccccaaugccaaccccaaugcuaacccuaaugccaacccgaaugcuaaccccaacgccaauccuaacgccaaucccaacgcuaauccuaacguggaccccaaugcgaacccgaaugccaacccuaaugcuaaccccaaugccaacccuaaugccaaccccaacgcuaauccuaacgccaaucccaacgcgaauccgaacgcuaauccuaacgccaaucccaacgccaaucccaacgcuaauccuaacgccaauccgaacgcuaaucccaacgccaacccuaaugcgaaccccaaugccaacccuaaugcuaaccccaauaagaacaaucagggcaacgggcaaggacacaauaugccuaacgaucccaaucggaacguugacgaaaaugccaacgcuaacuccgccgugaaaaauaacaauaacgaggaaccgucugauaagcauauuaaagaguaucugaauaagauccagaacagccucuccacagaguggagcccuuguucugugaccugcggcaauggcauucagguccgcaucaagcccggguccgcgaacaaaccuaaggacgaacuggacuacgccaaugauauugagaaaaagaucuguaaaauggaaaagugcagcucuguuuucaacguggucaauuccagcaucggacuuauuauggugcugucuuuucucuuccugaacugaggacuagucccuguucccagagcccacuuuuuuuucuuuuuuugaaauaaaauagccugucuuucagaucuaaaaaaaaaaaaaaaaaaaaaaaaaaaaaaaaaaaaaaaaaaaaaaaaaaaaaaaaaaaaaaaaugcaucccccccccccccccccccccccccccccccaaaggcucuuuucagagccaccagaauu

SEQ ID NO: 520 - RNA, 1635 nt, Artificial Sequence
  mRNA Design a-1 (A64-N5-C30-hSL-N5) comprising derived and/or modified sequence from Pf(3D7)__XP_001351122.1__Pf-CSP_L(G4SG4)_TM domain HA (opt5)
gggagagucccgcagucggcguccagcggcucugcuuguucgugugugugucguugcaggccuuauucaagcuuaccaugaugagaaagcuggccauccucagcguguccucuuuccuguuugucgaggcucuuuuccaggaauaccaaugcuauggcagcuccucuaacacccggguucugaaugagcucaacuacgacaaugccgggacaaaccuguauaaugaacuugagaugaacuacuauggaaaacaggaaaauugguacagccugaagaaaaacucccgcucucucggcgagaaugaugacgggaacaaugaggauaacgaaaagcugagaaaacccaagcacaagaaacugaagcagccugcggacggaaauccggaucccaacgcuaauccuaacguggaccccaacgccaauccuaacguggaucccaaugccaacccuaaugucgacccgaacgcuaaucccaacgccaauccuaacgcuaaucccaacgccaauccuaacgcgaaucccaacgccaacccgaaugcuaacccuaaugccaaccccaaugcuaacccuaaugccaaccccaaugcgaaccccaaugccaacccuaaugcuaacccgaaugccaaccccaacgcuaauccuaacgccaaucccaacgccaauccuaacguggaucccaaugcuaacccgaaugcgaacccuaaugccaaccccaaugcuaacccuaaugccaaccccaacgccaauccuaacgcuaaucccaacgccaauccgaacgcgaauccuaacgcuaaucccaacgccaaucccaacgccaauccuaacgcuaauccgaacgccaaucccaacgcuaacccuaaugccaaccccaaugcgaacccuaaugccaaccccaauaaaaacaaucagggcaacgggcaaggacauaauaugccuaacgaccccaaucggaacguugaugagaaugcuaacgccaacagcgcugugaagaauaacaauaacgaggaaccguccgacaaacacauuaaggaguaucucaauaagauccagaacagccugucuacggaaugguccccuuguagcgugaccugcggcaauggcauucagguccgcaucaaacccgggucugccaacaagccuaaagaugagcuugacuacgcgaaugacauugaaaagaaaaucuguaagauggagaaaugcuccagcguuuuuaacguggucaauucuuccaucggacugauuauggugcucagcuuccuguuucuuaacggcgggggaggcuccgggggaggcggcaagcuggaaucuacaagaaucuaccagauucucgccaucuauagcaccguggcuuccagccugguccugguugugucucucggggccauuuccuucuggauguguagcaauggaucucugcaaugccggaucuguauuugaggacuagucccuguucccagagcccacuuuuuuuucuuuuuuugaaauaaaauagccugucuuucagaucuaaaaaaaaaaaaaaaaaaaaaaaaaaaaaaaaaaaaaaaaaaaaaaaaaaaaaaaaaaaaaaaaugcaucccccccccccccccccccccccccccccccaaaggcucuuuucagagccaccagaauu

SEQ ID NO: 521 - RNA, 1509 nt, Artificial Sequence
  mRNA Design a-1 (A64-N5-C30-hSL-N5) comprising derived and/or modified sequence from Pf(3D7)__XP_001351122.1__Pf-CSP(199-377)_L(PVTN)_HBsAg (opt5)
gggagagucccgcagucggcguccagcggcucugcuuguucgugugugugucguugcaggccuuauucaagcuuaccauggaccccaacgccaauccuaacgcuaauccgaacgccaaucccaacgcgaauccuaacgcuaaucccaacgccaauccuaacgccaaucccaacgcuaauccuaacgccaacccgaaugcuaaccccaaugccaacccuaaugcgaaccccaaugccaacccuaaugcuaaccccaaugccaacccgaaugcuaacccuaaugccaaccccaacgcgaauccuaacaagaauaaccagggcaaugggcaaggacacaacaugcccaaugaucccaacagaaauguggacgagaacgccaaugcuaacagcgccgucaaaaauaacaauaacgaggaaccuuccgauaagcauaucaaagaauaccugaacaagauucaaaauucucucagcaccgagugguccccgugcucuguuacauguggcaacgggauccaggugcggauuaaacccggaagcgcuaauaagccuaaggacgaacuggauuaugccaacgacaucgagaaaaagauuugcaaaauggagaaguguuccucugugcccgucacgaauauggaaaacaucaccagcggcuuccuugggccucugcucgugcugcaggccggauuuuuccuucugacacgcauccucaccauuccccagucccuggauagcugguggacaucucugaauuuucucggcggcuccccgguuugccuggggcagaacagccagucuccuaccuccaaucacagccccacaucuuguccucccaucugcccuggauacagauggaugugucuucggcgcuucauuaucuuucuguucauucuccugcuuugccugaucuuucuccuggugcugcucgacuaucagggcaugcugcccgucuguccgcuuauuccuggguccaccacgaccaacacaggacccugcaaaaccuguacaacccccgcucaaggcaauagcauguucccuuccugcugcuguacgaagccgacagaugggaacugcaccuguauccccaucccuucuagcugggcguuugccaaguaccugugggagugggcuuccgugagauucagcuggcucucucugcuuguucccuuugugcagugguucgucggacuguccccuacaguguggcucagcgccauuuggaugaugugguauuggggccccucucuguacagcaucguguccccuuuuauuccccugcucccgaucuucuucugccugugggucuauauuugaggacuagucccuguucccagagcccacuuuuuuuucuuuuuuugaaauaaaauagccugucuuucagaucuaaaaaaaaaaaaaaaaaaaaaaaaaaaaaaaaaaaaaaaaaaaaaaaaaaaaaaaaaaaaaaaaugcaucccccccccccccccccccccccccccccccaaaggcucuuuucagagccaccagaauu

SEQ ID NO: 522 - RNA, 1551 nt, Artificial Sequence
  mRNA Design a-1 (A64-N5-C30-hSL-N5) comprising derived and/or modified sequence from Pf(3D7)__XP_001351122.1__Pf-CSP(199-387)_L(PVTN)_HBsAg (opt5)
gggagagucccgcagucggcguccagcggcucugcuuguucgugugugugucguugcaggccuuauucaagcuuaccaugauggcccccgacccuaacgcuaauccgaacgccaaucccaacgcgaauccuaacgcuaaucccaacgccaauccuaacgccaaucccaacgcuaauccuaacgccaauccgaacgcuaaccccaaugccaacccuaaugcgaaccccaaugccaacccuaaugcuaaccccaaugccaacccgaaugcuaacccuaaugccaaccccaaugcgaacccuaacgccaaucccaacaagaauaaccagggcaaugggcaaggacacaacaugcccaaugauccuaacagaaauguggacgagaacgcuaaugccaacagcgcugucaaaaauaacaauaacgaggaaccguccgauaagcauaucaaagaauaccugaacaagauucaaaauucucucagcaccgaguggucccccugcucuguuacauguggcaacgggauccaggugcggauuaaaccuggaagcgccaauaagcccaaggacgaacuggauuaugccaacgacaucgagaaaaagauuugcaaaauggagaaguguuccucuguguucaaugucgugaacagcuccaucggccuugggccuguuacgaauauggaaaacaucaccagcggauuucugggcccccuccuggugcuucaggcuggcuucuuucugcucacacgcauucugaccaucccgcagucucuggauuccugguggacaagccucaauuuccuugggggaucuccugucugccugggccagaacucccagagccccaccucuaaucacuccccuacaagcugucccccuauuugccccggguacagauggaugugucugcggcgcuuuaucauuuuccucuuuauccugcuucugugccucauuuuccugcuggugcuccuggacuaucagggaaugcuuccgguuuguccucugauccccggcuccaccacgaccaacacagggcccugcaaaaccuguacaaccccugcgcaaggaaauucuauguuuccgagcugcugcuguacgaagcccacagauggcaacugcaccuguaucccuauucccuccagcugggccuucgcuaaguaccucugggagugggccucugugagauuuuccuggcugagccuucuggucccuuucgugcagugguuugugggccucucucccacagucuggcugagcgccaucuggaugaugugguauugggggccuucccuguacucuauuguuagccccuucaucccgcuccugccuauuuucuuuugccuuuggguguauaucugaggacuagucccuguucccagagcccacuuuuuuuucuuuuuuugaaauaaaauagccugucuuucagaucuaaaaaaaaaaaaaaaaaaaaaaaaaaaaaaaaaaaaaaaaaaaaaaaaaaaaaaaaaaaaaaaaugcaucccccccccccccccccccccccccccccccaaaggcucuuuucagagccaccagaauu

SEQ ID NO: 523 - RNA, 735 nt, Artificial Sequence
  mRNA Design a-1 (A64-N5-C30-hSL-N5) comprising derived and/or modified sequence from Pf(3D7)__XP_001351122.1__HsALB_Pf-CSP(19-152) (opt5)
gggagagucccgcagucggcguccagcggcucugcuuguucgugugugugucguugcaggccuuauucaagcuuaccaugaagugggugaccuucaucagccugcucuuucuguucuccucugccuacagccuuuuucaggaguaucaaugcuacggcuccucuagcaacacaagaguccugaaugaacucaacuaugacaaugcugggacgaaccuguacaaugagcuugaaaugaacuauuacggaaaacaggagaauugguauucccugaagaaaaacucucggagccucggcgaaaaugaugacgggaacaaugaggauaacgagaagcugcgcaaacccaagcacaagaaacugaagcagccugccgacggaaauccggaucccaacgcgaauccuaacguugaccccaacgcuaauccuaacguggaucccaaugccaacccuaauguggacccgaacgccaaucccaacgcuaauccuaacgccaaucccaacgcuaauccuaacgccaaucccaacgcgaacccgugaggacuagucccuguucccagagcccacuuuuuuuucuuuuuuugaaauaaaauagccugucuuucagaucuaaaaaaaaaaaaaaaaaaaaaaaaaaaaaaaaaaaaaaaaaaaaaaaaaaaaaaaaaaaaaaaaugcaucccccccccccccccccccccccccccccccaaaggcucuuuucagagccaccagaauu

SEQ ID NO: 524 - RNA, 855 nt, Artificial Sequence
  mRNA Design a-1 (A64-N5-C30-hSL-N5) comprising derived and/or modified sequence from Pf(3D7)__XP_001351122.1__HsALB_Pf-CSP(19-192) (opt5)
gggagagucccgcagucggcguccagcggcucugcuuguucgugugugugucguugcaggccuuauucaagcuuaccaugaagugggugaccuucaucagccugcucuuucuguucuccucugccuacagccuuuuucaggaguaucaaugcuacggcuccucuagcaacacaagaguccugaaugaacucaacuaugacaaugcugggacgaaccuguacaaugagcuugaaaugaacuauuacggaaaacaggagaauugguauucccugaagaaaaacucucggagccucggcgaaaaugaugacgggaacaaugaggauaacgagaagcugcgcaaacccaagcacaagaaacugaagcagccugccgacggaaauccggaucccaacgcgaauccuaacguugaccccaacgcuaauccuaacguggaucccaaugccaacccuaauguggacccgaacgccaaucccaacgcuaauccuaacgccaaucccaacgcuaauccuaacgccaaucccaacgcgaacccgaaugccaacccuaaugcuaaccccaaugccaacccuaaugcuaaccccaaugccaaccccaaugcgaacccuaaugccaacccgaaugcuaaccccaacgccaauccuaacgcuaaucccugaggacuagucccuguucccagagcccacuuuuuuuucuuuuuuugaaauaaaauagccugucuuucagaucuaaaaaaaaaaaaaaaaaaaaaaaaaaaaaaaaaaaaaaaaaaaaaaaaaaaaaaaaaaaaaaaaugcaucccccccccccccccccccccccccccccccaaaggcucuuuucagagccaccagaauu

SEQ ID NO: 525 - RNA, 1095 nt, Artificial Sequence
  mRNA Design a-1 (A64-N5-C30-hSL-N5) comprising derived and/or modified sequence from Pf(3D7)__XP_001351122.1__HsALB_Pf-CSP(19-272) (opt5)
gggagagucccgcagucggcguccagcggcucugcuuguucgugugugugucguugcaggccuuauucaagcuuaccaugaagugggugaccuucaucagccugcucuuucuguucuccucugccuacagccuuuuucaggaguaucaaugcuacggcuccucuagcaacacaagaguccugaaugaacucaacuaugacaaugcugggacgaaccuguacaaugagcuugaaaugaacuauuacggaaaacaggagaauugguauucccugaagaaaaacucucggagccucggcgaaaaugaugacgggaacaaugaggauaacgagaagcugcgcaaacccaagcacaagaaacugaagcagccugccgacggaaauccggaucccaacgcgaauccuaacguugaccccaacgcuaauccuaacguggaucccaaugccaacccuaauguggacccgaacgccaaucccaacgcuaauccuaacgccaaucccaacgcuaauccuaacgccaaucccaacgcgaacccgaaugccaacccuaaugcuaaccccaaugccaacccuaaugcuaaccccaaugccaaccccaaugcgaacccuaaugccaacccgaaugcuaaccccaacgccaauccuaacgcuaaucccaacgccaauccuaacgucgaucccaaugccaacccgaaugcuaacccuaaugcgaaccccaaugccaacccuaaugcuaaccccaacgccaauccuaacgccaaucccaacgcuaauccgaacgccaauccuaacgcgaaucccaacgcuaaucccaacgccaauccuaacgccaauccgaacgcuaaucccaacgccaacccuaaugcuaaccccaaugccaacccuaaugcgaaccccugaggacuagucccuguucccagagcccacuuuuuuuucuuuuuuugaaauaaaauagccugucuuucagaucuaaaaaaaaaaaaaaaaaaaaaaaaaaaaaaaaaaaaaaaaaaaaaaaaaaaaaaaaaaaaaaaaugcaucccccccccccccccccccccccccccccccaaaggcucuuuucagagccaccagaauu

SEQ ID NO: 526 - RNA, 1257 nt, Artificial Sequence
  mRNA Design a-1 (A64-N5-C30-hSL-N5) comprising derived and/or modified sequence from Pf(3D7)__XP_001351122.1__HsALB_Pf-CSP(19-272)_L(AAY)_Pf-CSP(310-3 27)_L(AAY)_Pf-CSP(346-375) (opt5)
gggagagucccgcagucggcguccagcggcucugcuuguucgugugugugucguugcaggccuuauucaagcuuaccaugaagugggugaccuucaucagccugcucuuucuguucuccucugccuacagccuuuuucaggaguaucaaugcuacggcuccucuagcaacacaagaguccugaaugaacucaacuaugacaaugcugggacgaaccuguacaaugagcuugaaaugaacuauuacggaaaacaggagaauugguauucccugaagaaaaacucucggagccucggcgaaaaugaugacgggaacaaugaggauaacgagaagcugcgcaaacccaagcacaagaaacugaagcagccugccgacggaaauccggaucccaacgcgaauccuaacguugaccccaacgcuaauccuaacguggaucccaaugccaacccuaauguggacccgaacgccaaucccaacgcuaauccuaacgccaaucccaacgcuaauccuaacgccaaucccaacgcgaacccgaaugccaacccuaaugcuaaccccaaugccaacccuaaugcuaaccccaaugccaaccccaaugcgaacccuaaugccaacccgaaugcuaaccccaacgccaauccuaacgcuaaucccaacgccaauccuaacgucgaucccaaugccaacccgaaugcuaacccuaaugcgaaccccaaugccaacccuaaugcuaaccccaacgccaauccuaacgccaaucccaacgcuaauccgaacgccaauccuaacgcgaaucccaacgcuaaucccaacgccaauccuaacgccaauccgaacgcuaaucccaacgccaacccuaaugcuaaccccaaugccaacccuaaugcgaaccccgccgcuuacgaaccuuccgacaaacauauuaaggaguaccucaauaaaauccagaacagccuggccgcuuauauuaagcccggcucugccaauaagccgaaagaugaacuugacuacgcgaacgauaucgagaagaaaauuuguaagauggagaaaugcuccugaggacuagucccuguucccagagcccacuuuuuuuucuuuuuuugaaauaaaauagccugucuuucagaucuaaaaaaaaaaaaaaaaaaaaaaaaaaaaaaaaaaaaaaaaaaaaaaaaaaaaaaaaaaaaaaaaugcaucccccccccccccccccccccccccccccccaaaggcucuuuucagagccaccagaauu

SEQ ID NO: 527 - RNA, 1218 nt, Artificial Sequence
  mRNA Design a-1 (A64-N5-C30-hSL-N5) comprising derived and/or modified sequence from Pf(3D7)__XP_001351122.1__HsALB_Pf-CSP(19-272)_L(AAY)_Pf-CSP(346-3 65)_L(AAY)_P2 (opt5)
gggagagucccgcagucggcguccagcggcucugcuuguucgugugugugucguugcaggccuuauucaagcuuaccaugaagugggugaccuucaucagccugcucuuucuguucuccucugccuacagccuuuuucaggaguaucaaugcuacggcuccucuagcaacacaagaguccugaaugaacucaacuaugacaaugcugggacgaaccuguacaaugagcuugaaaugaacuauuacggaaaacaggagaauugguauucccugaagaaaaacucucggagccucggcgaaaaugaugacgggaacaaugaggauaacgagaagcugcgcaaacccaagcacaagaaacugaagcagccugccgacggaaauccggaucccaacgcgaauccuaacguugaccccaacgcuaauccuaacguggaucccaaugccaacccuaauguggacccgaacgccaaucccaacgcuaauccuaacgccaaucccaacgcuaauccuaacgccaaucccaacgcgaacccgaaugccaacccuaaugcuaaccccaaugccaacccuaaugcuaaccccaaugccaaccccaaugcgaacccuaaugccaacccgaaugcuaaccccaacgccaauccuaacgcuaaucccaacgccaauccuaacgucgaucccaaugccaacccgaaugcuaacccuaaugcgaaccccaaugccaacccuaaugcuaaccccaacgccaauccuaacgccaaucccaacgcuaauccgaacgccaauccuaacgcgaaucccaacgcuaaucccaacgccaauccuaacgccaauccgaacgcuaaucccaacgccaacccuaaugcuaaccccaaugccaacccuaaugcgaaccccgccgcuuacauuaaaccuggcuccgccaauaagcccaaagacgaacucgauuacgcuaacgacaucgaggccgcguaucaguacauuaaggccaauagcaaguucaucgggauuaccgaacugugaggacuagucccuguucccagagcccacuuuuuuuucuuuuuuugaaauaaaauagccugucuuucagaucuaaaaaaaaaaaaaaaaaaaaaaaaaaaaaaaaaaaaaaaaaaaaaaaaaaaaaaaaaaaaaaaaugcaucccccccccccccccccccccccccccccccaaaggcucuuuucagagccaccagaauu

SEQ ID NO: 528 - RNA, 1212 nt, Artificial Sequence
  mRNA Design a-1 (A64-N5-C30-hSL-N5) comprising derived and/or modified sequence from Pf(3D7)__XP_001351122.1__HsALB_Pf-CSP(19-272)_L(AAY)_Pf-CSP(346-3 65)_L(AAY)_PADRE (opt5)
gggagagucccgcagucggcguccagcggcucugcuuguucgugugugugucguugcaggccuuauucaagcuuaccaugaagugggugaccuucaucagccugcucuuucuguucuccucugccuacagccuuuuucaggaguaucaaugcuacggcuccucuagcaacacaagaguccugaaugaacucaacuaugacaaugcugggacgaaccuguacaaugagcuugaaaugaacuauuacggaaaacaggagaauugguauucccugaagaaaaacucucggagccucggcgaaaaugaugacgggaacaaugaggauaacgagaagcugcgcaaacccaagcacaagaaacugaagcagccugccgacggaaauccggaucccaacgcgaauccuaacguugaccccaacgcuaauccuaacguggaucccaaugccaacccuaauguggacccgaacgccaaucccaacgcuaauccuaacgccaaucccaacgcuaauccuaacgccaaucccaacgcgaacccgaaugccaacccuaaugcuaaccccaaugccaacccuaaugcuaaccccaaugccaaccccaaugcgaacccuaaugccaacccgaaugcuaaccccaacgccaauccuaacgcuaaucccaacgccaauccuaacgucgaucccaaugccaacccgaaugcuaacccuaaugcgaaccccaaugccaacccuaaugcuaaccccaacgccaauccuaacgccaaucccaacgcuaauccgaacgccaauccuaacgcgaaucccaacgcuaaucccaacgccaauccuaacgccaauccgaacgcuaaucccaacgccaacccuaaugcuaaccccaaugccaacccuaaugcgaaccccgccgcuuacauuaaaccuggcuccgccaauaagcccaaagacgaacucgauuacgcuaacgacaucgaggccgcguaugccaaguucguggcugccuggacccugaaggcugccgccugaggacuagucccuguucccagagcccacuuuuuuuucuuuuuuugaaauaaaauagccugucuuucagaucuaaaaaaaaaaaaaaaaaaaaaaaaaaaaaaaaaaaaaaaaaaaaaaaaaaaaaaaaaaaaaaaaugcaucccccccccccccccccccccccccccccccaaaggcucuuuucagagccaccagaauu

SEQ ID NO: 529 - RNA, 1269 nt, Artificial Sequence
  mRNA Design a-1 (A64-N5-C30-hSL-N5) comprising derived and/or modified sequence from Pf(3D7)__XP_001351122.1__HsALB_Pf-CSP(19-272)_L(G4S)_Pf-CSP(310-3 27)_L(G4S)_Pf-CSP(346-375) (opt5)
gggagagucccgcagucggcguccagcggcucugcuuguucgugugugugucguugcaggccuuauucaagcuuaccaugaagugggugaccuucaucagccugcucuuucuguucuccucugccuacagccuuuuucaggaguaucaaugcuacggcuccucuagcaacacaagaguccugaaugaacucaacuaugacaaugcugggacgaaccuguacaaugagcuugaaaugaacuauuacggaaaacaggagaauugguauucccugaagaaaaacucucggagccucggcgaaaaugaugacgggaacaaugaggauaacgagaagcugcgcaaacccaagcacaagaaacugaagcagccugccgacggaaauccggaucccaacgcgaauccuaacguugaccccaacgcuaauccuaacguggaucccaaugccaacccuaauguggacccgaacgccaaucccaacgcuaauccuaacgccaaucccaacgcuaauccuaacgccaaucccaacgcgaacccgaaugccaacccuaaugcuaaccccaaugccaacccuaaugcuaaccccaaugccaaccccaaugcgaacccuaaugccaacccgaaugcuaaccccaacgccaauccuaacgcuaaucccaacgccaauccuaacgucgaucccaaugccaacccgaaugcuaacccuaaugcgaaccccaaugccaacccuaaugcuaaccccaacgccaauccuaacgccaaucccaacgcuaauccgaacgccaauccuaacgcgaaucccaacgcuaaucccaacgccaauccuaacgccaauccgaacgcuaaucccaacgccaacccuaaugcuaaccccaaugccaacccuaaugcgaaccccggcgggggaggcuccgaaccuagcgacaaacauauuaaggaguaccucaauaaaauccagaacucucugggcgggggaggcuccauuaagcccgggagcgccaauaagccgaaagaugaacuugacuacgcuaacgauaucgagaagaaaauuuguaagauggagaaaugcucuugaggacuagucccuguucccagagcccacuuuuuuuucuuuuuuugaaauaaaauagccugucuuucagaucuaaaaaaaaaaaaaaaaaaaaaaaaaaaaaaaaaaaaaaaaaaaaaaaaaaaaaaaaaaaaaaaaugcaucccccccccccccccccccccccccccccccaaaggcucuuuucagagccaccagaauu

SEQ ID NO: 530 - RNA, 1254 nt, Artificial Sequence
  mRNA Design a-1 (A64-N5-C30-hSL-N5) comprising derived and/or modified sequence from Pf(3D7)__XP_001351122.1__HsALB_Pf-CSP(19-272)_L(G4S)_Pf-CSP(310-3 27)_Pf-CSP(346-375) (opt5)
gggagagucccgcagucggcguccagcggcucugcuuguucgugugugugucguugcaggccuuauucaagcuuaccaugaagugggugaccuucaucagccugcucuuucuguucuccucugccuacagccuuuuucaggaguaucaaugcuacggcuccucuagcaacacaagaguccugaaugaacucaacuaugacaaugcugggacgaaccuguacaaugagcuugaaaugaacuauuacggaaaacaggagaauugguauucccugaagaaaaacucucggagccucggcgaaaaugaugacgggaacaaugaggauaacgagaagcugcgcaaacccaagcacaagaaacugaagcagccugccgacggaaauccggaucccaacgcgaauccuaacguugaccccaacgcuaauccuaacguggaucccaaugccaacccuaauguggacccgaacgccaaucccaacgcuaauccuaacgccaaucccaacgcuaauccuaacgccaaucccaacgcgaacccgaaugccaacccuaaugcuaaccccaaugccaacccuaaugcuaaccccaaugccaaccccaaugcgaacccuaaugccaacccgaaugcuaaccccaacgccaauccuaacgcuaaucccaacgccaauccuaacgucgaucccaaugccaacccgaaugcuaacccuaaugcgaaccccaaugccaacccuaaugcuaaccccaacgccaauccuaacgccaaucccaacgcuaauccgaacgccaauccuaacgcgaaucccaacgcuaaucccaacgccaauccuaacgccaauccgaacgcuaaucccaacgccaacccuaaugcuaaccccaaugccaacccuaaugcgaaccccggcgggggaggcuccgaaccuagcgacaaacauauuaaggaguaccucaauaaaauccagaacucucugauuaagcccggcuccgccaauaagccgaaagaugaacuugacuacgcuaacgauaucgagaagaaaauuuguaagauggagaaaugcagcugaggacuagucccuguucccagagcccacuuuuuuuucuuuuuuugaaauaaaauagccugucuuucagaucuaaaaaaaaaaaaaaaaaaaaaaaaaaaaaaaaaaaaaaaaaaaaaaaaaaaaaaaaaaaaaaaaugcaucccccccccccccccccccccccccccccccaaaggcucuuuucagagccaccagaauu

SEQ ID NO: 531 - RNA, 1254 nt, Artificial Sequence
  mRNA Design a-1 (A64-N5-C30-hSL-N5) comprising derived and/or modified sequence from Pf(3D7)__XP_001351122.1__HsALB_Pf-CSP(19-325) (opt5)
gggagagucccgcagucggcguccagcggcucugcuuguucgugugugugucguugcaggccuuauucaagcuuaccaugaagugggugaccuucaucagccugcucuuucuguucuccucugccuacagccuuuuucaggaguaucaaugcuacggcuccucuagcaacacaagaguccugaaugaacucaacuaugacaaugcugggacgaaccuguacaaugagcuugaaaugaacuauuacggaaaacaggagaauugguauucccugaagaaaaacucucggagccucggcgaaaaugaugacgggaacaaugaggauaacgagaagcugcgcaaacccaagcacaagaaacugaagcagccugccgacggaaauccggaucccaacgcgaauccuaacguugaccccaacgcuaauccuaacguggaucccaaugccaacccuaauguggacccgaacgccaaucccaacgcuaauccuaacgccaaucccaacgcuaauccuaacgccaaucccaacgcgaacccgaaugccaacccuaaugcuaaccccaaugccaacccuaaugcuaaccccaaugccaaccccaaugcgaacccuaaugccaacccgaaugcuaaccccaacgccaauccuaacgcuaaucccaacgccaauccuaacgucgaucccaaugccaacccgaaugcuaacccuaaugcgaaccccaaugccaacccuaaugcuaaccccaacgccaauccuaacgccaaucccaacgcuaauccgaacgccaauccuaacgcgaaucccaacgcuaaucccaacgccaauccuaacgccaauccgaacgcuaaucccaacgccaacccuaaugcuaaccccaaugccaacccuaaugcgaaccccaauaaaaacaaucagggcaacgggcaaggacauaauaugccuaacgaccccaauagaaacguggaugaaaaugccaacgcuaacuccgccguuaagaauaacaauaacgaggaaccgagcgacaaacacauuaaggaguaccucaauaagauccagaacugaggacuagucccuguucccagagcccacuuuuuuuucuuuuuuugaaauaaaauagccugucuuucagaucuaaaaaaaaaaaaaaaaaaaaaaaaaaaaaaaaaaaaaaaaaaaaaaaaaaaaaaaaaaaaaaaaugcaucccccccccccccccccccccccccccccccaaaggcucuuuucagagccaccagaauu

SEQ ID NO: 532 - RNA, 1431 nt, Artificial Sequence
  mRNA Design a-1 (A64-N5-C30-hSL-N5) comprising derived and/or modified sequence from Pf(3D7)__XP_001351122.1__HsALB_Pf-CSP(19-384) (opt5)
gggagagucccgcagucggcguccagcggcucugcuuguucgugugugugucguugcaggccuuauucaagcuuaccaugaagugggugaccuucaucagccugcucuuucuguucuccucugccuacagccuuuuucaggaguaucaaugcuacggcuccucuagcaacacaagagugcugaaugaacucaacuaugacaaugcugggacgaaccuguacaaugagcuugaaaugaacuauuacggaaaacaggagaauugguauucccugaagaaaaacucucggagccucggcgaaaaugaugacgggaacaaugaggauaacgagaagcugcgcaaacccaagcacaagaaacugaagcagccugccgacggaaauccggaucccaacgcgaauccuaacguugaccccaacgcuaauccuaacguggaucccaaugccaacccuaauguggacccgaacgccaaucccaacgcuaauccuaacgccaaucccaacgcuaauccuaacgccaaucccaacgcgaacccgaaugccaacccuaaugcuaaccccaaugccaacccuaaugcuaaccccaaugccaaccccaaugcgaacccuaaugccaacccgaaugcuaaccccaacgccaauccuaacgcuaaucccaacgccaauccuaacgucgaucccaaugccaacccgaaugcuaacccuaaugcgaaccccaaugccaacccuaaugcuaaccccaacgccaauccuaacgccaaucccaacgcuaauccgaacgccaauccuaacgcgaaucccaacgcuaaucccaacgccaauccuaacgccaauccgaacgcuaaucccaacgccaacccuaaugcuaaccccaaugccaacccuaaugcgaaccccaauaaaaacaaucagggcaacgggcaaggacauaauaugccuaacgaccccaauagaaacguggaugaaaaugccaacgcuaacuccgccguuaagaauaacaauaacgaggaaccgagcgacaaacacauuaaggaguaccucaauaagauccagaacucucuguccaccgaguggagcccuuguucugugacaugcggcaauggcauucagguccggaucaaacccggguccgcuaacaagccuaaagaugaacuugacuacgccaaugacauugagaagaaaaucuguaagauggaaaaaugcagcucuguguucaacguugucaauuccagcugaggacuagucccuguucccagagcccacuuuuuuuucuuuuuuugaaauaaaauagccugucuuucagaucuaaaaaaaaaaaaaaaaaaaaaaaaaaaaaaaaaaaaaaaaaaaaaaaaaaaaaaaaaaaaaaaaugcaucccccccccccccccccccccccccccccccaaaggcucuuuucagagccaccagaauu

SEQ ID NO: 533 - RNA, 1569 nt, Artificial Sequence
  mRNA Design a-1 (A64-N5-C30-hSL-N5) comprising derived and/or modified sequence from Pf(3D7)__XP_001351122.1__HsALB_Pf-CSP(19-384)_TM domain HA (opt5)
gggagagucccgcagucggcguccagcggcucugcuuguucgugugugugucguugcaggccuuauucaagcuuaccaugaagugggugaccuucaucagccugcucuuucuguucuccucugccuacagccuuuuucaggaguaucaaugcuacggcuccucuagcaacacaagaguccugaaugaacucaacuaugacaaugcugggacgaaccuguacaaugagcuugaaaugaacuauuacggaaaacaggagaauugguauucccugaagaaaaacucucggagccucggcgaaaaugaugacgggaacaaugaggauaacgagaagcugcgcaaacccaagcacaagaaacugaagcagccugccgacggaaauccggaucccaacgcgaauccuaacguugaccccaacgcuaauccuaacguggaucccaaugccaacccuaauguggacccgaacgccaaucccaacgcuaauccuaacgccaaucccaacgcuaauccuaacgccaaucccaacgcgaacccgaaugccaacccuaaugcuaaccccaaugccaacccuaaugcuaaccccaaugccaaccccaaugcgaacccuaaugccaacccgaaugcuaaccccaacgccaauccuaacgcuaaucccaacgccaauccuaacgucgaucccaaugccaacccgaaugcuaacccuaaugcgaaccccaaugccaacccuaaugcuaaccccaacgccaauccuaacgccaaucccaacgcuaauccgaacgccaauccuaacgcgaaucccaacgcuaaucccaacgccaauccuaacgccaauccgaacgcuaaucccaacgccaacccuaaugcuaaccccaaugccaacccuaaugcgaaccccaauaaaaacaaucagggcaacgggcaaggacauaauaugccuaacgaccccaauagaaacguggaugaaaaugccaacgcuaacuccgccguuaagaauaacaauaacgaggaaccgagcgacaaacacauuaaggaguaccucaauaagauccagaacucucuguccaccgaguggagcccuuguucugugacaugcggcaauggcauucagguccggaucaaacccggguccgcuaacaagccuaaagaugaacuugacuacgccaaugacauugagaagaaaaucuguaagauggaaaaaugcagcucuguguucaacguugucaauuccagcaagcuggaguccacccgcaucuaucagauucucgcgaucuacucuacaguggccagcucccuggugcuuguggucagccugggagcuauuucuuuuuggauguguuccaacggcagccuccaaugcagaaucuguauuugaggacuagucccuguucccagagcccacuuuuuuuucuuuuuuugaaauaaaauagccugucuuucagaucuaaaaaaaaaaaaaaaaaaaaaaaaaaaaaaaaaaaaaaaaaaaaaaaaaaaaaaaaaaaaaaaaugcaucccccccccccccccccccccccccccccccaaaggcucuuuucagagccaccagaauu

SEQ ID NO: 534 - RNA, 1281 nt, Artificial Sequence
  mRNA Design a-1 (A64-N5-C30-hSL-N5) comprising derived and/or modified sequence from Pf(3D7)__XP_001351122.1__HsALB_Pf-CSP(82-397) (opt5)
gggagagucccgcagucggcguccagcggcucugcuuguucgugugugugucguugcaggccuuauucaagcuuaccaugaagugggugaccuucaucagccugcucuuucuguucuccucugccuacagcgacaacgagaaacuuagaaagcccaaacacaagaaacugaagcagccugcugauggcaauccggaccccaacgccaauccuaacgucgaucccaaugcgaacccuaauguugaccccaacgcuaauccuaacguggauccgaaugccaaccccaaugccaacccuaaugcuaaccccaacgccaauccuaacgcuaaucccaacgccaauccgaacgcgaauccuaacgccaaucccaacgcuaauccuaacgccaaucccaacgcuaaucccaacgccaacccuaaugcgaacccgaaugccaaccccaaugcuaacccuaaugccaaccccaaugcuaacccuaauguggaccccaacgccaauccgaacgccaauccuaacgcuaaccccaaugcgaacccuaaugccaaccccaaugcuaacccuaaugccaaccccaaugccaacccgaaugcuaacccuaaugccaaccccaaugcgaaccccaacgcuaauccuaacgccaauccgaacgccaaucccaacgcuaauccuaacgccaaucccaacgcuaauccuaacgccaaucccaacaagaauaaccaagggaauggacagggccauaacaugccuaacgaucccaaucggaacgucgacgaaaaugcgaacgccaauuccgcugugaaaaacaauaacaaugaggaaccgucugauaagcacauuaaagaguaucucaacaagauccagaauagccuguccacagaauggucuccuugcagcguuacgugugggaacggcauucaggugcgcaucaaacccggauccgccaauaagccuaaggacgagcuugauuacgcuaacgacauugagaaaaagaucugcaaaauggaaaaguguagcucugucuuuaaugugguuaacuccagcaucgggcugauuauggugcucucuuuccuguuucugaacugaggacuagucccuguucccagagcccacuuuuuuuucuuuuuuugaaauaaaauagccugucuuucagaucuaaaaaaaaaaaaaaaaaaaaaaaaaaaaaaaaaaaaaaaaaaaaaaaaaaaaaaaaaaaaaaaaugcaucccccccccccccccccccccccccccccccaaaggcucuuuucagagccaccagaauu

SEQ ID NO: 535 - RNA, 633 nt, Artificial Sequence
  mRNA Design a-1 (A64-N5-C30-hSL-N5) comprising derived and/or modified sequence from Pf(3D7)__XP_001351122.1__HsALB_Pf-CSP(93-192) (opt5)
gggagagucccgcagucggcguccagcggcucugcuuguucgugugugugucguugcaggccuuauucaagcuuaccaugaagugggugaccuucaucagccugcucuuucuguucuccucugccuacagcaaacuuaagcagcccgcugacggcaacccugauccgaaugccaaccccaaugucgacccuaacgcgaaucccaacguugauccuaaugcuaaccccaauguggacccuaacgccaauccgaacgccaaucccaacgcuaauccuaacgccaaccccaaugcuaacccuaaugccaaccccaaugcgaacccgaaugccaacccuaaugcuaaccccaaugccaacccuaaugcuaaccccaaugccaaccccaacgcgaauccuaacgccaauccgaacgcuaaucccaacgccaauccuugaggacuagucccuguucccagagcccacuuuuuuuucuuuuuuugaaauaaaauagccugucuuucagaucuaaaaaaaaaaaaaaaaaaaaaaaaaaaaaaaaaaaaaaaaaaaaaaaaaaaaaaaaaaaaaaaaugcaucccccccccccccccccccccccccccccccaaaggcucuuuucagagccaccagaauu

SEQ ID NO: 536 - RNA, 873 nt, Artificial Sequence
  mRNA Design a-1 (A64-N5-C30-hSL-N5) comprising derived and/or modified sequence from Pf(3D7)__XP_001351122.1__HsALB_Pf-CSP(93-272) (opt5)
gggagagucccgcagucggcguccagcggcucugcuuguucgugugugugucguugcaggccuuauucaagcuuaccaugaagugggugaccuucaucagccugcucuuucuguucuccucugccuacagcaaacuuaagcagcccgcugacggcaacccugauccgaaugccaaccccaaugucgacccuaacgcgaaucccaacguugauccuaaugcuaaccccaauguggacccuaacgccaauccgaacgccaaucccaacgcuaauccuaacgccaaccccaaugcuaacccuaaugccaaccccaaugcgaacccgaaugccaacccuaaugcuaaccccaaugccaacccuaaugcuaaccccaaugccaaccccaacgcgaauccuaacgccaauccgaacgcuaaucccaacgccaauccuaacgcuaaucccaacguggauccuaaugccaaccccaaugccaacccgaaugcuaacccuaacgcgaaucccaacgccaauccuaacgcuaaucccaacgccaauccuaacgccaaucccaacgcuaauccgaacgccaauccuaacgcgaaucccaacgcuaaccccaaugccaacccuaaugccaacccgaaugcuaaccccaaugccaacccuaaugcuaaccccaaugccaacccuugaggacuagucccuguucccagagcccacuuuuuuuucuuuuuuugaaauaaaauagccugucuuucagaucuaaaaaaaaaaaaaaaaaaaaaaaaaaaaaaaaaaaaaaaaaaaaaaaaaaaaaaaaaaaaaaaaugcaucccccccccccccccccccccccccccccccaaaggcucuuuucagagccaccagaauu

SEQ ID NO: 537 - RNA, 1248 nt, Artificial Sequence
  mRNA Design a-1 (A64-N5-C30-hSL-N5) comprising derived and/or modified sequence from Pf(3D7)__XP_001351122.1__HsALB_Pf-CSP(93-397) (opt5)
gggagagucccgcagucggcguccagcggcucugcuuguucgugugugugucguugcaggccuuauucaagcuuaccaugaagugggugaccuucaucagccugcucuuucuguucuccucugccuacagcaaacuuaagcagcccgcugacggcaacccugauccgaaugccaaccccaaugucgacccuaacgcgaaucccaacguugauccuaaugcuaaccccaauguggacccuaacgccaauccgaacgccaaucccaacgcuaauccuaacgccaaccccaaugcuaacccuaaugccaaccccaaugcgaacccgaaugccaacccuaaugcuaaccccaaugccaacccuaaugcuaaccccaaugccaaccccaacgcgaauccuaacgccaauccgaacgcuaaucccaacgccaauccuaacgcuaaucccaacguggauccuaaugccaaccccaaugccaacccgaaugcuaacccuaacgcgaaucccaacgccaauccuaacgcuaaucccaacgccaauccuaacgccaaucccaacgcuaauccgaacgccaauccuaacgcgaaucccaacgcuaaccccaaugccaacccuaaugccaacccgaaugcuaaccccaaugccaacccuaaugcuaaccccaaugccaacccuaauaaaaacaaucaagggaacggacagggccacaauaugcccaacgacccuaacagaaaugucgaugagaacgcgaaugccaacuccgcugugaagaauaacaauaacgaggaacccucugacaaacauauuaaggaauaucugaauaagauccagaacagccucuccacagaguggucuccgugcagcguuacgugugggaauggcauucaggugcggaucaaaccuggauccgccaacaagcccaaagaugaacuggacuacgcuaaugauauugagaagaaaaucugcaagauggagaaguguagcucugucuuuaacgugguuaauuccagcaucgggcuuauuauggugcugucuuuccucuuucugaacugaggacuagucccuguucccagagcccacuuuuuuuucuuuuuuugaaauaaaauagccugucuuucagaucuaaaaaaaaaaaaaaaaaaaaaaaaaaaaaaaaaaaaaaaaaaaaaaaaaaaaaaaaaaaaaaaaugcaucccccccccccccccccccccccccccccccaaaggcucuuuucagagccaccagaauu

SEQ ID NO: 538 - RNA, 618 nt, Artificial Sequence
  mRNA Design a-1 (A64-N5-C30-hSL-N5) comprising derived and/or modified sequence from Pf(3D7)__XP_001351122.1__HsALB_Pf-CSP(98-192) (opt5)
gggagagucccgcagucggcguccagcggcucugcuuguucgugugugugucguugcaggccuuauucaagcuuaccaugaagugggugaccuucaucagccugcucuuucuguucuccucugccuacagcgcugacggcaaccccgauccuaaugccaacccgaaugucgaccccaacgcgaauccuaacguugaucccaaugcuaacccuaauguggaccccaacgccaauccuaacgccaauccgaacgcuaaucccaacgccaacccuaaugcuaaccccaaugccaacccuaaugcgaaccccaaugccaacccgaaugcuaacccuaaugccaaccccaaugcuaacccuaaugccaaccccaacgcgaaucccaacgccaauccuaacgcuaauccgaacgccaaucccugaggacuagucccuguucccagagcccacuuuuuuuucuuuuuuugaaauaaaauagccugucuuucagaucuaaaaaaaaaaaaaaaaaaaaaaaaaaaaaaaaaaaaaaaaaaaaaaaaaaaaaaaaaaaaaaaaugcaucccccccccccccccccccccccccccccccaaaggcucuuuucagagccaccagaauu

SEQ ID NO: 539 - RNA, 858 nt, Artificial Sequence
  mRNA Design a-1 (A64-N5-C30-hSL-N5) comprising derived and/or modified sequence from Pf(3D7)__XP_001351122.1__HsALB_Pf-CSP(98-272) (opt5)
gggagagucccgcagucggcguccagcggcucugcuuguucgugugugugucguugcaggccuuauucaagcuuaccaugaagugggugaccuucaucagccugcucuuucuguucuccucugccuacagcgcugacggcaaccccgauccuaaugccaacccgaaugucgaccccaacgcgaauccuaacguugaucccaaugcuaacccuaauguggaccccaacgccaauccuaacgccaauccgaacgcuaaucccaacgccaacccuaaugcuaaccccaaugccaacccuaaugcgaaccccaaugccaacccgaaugcuaacccuaaugccaaccccaaugcuaacccuaaugccaaccccaacgcgaaucccaacgccaauccuaacgcuaauccgaacgccaaucccaacgcuaauccuaacguggaucccaaugccaacccuaaugccaaccccaaugcuaacccgaacgcgaauccuaacgccaaucccaacgcuaauccuaacgccaaucccaacgccaauccuaacgcuaaucccaacgccaauccgaacgcgaauccuaacgcuaaccccaaugccaaccccaaugccaacccuaaugcuaacccgaaugccaaccccaaugcuaacccuaaugccaaccccugaggacuagucccuguucccagagcccacuuuuuuuucuuuuuuugaaauaaaauagccugucuuucagaucuaaaaaaaaaaaaaaaaaaaaaaaaaaaaaaaaaaaaaaaaaaaaaaaaaaaaaaaaaaaaaaaaugcaucccccccccccccccccccccccccccccccaaaggcucuuuucagagccaccagaauu

SEQ ID NO: 540 - RNA, 1164 nt, Artificial Sequence
  mRNA Design a-1 (A64-N5-C30-hSL-N5) comprising derived and/or modified sequence from Pf(3D7)__XP_001351122.1__HsALB_Pf-CSP(98-374) (opt5)
gggagagucccgcagucggcguccagcggcucugcuuguucgugugugugucguugcaggccuuauucaagcuuaccaugaagugggugaccuucaucagccugcucuuucuguucuccucugccuacagcgcugacggcaaccccgauccuaaugccaacccgaaugucgaccccaacgcgaauccuaacguugaucccaaugcuaacccuaauguggaccccaacgccaauccuaacgccaauccgaacgcuaaucccaacgccaacccuaaugcuaaccccaaugccaacccuaaugcgaaccccaaugccaacccgaaugcuaacccuaaugccaaccccaaugcuaacccuaaugccaaccccaacgcgaaucccaacgccaauccuaacgcuaauccgaacgccaaucccaacgcuaauccuaacguggaucccaaugccaacccuaaugccaaccccaaugcuaacccgaacgcgaauccuaacgccaaucccaacgcuaauccuaacgccaaucccaacgccaauccuaacgcuaaucccaacgccaauccgaacgcgaauccuaacgcuaaccccaaugccaaccccaaugccaacccuaaugcuaacccgaaugccaaccccaaugcuaacccuaaugccaaccccaauaaaaacaaucaggggaacggacaaggccacaauaugccuaacgaccccaacagaaaugucgaugagaacgcgaaugccaacuccgcugugaagaauaacaauaacgaggaaccuucugacaaacauauuaaggaauaucuuaauaaaauccagaacagccuguccacagaguggucucccugcagcguuacgugugggaauggcauucaggugcggaucaagccgggauccgccaacaagccuaaagaugaacucgacuacgcuaaugauauugagaagaaaaucugcaagauggagaaauguugaggacuagucccuguucccagagcccacuuuuuuuucuuuuuuugaaauaaaauagccugucuuucagaucuaaaaaaaaaaaaaaaaaaaaaaaaaaaaaaaaaaaaaaaaaaaaaaaaaaaaaaaaaaaaaaaaugcaucccccccccccccccccccccccccccccccaaaggcucuuuucagagccaccagaauu

SEQ ID NO: 541 - RNA, 1233 nt, Artificial Sequence
  mRNA Design a-1 (A64-N5-C30-hSL-N5) comprising derived and/or modified sequence from Pf(3D7)__XP_001351122.1__HsALB_Pf-CSP(98-397) (opt5)
gggagagucccgcagucggcguccagcggcucugcuuguucgugugugugucguugcaggccuuauucaagcuuaccaugaagugggugaccuucaucagccugcucuuucuguucuccucugccuacagcgcugacggcaaccccgauccuaaugccaacccgaaugucgaccccaacgcgaauccuaacguugaucccaaugcuaacccuaauguggaccccaacgccaauccuaacgccaauccgaacgcuaaucccaacgccaacccuaaugcuaaccccaaugccaacccuaaugcgaaccccaaugccaacccgaaugcuaacccuaaugccaaccccaaugcuaacccuaaugccaaccccaacgcgaaucccaacgccaauccuaacgcuaauccgaacgccaaucccaacgcuaauccuaacguggaucccaaugccaacccuaaugccaaccccaaugcuaacccgaacgcgaauccuaacgccaaucccaacgcuaauccuaacgccaaucccaacgccaauccuaacgcuaaucccaacgccaauccgaacgcgaauccuaacgcuaaccccaaugccaaccccaaugccaacccuaaugcuaacccgaaugccaaccccaaugcuaacccuaaugccaaccccaauaaaaacaaucaggggaacggacaaggccacaauaugccuaacgaccccaacagaaaugucgaugagaacgcgaaugccaacuccgcugugaagaauaacaauaacgaggaaccuucugacaaacauauuaaggaauaucuuaauaaaauccagaacagccuguccacagaguggucucccugcagcguuacgugugggaauggcauucaggugcggaucaagccgggauccgccaacaagccuaaagaugaacucgacuacgcuaaugauauugagaagaaaaucugcaagauggagaaauguagcucugucuuuaacgugguuaauuccagcaucgggcugauuauggugcuuucuuuccuguuucucaacugaggacuagucccuguucccagagcccacuuuuuuuucuuuuuuugaaauaaaauagccugucuuucagaucuaaaaaaaaaaaaaaaaaaaaaaaaaaaaaaaaaaaaaaaaaaaaaaaaaaaaaaaaaaaaaaaaugcaucccccccccccccccccccccccccccccccaaaggcucuuuucagagccaccagaauu

SEQ ID NO: 542 - RNA, 1560 nt, Artificial Sequence
  mRNA Design a-1 (A64-N5-C30-hSL-N5) comprising derived and/or modified sequence from Pf(3D7)__XP_001351122.1__HsALB_Pf-CSP(199-377)_L(PVTN)_HBsAg (opt5)
gggagagucccgcagucggcguccagcggcucugcuuguucgugugugugucguugcaggccuuauucaagcuuaccaugaagugggugaccuucaucagccugcucuuucuguucuccucugccuacagcgaccccaacgcuaauccuaacgccaauccgaacgcgaaucccaacgcuaauccuaacgccaaucccaacgccaauccuaacgcuaaucccaacgccaauccuaacgcuaacccgaaugccaaccccaaugcgaacccuaaugccaaccccaaugcuaacccuaaugccaaccccaaugcuaacccgaaugccaacccuaaugcgaaccccaacgccaauccuaacaaaaauaaccagggcaaugggcaaggacacaacaugcccaaugaucccaacagaaaugucgacgagaacgcuaaugccaacuccgcuguuaagaauaacaauaacgaggaaccuucugauaaacauauuaaggaauaucuuaacaaaauccagaauagccuguccacagaguggucuccgugcagcgugacguguggcaacgggauucaggugcggaucaagcccggauccgccaauaagccuaaagacgaacucgauuacgccaacgacauugagaagaaaaucugcaagauggagaaauguagcucuguccccgugaccaauauggaaaacaucacauccggcuuucuggggccucuucugguucuccaggcuggauucuuucugcugacccgcauucucacaaucccccaaagccuggauucuugguggaccucccuuaauuuccugggcggcagcccggugugccucgggcagaacucucaguccccuacaagcaaucacucccccaccucuuguccucccauuugcccuggauauagauggaugugucugcggcgcuuuaucauuuuccuuuuuauccugcuccugugccugauuuuccuccugguccuucuggacuaccagggcaugcuccccguguguccgcugaucccugggagcacgaccacaaacaccggacccugcaagacauguaccacgcccgcgcaaggcaauuccauguuuccuagcugcugcuguacaaagccgaccgaugggaacugcacauguauccccauuccuucuuccugggccuucgcuaaauaucuuugggagugggccagcguuagauuuucuuggcugagccuccuggugcccuucguccagugguucgugggacuguccccuaccguguggcucucugccaucuggaugaugugguacuggggccccagccuguauuccauugucagcccuuuuaucccccuucugccgauuuucuuuugccucuggguuuacaucugaggacuagucccuguucccagagcccacuuuuuuuucuuuuuuugaaauaaaauagccugucuuucagaucuaaaaaaaaaaaaaaaaaaaaaaaaaaaaaaaaaaaaaaaaaaaaaaaaaaaaaaaaaaaaaaaaugcaucccccccccccccccccccccccccccccccaaaggcucuuuucagagccaccagaauu

SEQ ID NO: 543 - RNA, 1299 nt, Artificial Sequence
  mRNA Design a-1 (A64-N5-C30-hSL-N5) comprising derived and/or modified sequence from Pb(ANKA)__XP_022712148.1__Pb-CSP (opt5)
gggagagucccgcagucggcguccagcggcucugcuuguucgugugugugucguugcaggccuuauucaagcuuaccaugaagaaaugcaccauccugguugucgccagccuccugcuuguuaacucccugcuccccggcuacgggcagaauaagucuauucaagcucagagaaaccugaaugagcuuuguuauaacgaaggaaaugacaacaaacuguaccacgugcucaauagcaagaacggcaaaaucuauaaucggaacacagugaaucgccugcuggccgaugcgccugaggggaagaagaacgaaaagaaaaaugagaaaauugaaagaaacaauaagcucaaacagccgcccccucccccuaaccccaacgacccuccgcccccuaaucccaacgauccucccccgccuaaucccaacgacccucccccucccaauccgaacgaucccccucccccuaaugcuaacgaucccccgccucccaaugccaacgacccugcucccccuaaugccaacgaccccgccccgccuaaugcuaacgaucccgcgcccccuaaugccaacgacccggcucccccuaacgccaaugaucccccucccccuaaccccaaugacccggccccucccaacgcuaaugauccucccccgccuaaccccaaugacccugccccuccccagggaaacaauaacccccaaccgcagccccggccucagccccagccucaaccccagccucagccgcagccccaaccucagccccagccucgcccccaaccgcagccucagcccggcgggaauaacaauaacaagaauaacaacaaugacgauuccuacauccccucugcggagaagauucuggaguucgucaaacagaucagagacagcaucacggaagaguggucccaaugcaacgugaccuguggaucuggcauucggguucgcaagagaaaaggcagcaauaagaaagccgaagaucuuacacuggaggacaucgauaccgagauuugcaagauggacaaauguuccagcaucuuuaacauugugucuaauucccucggguucgucauccugcuugugcugguguuuuucaacugaggacuagucccuguucccagagcccacuuuuuuuucuuuuuuugaaauaaaauagccugucuuucagaucuaaaaaaaaaaaaaaaaaaaaaaaaaaaaaaaaaaaaaaaaaaaaaaaaaaaaaaaaaaaaaaaaugcaucccccccccccccccccccccccccccccccaaaggcucuuuucagagccaccagaauu

SEQ ID NO: 544 - RNA, 1464 nt, Artificial Sequence
  mRNA Design a-1 (A64-N5-C30-hSL-N5) comprising derived and/or modified sequence from Pb(ANKA)__XP_022712148.1__Pb-CSP_L(G4SG4)_TM domain HA (opt5)
gggagagucccgcagucggcguccagcggcucugcuuguucgugugugugucguugcaggccuuauucaagcuuaccaugaagaaaugcaccauccugguggucgccagccuccugcuuguuaacucccugcuccccggcuacgggcagaauaagucuauucaagcucagagaaaccugaaugagcuuuguuauaacgaaggaaaugacaacaaacuguaccacgugcucaauagcaagaacggcaaaaucuauaaucggaacacagugaaucgccugcuggccgaugcgccugaggggaagaagaacgaaaagaaaaaugagaaaauugaaagaaacaauaagcucaaacagccgcccccucccccuaaccccaacgacccuccgcccccuaaucccaacgauccucccccgccuaaucccaacgacccucccccucccaauccgaacgaucccccucccccuaaugcuaacgaucccccgccucccaaugccaacgacccugcucccccuaaugccaacgaccccgccccgccuaaugcuaacgaucccgcgcccccuaaugccaacgacccggcucccccuaacgccaaugaucccccucccccuaaccccaaugacccggccccucccaacgcuaaugauccucccccgccuaaccccaaugacccugccccuccccagggaaacaauaacccccaaccgcagccccggccucagccccagccucaaccccagccucagccgcagccccaaccucagccccagccucgcccccaaccgcagccucagcccggcgggaauaacaauaacaagaauaacaacaaugacgauuccuacauccccucugcggagaagauucuggaguucgucaaacagaucagagacagcaucacggaagaguggucccaaugcaacgugaccuguggaucuggcauucggguucgcaagagaaaaggcagcaauaagaaagccgaagaucuuacacuggaggacaucgauaccgagauuugcaagauggacaaauguuccagcaucuuuaacauugugucuaauucccucggguucgucauccugcuugugcugguguuuuucaacggaggcgggggaagcggcgggggaggcaagcucgaaucuacacggauuuaucagauccuggcuaucuacuccaccguugccagcucucugguccucguggugucccugggcgcuauuagcuuuuggaugugcuccaaugggucucuucagugucgcaucugcauuugaggacuagucccuguucccagagcccacuuuuuuuucuuuuuuugaaauaaaauagccugucuuucagaucuaaaaaaaaaaaaaaaaaaaaaaaaaaaaaaaaaaaaaaaaaaaaaaaaaaaaaaaaaaaaaaaaugcaucccccccccccccccccccccccccccccccaaaggcucuuuucagagccaccagaauu

SEQ ID NO: 545 - RNA, 1284 nt, Artificial Sequence
  mRNA Design a-1 (A64-N5-C30-hSL-N5) comprising derived and/or modified sequence from Pb(ANKA)__XP_022712148.1__HsALB_Pb-CSP(24-340) (opt5)
gggagagucccgcagucggcguccagcggcucugcuuguucgugugugugucguugcaggccuuauucaagcuuaccaugaagugggugaccuucaucagccugcucuuucuguucuccucugccuacagccagaacaaauccauucaagcucagagaaaucuuaacgagcugugcuauaaugaaggcaacgacaauaagcucuaccacguccugaacucuaaaaaugggaagaucuauaaccggaauacaguuaaccgccuucuggccgaugcgcccgagggcaaaaagaaugaaaagaaaaacgagaagauugaaagaaauaacaaacucaagcagccuccgcccccucccaauccuaacgacccucccccgcccaacccuaaugaucccccucccccgaacccuaaugaucccccuccucccaaccccaaugacccgcccccucccaacgcuaaugacccucccccgccuaacgccaaugaucccgccccucccaacgcuaaugacccugcucccccgaacgccaaugauccugccccucccaacgcgaaugaccccgccccgcccaacgcuaacgauccucccccucccaauccuaacgaccccgccccgccuaaugcuaacgaucccccucccccgaauccuaacgaccccgccccuccccagggaaauaacaauccccaaccucagccgcggccccagccucagccccaaccucagccccagccucagccgcaaccccagccucagccccgcccucaaccccagccgcagccugggggaaacaauaacaauaaaaacaauaacaacgacgauagcuacauccccuccgcggagaagauucuggaguuugugaagcagaucagagacucuaucacggaagaguggagccaaugcaaugugaccugcggcuccgggauucggguccgcaaaagaaagggaagcaacaaaaaggccgaagaucugacacucgaggacaucgauaccgagauuuguaaaauggacaaguguucuuccaucuucaauauugugagcaacucucugggcuuuguuauccuucuggugcucgucuucuuuaauugaggacuagucccuguucccagagcccacuuuuuuuucuuuuuuugaaauaaaauagccugucuuucagaucuaaaaaaaaaaaaaaaaaaaaaaaaaaaaaaaaaaaaaaaaaaaaaaaaaaaaaaaaaaaaaaaaugcaucccccccccccccccccccccccccccccccaaaggcucuuuucagagccaccagaauu

SEQ ID NO: 546 - RNA, 1302 nt, Artificial Sequence
  mRNA Design a-1 (A64-N5-C30-hSL-N5) comprising derived and/or modified sequence from Pb(ANKA)__XP_022712148.1__HsIns-iso1_Pb-CSP(24-340) (opt5)
gggagagucccgcagucggcguccagcggcucugcuuguucgugugugugucguugcaggccuuauucaagcuuaccauggcccuguggaugagacuccugccccuucuggcucuccuggcccuuuggggcccugacccggcggcugcccagaacaagagcauccaagcccagcggaaucugaacgagcucugcuacaaugaagggaacgauaauaaacuguaucacgugcugaacuccaagaauggaaaaauuuacaaccgcaauaccgucaacagacuccuggcugacgcccccgagggcaagaaaaaugaaaagaagaacgagaaaaucgaacggaauaacaaacuuaagcagccucccccucccccuaauccgaacgaucccccucccccuaaccccaaugacccgccucccccuaaccccaaugaucccccuccgcccaacccuaaugaucccccucccccgaacgcuaaugacccucccccucccaacgccaaugacccugcgcccccgaacgccaaugauccugcuccucccaacgccaaugaccccgcuccgcccaacgccaaugauccugcgcccccuaacgccaacgaucccccucccccgaauccuaacgaccccgcuccucccaaugccaacgacccgccucccccuaaucccaacgaccccgcuccuccgcaggggaauaacaauccccaaccucagccccgcccucagccccagccucaaccgcagccccagccucagccccaaccucagccccagccgagaccucaaccccagccccagccuggaggcaacaauaacaauaagaacaauaacaacgaugacucuuauauucccagcgccgagaaaauccuggaguucguuaagcagauucgggauuccaucacagaagaguggucucaauguaaugugacgugcgggagcggaauccgcgugagaaagcggaaaggcuccaacaagaaagccgaagaccucacccuggaggauauugacacagagaucuguaagauggauaaaugcucuagcauuuuuaauaucgucuccaacagccuuggcuucgugauucugcucguucugguguuuuucaauugaggacuagucccuguucccagagcccacuuuuuuuucuuuuuuugaaauaaaauagccugucuuucagaucuaaaaaaaaaaaaaaaaaaaaaaaaaaaaaaaaaaaaaaaaaaaaaaaaaaaaaaaaaaaaaaaaugcaucccccccccccccccccccccccccccccccaaaggcucuuuucagagccaccagaauu

SEQ ID NO: 547 - RNA, 1281 nt, Artificial Sequence
  mRNA Design a-1 (A64-N5-C30-hSL-N5) comprising derived and/or modified sequence from Pb(ANKA)__XP_022712148.1__HsSPARC_Pb-CSP(24-340) (opt5)
gggagagucccgcagucggcguccagcggcucugcuuguucgugugugugucguugcaggccuuauucaagcuuaccaugagagccuggaucuucuuucugcucugccuggcuggccgggcccuugcgcagaacaagagcauucaagcucagcgcaaucugaacgagcucuguuacaaugaagggaacgacaauaaacuguaucacgugcuuaacuccaagaauggaaaaaucuacaacagaaauaccgucaaccggcugcucgccgaugcccccgagggcaagaaaaaugaaaagaagaacgagaaaauugaacgcaauaacaagcugaaacagccuccgcccccucccaauccuaacgacccucccccgcccaacccuaaugaucccccucccccgaacccuaaugaucccccuccucccaaccccaaugacccgcccccucccaacgcuaaugacccucccccgccuaacgccaaugaucccgcuccucccaacgccaaugacccugcgcccccgaacgccaaugauccugcuccucccaacgccaaugaccccgcuccgcccaacgccaacgauccucccccucccaauccuaacgaccccgcgccgccuaaugccaacgaucccccucccccgaauccuaacgaccccgcuccuccccaggggaauaacaauccccaaccucagccgagaccccagccucagccccaaccucagccccagccucagccgcaaccccagccucagccccggccucaaccccagccgcagccuggaggcaacaauaacaauaagaacaauaacaacgacgauucuuauauccccagcgccgagaaaauucuggaguucguuaagcagauccgcgacuccaucacagaagaguggucucaaugcaaugugacgugugggagcggaauuagagugcggaagcgcaaaggcuccaacaagaaagcugaagaucucacccuggaggacaucgauacagagauuugcaagauggacaaauguucuagcaucuuuaauauugucuccaacagccuuggcuucgugauccugcucguucugguguuuuucaauugaggacuagucccuguucccagagcccacuuuuuuuucuuuuuuugaaauaaaauagccugucuuucagaucuaaaaaaaaaaaaaaaaaaaaaaaaaaaaaaaaaaaaaaaaaaaaaaaaaaaaaaaaaaaaaaaaugcaucccccccccccccccccccccccccccccccaaaggcucuuuucagagccaccagaauu

SEQ ID NO: 548 - RNA, 1284 nt, Artificial Sequence
  mRNA Design a-1 (A64-N5-C30-hSL-N5) comprising derived and/or modified sequence from Pb(ANKA)__XP_022712148.1__IgE_Pb-CSP(24-340) (opt5)
gggagagucccgcagucggcguccagcggcucugcuuguucgugugugugucguugcaggccuuauucaagcuuaccauggacuggaccuggauccuguuccucguggccgcugccacaagaguccacagccagaacaaguccauucaagcgcagcggaaucugaacgagcuuugcuacaaugaaggcaacgauaauaaacuguaucauguucucaacucuaagaaugggaaaaucuacaaccgcaauacggugaacagacugcuugcugacgcccccgagggaaagaaaaaugaaaagaagaacgagaaaauugaacggaauaacaagcugaaacagccuccgcccccucccaauccuaacgaucccccuccgcccaacccuaaugacccgccucccccgaacccuaaugaucccccuccucccaaccccaaugacccgcccccucccaacgccaaugauccucccccgccuaacgcuaaugaccccgccccucccaacgcuaaugauccugccccucccaacgcgaaugaccccgccccucccaacgcuaaugaucccgccccgcccaacgcuaacgacccucccccucccaauccuaacgaucccgccccgccuaaugcgaacgaucccccucccccgaauccuaacgaccccgccccuccccagggcaauaacaauccccaaccucagccgcgcccccagccucagccccaaccucagccccagccucagccgcaaccccagccucagcccagaccucaaccccagccgcagccugggggaaacaauaacaauaagaacaauaacaacgacgacagcuauauccccuccgcugagaaaauucucgaguuugugaagcagauccgggauucuaucaccgaagaguggagccaauguaaugucacaugcggcuccgggauucgcgugagaaagcggaaaggaucuaacaagaaagccgaagaccugacccuggaggauaucgacacagagauuuguaagauggauaaaugcagcuccaucuucaauauuguuagcaacucucucggcuuugugauccugcuuguccugguguucuuuaauugaggacuagucccuguucccagagcccacuuuuuuuucuuuuuuugaaauaaaauagccugucuuucagaucuaaaaaaaaaaaaaaaaaaaaaaaaaaaaaaaaaaaaaaaaaaaaaaaaaaaaaaaaaaaaaaaaugcaucccccccccccccccccccccccccccccccaaaggcucuuuucagagccaccagaauu

SEQ ID NO: 549 - RNA, 1470 nt, Artificial Sequence
  mRNA Design a-1 (A64-N5-C30-hSL-N5) comprising derived and/or modified sequence from Pf(3D7)__XP_001351122.1__Pf-CSP (opt6)
gggagagucccgcagucggcguccagcggcucugcuuguucgugugugugucguugcaggccuuauucaagcuuaccaugaugagaaaacuugcaauacuaagcguaucuucauuccuauucguagaagcacuauuccaagaauaucaaugcuauggaucaagcuccaacacaagaguacuuaacgaacuaaauuacgacaaugcaggaacaaaccuauacaaugaacuugaaaugaauuacuacggcaaacaagaaaacugguacucccuaaaaaaaaacucaaggucauuaggagaaaacgacgacggaaacaacgaagacaacgaaaaacuacgaaaacccaaacacaaaaaauuaaaacaaccagcagacggaaaccccgacccaaacgcaaacccaaacgucgacccaaacgcaaacccgaacguagacccaaacgcgaacccaaacguagacccaaacgcaaacccaaacgcaaacccaaacgcaaacccaaacgcaaacccaaaugcaaacccaaacgcaaacccaaacgccaauccaaacgccaacccaaacgcaaacccaaacgcaaacccaaacgcaaacccaaacgcaaaccccaacgcaaacccaaacgcuaacccaaacgcaaacccuaaugcaaacccuaacgcaaacccaaacgucgacccgaacgcaaacccaaaugcaaacccaaacgcaaacccaaacgcaaaccccaacgccaacccaaaugcaaacccaaaugcaaauccaaacgcaaacccaaacgcaaacccuaacgcaaacccaaacgcaaaccccaacgcaaacccaaacgcaaacccaaacgccaacccaaacgcaaaccccaaugcaaacccaaacgcaaacccaaacgcaaacccaaacaaaaacaaucaaggcaacggacaaggacacaacaugcccaacgacccaaaccgaaacgucgacgaaaacgccaacgcaaacagcgcaguaaaaaacaacaacaacgaagaacccucagacaaacacauaaaagaauacuuaaacaaaauacaaaacucacuaucuacagaauggucacccuguagcguaaccugcggcaacggaauacaaguaagaauaaaaccaggcucagcaaacaaaccaaaagaugaacuagacuacgccaaugauauagaaaaaaaaauauguaaaauggaaaaauguagcucagucuucaacguagucaacucaucaauaggacuaauaaugguacucuccuuccucuuccuaaauuaaggacuagucccuguucccagagcccacuuuuuuuucuuuuuuugaaauaaaauagccugucuuucagaucuaaaaaaaaaaaaaaaaaaaaaaaaaaaaaaaaaaaaaaaaaaaaaaaaaaaaaaaaaaaaaaaaugcaucccccccccccccccccccccccccccccccaaaggcucuuuucagagccaccagaauu

SEQ ID NO: 550 - RNA, 1401 nt, Artificial Sequence
  mRNA Design a-1 (A64-N5-C30-hSL-N5) comprising derived and/or modified sequence from Pf(3D7)__XP_001351122.1__Pf-CSP(1-374) (opt6)
gggagagucccgcagucggcguccagcggcucugcuuguucgugugugugucguugcaggccuuauucaagcuuaccaugaugagaaaacuagcaauauuaagcguaagcucauuccuauucguugaagcauuauuccaagaauaccaaugcuacggcucaagcucaaacacaagaguauuaaacgaauuaaacuacgacaaugcaggaaccaaccucuacaacgaacuagaaaugaauuauuacggcaaacaagaaaacugguacucacucaaaaaaaacucacgaucccuaggagaaaacgaugacggaaacaaugaagauaacgaaaaauuaagaaaaccaaaacacaaaaaauuaaaacaaccugcagacggaaacccagacccaaacgcaaauccaaauguagacccaaacgcaaaccccaacguagacccaaaugcaaacccaaacguagacccaaacgcaaacccaaaugcaaacccaaacgcaaacccaaacgcaaacccaaacgcaaaccccaacgcaaacccaaacgcaaacccaaacgccaaccccaacgcaaacccaaacgcaaacccgaaugcaaacccaaacgcaaacccaaacgcaaacccaaacgcaaacccaaacgcaaacccaaacgcaaacccaaaugcaaacccaaacguggauccaaacgcaaauccaaacgcaaacccaaacgcaaacccaaacgcaaaccccaacgcaaauccaaacgcaaaccccaaugcaaauccaaacgcaaacccaaacgccaacccaaacgcaaacccgaacgccaauccaaacgcaaacccaaacgcaaacccaaacgcaaacccaaacgccaacccaaacgcaaacccaaacgcaaacccaaacgcaaaccccaacaaaaacaaccaaggaaacggacaaggacacaacaugccaaacgauccaaacagaaacgucgacgaaaacgccaacgcuaacagcgcaguaaaaaacaauaacaacgaagaaccaucagacaaacauauaaaagaauacuuaaacaaaauccaaaacucacuaucaacagaauggucccccuguuccguaacaugcggaaacggaauacaaguacgaaucaaaccaggaucagccaacaaaccgaaagacgaacuagacuaugccaacgauauagaaaaaaaaauaugcaaaauggaaaaaugcugaggacuagucccuguucccagagcccacuuuuuuuucuuuuuuugaaauaaaauagccugucuuucagaucuaaaaaaaaaaaaaaaaaaaaaaaaaaaaaaaaaaaaaaaaaaaaaaaaaaaaaaaaaaaaaaaaugcaucccccccccccccccccccccccccccccccaaaggcucuuuucagagccaccagaauu

SEQ ID NO: 551 - RNA, 1254 nt, Artificial Sequence
  mRNA Design a-1 (A64-N5-C30-hSL-N5) comprising derived and/or modified sequence from Pf(3D7)__XP_001351122.1__Pf-CSP(1-325) (opt6)
gggagagucccgcagucggcguccagcggcucugcuuguucgugugugugucguugcaggccuuauucaagcuuaccaugaugcgaaaauuagcaauacuaagcguaagcucauucuuauucguagaagcacucuuccaagaauaccaaugcuacggaucaagcucaaacacaagaguccuaaacgaauuaaacuaugacaacgcaggaacaaaccuauacaacgaacuagaaaugaacuacuacggaaaacaagaaaacugguacucacucaaaaaaaacagcagaagucuaggagaaaacgacgacggaaacaacgaagacaacgaaaaacuacgaaaaccaaaacacaaaaaacuaaaacaaccagcagacgggaacccagacccaaacgcaaacccaaacguagauccaaacgcaaacccaaauguagacccuaacgcaaacccaaauguagacccaaacgcaaacccuaacgcaaacccaaaugcaaacccaaacgcaaauccaaacgcaaacccaaacgcaaacccaaacgcgaacccaaacgcaaacccaaacgcaaacccaaaugcaaaccccaacgcaaauccaaaugcaaacccaaaugcaaauccaaacgcaaacccaaacgcaaacccaaaugcaaauccaaacgcaaauccaaacguggauccaaacgcaaacccaaacgcaaacccaaacgcaaacccaaacgcaaacccaaacgcaaacccaaacgcaaauccaaacgccaauccaaacgcaaauccaaaugcaaacccaaacgcaaacccaaacgcaaacccaaacgcaaacccaaacgcaaacccaaacgcaaacccaaacgcaaacccaaacgcaaacccaaacgcaaacccaaacgcaaacccaaacaaaaacaaccaaggaaacggacaaggacacaacaugccaaacgacccaaacagaaacguagacgaaaacgccaacgcaaauagcgcagucaaaaacaacaauaacgaagaaccaucggacaaacacauaaaagaauacuuaaacaaaauacaaaacugaggacuagucccuguucccagagcccacuuuuuuuucuuuuuuugaaauaaaauagccugucuuucagaucuaaaaaaaaaaaaaaaaaaaaaaaaaaaaaaaaaaaaaaaaaaaaaaaaaaaaaaaaaaaaaaaaugcaucccccccccccccccccccccccccccccccaaaggcucuuuucagagccaccagaauu

SEQ ID NO: 552 - RNA, 1470 nt, Artificial Sequence
  mRNA Design a-1 (A64-N5-C30-hSL-N5) comprising derived and/or modified sequence from Pf(3D7)__XP_001351122.1__HsALB_Pf-CSP(19-397) (opt6)
gggagagucccgcagucggcguccagcggcucugcuuguucgugugugugucguugcaggccuuauucaagcuuaccaugaaaugggucacauuuauuucacuacuauucuuauucucaagcgcauacucacuauuucaagaauaccaaugcuacggcucauccucaaauacacgaguacuaaaugaacucaacuacgacaacgcaggaaccaaucucuacaacgaauuagaaaugaacuacuacggcaaacaagaaaacugguauucacuaaaaaaaaacaguagaucacuaggagaaaaugacgacggaaacaaugaagacaacgaaaaacuaagaaaaccaaaacacaaaaaauuaaaacaaccagcagacggaaacccagacccaaacgcaaacccuaacguagaucccaaugccaacccaaauguagacccaaacgcaaaccccaacgucgauccaaacgcaaacccaaacgcaaacccaaacgcaaacccaaacgcaaacccaaacgcaaacccaaaugcaaaccccaacgcaaacccaaacgcuaacccaaacgcaaacccaaacgcaaacccaaacgcaaacccaaacgcaaacccaaacgccaacccaaacgccaacccaaacgcaaauccaaacgcaaacccaaaugccaauccaaacguugacccaaacgcaaacccaaacgcaaaccccaacgcaaacccaaacgcaaauccaaacgcgaaccccaacgcaaacccaaacgcaaacccaaaugcaaacccaaacgcuaacccaaaugcaaacccaaacgccaacccaaacgccaacccaaacgcaaaccccaacgcaaacccaaacgcaaacccaaacgccaauccaaacgcaaacccaaaugcaaacccaaacaaaaacaaccaaggaaacggacaaggacacaacaugccaaacgaccccaacagaaacguagaugaaaaugcaaaugcuaacucagccguaaaaaacaauaacaacgaagaaccaucagacaaacacauaaaagaauaccuaaauaaaauacaaaauuccuuaucaacagaaugguccccaugcucaguaacuugcgguaacggcauacaaguaagaauaaaaccaggaucagcaaacaaaccaaaagacgaauuagacuaugcaaacgacauagaaaaaaaaauauguaaaauggaaaaaugcagcucaguauucaacguaguaaauuccucaaucggacucaucaugguauuaucauuccuauuuuuaaauuaaggacuagucccuguucccagagcccacuuuuuuuucuuuuuuugaaauaaaauagccugucuuucagaucuaaaaaaaaaaaaaaaaaaaaaaaaaaaaaaaaaaaaaaaaaaaaaaaaaaaaaaaaaaaaaaaaugcaucccccccccccccccccccccccccccccccaaaggcucuuuucagagccaccagaauu

SEQ ID NO: 553 - RNA, 1488 nt, Artificial Sequence
  mRNA Design a-1 (A64-N5-C30-hSL-N5) comprising derived and/or modified sequence from Pf(3D7)__XP_001351122.1__HsIns-iso1_Pf-CSP(19-397) (opt6)
gggagagucccgcagucggcguccagcggcucugcuuguucgugugugugucguugcaggccuuauucaagcuuaccauggcacuauggaugagacuacuaccacuacuagcacuccuagccuuauggggacccgauccagccgcagcacucuuccaagaauaccaaugcuauggaucauccuccaacacaagaguccuaaacgaauuaaauuacgacaacgcuggaacaaaccuauacaaugaacuagaaaugaauuauuacggaaaacaagaaaauugguacucacuaaaaaaaaacucuagaagccuaggagaaaacgacgacggaaacaacgaagauaacgaaaaacuaagaaaaccaaaacacaaaaaauuaaaacaacccgcagacggcaacccagacccaaaugcaaauccaaacguagacccaaacgcaaauccaaacguagacccaaacgcaaacccaaauguagacccaaacgcaaauccaaacgcaaacccaaaugcaaacccaaaugcaaacccaaacgcaaauccaaacgcaaaucccaacgccaacccaaacgcaaacccaaacgcaaauccaaacgcaaacccaaacgcaaacccaaacgcaaacccaaacgcaaacccaaaugcaaacccaaaugccaauccaaacgccaacccaaacgcaaacccaaacguagacccaaacgcaaacccaaacgccaacccaaacgcaaaccccaaugcaaacccaaacgcaaacccaaacgcaaaccccaacgcaaauccaaacgcaaacccaaacgcaaauccaaacgcaaauccaaacgccaacccaaacgcaaacccaaacgcaaauccaaacgcaaaccccaacgcaaacccaaacgccaacccaaaugcaaacccaaacgcaaaucccaauaaaaacaaccaaggaaacggacaaggacacaacaugccaaacgauccaaacagaaacguagacgaaaacgcaaacgcaaacucagcagucaaaaacaauaacaacgaagaaccaucagacaaacacauaaaagaauaccuaaacaaaauacaaaacucacuauccacagaauggucaccaugcucaguaaccugcggaaacggaauacaaguaagaauaaaaccaggaucagccaacaaaccaaaagacgaacuagacuaugcuaaugacauagaaaaaaaaauaugcaaaauggaaaaaugcuccucaguauucaacgucguaaacucuucaauaggacuaauaaugguacuauccuucuuauuucuaaacuaaggacuagucccuguucccagagcccacuuuuuuuucuuuuuuugaaauaaaauagccugucuuucagaucuaaaaaaaaaaaaaaaaaaaaaaaaaaaaaaaaaaaaaaaaaaaaaaaaaaaaaaaaaaaaaaaaugcaucccccccccccccccccccccccccccccccaaaggcucuuuucagagccaccagaauu

SEQ ID NO: 554 - RNA, 1467 nt, Artificial Sequence
  mRNA Design a-1 (A64-N5-C30-hSL-N5) comprising derived and/or modified sequence from Pf(3D7)__XP_001351122.1__HsSPARC_Pf-CSP(19-397) (opt6)
gggagagucccgcagucggcguccagcggcucugcuuguucgugugugugucguugcaggccuuauucaagcuuaccaugcgcgcauggauauucuuccuccuaugucuagcaggucgagcacuugcacucuuccaagaauaccaauguuacggauccucaagcaacacacgaguacuaaacgaacuaaacuacgauaacgcaggaaccaacuuauacaacgaacuagaaaugaacuacuacggcaaacaagaaaacugguacucacucaaaaaaaacagcagaagccuaggagaaaaugacgacggaaacaacgaagauaacgaaaaauuacgaaaacccaaacacaaaaaauuaaaacaacccgcagauggaaauccagacccgaacgcaaacccaaacguagacccaaacgcaaacccaaacguugacccaaacgcaaacccaaacguagacccaaacgcaaacccuaacgccaacccaaacgcaaacccaaacgcaaacccaaaugcgaacccaaaugcaaacccaaacgccaacccaaaugcaaaccccaacgcaaauccaaacgcaaacccaaaugcaaacccaaacgcaaacccaaacgcaaacccaaacgcaaacccaaacgccaaccccaaugcaaacccaaacgcaaacccaaacgucgacccaaacgcaaacccaaacgcaaacccaaacgcaaauccaaacgcaaauccaaacgcaaacccuaacgcaaacccaaacgcaaacccaaaugcaaauccaaacgcaaacccaaacgcaaacccaaacgcaaauccaaacgcaaacccaaacgcaaacccaaacgcaaacccuaaugcaaacccaaaugcaaauccaaacgcaaacccaaaugcaaaccccaacaaaaacaaccaaggaaacggacaaggacacaauaugccaaacgacccaaacagaaacguagacgaaaacgcaaacgccaacagcgcaguaaaaaacaacaacaacgaagaaccaucagacaaacacauaaaagaauaccuaaacaaaauacaaaacucacuaucaacagaauggucucccugcuccguaacaugcggaaacggcauacaaguacgaauaaaaccuggaucagccaacaaaccaaaagacgaacuagacuaugcaaaugacauagaaaaaaaaauaugcaaaauggaaaaaugcaguucagucuucaacguagucaacagcucaauaggccuaauaaugguacucucauuccuauucuuaaacuaaggacuagucccuguucccagagcccacuuuuuuuucuuuuuuugaaauaaaauagccugucuuucagaucuaaaaaaaaaaaaaaaaaaaaaaaaaaaaaaaaaaaaaaaaaaaaaaaaaaaaaaaaaaaaaaaaugcaucccccccccccccccccccccccccccccccaaaggcucuuuucagagccaccagaauu

SEQ ID NO: 555 - RNA, 1470 nt, Artificial Sequence
  mRNA Design a-1 (A64-N5-C30-hSL-N5) comprising derived and/or modified sequence from Pf(3D7)__XP_001351122.1__IgE_Pf-CSP(19-397) (opt6)
gggagagucccgcagucggcguccagcggcucugcuuguucgugugugugucguugcaggccuuauucaagcuuaccauggauuggacauggauucucuuccucguagcagcagccacaagaguacacucuuuauuucaagaauaccaaugcuacggaucaagcucaaacacacgcguacuaaacgaacuaaacuacgacaacgcaggaacaaacuuauacaacgaacuagaaaugaacuauuauggcaaacaagaaaacugguacucacuaaaaaaaaacuccagaagcuuaggagaaaacgacgacggaaacaacgaagacaacgaaaaacuacgcaaaccuaaacacaaaaaacuaaaacaaccugcagacggaaacccagacccaaacgcgaacccaaacguagauccaaacgcaaacccaaacguagaucccaacgcaaacccgaacguagacccuaacgcaaauccaaacgcaaaccccaacgcaaacccgaacgcaaacccaaacgcaaacccaaacgcaaacccaaacgcaaacccaaacgcaaacccaaacgccaacccaaacgcaaauccaaacgcuaacccaaaugcaaacccuaacgcaaacccaaacgccaacccaaacgcaaacccaaacgcaaacccaaacgcaaaucccaauguagacccaaacgcaaacccaaacgcaaacccaaacgcuaacccaaaugcaaacccaaacgcaaacccaaacgcaaacccaaacgcuaaccccaacgcaaacccgaacgcaaacccaaaugcaaacccaaacgcaaacccaaaugcaaacccaaacgcaaacccaaacgcaaaccccaaugccaacccaaacgcaaauccaaaugccaauccaaacgcaaacccaaacaaaaacaaccaaggaaauggacaaggacauaacaugccaaacgaccccaaccgaaauguagacgaaaacgccaacgcaaauagugcagucaaaaacaauaacaaugaagaacccucagauaaacauauaaaagaauacuuaaacaaaauacaaaacucacuaucaaccgaguggucuccuugcucaguaacauguggaaacggaauacaaguacgaauaaaaccaggaucagcaaacaaaccgaaagacgaacuagacuacgccaacgacauagaaaagaaaauauguaaaauggagaaauguaguucaguauucaacgugguaaacagcucaauaggccuaauaaugguacucucuuuccuauuccuaaacuaaggacuagucccuguucccagagcccacuuuuuuuucuuuuuuugaaauaaaauagccugucuuucagaucuaaaaaaaaaaaaaaaaaaaaaaaaaaaaaaaaaaaaaaaaaaaaaaaaaaaaaaaaaaaaaaaaugcaucccccccccccccccccccccccccccccccaaaggcucuuuucagagccaccagaauu

SEQ ID NO: 556 - RNA, 1635 nt, Artificial Sequence
  mRNA Design a-1 (A64-N5-C30-hSL-N5) comprising derived and/or modified sequence from Pf(3D7)__XP_001351122.1__Pf-CSP_L(G4SG4)_TM domain HA (opt6)
gggagagucccgcagucggcguccagcggcucugcuuguucgugugugugucguugcaggccuuauucaagcuuaccaugaugcguaaacuagcaauacuaucugucaguucauucuuauucguagaagcacuauuccaagaauaccaauguuacggaucuucaucaaacacaagaguacucaacgaauuaaacuacgauaacgcuggaaccaauuuauacaacgaacuagaaaugaacuacuauggaaaacaagaaaacugguauucacuaaaaaaaaacagcagaaguuuaggagaaaaugacgacggaaacaaugaagacaaugaaaaauuacgaaaaccaaaacacaaaaaauuaaaacaacccgccgacggaaauccagacccaaacgcaaacccaaauguagacccaaacgcaaacccaaauguagaucccaacgcaaacccaaacguagaucccaaugcaaacccaaacgcaaacccaaaugcaaaccccaacgcaaacccaaaugcaaacccuaacgcaaacccgaacgcaaacccaaacgcaaaucccaaugcaaaccccaacgcaaauccaaaugcaaacccuaacgcaaauccgaacgcaaauccaaacgcaaacccaaacgcaaacccaaacgcaaacccaaacgcaaacccaaacgucgacccaaacgccaauccaaacgcaaaccccaaugcaaacccaaaugcaaacccaaacgcaaacccaaaugccaacccaaacgcaaacccaaacgcaaacccaaacgcaaacccaaacgcaaacccaaaugcaaacccaaaugcaaacccaaacgccaacccaaacgcaaacccaaacgcaaacccaaacgccaacccaaacgcaaacccuaacgcaaauccaaacaaaaacaaccaagggaacggacaaggacacaacaugccaaacgacccaaacagaaacguagacgaaaacgccaacgcaaacucagcugucaaaaacaauaacaacgaagaacccuccgauaaacacauaaaagaauaccuaaacaaaauccaaaacucccuuucuacagaauggucacccugcucaguaacaugcggcaacggcauacaaguuagaaucaaaccaggaucagcaaauaaaccaaaagacgaauuagacuaugccaacgacauagaaaaaaaaauauguaaaauggaaaaaugcucaucaguuuucaacguaguaaacagcucaaucggauuaauaaugguacuaucauucuuauuuuuaaacggaggaggaggcuccggcggagguggaaaacuagaaucaacuagaauauaccaaauauuagcaauauacucaacaguagcaucaucacucguauuaguaguaucgcuaggagcaauaaguuucuggaugugcucuaacggaagccuacaaugccgaauaugcauauaaggacuagucccuguucccagagcccacuuuuuuuucuuuuuuugaaauaaaauagccugucuuucagaucuaaaaaaaaaaaaaaaaaaaaaaaaaaaaaaaaaaaaaaaaaaaaaaaaaaaaaaaaaaaaaaaaugcaucccccccccccccccccccccccccccccccaaaggcucuuuucagagccaccagaauu

SEQ ID NO: 557 - RNA, 1509 nt, Artificial Sequence
  mRNA Design a-1 (A64-N5-C30-hSL-N5) comprising derived and/or modified sequence from Pf(3D7)__XP_001351122.1__Pf-CSP(199-377)_L(PVTN)_HBsAg (opt6)
gggagagucccgcagucggcguccagcggcucugcuuguucgugugugugucguugcaggccuuauucaagcuuaccauggacccaaacgccaaccccaacgcaaacccaaaugcaaacccaaacgcuaaccccaacgcaaacccaaacgcuaacccuaacgcaaauccaaacgcaaaucccaacgcaaauccaaacgcaaacccaaacgcaaacccaaaugccaacccaaacgcaaacccuaacgcaaaucccaacgcaaauccaaaugcaaaccccaaugcaaacccaaacgcaaauccaaacaaaaauaaucaaggaaauggacaaggacauaacaugccaaacgacccuaaccgaaacgucgacgaaaaugcaaacgcaaacuccgcaguaaaaaacaacaacaacgaagaaccuuccgacaaacacauaaaagaauaccuaaacaaaauacaaaacucucuauccacugaauggucaccaugcucaguaaccugcggaaauggcauacaaguaagaauaaaaccaggaucugcaaauaaaccuaaagacgaacuagauuacgcaaaugacauagaaaaaaaaauaugcaaaauggaaaaaugcucaucagucccaguaacaaacauggaaaacaucacaucaggauucuuaggaccacuacucguauuacaagcaggauucuuucuuuuaacaagaauauuaacaauaccacaaucccuagacucaugguggacaucauuaaacuuccuagguggaucaccagucugccucggacaaaacucacaaucaccaacaucaaaccacucaccaacauccugcccaccaauuuguccaggauacagauggaugugccuacgaagauucauaauauucuuauuuauauuacuacuaugucucauauuuuuacucguacuauuagacuaucagggcauguuacccguauguccacuaauaccaggcucaaccaccacaaacacagguccaugcaaaaccugcaccacaccagcacaaggaaacuccauguuucccucauguugcugcaccaaacccaccgauggaaacugcaccugcauaccaaucccaucuucaugggcauucgcaaaauaucuaugggaaugggcauccguaagauuuucauggcuaucacuauuaguaccauucguacaaugguucguaggauuaucaccaacaguaugguuaucagcaauauggaugaugugguacuggggaccaucacuauacucaauaguauccccuuucauaccauuacucccaauauuuuucugccuuuggguauacauauaaggacuagucccuguucccagagcccacuuuuuuuucuuuuuuugaaauaaaauagccugucuuucagaucuaaaaaaaaaaaaaaaaaaaaaaaaaaaaaaaaaaaaaaaaaaaaaaaaaaaaaaaaaaaaaaaaugcaucccccccccccccccccccccccccccccccaaaggcucuuuucagagccaccagaauu

SEQ ID NO: 558 - RNA, 1551 nt, Artificial Sequence
  mRNA Design a-1 (A64-N5-C30-hSL-N5) comprising derived and/or modified sequence from Pf(3D7)__XP_001351122.1__Pf-CSP(199-387)_L(PVTN)_HBsAg (opt6)
gggagagucccgcagucggcguccagcggcucugcuuguucgugugugugucguugcaggccuuauucaagcuuaccaugauggcaccagauccaaacgcaaacccaaacgcaaacccaaacgcaaauccaaaugcaaacccaaacgcaaaucccaaugcaaacccuaacgcaaacccaaacgccaacccaaaugccaacccaaacgcaaacccaaacgcaaauccaaacgcaaacccaaacgcuaacccaaaugcaaaccccaacgcaaauccaaacgcaaacccaaacgcaaauccaaacgcuaacccaaacaaaaauaaccaaggaaacggacaaggacacaauaugccaaaugacccaaauagaaacguagacgaaaacgcaaacgcaaauucagcagucaaaaacaauaacaacgaagaaccauccgauaaacacauaaaagaauacuuaaacaaaauccaaaacucacuaucaacugaauggucaccuuguucaguaacauguggcaacggaauacaaguaagaauaaaaccagguucagccaacaaaccuaaagacgaacuagacuacgcaaacgacauagaaaaaaaaaucugcaaaauggaaaaaugcucaucaguauuuaauguaguaaacucaucaauaggacuaggcccuguaacaaacauggaaaacauaaccucaggauucuuaggcccacuacuaguacuccaagcaggauucuuucuucuaacaagaauauuaaccauuccucaaucauuagacucaugguggacaucccuuaacuuucuaggaggaagccccguaugcuuaggacaaaacagccaauccccaacauccaaccacuccccaacaucaugccccccaauaugcccaggauacagauggaugugccuaagaagauucaucauauuccuauuuauucucuuacucugcuuaauauucuuacucguauuacucgacuaccaaggaauguuaccaguaugcccacuaauaccaggauccacaacaacaaacacgggaccaugcaaaacaugcacaacaccugcccaaggaaauuccauguucccaucaugcugcugcacaaaaccaaccgacggcaacugcacaugcauaccaauaccaucaagcugggccuucgcaaaauaccuaugggaaugggcaucagugagauucucauggcucucauuacuagucccauucguacaaugguuuguaggauuaucaccaacaguuuggcucagcgcaauauggaugaugugguacuggggccccucuuuauauucaauaguauccccauuuauaccacuacucccaauauucuucuguuuauggguauacauauaaggacuagucccuguucccagagcccacuuuuuuuucuuuuuuugaaauaaaauagccugucuuucagaucuaaaaaaaaaaaaaaaaaaaaaaaaaaaaaaaaaaaaaaaaaaaaaaaaaaaaaaaaaaaaaaaaugcaucccccccccccccccccccccccccccccccaaaggcucuuuucagagccaccagaauu

SEQ ID NO: 559 - RNA, 735 nt, Artificial Sequence
  mRNA Design a-1 (A64-N5-C30-hSL-N5) comprising derived and/or modified sequence from Pf(3D7)__XP_001351122.1__HsALB_Pf-CSP(19-152) (opt6)
gggagagucccgcagucggcguccagcggcucugcuuguucgugugugugucguugcaggccuuauucaagcuuaccaugaaauggguaacauucauaucacuacuauuccuauucuccagcgcauacucacuauuccaagaauaccaaugcuacggaucaagcucaaacacacgaguacuaaacgaacuaaacuacgacaacgcaggaaccaaccuauacaacgaacuagaaaugaacuacuacggaaaacaagaaaacugguacucacuaaaaaaaaacagcagaucacuaggagaaaacgacgacggaaacaacgaagacaacgaaaaacuaagaaaaccaaaacacaaaaaacuaaaacaacccgcagacggaaacccagacccaaacgcaaacccaaacguagacccaaaugcaaacccaaacguagacccaaacgcaaacccaaacguagacccaaacgcaaacccaaacgcaaacccaaacgcaaacccaaacgcaaacccaaacgcaaacccaaacgcaaacccauaaggacuagucccuguucccagagcccacuuuuuuuucuuuuuuugaaauaaaauagccugucuuucagaucuaaaaaaaaaaaaaaaaaaaaaaaaaaaaaaaaaaaaaaaaaaaaaaaaaaaaaaaaaaaaaaaaugcaucccccccccccccccccccccccccccccccaaaggcucuuuucagagccaccagaauu

SEQ ID NO: 560 - RNA, 855 nt, Artificial Sequence
  mRNA Design a-1 (A64-N5-C30-hSL-N5) comprising derived and/or modified sequence from Pf(3D7)__XP_001351122.1__HsALB_Pf-CSP(19-192) (opt6)
gggagagucccgcagucggcguccagcggcucugcuuguucgugugugugucguugcaggccuuauucaagcuuaccaugaaauggguaacauucaucucacuacuauucuuauucucaucagcauacucacuauuccaagaauaccaaugcuacggaucaucaucaaacacacgaguacucaacgaacuaaacuacgacaacgcaggaacaaaccuauacaacgaacuagaaaugaacuacuacggaaaacaagaaaacugguauucacuaaaaaaaaacucaagaucacuaggagaaaacgacgacggaaacaacgaagacaacgaaaaacuaagaaaaccaaaacacaaaaaacuaaaacaaccagcagacggaaacccagacccaaacgcaaacccaaacguagacccaaacgccaacccaaacguagacccaaacgcaaacccaaacguagacccaaacgcaaacccaaacgcaaacccaaacgcaaacccaaacgcaaacccaaacgcaaacccaaacgcaaacccaaacgcaaacccaaacgcaaacccaaacgcaaacccaaacgcaaacccaaacgcaaacccaaacgcaaauccaaacgcaaacccaaacgcaaacccaaacgcaaacccaaacgcaaaccccuaaggacuagucccuguucccagagcccacuuuuuuuucuuuuuuugaaauaaaauagccugucuuucagaucuaaaaaaaaaaaaaaaaaaaaaaaaaaaaaaaaaaaaaaaaaaaaaaaaaaaaaaaaaaaaaaaaugcaucccccccccccccccccccccccccccccccaaaggcucuuuucagagccaccagaauu

SEQ ID NO: 561 - RNA, 1095 nt, Artificial Sequence
  mRNA Design a-1 (A64-N5-C30-hSL-N5) comprising derived and/or modified sequence from Pf(3D7)__XP_001351122.1__HsALB_Pf-CSP(19-272) (opt6)
gggagagucccgcagucggcguccagcggcucugcuuguucgugugugugucguugcaggccuuauucaagcuuaccaugaaauggguaacauucauaucacuacuauuccuauucucaagcgcauauucacuauuccaagaauaccaaugcuacggaucaagcucaaacacaagaguacuuaacgaacuaaacuacgacaacgcaggaacaaaccuauacaacgaacuugaaaugaacuacuacggaaaacaagaaaacugguacucacuaaaaaaaaauagcagaagcuuaggagaaaacgacgacggaaacaacgaagacaacgaaaaauuaagaaaaccuaaacacaaaaaacuaaaacaacccgcagacggaaacccagacccuaacgccaacccaaauguagacccaaacgcaaacccaaacguagacccaaacgcaaaccccaacguagacccaaacgcaaacccaaacgcaaacccaaacgcaaacccaaacgcaaaccccaacgcaaacccaaacgcaaacccaaacgcaaacccaaacgcaaacccaaacgcaaacccaaacgcaaacccaaacgcaaacccaaacgcaaacccaaacgcgaacccaaacgcaaacccaaacgcaaacccaaacgcaaacccaaacgcaaacccaaacguagacccaaaugcaaaccccaacgcaaacccaaacgcaaacccaaaugcaaaccccaacgcaaacccaaacgcaaacccaaacgcaaacccaaacgcaaacccaaaugcaaacccaaacgcaaacccaaacgccaacccaaacgcaaacccaaacgcaaacccaaacgcaaacccaaacgcaaacccgaacgcaaacccaaacgcaaacccaaacgcaaacccauaaggacuagucccuguucccagagcccacuuuuuuuucuuuuuuugaaauaaaauagccugucuuucagaucuaaaaaaaaaaaaaaaaaaaaaaaaaaaaaaaaaaaaaaaaaaaaaaaaaaaaaaaaaaaaaaaaugcaucccccccccccccccccccccccccccccccaaaggcucuuuucagagccaccagaauu

SEQ ID NO: 562 - RNA, 1257 nt, Artificial Sequence
  mRNA Design a-1 (A64-N5-C30-hSL-N5) comprising derived and/or modified sequence from Pf(3D7)__XP_001351122.1__HsALB_Pf-CSP(19-272)_L(AAY)_Pf-CSP(310-3 27)_L(AAY)_Pf-CSP(346-375) (opt6)
gggagagucccgcagucggcguccagcggcucugcuuguucgugugugugucguugcaggccuuauucaagcuuaccaugaaauggguaacauuuauaucacuccuauuccuuuuuucgucagcauacucacuauuccaagaauaucaaugcuacggaucaagcuccaacacaagaguacuaaacgaacuaaacuacgacaacgcaggaacaaaccuauacaacgaacuagaaaugaacuacuacggaaaacaagaaaacugguacucacuaaaaaaaaacagccgaagcuuaggagaaaaugacgacggaaacaacgaagacaacgaaaaauuacgcaaacccaaacacaaaaaacugaaacaaccagcagacggaaacccagacccaaacgcaaacccaaacguagacccaaacgcaaacccaaacguagacccaaacgcaaacccaaacguagacccaaacgcaaacccaaacgcgaacccaaacgccaacccaaacgcaaacccaaacgcaaacccaaacgcaaacccaaacgcaaacccaaacgcaaacccaaacgccaacccgaacgcaaacccaaacgcaaacccaaacgcaaauccaaacgcaaacccaaacgcaaacccaaacgccaacccaaacgcaaacccaaacgcaaacccaaauguggacccaaacgcaaacccaaacgcaaacccaaacgcaaacccaaaugcaaacccaaacgcaaacccaaacgcaaacccaaacgcaaacccaaacgcaaacccaaaugcaaacccaaacgcaaauccaaacgcaaacccaaacgcaaacccaaacgcaaacccaaacgcaaacccuaacgcaaacccaaacgcaaacccaaacgccaaccccaaugcaaacccagcagcauacgaaccaucagacaaacacauaaaagaauaccuaaacaaaauacaaaacucacucgcagcauauauaaagccaggaagcgccaacaaaccaaaagacgaacuagauuacgcaaacgacauagaaaaaaaaaucuguaaaauggaaaaaugcucauaaggacuagucccuguucccagagcccacuuuuuuuucuuuuuuugaaauaaaauagccugucuuucagaucuaaaaaaaaaaaaaaaaaaaaaaaaaaaaaaaaaaaaaaaaaaaaaaaaaaaaaaaaaaaaaaaaugcaucccccccccccccccccccccccccccccccaaaggcucuuuucagagccaccagaauu

SEQ ID NO: 563 - RNA, 1218 nt, Artificial Sequence
  mRNA Design a-1 (A64-N5-C30-hSL-N5) comprising derived and/or modified sequence from Pf(3D7)__XP_001351122.1__HsALB_Pf-CSP(19-272)_L(AAY)_Pf-CSP(346-3 65)_L(AAY)_P2 (opt6)
gggagagucccgcagucggcguccagcggcucugcuuguucgugugugugucguugcaggccuuauucaagcuuaccaugaaauggguaacauucauaucacuauuauuccuuuucucaucagcuuacucacuauuccaagaauaccaaugcuacggaucauccucaaacacaagaguacuaaacgaacuaaacuacgacaacgccggaaccaaccuauacaacgaacucgaaaugaacuacuacggaaaacaagaaaacugguacucacuaaaaaaaaacagccgaucccuaggagaaaacgacgacggaaauaacgaagacaaugaaaaauuaagaaaaccaaaacacaaaaaacuaaaacaaccagcagacggaaacccagacccaaacgcaaacccaaacguagauccaaacgcaaacccaaacguagacccaaacgcaaacccaaacguagacccaaacgcuaacccaaacgcaaacccaaacgcaaacccaaacgcaaacccaaacgcaaacccaaacgcaaacccgaacgcaaaccccaacgcaaacccaaacgcaaacccaaacgcaaaccccaacgcaaacccaaacgcaaacccgaacgcaaacccaaacgcaaacccaaacgcaaacccaaacgcaaacccaaacgcaaacccaaacguagacccaaacgccaacccaaacgcaaacccaaacgcaaacccaaacgcaaacccaaacgcaaacccaaacgcaaacccaaacgcaaacccaaacgcaaacccaaacgcaaacccaaacgcaaaccccaacgcaaacccaaaugcaaacccaaacgcaaacccaaaugcaaaccccaacgcaaacccaaaugccaauccaaacgcaaacccaaacgcaaacccagccgcauacauaaaaccaggauccgcaaacaaaccaaaagacgaacuagacuacgcaaacgacauagaagcagcauaccaauauauaaaagccaacuccaaauucauagguauaacagaacucuaaggacuagucccuguucccagagcccacuuuuuuuucuuuuuuugaaauaaaauagccugucuuucagaucuaaaaaaaaaaaaaaaaaaaaaaaaaaaaaaaaaaaaaaaaaaaaaaaaaaaaaaaaaaaaaaaaugcaucccccccccccccccccccccccccccccccaaaggcucuuuucagagccaccagaauu

SEQ ID NO: 564 - RNA, 1212 nt, Artificial Sequence
  mRNA Design a-1 (A64-N5-C30-hSL-N5) comprising derived and/or modified sequence from Pf(3D7)__XP_001351122.1__HsALB_Pf-CSP(19-272)_L(AAY)_Pf-CSP(346-3 65)_L(AAY)_PADRE (opt6)
gggagagucccgcagucggcguccagcggcucugcuuguucgugugugugucguugcaggccuuauucaagcuuaccaugaaauggguaaccuucauaucacuacuauucuuauucucaucagcauacucacucuuccaagaauaccaaugcuacggcucaagcucaaacacaagaguacuaaacgaauuaaacuaugacaacgccggaacaaaccuauacaaugaauuagaaaugaacuacuacggcaaacaagaaaacugguacucacucaaaaaaaacuccagaaguuuaggagaaaaugacgacggaaacaaugaagacaaugaaaaauuacgaaaaccaaaacacaaaaaacuaaaacaacccgccgacggaaaccccgacccgaacgcaaacccaaacguagacccaaacgcaaacccaaacguagacccaaaugcaaacccaaacguagacccaaacgcaaacccaaacgcaaacccaaacgcaaauccaaacgcaaacccaaaugcaaacccaaaugcaaauccaaacgcaaaccccaacgcaaacccaaacgcaaacccaaaugcaaauccaaacgccaacccaaaugcaaacccaaacgcaaauccaaacgcaaacccaaacgcaaauccaaacgcaaacccaaaugcaaacccaaacguagauccaaacgcaaacccaaacgccaacccaaacgcaaacccgaacgcaaacccaaacgcaaacccaaacgccaacccaaacgccaacccaaacgccaacccaaacgcaaacccaaacgcaaacccaaacgcaaacccaaacgcaaacccaaaugcaaacccuaacgcaaacccaaacgcaaacccaaacgcaaacccaaacgccaacccaaacgcaaauccagcagcauacauaaaaccaggaucagcaaacaaaccaaaagaugaacuagacuacgcaaaugacaucgaagcagccuacgcuaaauucguagcagccuggacacuaaaagcagcagccuaaggacuagucccuguucccagagcccacuuuuuuuucuuuuuuugaaauaaaauagccugucuuucagaucuaaaaaaaaaaaaaaaaaaaaaaaaaaaaaaaaaaaaaaaaaaaaaaaaaaaaaaaaaaaaaaaaugcaucccccccccccccccccccccccccccccccaaaggcucuuuucagagccaccagaauu

SEQ ID NO: 565 - RNA, 1269 nt, Artificial Sequence
  mRNA Design a-1 (A64-N5-C30-hSL-N5) comprising derived and/or modified sequence from Pf(3D7)__XP_001351122.1__HsALB_Pf-CSP(19-272)_L(G4S)_Pf-CSP(310-3 27)_L(G4S)_Pf-CSP(346-375) (opt6)
gggagagucccgcagucggcguccagcggcucugcuuguucgugugugugucguugcaggccuuauucaagcuuaccaugaaauggguaaccuucaucucacuacuauuccuauucucaagcgcauacucacucuuucaagaauaccaaugcuacggcucaagcucaaacacacgaguacuaaacgaacuaaacuacgacaacgcaggaacaaaccuauauaacgaacucgaaaugaacuacuacggcaaacaagaaaauugguacucacuaaaaaaaaacagcagaagcuuaggagaaaacgacgacggaaacaacgaagauaacgaaaaacuaagaaaaccaaaacacaaaaaacuaaaacaacccgcagacggaaacccagacccaaacgcaaauccaaauguagacccgaacgcaaacccaaacguagacccaaaugcgaacccaaacgucgacccaaacgcaaacccaaaugcaaacccaaaugcgaacccaaacgcaaacccaaacgcaaauccaaacgcaaauccaaaugcaaacccaaacgcgaauccaaacgcaaacccaaacgcaaacccaaacgcaaacccaaacgcaaacccaaacgcaaacccaaacgcaaacccgaacgcuaacccaaacgcaaacccaaacgcaaacccaaacguagauccaaacgcgaacccaaacgcaaacccaaaugcaaacccaaacgcaaacccaaacgcaaacccaaacgcaaacccaaacgcaaacccaaacgcaaacccaaacgcgaacccaaacgcaaauccaaaugcaaacccaaacgcaaacccaaacgcaaacccaaacgcaaacccaaaugcaaacccaaacgcaaacccaaaugcaaacccaaacgcaaacccaggaggaggaggaucagaacccucagacaaacacauaaaagaauaccuaaacaaaauacaaaacucacuaggaggaggaggaucgaucaaaccaggaagcgcaaacaaaccaaaagacgaacucgacuacgcaaacgauauagaaaaaaaaauaugcaaaauggaaaaaugcucguaaggacuagucccuguucccagagcccacuuuuuuuucuuuuuuugaaauaaaauagccugucuuucagaucuaaaaaaaaaaaaaaaaaaaaaaaaaaaaaaaaaaaaaaaaaaaaaaaaaaaaaaaaaaaaaaaaugcaucccccccccccccccccccccccccccccccaaaggcucuuuucagagccaccagaauu

SEQ ID NO: 566 - RNA, 1254 nt, Artificial Sequence
  mRNA Design a-1 (A64-N5-C30-hSL-N5) comprising derived and/or modified sequence from Pf(3D7)__XP_001351122.1__HsALB_Pf-CSP(19-272)_L(G4S)_Pf-CSP(310-3 27)_Pf-CSP(346-375) (opt6)
gggagagucccgcagucggcguccagcggcucugcuuguucgugugugugucguugcaggccuuauucaagcuuaccaugaaauggguaacauucauaucacuccuauuccuauucuccucagcauacucccucuuccaagaauaccaaugcuacggcucaagcucaaacacacgaguacuaaacgaacuaaauuacgacaacgccggaacaaaccuauauaaugaacuagaaaugaauuacuacggaaaacaagaaaacugguacucacuuaaaaaaaacucaagaucauuaggagaaaacgacgacggcaacaacgaagacaacgaaaaacuaagaaaaccaaaacacaaaaaacuaaaacaacccgcagacggaaauccagauccaaacgcaaacccaaacguagacccaaacgcaaacccaaacguagacccaaacgcaaacccaaacgucgacccaaacgccaacccaaacgcaaacccaaacgcaaacccaaacgcaaacccaaacgccaacccaaacgcaaacccaaacgcaaacccaaacgcaaacccaaacgcaaacccaaacgcaaacccaaacgcaaacccgaacgcaaacccaaacgcaaauccuaacgcaaacccaaacgcaaacccaaacgcaaauccgaacgcaaacccaaacguagacccaaacgcaaacccaaacgcaaacccaaacgcaaacccaaacgcaaacccaaacgcaaacccuaacgcaaacccaaaugcaaacccaaacgcgaacccaaaugcaaacccaaaugcaaacccaaacgcaaacccaaacgcaaacccaaacgcaaauccaaacgcaaauccaaacgcaaacccaaacgcaaacccaaacgcaaacccaaacgccaacccaggaggagguggaagcgaaccauccgacaaacacauaaaagaauaccuaaacaaaauacaaaacucacuaauaaaacccggcucagcaaacaaaccaaaagacgaacuagacuacgccaacgacauagaaaaaaaaauauguaaaauggaaaaaugcucauaaggacuagucccuguucccagagcccacuuuuuuuucuuuuuuugaaauaaaauagccugucuuucagaucuaaaaaaaaaaaaaaaaaaaaaaaaaaaaaaaaaaaaaaaaaaaaaaaaaaaaaaaaaaaaaaaaugcaucccccccccccccccccccccccccccccccaaaggcucuuuucagagccaccagaauu

SEQ ID NO: 567 - RNA, 1254 nt, Artificial Sequence
  mRNA Design a-1 (A64-N5-C30-hSL-N5) comprising derived and/or modified sequence from Pf(3D7)__XP_001351122.1__HsALB_Pf-CSP(19-325) (opt6)
gggagagucccgcagucggcguccagcggcucugcuuguucgugugugugucguugcaggccuuauucaagcuuaccaugaaauggguaacauucauaucacuccuauuccuauucucaagcgcauacucauuauuccaagaauaccaaugcuacggaucaucaucuaacacaagaguacucaacgaacuaaacuacgacaacgcaggaacuaaucucuacaacgaacuagaaaugaacuacuacggaaaacaagaaaacugguauucacuaaaaaaaaacagccgaucauuaggagaaaacgacgacggcaacaacgaagacaacgaaaaacuacgaaaaccaaaacacaaaaaauuaaaacagccagccgacggaaacccagacccaaacgcaaacccaaacguagacccaaacgcaaacccaaacguagacccaaacgcaaacccaaacguagacccaaacgcaaacccaaacgcaaacccaaacgcaaauccaaacgcaaacccaaacgccaacccaaacgcaaacccaaacgcaaaccccaacgcaaacccaaacgcaaacccaaacgcaaacccaaaugccaacccaaacgcaaacccaaacgcaaacccaaacgcaaacccaaacgcaaacccaaaugcaaacccaaacgcaaacccaaacguagacccaaacgcaaacccaaaugcaaacccaaacgcaaaccccaacgcaaacccaaacgcaaacccaaacgcaaacccaaacgcaaacccaaacgccaacccaaacgcaaacccaaacgcaaacccaaacgcaaacccaaacgcaaacccaaacgcaaauccaaacgcaaacccaaacgcaaacccaaacgcaaacccaaacgcaaacccaaacgcaaacccaaauaaaaacaaucaaggaaacggacaaggacacaacaugccaaacgauccaaaucgcaacguagacgaaaacgcaaacgcaaacagcgcagucaaaaacaacaacaacgaagaaccaucagacaaacacauaaaagaauaccuaaauaaaauacaaaacuagggacuagucccuguucccagagcccacuuuuuuuucuuuuuuugaaauaaaauagccugucuuucagaucuaaaaaaaaaaaaaaaaaaaaaaaaaaaaaaaaaaaaaaaaaaaaaaaaaaaaaaaaaaaaaaaaugcaucccccccccccccccccccccccccccccccaaaggcucuuuucagagccaccagaauu

SEQ ID NO: 568 - RNA, 1431 nt, Artificial Sequence
  mRNA Design a-1 (A64-N5-C30-hSL-N5) comprising derived and/or modified sequence from Pf(3D7)__XP_001351122.1__HsALB_Pf-CSP(19-384) (opt6)
gggagagucccgcagucggcguccagcggcucugcuuguucgugugugugucguugcaggccuuauucaagcuuaccaugaaauggguaaccuuuauaucacucuuauuccuauuuucaucagcauacucacucuuccaagaauaucaaugcuacggaucaucaucaaacacaagaguccucaaugaauuaaacuaugacaaugcaggaaccaaccuauacaacgaauuagaaaugaacuacuacggcaaacaagaaaacugguacucacucaaaaaaaacucaagauccuuaggagaaaaugaugacggaaacaacgaagacaacgaaaaacuccgaaaaccaaaacacaaaaaacuaaaacaacccgccgacggaaacccagaccccaacgcaaacccaaauguagaccccaacgcaaacccaaacguagacccaaacgcaaacccaaacguagacccaaacgcaaauccaaacgccaacccaaacgcaaacccaaacgccaacccaaacgcaaacccaaacgcaaacccaaacgcaaacccaaacgcaaacccaaaugcaaacccaaaugcaaacccaaacgcaaacccaaacgcaaacccaaacgcaaacccaaacgcaaacccaaaugcaaacccaaacgcaaacccaaacgcaaacccaaacguagacccaaaugcaaacccaaacgcaaacccaaacgcaaauccaaaugcaaauccaaacgcaaauccaaacgcaaacccaaacgcaaacccaaacgcaaacccaaacgcaaauccaaaugcaaacccaaacgcaaacccaaacgcaaacccaaacgcuaacccaaacgccaauccaaacgcaaacccaaacgcaaacccuaaugcaaacccaaacgccaacccaaauaaaaauaaccaaggaaacggacaaggacacaacaugccaaacgacccaaacagaaacgucgaugaaaacgcaaacgcaaauuccgcagucaaaaacaacaacaacgaagaaccaucagacaaacacauaaaagaauaccucaacaaaauacaaaacucccuaucaacagaauggucacccugcuccguuacaugcgguaacggcauacaaguaagaauaaaaccaggaucagcuaacaaacccaaagacgaacuagacuacgccaacgacauagaaaaaaaaauaugcaaaauggaaaaaugcuccucaguauucaacguaguaaacucaucauaaggacuagucccuguucccagagcccacuuuuuuuucuuuuuuugaaauaaaauagccugucuuucagaucuaaaaaaaaaaaaaaaaaaaaaaaaaaaaaaaaaaaaaaaaaaaaaaaaaaaaaaaaaaaaaaaaugcaucccccccccccccccccccccccccccccccaaaggcucuuuucagagccaccagaauu

SEQ ID NO: 569 - RNA, 1569 nt, Artificial Sequence
  mRNA Design a-1 (A64-N5-C30-hSL-N5) comprising derived and/or modified sequence from Pf(3D7)__XP_001351122.1__HsALB_Pf-CSP(19-384)_TM domain HA (opt6)
gggagagucccgcagucggcguccagcggcucugcuuguucgugugugugucguugcaggccuuauucaagcuuaccaugaaauggguaacauuuauaucacuacuuuuccuauucucaucagcauacucacucuuccaagaauaucaaugcuauggauccucaucaaacacaagaguacucaacgaauuaaacuacgauaaugccggaacaaaccuauauaacgaacuagaaaugaacuacuacggaaaacaagaaaauugguacucauuaaaaaaaaacuccagaucccuuggagaaaacgacgauggaaacaacgaagauaacgaaaaauuaagaaaaccaaaacacaaaaaauugaaacaaccagcagacgguaacccagacccaaacgccaacccaaacguagacccaaacgcgaauccaaacgucgacccaaacgcaaaucccaacguagacccaaaugcaaauccaaaugccaauccaaacgcaaacccaaacgcaaacccaaaugcaaacccaaacgccaacccaaacgcaaauccaaacgcaaacccaaacgcaaacccaaacgccaacccaaacgccaaccccaaugcaaacccaaaugcaaacccaaacgcaaacccaaacgcaaauccaaacgcaaacccaaacgccaacccaaacguagacccaaacgcaaauccaaacgcaaacccaaacgccaauccaaacgcaaacccaaacgccaacccaaaugcaaaucccaacgcaaacccaaacgcaaauccaaaugcaaaccccaacgcaaauccaaacgcaaacccaaacgcaaauccaaacgcaaauccaaaugcaaacccaaacgcaaacccuaaugcaaacccaaacgcaaacccaaacgccaacccaaacaaaaacaaccaaggaaacggacaaggucacaauaugccaaaugacccaaaccgaaacguagacgaaaacgcaaaugccaauagcgcaguaaaaaacaauaacaacgaagaaccuucagauaaacacauaaaagaauaccuaaacaaaauacaaaacucccuaucaacagaauggucaccuuguucagucacauguggaaacggaauacaaguaagaauaaaaccaggaucagcaaacaaaccaaaagacgaacuagauuacgcaaacgauauagaaaaaaaaauauguaaaauggaaaaaugcuccucagucuucaacguagucaacaguuccaaacuagaaucaaccagaaucuaccaaauacuagcaauauauuccacaguagcaagcucacucguauuaguagucucccuaggagcaauaucauucuggaugugcucaaacggaagcuuacaaugccgaauauguauauaaggacuagucccuguucccagagcccacuuuuuuuucuuuuuuugaaauaaaauagccugucuuucagaucuaaaaaaaaaaaaaaaaaaaaaaaaaaaaaaaaaaaaaaaaaaaaaaaaaaaaaaaaaaaaaaaaugcaucccccccccccccccccccccccccccccccaaaggcucuuuucagagccaccagaauu

SEQ ID NO: 570 - RNA, 1281 nt, Artificial Sequence
  mRNA Design a-1 (A64-N5-C30-hSL-N5) comprising derived and/or modified sequence from Pf(3D7)__XP_001351122.1__HsALB_Pf-CSP(82-397) (opt6)
gggagagucccgcagucggcguccagcggcucugcuuguucgugugugugucguugcaggccuuauucaagcuuaccaugaaauggguaacauucauaucacuacuauuccucuucaguucagccuauagcgauaacgaaaaacuaagaaaaccaaaacacaaaaaacucaaacaaccagcagacggaaacccagacccaaacgcaaacccaaacguagacccaaacgcaaacccaaacguagacccaaacgcaaauccaaacguagacccaaaugcaaaccccaacgcaaacccaaacgcaaacccaaacgcaaacccaaacgcaaacccaaaugcgaacccaaaugcaaauccaaacgcaaacccaaacgcaaacccaaacgcaaacccaaacgcuaacccaaacgcaaacccaaacgcaaacccaaaugcaaacccaaacgcaaacccaaacgcaaaccccaacgcaaacccaaacguagacccaaacgcaaacccaaacgcaaacccaaacgcaaacccaaacgccaacccaaaugccaacccaaacgcaaacccaaaugcaaaccccaacgcaaacccaaacgccaacccaaacgcaaacccaaacgcaaacccaaacgcaaaccccaaugcaaacccaaacgcaaacccaaaugcaaauccaaacgcaaacccaaacgcaaacccaaacgcaaacccaaacaaaaacaaccaaggaaacggacaaggacacaacaugccaaacgacccaaaucgaaacgucgaugaaaacgccaacgcaaacucagcaguaaaaaacaacaacaacgaagaaccaucugacaaacacauaaaagaauaccuaaacaaaauacaaaacucauuauccaccgaauggucaccauguucaguaacaugcggcaacggaauacaagucagaauaaaaccaggcucagcaaauaaaccaaaagacgaacuagacuacgcaaacgacauagaaaaaaaaauaugcaaaauggaaaaauguucaucagucuucaacguaguaaacucaucaauaggacucauaaugguacuaucauuccuauucuuaaacuaaggacuagucccuguucccagagcccacuuuuuuuucuuuuuuugaaauaaaauagccugucuuucagaucuaaaaaaaaaaaaaaaaaaaaaaaaaaaaaaaaaaaaaaaaaaaaaaaaaaaaaaaaaaaaaaaaugcaucccccccccccccccccccccccccccccccaaaggcucuuuucagagccaccagaauu

SEQ ID NO: 571 - RNA, 633 nt, Artificial Sequence
  mRNA Design a-1 (A64-N5-C30-hSL-N5) comprising derived and/or modified sequence from Pf(3D7)__XP_001351122.1__HsALB_Pf-CSP(93-192) (opt6)
gggagagucccgcagucggcguccagcggcucugcuuguucgugugugugucguugcaggccuuauucaagcuuaccaugaaauggguaacauucaucucacuacuauuccuauucucaagcgcauacucaaaacuaaaacaaccagcagacggaaacccagacccaaacgcaaacccaaacguagacccaaacgcaaacccaaacguagacccaaacgcaaacccaaacguagacccaaacgcaaacccaaacgcaaacccaaacgcaaacccaaacgcaaacccaaacgcaaacccaaacgcaaacccaaacgcaaacccaaacgcaaacccaaacgcaaacccaaacgcaaacccaaacgcaaacccaaacgcaaacccaaacgcaaacccaaacgcaaacccaaacgcaaacccaaacgcaaacccauaaggacuagucccuguucccagagcccacuuuuuuuucuuuuuuugaaauaaaauagccugucuuucagaucuaaaaaaaaaaaaaaaaaaaaaaaaaaaaaaaaaaaaaaaaaaaaaaaaaaaaaaaaaaaaaaaaugcaucccccccccccccccccccccccccccccccaaaggcucuuuucagagccaccagaauu

SEQ ID NO: 572 - RNA, 873 nt, Artificial Sequence
  mRNA Design a-1 (A64-N5-C30-hSL-N5) comprising derived and/or modified sequence from Pf(3D7)__XP_001351122.1__HsALB_Pf-CSP(93-272) (opt6)
gggagagucccgcagucggcguccagcggcucugcuuguucgugugugugucguugcaggccuuauucaagcuuaccaugaaaugggucacauucauaucacuccuauuccuauucucaagcgcauacucaaaacuaaaacaaccagcagacggaaacccagacccaaacgcaaacccaaacguagacccaaacgcaaacccaaacguagacccaaacgcaaacccaaacguagacccaaacgcaaacccaaacgcaaacccaaacgccaacccaaacgcaaacccaaacgcaaacccaaacgcaaacccaaacgcaaacccaaacgcaaacccaaacgcaaacccaaacgcaaacccaaacgcaaacccaaacgcaaacccaaacgcaaauccaaacgcaaacccaaacgccaacccaaacgcaaacccaaacgcaaacccaaacguagacccaaacgcaaacccaaacgcaaacccaaacgcaaacccaaacgcaaacccaaacgcaaacccaaacgcaaacccaaacgcaaacccaaacgcaaacccaaacgcaaauccaaacgcaaacccaaacgcaaacccaaacgcaaacccaaacgcaaacccaaacgcaaacccaaacgcaaacccaaacgcaaacccaaacgcaaacccaaacgcaaacccauaaggacuagucccuguucccagagcccacuuuuuuuucuuuuuuugaaauaaaauagccugucuuucagaucuaaaaaaaaaaaaaaaaaaaaaaaaaaaaaaaaaaaaaaaaaaaaaaaaaaaaaaaaaaaaaaaaugcaucccccccccccccccccccccccccccccccaaaggcucuuuucagagccaccagaauu

SEQ ID NO: 573 - RNA, 1248 nt, Artificial Sequence
  mRNA Design a-1 (A64-N5-C30-hSL-N5) comprising derived and/or modified sequence from Pf(3D7)__XP_001351122.1__HsALB_Pf-CSP(93-397) (opt6)
gggagagucccgcagucggcguccagcggcucugcuuguucgugugugugucguugcaggccuuauucaagcuuaccaugaaauggguaacauucauaucacuccuauuccuauucucaucagcauacucaaaacuaaaacaacccgcagacggaaacccagacccaaacgccaacccaaacguagacccaaacgcaaacccgaacguagacccaaacgcaaaccccaacguagacccaaacgcaaacccaaaugcaaacccaaacgcaaacccaaacgcaaacccaaacgcaaacccaaacgcaaacccaaacgcaaacccaaacgcaaacccaaacgcaaacccaaacgcgaaucccaacgcaaauccaaacgcaaacccaaacgcaaauccaaacgcaaacccgaacgcaaacccaaacgcaaacccaaacgcaaacccaaacguagauccaaacgcaaauccaaacgcaaacccaaacgcaaauccaaacgcaaacccaaacgcaaacccaaacgcaaaccccaacgcaaacccaaacgcaaacccaaacgcaaacccaaacgcaaauccaaacgccaacccaaacgcaaacccaaacgcaaacccaaacgcgaacccaaacgcgaacccaaacgcaaacccaaacgcaaacccaaacgcaaacccaaacaaaaacaaccaagggaacggacaaggacacaacaugccaaacgauccaaacagaaacguagacgaaaacgcaaacgcaaacucagcaguaaaaaacaacaacaacgaagaaccaucagacaaacacauaaaagaauaccuaaacaaaauacaaaacucacucucaacagaauggucaccaugcaguguaacaugcggaaauggaauacaaguacguauaaaaccaggaucagcaaacaaaccaaaagacgaauuagacuacgccaacgauauagaaaaaaaaauaugcaaaauggaaaaaugcagcucagucuucaacguagucaacagcucaauaggacuaauaaugguccucucauucuuauuucuaaacugaggacuagucccuguucccagagcccacuuuuuuuucuuuuuuugaaauaaaauagccugucuuucagaucuaaaaaaaaaaaaaaaaaaaaaaaaaaaaaaaaaaaaaaaaaaaaaaaaaaaaaaaaaaaaaaaaugcaucccccccccccccccccccccccccccccccaaaggcucuuuucagagccaccagaauu

SEQ ID NO: 574 - RNA, 618 nt, Artificial Sequence
  mRNA Design a-1 (A64-N5-C30-hSL-N5) comprising derived and/or modified sequence from Pf(3D7)__XP_001351122.1__HsALB_Pf-CSP(98-192) (opt6)
gggagagucccgcagucggcguccagcggcucugcuuguucgugugugugucguugcaggccuuauucaagcuuaccaugaaauggguaacauucauaagccuacuauuccuauucagcucagcauacagcgcagacggaaacccagacccaaacgcaaacccaaacguagacccaaacgcaaacccaaacguagacccaaacgcaaacccaaacguagacccaaacgcaaacccaaacgcaaacccaaacgcaaacccaaacgcaaacccaaacgcaaacccaaacgcaaacccaaacgcaaacccaaacgcaaacccaaacgcaaacccaaacgcaaacccaaacgcaaacccaaacgcaaacccaaacgcaaacccaaacgcaaacccaaacgcaaacccaaacgcaaacccauaaggacuagucccuguucccagagcccacuuuuuuuucuuuuuuugaaauaaaauagccugucuuucagaucuaaaaaaaaaaaaaaaaaaaaaaaaaaaaaaaaaaaaaaaaaaaaaaaaaaaaaaaaaaaaaaaaugcaucccccccccccccccccccccccccccccccaaaggcucuuuucagagccaccagaauu

SEQ ID NO: 575 - RNA, 858 nt, Artificial Sequence
  mRNA Design a-1 (A64-N5-C30-hSL-N5) comprising derived and/or modified sequence from Pf(3D7)__XP_001351122.1__HsALB_Pf-CSP(98-272) (opt6)
gggagagucccgcagucggcguccagcggcucugcuuguucgugugugugucguugcaggccuuauucaagcuuaccaugaaauggguaacauucauaucacuacuauuccuauucagcucagccuacagcgcagacggaaacccagacccaaacgcaaacccaaacguagacccaaacgcaaacccaaacgucgacccaaacgcaaacccaaacguagacccaaacgcaaacccaaacgcaaacccaaacgcaaacccaaacgcaaacccaaacgcaaacccaaacgcaaacccaaacgcaaacccaaacgcaaacccaaacgcaaacccaaacgcaaacccaaacgcaaacccaaacgcaaacccaaacgcaaacccaaacgcaaacccaaacgcaaacccaaacgcaaacccaaacgcaaacccaaacguagacccaaaugcaaacccaaacgcaaacccaaacgcaaacccaaacgcaaacccaaacgcaaacccaaacgcaaacccaaacgcaaacccaaacgcaaacccaaacgcaaacccaaacgcaaacccaaacgcaaacccaaacgcgaacccaaacgcaaacccaaacgcaaacccaaacgcaaacccaaacgcaaacccaaaugcaaacccaaacgcaaacccauaaggacuagucccuguucccagagcccacuuuuuuuucuuuuuuugaaauaaaauagccugucuuucagaucuaaaaaaaaaaaaaaaaaaaaaaaaaaaaaaaaaaaaaaaaaaaaaaaaaaaaaaaaaaaaaaaaugcaucccccccccccccccccccccccccccccccaaaggcucuuuucagagccaccagaauu

SEQ ID NO: 576 - RNA, 1164 nt, Artificial Sequence
  mRNA Design a-1 (A64-N5-C30-hSL-N5) comprising derived and/or modified sequence from Pf(3D7)__XP_001351122.1__HsALB_Pf-CSP(98-374) (opt6)
gggagagucccgcagucggcguccagcggcucugcuuguucgugugugugucguugcaggccuuauucaagcuuaccaugaaaugggucacauucauaucccuacuauuccuauucucaucagcauauucagcagauggaaacccagacccaaacgccaacccaaacguagacccaaacgcaaacccaaacguagacccaaacgcaaacccaaacguagacccaaacgcaaacccaaacgcaaacccaaacgcaaacccaaacgcaaacccaaacgcaaacccaaacgcaaacccaaacgcaaacccaaacgcaaacccaaacgcaaacccaaacgcaaacccaaacgcaaacccaaaugcaaauccaaacgcaaauccaaacgcaaacccaaacgccaacccaaacgcaaauccaaacgcaaacccaaacguagacccgaacgcaaacccgaacgcaaacccaaacgcaaacccaaaugcaaacccaaacgcaaacccaaacgccaacccaaacgcaaacccaaacgcaaacccaaaugcaaacccaaacgcaaacccaaacgccaacccaaacgcaaacccaaacgcaaacccaaacgcaaacccaaacgcaaacccaaaugcaaacccaaacgcaaacccaaacgcaaacccaaacaaaaacaaccaaggaaauggacaaggccacaacaugccaaacgacccaaacagaaacguagacgaaaacgcaaacgcaaacuccgcagucaaaaacaacaacaacgaagaaccauccgacaaacacauaaaagaauaccucaauaaaauacaaaacucacuaucaacagaaugguccccaugcucaguaacaugcggaaacggaauacaaguaagaauaaaaccaggauccgcaaacaaaccaaaagacgaacuagacuacgcaaacgauauagaaaaaaaaauaugcaaaauggaaaaaugcuaaggacuagucccuguucccagagcccacuuuuuuuucuuuuuuugaaauaaaauagccugucuuucagaucuaaaaaaaaaaaaaaaaaaaaaaaaaaaaaaaaaaaaaaaaaaaaaaaaaaaaaaaaaaaaaaaaugcaucccccccccccccccccccccccccccccccaaaggcucuuuucagagccaccagaauu

SEQ ID NO: 577 - RNA, 1233 nt, Artificial Sequence
  mRNA Design a-1 (A64-N5-C30-hSL-N5) comprising derived and/or modified sequence from Pf(3D7)__XP_001351122.1__HsALB_Pf-CSP(98-397) (opt6)
gggagagucccgcagucggcguccagcggcucugcuuguucgugugugugucguugcaggccuuauucaagcuuaccaugaaauggguaaccuucauaucauuacuauuccuuuucagcucggcauacucagcagacggcaacccagacccaaacgcaaacccaaacgucgacccaaaugcgaacccaaacguagacccaaacgcaaacccaaacguagauccaaacgcaaacccaaacgcaaacccaaacgcaaacccaaacgcaaacccaaacgccaacccaaaugcaaacccaaacgcaaaccccaacgcaaacccaaacgcaaacccaaacgcaaacccaaacgcaaaucccaacgcaaauccaaacgcaaacccaaaugcaaacccaaacgccaacccaaacgcaaacccaaacgcaaaccccaaugucgacccaaacgcaaacccaaacgcaaacccaaacgcaaacccaaacgcaaauccaaacgcaaaccccaacgcaaacccaaacgcaaacccaaacgcaaacccaaacgcaaacccaaacgcaaacccaaacgcaaacccaaacgcaaacccaaacgcaaacccaaacgcaaacccaaacgcaaauccaaacgcaaacccaaacgcaaacccaaacgcaaacccaaacaaaaacaaccaaggaaauggacaaggacacaacaugccaaaugaccccaacagaaacgucgacgaaaacgccaacgcaaacagcgcaguaaaaaacaacaacaaugaagaaccaucagacaaacacauaaaagaauaccuaaacaaaauucaaaacucacuaucaaccgaaugguccccaugcucaguaacaugcggaaacgguauacaaguacgaauaaaaccaggaucagcaaacaaaccaaaagacgaacuagacuacgcaaacgacauagaaaaaaaaauaugcaaaauggaaaaaugcucaucaguuuuuaacguagucaauagcucaaucggacucauaaugguacuaucauuucucuuccuaaauuaaggacuagucccuguucccagagcccacuuuuuuuucuuuuuuugaaauaaaauagccugucuuucagaucuaaaaaaaaaaaaaaaaaaaaaaaaaaaaaaaaaaaaaaaaaaaaaaaaaaaaaaaaaaaaaaaaugcaucccccccccccccccccccccccccccccccaaaggcucuuuucagagccaccagaauu

SEQ ID NO: 578 - RNA, 1560 nt, Artificial Sequence
  mRNA Design a-1 (A64-N5-C30-hSL-N5) comprising derived and/or modified sequence from Pf(3D7)__XP_001351122.1__HsALB_Pf-CSP(199-377)_L(PVTN)_HBsAg (opt6)
gggagagucccgcagucggcguccagcggcucugcuuguucgugugugugucguugcaggccuuauucaagcuuaccaugaaauggguaacauuuauauccuuacuauuucucuucuccucagcuuacucugacccaaacgcaaaucccaacgcaaacccaaaugcaaacccaaacgcaaauccaaacgcaaacccaaaugcuaaucccaacgcaaacccaaacgcaaaccccaaugccaacccaaacgcuaacccaaacgcaaacccaaacgccaacccaaaugcaaacccaaacgcaaacccaaacgcaaauccaaaugcaaacccaaacgcaaauccaaacgcaaacccaaacaaaaacaaccaaggaaacggacaaggccauaauaugccuaaugaccccaacagaaacguagacgaaaaugcuaacgccaacucagcaguaaaaaacaacaauaacgaagaaccaucagauaaacacauaaaagaauacuuaaacaaaauacaaaauucauuaucaacagaauggucaccaugcucagucaccugcggaaacgguauacaaguacgcauaaaaccaggcucagcaaauaaaccaaaagacgaacuagauuacgcuaacgacauagaaaaaaaaauaugcaaaauggaaaaaugcucaucaguaccaguaacaaauauggaaaacauaacaucaggauuccuaggcccacucuuaguacuacaagcaggauuuuuucuucuaacaagaaucuuaacuauaccccaaucacucgacucaugguggaccucacuaaauuuccucggaggaucuccaguaugccucggacaaaauucacaaucaccaacauccaaucacucacccaccuccugcccaccaaucugcccaggauacagauggaugugcuuacgaagauucauaauauuccuauucauacuacuucuaugcuuaauauuccuucucguccuacucgacuaucaaggaaugcucccuguaugcccacucauaccaggauccacaacaacuaacacaggacccuguaaaacaugcacaacacccgcccaaggaaauucaauguuccccucuugcugcugcacaaaaccaacagacggaaauugcacaugcauuccaauuccaucaucuugggcauuugcaaaauacuuaugggaaugggcaucaguccgauucucgugguuaucuuuacuaguaccauucguucaaugguuuguaggacuuucaccuacaguaugguuaucugcaauauggaugaugugguacuggggaccaucauuauacucaaucguaucaccauuuauaccacuacuacccauauuuuucugccuauggguauacauauaaggacuagucccuguucccagagcccacuuuuuuuucuuuuuuugaaauaaaauagccugucuuucagaucuaaaaaaaaaaaaaaaaaaaaaaaaaaaaaaaaaaaaaaaaaaaaaaaaaaaaaaaaaaaaaaaaugcaucccccccccccccccccccccccccccccccaaaggcucuuuucagagccaccagaauu

SEQ ID NO: 579 - RNA, 1299 nt, Artificial Sequence
  mRNA Design a-1 (A64-N5-C30-hSL-N5) comprising derived and/or modified sequence from Pb(ANKA)__XP_022712148.1__Pb-CSP (opt6)
gggagagucccgcagucggcguccagcggcucugcuuguucgugugugugucguugcaggccuuauucaagcuuaccaugaaaaaaugcacaaucuuaguaguagcaucacuccuacuagucaacucucuccuaccaggauacggccaaaacaaauccauacaagcccaacgcaaccuaaacgaauuaugcuauaacgaaggcaacgacaacaaauuauaccauguauuaaacucaaaaaacggaaaaauauacaacagaaacacaguaaacagacuacucgcagacgcacccgaaggaaaaaaaaaugaaaaaaaaaacgaaaaaauagaacgcaacaacaaacuuaaacaaccaccaccacccccaaaccccaacgacccaccacccccaaaccccaacgauccaccccccccaaaccccaacgacccaccacccccaaacccaaacgaccccccaccaccaaaugcaaacgacccaccaccaccaaacgcaaacgacccagcaccacccaacgccaacgaccccgcaccaccaaacgcaaacgauccagcucccccaaacgcaaacgauccagcaccaccaaacgccaacgacccaccaccaccaaacccaaacgacccagcaccaccaaacgcaaaugacccaccaccccccaacccaaacgaccccgccccaccacaagguaacaacaacccacaaccacaaccacgcccacaaccacaaccacaaccacaaccacaaccccaaccacaaccacaaccacaaccacgcccacaaccccaaccucaaccaggaggcaauaacaacaacaaaaacaauaauaacgaugacuccuacauaccaucugccgaaaaaauccucgaauucguaaaacaaauaagagacucaauaacagaagaauggucacaauguaacguaacaugcggaucaggcauacgaguaagaaaacgcaaaggaucaaacaaaaaagcagaagaccuaacacucgaagacauugacacagaaaucugcaaaauggacaaaugcucaucaauauucaacauagucucaaacucauuaggauucguaauccuacuaguacucguauucuucaacuaaggacuagucccuguucccagagcccacuuuuuuuucuuuuuuugaaauaaaauagccugucuuucagaucuaaaaaaaaaaaaaaaaaaaaaaaaaaaaaaaaaaaaaaaaaaaaaaaaaaaaaaaaaaaaaaaaugcaucccccccccccccccccccccccccccccccaaaggcucuuuucagagccaccagaauu

SEQ ID NO: 580 - RNA, 1464 nt, Artificial Sequence
  mRNA Design a-1 (A64-N5-C30-hSL-N5) comprising derived and/or modified sequence from Pb(ANKA)__XP_022712148.1__Pb-CSP_L(G4SG4)_TM domain HA (opt6)
gggagagucccgcagucggcguccagcggcucugcuuguucgugugugugucguugcaggccuuauucaagcuuaccaugaaaaaaugcaccauacuagucguagccucacuacuacuagucaauucauuauuaccaggauacggccaaaauaaauccauacaagcacaaagaaaucucaaugaauuaugcuacaacgaaggaaacgacaauaaacuauaccacguauuaaacucaaaaaauggaaaaauauacaaccgaaacaccguaaaccguuuauuagcagacgcaccagaaggaaaaaaaaacgaaaaaaaaaacgaaaaaauugaaagaaacaauaaacucaaacaaccaccucccccacccaacccaaacgacccacccccacccaacccaaacgacccaccacccccaaaccccaacgauccccccccacccaauccaaacgauccaccaccaccaaacgcaaacgacccaccaccaccaaacgcaaacgacccagcaccaccaaacgcaaacgaccccgcaccaccaaacgcaaacgauccagcaccacccaacgcaaacgacccagcacccccaaacgccaacgaccccccaccaccaaacccaaacgaccccgcaccuccaaacgcaaacgacccaccaccaccaaacccuaacgacccagcccccccacaaggaaacaacaauccucaaccacaaccacgcccucaaccacaaccccaaccucaaccacaaccacaaccacaaccccaaccacaaccacgaccacaaccucaaccucaaccaggaggcaacaacaacaacaaaaacaacaacaacgacgacucauacauaccaucagcagaaaaaauacuagaauucgucaaacaaauaagagacucuauaacugaagaauggucccaaugcaauguaacuugcggaucaggcaucagagucagaaaacgcaaaggauccaacaaaaaagccgaagaccuaacccucgaagauauagacacagaaaucugcaaaauggacaaaugcucaucaauuuucaauauagucucaaauucacuaggauucgucaucuuacuaguacuaguauucuuuaauggaggaggaggaucaggaggaggaggaaaacuagaaucaacccgaauauaccaaauacuagcaauauacucaaccguagcaucaucacucguacuagugguauccuuaggagcaauaagcuuuuggaugugcuccaacggcucucuacaaugucgaauaugcauaugaggacuagucccuguucccagagcccacuuuuuuuucuuuuuuugaaauaaaauagccugucuuucagaucuaaaaaaaaaaaaaaaaaaaaaaaaaaaaaaaaaaaaaaaaaaaaaaaaaaaaaaaaaaaaaaaaugcaucccccccccccccccccccccccccccccccaaaggcucuuuucagagccaccagaauu

SEQ ID NO: 581 - RNA, 1284 nt, Artificial Sequence
  mRNA Design a-1 (A64-N5-C30-hSL-N5) comprising derived and/or modified sequence from Pb(ANKA)__XP_022712148.1__HsALB_Pb-CSP(24-340) (opt6)
gggagagucccgcagucggcguccagcggcucugcuuguucgugugugugucguugcaggccuuauucaagcuuaccaugaaaugggucacauucauaucacuccuauuccuauucucaucagcauacucacaaaacaaaucaauccaagcccaacgaaaccuaaacgaacuaugcuacaacgaaggaaacgauaacaaacuauaccacguacuaaacucaaaaaacggaaaaauauacaaucgaaacacaguaaacagacucuuagcagacgcaccagaaggaaaaaaaaacgaaaaaaaaaacgaaaaaaucgaaagaaacaacaaacucaaacaaccaccaccaccaccaaacccaaacgauccaccaccccccaacccaaacgacccacccccacccaacccaaacgaccccccaccaccaaacccaaacgaccccccaccaccaaacgcaaacgauccaccaccccccaacgcaaacgauccagcaccacccaacgccaacgacccagcaccacccaaugcaaacgacccagcacccccaaacgcaaacgacccagcacccccaaacgccaacgacccaccaccaccaaacccaaaugacccagcaccaccaaacgccaacgauccaccacccccaaacccaaacgacccugcaccuccccaaggaaacaacaacccacaaccacaaccaagaccacaaccucaaccacaaccacaaccacaaccacaaccacaaccacaaccccaaccaagaccacaaccacaaccccaaccaggaggcaacaacaauaacaaaaauaacaacaacgacgacucauacaucccauccgcagaaaaaauauuagaauuuguaaaacaaauaagagacucaauaacagaagaauggucccaaugcaacguaacaugcgguucaggaauccguguacgaaaacgcaaaggcucaaacaaaaaagcagaagaccucacacucgaagacauugacacagaaauaugcaaaauggacaaaugcuccucaaucuucaacauugucucaaacucauuaggauucguaaucuuacucguacucguauucuucaacuaaggacuagucccuguucccagagcccacuuuuuuuucuuuuuuugaaauaaaauagccugucuuucagaucuaaaaaaaaaaaaaaaaaaaaaaaaaaaaaaaaaaaaaaaaaaaaaaaaaaaaaaaaaaaaaaaaugcaucccccccccccccccccccccccccccccccaaaggcucuuuucagagccaccagaauu

SEQ ID NO: 582 - RNA, 1302 nt, Artificial Sequence
  mRNA Design a-1 (A64-N5-C30-hSL-N5) comprising derived and/or modified sequence from Pb(ANKA)__XP_022712148.1__HsIns-iso1_Pb-CSP(24-340) (opt6)
gggagagucccgcagucggcguccagcggcucugcuuguucgugugugugucguugcaggccuuauucaagcuuaccauggcacuauggaugagacuacuaccacuauuagcacuacucgcacuauggggacccgacccagcagcagcacaaaacaaaucaauacaagcccaaagaaaccuaaaugaacuaugcuacaacgaaggaaacgacaacaaauuauaccacguacuaaacuccaaaaacggaaaaauuuacaacagaaacaccguaaaccgacuacuagcagacgcaccagaaggaaaaaaaaacgaaaaaaaaaacgaaaaaauagaaagaaacaauaaacuaaaacaaccaccacccccaccaaaccccaacgacccaccaccaccaaacccaaacgacccuccaccaccaaaccccaacgaccccccucccccaaacccaaacgaccccccaccaccaaacgcaaaugaccccccccccccaaaugcaaacgaccccgcaccaccaaacgcaaacgacccagccccaccaaacgccaacgauccugcaccaccaaaugcaaacgacccagcccccccaaacgcaaaugacccaccaccaccaaacccaaacgacccugcaccaccaaaugcuaacgaccccccaccaccaaauccaaacgaccccgcccccccacaaggaaacaauaacccacaaccccaacccagaccacaaccacaaccucaaccacaaccccaaccacaaccccaaccacaaccacaaccacgcccacaaccacaaccacaaccaggaggaaacaacaauaauaaaaacaacaauaacgacgacucauacauucccuccgcagaaaaaauacucgaauucguaaaacaaauaagagacucuauaacagaagaauggucccaaugcaacgucacaugcggauccggaauaagagucagaaaaagaaaaggaucaaacaaaaaagcagaagaccucacacuagaagacauagauacagaaauaugcaaaauggacaaauguucaucaauauuuaacauaguaucaaacucuuuaggauucgucauauuacucguacuaguauucuucaacuaaggacuagucccuguucccagagcccacuuuuuuuucuuuuuuugaaauaaaauagccugucuuucagaucuaaaaaaaaaaaaaaaaaaaaaaaaaaaaaaaaaaaaaaaaaaaaaaaaaaaaaaaaaaaaaaaaugcaucccccccccccccccccccccccccccccccaaaggcucuuuucagagccaccagaauu

SEQ ID NO: 583 - RNA, 1281 nt, Artificial Sequence
  mRNA Design a-1 (A64-N5-C30-hSL-N5) comprising derived and/or modified sequence from Pb(ANKA)__XP_022712148.1__HsSPARC_Pb-CSP(24-340) (opt6)
gggagagucccgcagucggcguccagcggcucugcuuguucgugugugugucguugcaggccuuauucaagcuuaccaugcgagcauggauauucuucuuacuuugucucgcaggacgcgcccuagcacaaaacaaaucaauacaagcacaaagaaaccucaacgaacuaugcuacaacgaaggaaacgacaacaaacuauaccacgucuuaaacucaaaaaacggaaaaauauacaauagaaacacaguaaaccgacuauuagcagacgcacccgaaggaaaaaaaaacgaaaaaaaaaaugaaaaaaucgaaagaaacaacaaacucaaacaaccacccccacccccaaacccuaacgacccaccaccaccaaaccccaacgauccaccaccaccaaacccaaacgacccaccaccccccaacccaaacgacccacccccacccaacgccaacgauccaccacccccaaaugcaaacgacccagccccaccaaacgcaaacgauccagcuccaccaaacgcaaacgaccccgccccaccaaacgccaacgacccagcuccaccaaacgcaaaugauccaccaccacccaacccaaacgacccugcacccccaaacgcaaacgacccaccaccaccaaacccaaacgacccagcacccccacaaggcaacaauaacccacaaccacaacccagaccacaaccccaaccgcaaccccaaccacaaccacaaccacaaccacaaccacaaccaagaccacaaccacaaccucaaccuggcggaaacaauaacaauaaaaacaacaacaacgacgacucauauauaccaucagccgaaaaaauucuagaauucguaaaacaaaucagagacucaauaacagaagaauggucacaaugcaacguaacauguggauccggaauaagaguaagaaaaagaaaaggaucaaacaaaaaagcagaagaucuaacacuagaagauauagacacagaaauaugcaaaauggacaaaugcucaucaauauucaacauagucuccaacucacucggauucguaauccuacucguacucguauucuucaacuaaggacuagucccuguucccagagcccacuuuuuuuucuuuuuuugaaauaaaauagccugucuuucagaucuaaaaaaaaaaaaaaaaaaaaaaaaaaaaaaaaaaaaaaaaaaaaaaaaaaaaaaaaaaaaaaaaugcaucccccccccccccccccccccccccccccccaaaggcucuuuucagagccaccagaauu

SEQ ID NO: 584 - RNA, 1284 nt, Artificial Sequence
  mRNA Design a-1 (A64-N5-C30-hSL-N5) comprising derived and/or modified sequence from Pb(ANKA)__XP_022712148.1__IgE_Pb-CSP(24-340) (opt6)
gggagagucccgcagucggcguccagcggcucugcuuguucgugugugugucguugcaggccuuauucaagcuuaccauggacuggacguggauauuauuuuuagucgccgcagccaccagaguacacucucaaaacaaaucaauacaagcccaaagaaaucuaaacgaauuaugcuacaacgaaggaaacgacaacaaacuauaccacguccucaacucuaaaaauggaaaaauauacaacagaaacaccguaaacagacuacuagcagacgcaccagaaggaaaaaaaaaugaaaaaaaaaacgaaaaaauagaaagaaauaacaaacucaaacaaccaccaccaccucccaacccaaacgacccaccacccccaaacccaaaugacccaccaccaccaaacccaaacgacccaccacccccaaacccaaaugacccaccaccaccaaacgcaaacgacccaccaccaccaaacgcaaacgacccagccccaccaaacgcaaacgacccagcaccaccaaacgcaaacgacccagcaccacccaaugccaaugacccagcaccaccaaacgcaaacgaccccccaccaccaaacccuaaugaccccgcaccaccaaacgcaaacgaccccccaccaccuaaccccaacgaccccgccccaccacaaggaaacaacaacccacaaccacaaccacguccacaaccacaaccacaaccccaaccacaaccccaaccacaaccacaaccacaaccccgaccacaaccacaaccacaacccggagguaacaacaacaauaaaaacaacaauaacgacgacuccuacauacccuccgcagaaaaaauacuagaauucguaaaacaaauaagagacucaauaacugaagaauggucacaauguaacguaacaugcgguucaggaauaagagucagaaaaagaaaaggaucaaacaaaaaagcagaagauuuaacacuagaagacauagacaccgaaauaugcaaaauggacaaaugcagcuccaucuucaacauaguaucaaacucacuaggauuuguaauacuacucguacuaguauucuucaauuaaggacuagucccuguucccagagcccacuuuuuuuucuuuuuuugaaauaaaauagccugucuuucagaucuaaaaaaaaaaaaaaaaaaaaaaaaaaaaaaaaaaaaaaaaaaaaaaaaaaaaaaaaaaaaaaaaugcaucccccccccccccccccccccccccccccccaaaggcucuuuucagagccaccagaauu

SEQ ID NO: 585 - RNA, 1470 nt, Artificial Sequence
  mRNA Design a-1 (A64-N5-C30-hSL-N5) comprising derived and/or modified sequence from Pf(3D7)__XP_001351122.1__Pf-CSP (opt11)
gggagagucccgcagucggcguccagcggcucugcuuguucgugugugugucguugcaggccuuauucaagcuuaccaugaugcgaaagcuugcgauccucagcgucuccucauuccuauucguagaagcacuauuccaagaauaccaaugcuacggcucauccucaaacacacgcguacucaacgaacucaacuacgacaacgcaggaacaaaccucuacaacgaacuagagaugaacuacuacggcaaacaagaaaacugguacucucucaaaaaaaacucacgaagccucggcgagaacgacgacggaaacaacgaagacaacgaaaaacuccgcaaaccaaaacacaaaaaacucaaacaacccgccgacggaaacccagacccaaacgcaaacccaaacguagacccaaacgccaaccccaacguagaccccaacgccaacccuaacgucgaccccaaugcaaaccccaacgcgaacccaaacgcaaaccccaacgcaaaccccaacgcaaacccaaacgccaaccccaacgcaaacccaaacgcaaacccuaacgccaacccaaacgccaacccaaacgccaacccaaacgcaaacccgaacgccaaccccaacgccaacccaaacgcaaacccaaacgcaaaccccaacgccaaccccaacguagaccccaacgcaaaccccaacgcaaacccaaacgccaaccccaacgccaaccccaacgccaaccccaacgccaaccccaaugccaacccaaacgcgaaccccaacgcaaacccgaacgcaaacccaaacgcgaacccaaacgcgaacccaaacgccaaccccaacgccaaccccaacgcaaacccaaacgcgaacccaaacgcaaaccccaacgccaacccaaacaaaaacaaccaaggaaacggacaaggccacaacaugccaaacgaccccaaccgcaacguagacgaaaacgccaacgccaacuccgcugucaagaacaacaacaacgaagaaccauccgacaaacacauaaaagaauaccuaaacaaaauccaaaacucccucucaaccgaauggucccccugcuccgucacaugcggaaacggcauccaaguccgaaucaaaccaggcuccgccaacaaacccaaagacgaacuggacuacgccaacgacaucgaaaaaaaaaucugcaaaauggaaaaaugcucauccgucuucaacguggucaacuccuccaucggacuaauaaugguccucuccuuccuauuccuaaacuaaggacuagucccuguucccagagcccacuuuuuuuucuuuuuuugaaauaaaauagccugucuuucagaucuaaaaaaaaaaaaaaaaaaaaaaaaaaaaaaaaaaaaaaaaaaaaaaaaaaaaaaaaaaaaaaaaugcaucccccccccccccccccccccccccccccccaaaggcucuuuucagagccaccagaauu

SEQ ID NO: 586 - RNA, 1401 nt, Artificial Sequence
  mRNA Design a-1 (A64-N5-C30-hSL-N5) comprising derived and/or modified sequence from Pf(3D7)__XP_001351122.1__Pf-CSP(1-374) (opt11)
gggagagucccgcagucggcguccagcggcucugcuuguucgugugugugucguugcaggccuuauucaagcuuaccaugaugcgcaaacucgcaauccucuccgucucaucguuccuauucguagaagcacucuuccaagaauaccaaugcuacggcucaagcuccaacacaagaguacucaacgaacucaacuacgacaaugccggaacaaaccuauacaacgagcuagaaaugaacuacuacggcaaacaagaaaacugguacucgcuaaaaaaaaacagcagaagccuaggugaaaacgacgacggaaacaacgaagacaacgaaaaacugcgcaaaccaaaacacaaaaaacuaaaacaacccgcagacggcaacccagacccaaacgcaaacccaaacguagaccccaacgccaacccaaacguagacccaaacgccaacccaaacguagacccaaacgcaaacccgaacgcaaacccaaacgcaaacccaaacgcaaacccaaacgcaaacccaaacgccaaccccaacgcaaauccaaacgcaaaccccaacgcaaaccccaacgccaacccaaacgcaaaccccaacgcgaacccaaacgccaaccccaacgccaacccaaacgcaaacccaaacgcaaacccaaacgccaaccccaacgucgacccaaacgccaacccaaacgcaaaccccaacgccaaccccaacgcaaacccaaacgccaacccgaacgcaaacccgaacgcaaacccaaacgcaaaccccaacgcaaaccccaacgcaaacccaaacgcaaaccccaacgccaaccccaacgccaaccccaacgcaaacccaaacgcaaacccgaacgcaaaccccaacgcaaaccccaacgccaaucccaacaaaaacaaccaaggcaacggacaaggacacaacaugccaaacgaccccaaccgcaacgucgacgaaaacgccaacgccaacuccgcggucaaaaacaacaacaacgaagagcccucagacaaacacauaaaagaauaccuaaacaaaauccaaaacucccucucgacagaauggucccccugcagcgucaccugcggaaacggcauacaaguacgaauaaaacccggcucagccaacaaaccaaaagacgaacuagacuacgccaacgacauagaaaaaaaaauaugcaaaauggaaaaaugcugaggacuagucccuguucccagagcccacuuuuuuuucuuuuuuugaaauaaaauagccugucuuucagaucuaaaaaaaaaaaaaaaaaaaaaaaaaaaaaaaaaaaaaaaaaaaaaaaaaaaaaaaaaaaaaaaaugcaucccccccccccccccccccccccccccccccaaaggcucuuuucagagccaccagaauu

SEQ ID NO: 587 - RNA, 1254 nt, Artificial Sequence
  mRNA Design a-1 (A64-N5-C30-hSL-N5) comprising derived and/or modified sequence from Pf(3D7)__XP_001351122.1__Pf-CSP(1-325) (opt11)
gggagagucccgcagucggcguccagcggcucugcuuguucgugugugugucguugcaggccuuauucaagcuuaccaugaugcgcaaacucgcaauccuaucaguaagcucauuccuguucguagaagcacuauuccaagaauaccaaugcuacggcucauccucaaacacaagaguacuaaacgaacuaaacuacgacaacgccggaaccaaccuauacaacgaacucgaaaugaacuacuacggcaaacaagaaaacugguacucacuaaagaaaaacagcagaagccucggcgaaaacgacgacggcaacaacgaagacaacgagaaacugagaaaaccaaaacacaagaaacuaaaacaacccgcggacgggaacccagacccaaaugcaaacccaaacgucgacccaaacgcaaacccaaacguagacccaaacgcaaaccccaacguagaccccaacgcaaacccaaacgcaaacccaaacgcaaacccaaacgcaaacccaaacgcaaaccccaacgcaaacccaaacgcaaacccaaacgcaaaccccaacgccaacccaaacgccaaccccaacgcaaacccaaacgcaaacccaaacgcaaaccccaacgccaacccgaacgcaaacccaaacgcaaacccaaacgcaaaccccaacguagacccaaacgcaaacccaaacgccaaccccaacgcaaacccaaacgcaaacccgaacgcaaaccccaacgcaaaccccaacgcaaacccaaacgcaaaccccaacgcaaauccaaacgcaaacccaaacgcaaacccaaacgccaacccaaacgcaaaucccaacgcaaacccaaacgcaaaccccaacgcaaacccaaacgcaaacccaaacgcaaacccaaacaaaaacaaccaaggaaacggccaaggacacaacaugccaaacgacccaaaccgaaacguagacgaaaacgccaacgccaacagcgcagucaaaaacaacaauaaugaagaacccuccgacaaacacauaaaagaauaccuaaacaaaauccaaaacugaggacuagucccuguucccagagcccacuuuuuuuucuuuuuuugaaauaaaauagccugucuuucagaucuaaaaaaaaaaaaaaaaaaaaaaaaaaaaaaaaaaaaaaaaaaaaaaaaaaaaaaaaaaaaaaaaugcaucccccccccccccccccccccccccccccccaaaggcucuuuucagagccaccagaauu

SEQ ID NO: 588 - RNA, 1470 nt, Artificial Sequence
  mRNA Design a-1 (A64-N5-C30-hSL-N5) comprising derived and/or modified sequence from Pf(3D7)__XP_001351122.1__HsALB_Pf-CSP(19-397) (opt11)
gggagagucccgcagucggcguccagcggcucugcuuguucgugugugugucguugcaggccuuauucaagcuuaccaugaaaugggucaccuucauaucccuccuauuccucuucucaucagccuacucccucuuccaggaauaccaaugcuacggaucguccucaaacacuagaguacucaaugaauuaaacuacgacaacgccggcaccaaccucuacaacgaacucgaaaugaacuacuacggaaaacaagaaaacugguacucacucaaaaaaaacucucgaucccucggcgaaaacgacgacggcaacaacgaagacaacgagaaacuacgcaaaccaaaacacaaaaaauuaaaacaacccgccgacggcaaccccgaccccaacgccaaccccaacguagaccccaacgcgaaccccaacgucgacccaaacgccaaccccaacguggaccccaacgccaacccaaacgccaaccccaacgccaacccaaacgcaaaccccaacgccaacccaaacgccaaccccaacgcaaacccaaacgcgaacccaaacgcaaacccaaacgccaacccaaacgcaaacccaaacgcgaacccaaacgccaacccaaacgccaaccccaacgcaaacccaaacgccaacccaaacgccaacccaaacguagacccaaacgcgaaccccaacgcuaacccaaacgcaaacccaaacgccaacccaaacgccaacccuaacgcaaacccaaacgccaaccccaacgccaaccccaacgccaaccccaacgcaaacccaaacgccaacccaaacgccaaccccaacgccaacccaaacgcaaacccaaacgcaaacccaaacgcaaaccccaacgccaacccaaacgccaacccaaacaaaaauaaccaaggcaaugggcaaggccacaacaugccaaacgaccccaaccgcaaugucgacgaaaacgccaacgccaacucugcaguaaaaaacaauaacaacgaagaacccucagacaaacacaucaaagaauaccucaacaagauccaaaauucccucuccacagaauggucccccugcagcguaaccugcggcaacggcauccaaguccgcaucaaacccggcuccgccaacaaaccgaaagacgaacuagacuacgccaacgacauagaaaaaaaaaucugcaaaauggaaaaaugcagcuccgucuucaacgucgucaacagcuccaucggccucaucaugguccucuccuuccuguuccucaacuaaggacuagucccuguucccagagcccacuuuuuuuucuuuuuuugaaauaaaauagccugucuuucagaucuaaaaaaaaaaaaaaaaaaaaaaaaaaaaaaaaaaaaaaaaaaaaaaaaaaaaaaaaaaaaaaaaugcaucccccccccccccccccccccccccccccccaaaggcucuuuucagagccaccagaauu

SEQ ID NO: 589 - RNA, 1488 nt, Artificial Sequence
  mRNA Design a-1 (A64-N5-C30-hSL-N5) comprising derived and/or modified sequence from Pf(3D7)__XP_001351122.1__HsIns-iso1_Pf-CSP(19-397) (opt11)
gggagagucccgcagucggcguccagcggcucugcuuguucgugugugugucguugcaggccuuauucaagcuuaccauggcacucuggaugagacuccucccccuccucgcacuccucgcccuauggggcccagacccagcggcagcccucuuccaagaauaccaaugcuacggcucauccuccaacacccgaguccucaaugaacuaaacuacgacaacgccggcaccaaccuauacaacgaacuagaaaugaacuacuacggcaaacaagaaaacugguacucccucaaaaaaaauucacgcucccuaggugagaacgacgacggaaacaacgaagacaacgaaaaacuccgaaaacccaaacacaaaaaacuaaaacaaccagcagacggcaaccccgaccccaacgcaaaccccaacguagacccaaacgcgaaccccaacgucgauccaaacgccaacccaaacguugaccccaacgcgaaccccaacgcaaacccaaacgcaaacccuaacgcgaaccccaacgcaaaccccaacgccaaccccaacgccaaccccaacgccaacccaaacgcaaaccccaacgccaaccccaacgcaaacccaaacgcaaacccgaacgcaaaccccaacgccaacccaaacgcaaacccaaacgccaacccaaacgcaaaccccaacguagacccaaacgccaaucccaacgcgaaccccaacgcaaacccaaacgcgaacccaaacgccaacccaaacgcaaacccgaacgccaacccaaacgccaaccccaacgcaaaccccaacgcaaacccaaacgccaacccaaacgcaaacccaaacgcaaaccccaacgccaaccccaacgcaaacccaaaugccaaccccaacgccaaccccaacgcaaacccaaacaaaaacaaccaaggaaacggccaaggccacaacaugccgaacgaccccaaccgaaacgucgacgaaaacgcaaacgccaacucagcggucaaaaacaacaacaacgaagaacccucagacaaacacaucaaagaauaccuaaacaagauccagaacucucucucaacagaauggucccccugcuccguaacaugcggcaacggcauccaaguacgaaucaaaccgggaucagccaauaaacccaaagacgaacucgacuacgccaacgacaucgaaaaaaaaauaugcaaaauggaaaaaugcagcucagucuucaacguagucaacagcuccauaggccucaucaugguacucuccuuccuguuccuaaacuaaggacuagucccuguucccagagcccacuuuuuuuucuuuuuuugaaauaaaauagccugucuuucagaucuaaaaaaaaaaaaaaaaaaaaaaaaaaaaaaaaaaaaaaaaaaaaaaaaaaaaaaaaaaaaaaaaugcaucccccccccccccccccccccccccccccccaaaggcucuuuucagagccaccagaauu

SEQ ID NO: 590 - RNA, 1467 nt, Artificial Sequence
  mRNA Design a-1 (A64-N5-C30-hSL-N5) comprising derived and/or modified sequence from Pf(3D7)__XP_001351122.1__HsSPARC_Pf-CSP(19-397) (opt11)
gggagagucccgcagucggcguccagcggcucugcuuguucgugugugugucguugcaggccuuauucaagcuuaccaugcgcgccuggauauucuuccuccuaugccuagcaggacgcgcccucgcacucuuccaagaauaccaaugcuacggcucauccucaaacacccgcguacuuaacgaacuaaacuacgacaacgccggaaccaaccuauacaacgaacucgaaaugaacuacuacgguaaacaagaaaacugguacucccucaaaaaaaacagccgaagccuaggagaaaacgacgacggaaacaacgaagacaacgaaaaacugcgcaaacccaaacacaaaaaacucaaacaacccgcagacgggaacccagacccaaacgcaaacccaaacguggacccaaacgccaacccuaacguagaccccaacgcaaaccccaacgucgacccuaaugcaaacccaaacgccaaccccaacgcgaacccaaacgcaaaccccaacgcuaacccgaacgccaaccccaacgccaacccgaacgcaaacccaaacgcaaacccaaacgcgaacccaaacgcaaacccaaacgccaaccccaacgcgaacccaaacgccaauccaaacgccaacccaaacgcaaacccaaacgccaaccccaacguagacccaaacgccaacccaaacgcgaacccaaacgcaaaccccaacgcaaacccaaacgcaaacccaaacgccaacccuaacgcaaacccaaacgccaaccccaacgccaacccaaacgcaaacccaaacgccaacccaaacgccaaccccaacgcaaacccgaacgcaaaccccaacgcaaacccaaacgcaaacccaaacgcgaacccgaacgccaacccaaauaagaacaaccaaggaaacggacaaggccacaacaugccaaacgaccccaaccgcaacgucgacgaaaacgcaaaugccaacuccgcagucaaaaacaacaauaacgaagaacccucggacaaacacaucaaagaauaccucaacaagauccaaaacucacucuccaccgaauggucacccugcagcguaacuugcggcaacggcauccaaguccgcauaaaaccaggcuccgcaaacaaacccaaagacgaacucgacuaugccaacgacaucgaaaaaaaaauaugcaaaauggaaaaaugcagcucagucuucaacguagucaacagcucuaucggacuaauaaugguacucuccuuccuauucuuaaacuaaggacuagucccuguucccagagcccacuuuuuuuucuuuuuuugaaauaaaauagccugucuuucagaucuaaaaaaaaaaaaaaaaaaaaaaaaaaaaaaaaaaaaaaaaaaaaaaaaaaaaaaaaaaaaaaaaugcaucccccccccccccccccccccccccccccccaaaggcucuuuucagagccaccagaauu

SEQ ID NO: 591 - RNA, 1470 nt, Artificial Sequence
  mRNA Design a-1 (A64-N5-C30-hSL-N5) comprising derived and/or modified sequence from Pf(3D7)__XP_001351122.1__IgE_Pf-CSP(19-397) (opt11)
gggagagucccgcagucggcguccagcggcucugcuuguucgugugugugucguugcaggccuuauucaagcuuaccauggacuggacauggauccucuuccucgucgccgcggccacacgcguacacucacucuuccaagaauaucaaugcuacggcucaagcucgaacacgcgcguacucaacgaacuaaacuacgacaacgccggcaccaaccuauacaacgaacucgaaaugaacuacuacggcaaacaagaaaacugguacucacuuaagaaaaauucacgaucccucggagaaaacgacgaugggaacaacgaagacaacgaaaaacuacgcaaacccaaacacaagaaacuuaaacaacccgcagacggcaacccagacccaaacgcaaaccccaacguagaccccaacgcaaacccaaacguagacccaaacgccaacccaaacguagacccaaacgcgaacccaaacgccaacccaaacgccaaccccaacgcaaacccaaacgcaaauccaaacgcaaacccaaaugcaaacccgaacgccaauccaaacgcaaaccccaacgcaaacccaaacgcaaaccccaaugccaacccaaacgcaaaccccaacgcaaaccccaacgcaaaccccaacgcaaacccaaacgcgaacccaaacguagaccccaacgccaaccccaacgccaacccaaacgcaaacccaaacgccaacccaaacgccaaccccaacgcaaaccccaacgcaaacccgaacgcaaacccaaacgcaaacccaaacgcaaacccgaacgcaaacccuaacgcgaaccccaacgccaaccccaacgcaaacccaaacgcaaacccaaacgccaacccaaacgcaaacccaaacgcaaacccaaacaaaaacaaccaaggaaacgggcaaggacauaacaugccgaacgaccccaaccgcaacguagacgaaaacgccaacgccaacagcgcagucaaaaacaacaacaacgaagaacccuccgacaaacacaucaaagaauaccuaaacaaaauccagaacucacuauccaccgaauggucccccugcagcgugaccugcggcaacggcauacaaguccgcauaaaaccaggcuccgccaacaaacccaaagacgaacuagacuacgccaacgacauagaaaagaaaauaugcaaaauggaaaaaugcagcucagucuucaauguagucaacuccuccaucggacucauaaugguccuaucauuccucuuccuaaacuaaggacuagucccuguucccagagcccacuuuuuuuucuuuuuuugaaauaaaauagccugucuuucagaucuaaaaaaaaaaaaaaaaaaaaaaaaaaaaaaaaaaaaaaaaaaaaaaaaaaaaaaaaaaaaaaaaugcaucccccccccccccccccccccccccccccccaaaggcucuuuucagagccaccagaauu

SEQ ID NO: 592 - RNA, 1635 nt, Artificial Sequence
  mRNA Design a-1 (A64-N5-C30-hSL-N5) comprising derived and/or modified sequence from Pf(3D7)__XP_001351122.1__Pf-CSP_L(G4SG4)_TM domain HA (opt11)
gggagagucccgcagucggcguccagcggcucugcuuguucgugugugugucguugcaggccuuauucaagcuuaccaugaugcgcaaacucgccauccucagcgucagcucguuccucuucgucgaagcacuauuccaagaauaccaguguuacggcucauccucaaacacacgcgugcucaacgaacuaaacuacgacaacgccggcaccaaccucuacaacgaacuagaaaugaacuauuacggcaagcaagaaaacugguacucacucaaaaaaaacagccgaagccuaggcgagaacgacgacgggaacaacgaagacaacgaaaaacuacgcaaacccaagcacaaaaaacugaaacaaccagccgacggaaauccagaccccaacgcaaacccgaacguagaccccaacgcgaaccccaacguggacccgaacgcaaacccgaacguagacccaaacgcaaacccaaacgcgaacccaaacgcaaacccaaacgcuaacccaaacgcaaaccccaacgccaaccccaacgcgaacccaaacgcaaacccaaacgcaaacccaaacgcaaacccgaacgcaaacccaaacgccaacccaaacgcgaacccaaacgccaacccaaacgcaaacccaaacgcaaacccaaacgcaaacccaaacguagacccgaacgccaacccgaaugcaaacccaaacgcaaacccgaacgcaaacccaaacgcgaacccgaacgccaacccaaacgcaaacccgaacgcaaaccccaacgccaacccaaacgcaaaccccaacgcaaaccccaacgcaaacccgaacgcaaacccaaacgcaaacccaaacgccaaccccaacgccaaccccaacgcaaacccgaacgccaacccaaacaaaaacaaccaaggcaacgggcaaggacacaacaugccaaacgaccccaaccgaaacgucgacgaaaacgccaacgccaacuccgcagucaaaaacaacaacaacgaagaacccucagacaaacacauaaaagaauaccucaacaaaauccaaaacucacucucaaccgaguggucacccugcagugugaccuguggcaacggaauacaaguacgcauaaaacccggaucagccaacaaaccgaaagacgaacuagacuacgccaacgacauagaaaaaaaaauaugcaaaauggagaaaugcagcucugucuucaacgucgucaacagcucaaucggacucauaaugguccucuccuuccuauuccucaacggcggagggggcucaggcggcggaggaaaauuagaauccaccagaaucuaucagauucucgccauauacagcacagucgcaagcucgcuuguccuugucguaucacuaggcgcaaucucauucuggaugugcuccaacggaagccugcaaugccgcauuugcauauaaggacuagucccuguucccagagcccacuuuuuuuucuuuuuuugaaauaaaauagccugucuuucagaucuaaaaaaaaaaaaaaaaaaaaaaaaaaaaaaaaaaaaaaaaaaaaaaaaaaaaaaaaaaaaaaaaugcaucccccccccccccccccccccccccccccccaaaggcucuuuucagagccaccagaauu

SEQ ID NO: 593 - RNA, 1509 nt, Artificial Sequence
  mRNA Design a-1 (A64-N5-C30-hSL-N5) comprising derived and/or modified sequence from Pf(3D7)__XP_001351122.1__Pf-CSP(199-377)_L(PVTN)_HBsAg (opt11)
gggagagucccgcagucggcguccagcggcucugcuuguucgugugugugucguugcaggccuuauucaagcuuaccauggaccccaacgccaaccccaacgccaaccccaacgccaaucccaacgcuaaccccaacgccaaccccaacgcaaaccccaacgccaacccaaacgccaaccccaacgcaaaccccaacgccaaucccaaugccaaccccaacgccaaccccaacgcgaaccccaacgccaaccccaacgcaaacccaaacgccaaccccaacgccaaccccaacgccaaccccaacaaaaacaaccaaggcaacggccaaggccacaacaugcccaacgaccccaaccgcaacguagacgagaacgccaacgccaacagcgcugucaaaaacaacaacaacgaggaacccuccgacaaacacaucaaagaauaccuuaacaaaauccaaaacucucucuccaccgaguggucccccugcucagucacaugcggcaacggcauacaaguucguaucaaacccggcucagcaaacaaacccaaagacgaacucgacuacgcaaacgacauagaaaagaaaaucugcaaaauggaaaaauguucauccguccccgucaccaacauggaaaacaucacuuccggauuccucgguccccuacucguacuccaagccggcuucuuccuccucacccgcauccucaccaucccccaaucacuugacuccugguggaccucccucaacuuccucggcggcucccccgucugccuaggccaaaacagccaaucccccacuagcaaccacucccccacauccugcccacccaucugccccggauaucgauggaugugccuucgccgauucauaaucuuccucuucauccuccuacucugccucaucuuccuccucguccuucuagauuaccaaggcaugcuccccgucugcccccuuauccccggcuccaccaccacaaacaccggccccugcaaaaccugcacaacccccgcccaaggcaauagcauguuccccuccugcugcugcacuaaaccaacagacggcaacuguaccugcaucccaaucccaucaucaugggccuucgccaaauaccucugggaaugggcaucuguacgauucuccuggcucucccuucucguacccuucguccagugguucgucggccucucccccaccguauggcuauccgccaucuggaugaugugguacuggggccccucccuauacuccaucgucuccccauucauaccacuccuacccaucuucuucugccucugggucuacaucugaggacuagucccuguucccagagcccacuuuuuuuucuuuuuuugaaauaaaauagccugucuuucagaucuaaaaaaaaaaaaaaaaaaaaaaaaaaaaaaaaaaaaaaaaaaaaaaaaaaaaaaaaaaaaaaaaugcaucccccccccccccccccccccccccccccccaaaggcucuuuucagagccaccagaauu

SEQ ID NO: 594 - RNA, 1551 nt, Artificial Sequence
  mRNA Design a-1 (A64-N5-C30-hSL-N5) comprising derived and/or modified sequence from Pf(3D7)__XP_001351122.1__Pf-CSP(199-387)_L(PVTN)_HBsAg (opt11)
gggagagucccgcagucggcguccagcggcucugcuuguucgugugugugucguugcaggccuuauucaagcuuaccaugauggcccccgaccccaacgcaaauccaaacgcaaaccccaacgccaacccuaacgcaaaccccaacgccaacccaaacgccaaucccaacgccaacccuaacgccaaccccaacgcaaaccccaacgccaaccccaacgccaacccuaacgcaaaccccaacgccaacccaaacgcaaaccccaacgccaaccccaacgccaaccccaacgcaaacccaaacgcaaaccccaacaaaaacaaccaaggaaacggacaaggccacaacaugccuaacgaccccaaucgcaacgucgacgaaaacgcaaacgccaacuccgccgucaaaaacaacaacaacgaagaacccucugacaaacacaucaaagaauaccucaacaagauccaaaacucccuauccaccgaauggucccccugcuccgucacuugcgguaauggcauccaaguccgcauaaaaccaggauccgcaaacaaacccaaagacgaacuagacuacgccaacgacauagaaaagaaaaucugcaaaauggaaaaaugcuccucagucuucaaugucguaaacuccuccauuggccuaggccccgucaccaacauggaaaacauuaccuccggauuccucgguccucuccucguccuccaagccggauucuuucuccucacacgaauccucacuaucccucaaucccuggacucaugguggaccucccucaacuuccugggcggcucccccgucugccucggccaaaacagccaauccccaaccuccaaucacucccccacaagcugcccucccauaugccccggcuaccgcuggaugugccuccgucgcuucaucauauuccucuucauacuucuccucugccucaucuuccuccuuguccugcuagacuaccaaggcaugcuccccgucugcccacucauccccgguuccaccacaacaaacaccggccccugcaaaacaugcaccacacccgcccaagguaacuccauguuccccuccugcugcugcaccaaaccaaccgacggcaacugcacuugcauucccauccccucauccugggccuucgccaaauaccucugggaaugggcauccguccguuucucauggcuaucucuccuaguaccauucguacaaugguucguuggccucucccccaccguauggcucuccgccauauggaugaugugguacuggggcccuucacuuuacuccaucgucucacccuucaucccacuccuacccaucuucuucugccuuuggguauacaucuaaggacuagucccuguucccagagcccacuuuuuuuucuuuuuuugaaauaaaauagccugucuuucagaucuaaaaaaaaaaaaaaaaaaaaaaaaaaaaaaaaaaaaaaaaaaaaaaaaaaaaaaaaaaaaaaaaugcaucccccccccccccccccccccccccccccccaaaggcucuuuucagagccaccagaauu

SEQ ID NO: 595 - RNA, 735 nt, Artificial Sequence
  mRNA Design a-1 (A64-N5-C30-hSL-N5) comprising derived and/or modified sequence from Pf(3D7)__XP_001351122.1__HsALB_Pf-CSP(19-152) (opt11)
gggagagucccgcagucggcguccagcggcucugcuuguucgugugugugucguugcaggccuuauucaagcuuaccaugaaaugggucaccuucaucucccuccucuuccucuucuccagcgcauacucccucuuccaagaauaccaaugcuacggcuccuccuccaacacccgcguccucaacgaacucaacuacgacaacgccggcaccaaccucuacaacgaacucgaaaugaacuacuacggcaaacaagaaaacugguacucccucaaaaaaaacucccgcucccuaggcgaaaacgacgacggaaacaacgaagacaacgaaaaacuccgcaaacccaaacacaaaaaacucaaacaacccgccgacggaaaccccgaccccaacgccaacccaaacgucgaccccaacgccaaccccaacgucgaccccaacgccaaccccaacgucgaccccaacgccaaccccaacgcaaacccaaacgcaaacccaaacgccaaccccaacgccaaccccaacgccaaccccuaaggacuagucccuguucccagagcccacuuuuuuuucuuuuuuugaaauaaaauagccugucuuucagaucuaaaaaaaaaaaaaaaaaaaaaaaaaaaaaaaaaaaaaaaaaaaaaaaaaaaaaaaaaaaaaaaaugcaucccccccccccccccccccccccccccccccaaaggcucuuuucagagccaccagaauu

SEQ ID NO: 596 - RNA, 855 nt, Artificial Sequence
  mRNA Design a-1 (A64-N5-C30-hSL-N5) comprising derived and/or modified sequence from Pf(3D7)__XP_001351122.1__HsALB_Pf-CSP(19-192) (opt11)
gggagagucccgcagucggcguccagcggcucugcuuguucgugugugugucguugcaggccuuauucaagcuuaccaugaaauggguaaccuucauaucccuccucuuccuauucucgagcgccuacucccucuuccaagaauaccaaugcuacggcucauccuccaacacccgcguccucaacgaacucaacuacgacaacgccggcaccaaccucuacaacgaacuagagaugaacuacuacggcaaacaagaaaacugguacucacucaaaaaaaacucccgaucccuaggagaaaacgacgacggcaacaacgaagacaacgaaaaacuacgaaaacccaaacacaaaaaacucaaacaacccgccgacggcaaccccgaccccaacgccaaccccaacgucgaccccaacgccaacccaaacguagaccccaacgccaaccccaacgucgacccaaacgccaaccccaacgccaaccccaacgccaacccaaacgcaaacccaaacgcaaacccaaacgccaacccaaacgccaaccccaacgccaaccccaacgcaaaccccaacgcaaaccccaacgccaacccaaacgcaaaccccaacgccaacccaaacgccaacccaaacgccaaccccaacgcaaaccccuaaggacuagucccuguucccagagcccacuuuuuuuucuuuuuuugaaauaaaauagccugucuuucagaucuaaaaaaaaaaaaaaaaaaaaaaaaaaaaaaaaaaaaaaaaaaaaaaaaaaaaaaaaaaaaaaaaugcaucccccccccccccccccccccccccccccccaaaggcucuuuucagagccaccagaauu

SEQ ID NO: 597 - RNA, 1095 nt, Artificial Sequence
  mRNA Design a-1 (A64-N5-C30-hSL-N5) comprising derived and/or modified sequence from Pf(3D7)__XP_001351122.1__HsALB_Pf-CSP(19-272) (opt11)
gggagagucccgcagucggcguccagcggcucugcuuguucgugugugugucguugcaggccuuauucaagcuuaccaugaaauggguaaccuucaucucccuccucuuccuauucucaucagcauacucacucuuccaagaauaccaaugcuacggcucgagcucaaacacacgcguacucaacgaacugaacuacgacaacgccggaaccaaccucuacaaugaacucgaaaugaacuacuacggcaaacaagagaacugguacucacucaaaaaaaacagcagaagccucggagaaaacgacgacggaaacaacgaagacaacgaaaaacuccgcaaacccaagcacaaaaaacuaaaacaacccgcagacggaaaccccgaccccaacgcaaacccgaacgucgacccaaacgccaacccaaacguagaccccaacgcgaacccaaacguagacccaaacgccaacccaaacgcaaaccccaacgccaaccccaacgcaaacccaaacgccaacccaaacgcaaaccccaaugcaaaccccaacgcaaacccaaacgccaaccccaacgcaaacccaaacgcaaacccaaacgcaaacccaaacgcaaacccaaacgcgaacccaaacgcaaacccaaacgcaaacccgaacgcaaacccaaacguagacccaaacgcaaaccccaacgccaacccaaacgcaaacccaaacgcaaacccaaacgcaaacccaaacgcgaacccaaacgccaacccaaacgcaaacccaaacgcaaacccaaacgcaaacccaaacgcaaacccaaacgcaaacccaaacgcaaacccgaacgcgaacccaaacgcaaacccaaacgcgaacccgaacgcaaaccccaacgcaaacccauaaggacuagucccuguucccagagcccacuuuuuuuucuuuuuuugaaauaaaauagccugucuuucagaucuaaaaaaaaaaaaaaaaaaaaaaaaaaaaaaaaaaaaaaaaaaaaaaaaaaaaaaaaaaaaaaaaugcaucccccccccccccccccccccccccccccccaaaggcucuuuucagagccaccagaauu

SEQ ID NO: 598 - RNA, 1257 nt, Artificial Sequence
  mRNA Design a-1 (A64-N5-C30-hSL-N5) comprising derived and/or modified sequence from Pf(3D7)__XP_001351122.1__HsALB_Pf-CSP(19-272)_L(AAY)_Pf-CSP(310-3 27)_L(AAY)_Pf-CSP(346-375) (opt11)
gggagagucccgcagucggcguccagcggcucugcuuguucgugugugugucguugcaggccuuauucaagcuuaccaugaaaugggucaccuucaucucacuccuauuccuauucuccuccgcauacucacucuuccaagaauaccagugcuacggaucaagcuccaacacacgcguacuaaacgaacugaacuacgacaacgccggaaccaaccucuacaacgaacucgaaaugaauuacuacggcaaacaagagaacugguacucacucaaaaaaaacagcagaucccuaggcgaaaacgacgacggaaacaacgaagacaacgaaaaacuacgcaaacccaaacacaaaaaacuaaaacaacccgcagacggaaacccagauccaaacgcaaacccaaacguagacccaaacgccaacccaaacguagacccaaacgcaaacccaaacguagaccccaacgcaaacccaaacgcaaacccgaacgccaacccaaacgcaaaccccaacgccaacccaaacgcaaacccaaacgcaaacccaaacgcaaacccaaacgccaaccccaacgcgaacccaaacgcaaacccuaacgccaacccaaacgcaaacccaaacgcaaacccgaacgcaaacccaaacgcaaacccaaacgcaaacccgaacguagacccaaacgcaaacccaaacgcaaacccaaacgcaaacccaaacgccaacccaaacgccaacccaaacgcaaaccccaacgcaaaccccaacgcgaacccaaacgccaaccccaacgcaaacccaaacgccaacccaaacgccaacccgaacgcaaacccaaacgccaacccaaacgccaacccgaacgcaaacccaaacgccaacccaaacgccaacccagccgcguacgaacccucagauaaacacauaaaagaauaccucaacaaaauccaaaacucacuagcagccuacaucaaaccaggauccgccaacaaacccaaggacgaacucgacuacgcaaacgacaucgaaaaaaaaaucugcaaaauggaaaaaugcucaugaggacuagucccuguucccagagcccacuuuuuuuucuuuuuuugaaauaaaauagccugucuuucagaucuaaaaaaaaaaaaaaaaaaaaaaaaaaaaaaaaaaaaaaaaaaaaaaaaaaaaaaaaaaaaaaaaugcaucccccccccccccccccccccccccccccccaaaggcucuuuucagagccaccagaauu

SEQ ID NO: 599 - RNA, 1218 nt, Artificial Sequence
  mRNA Design a-1 (A64-N5-C30-hSL-N5) comprising derived and/or modified sequence from Pf(3D7)__XP_001351122.1__HsALB_Pf-CSP(19-272)_L(AAY)_Pf-CSP(346-3 65)_L(AAY)_P2 (opt11)
gggagagucccgcagucggcguccagcggcucugcuuguucgugugugugucguugcaggccuuauucaagcuuaccaugaaaugggucaccuucaucucacuccuauuccuauucucgagcgcauacucacucuuccaagaauaccaaugcuauggcuccagcucaaacacacgcguccuaaacgaacucaacuacgacaacgccggaacaaaccucuacaacgaacucgaaaugaacuacuacggcaaacaagaaaacugguacucgcucaaaaaaaacucccgaagucuaggcgaaaacgacgacggaaacaacgaagacaacgaaaaacuacgcaaacccaaacacaaaaaacuaaaacaacccgcagacggaaaccccgacccaaacgcaaaccccaacguagacccaaacgcaaaccccaacguagacccaaacgcaaacccgaacguagacccaaacgccaacccaaacgccaaccccaacgcaaacccaaacgccaaccccaacgcaaacccaaacgcaaacccaaacgcaaacccaaacgcaaacccaaacgccaaccccaacgccaacccaaacgccaaccccaacgcgaaccccaacgcgaacccaaacgccaacccaaacgcaaaccccaacgcaaacccaaacgcaaacccaaacgucgacccaaacgcaaacccaaacgcaaacccgaacgcaaacccaaacgcaaaccccaacgccaacccaaacgcgaacccaaacgccaacccaaacgccaacccaaacgcaaacccaaacgccaacccaaacgcaaacccaaacgcaaaccccaacgcaaaccccaacgcaaacccaaacgccaaccccaacgcaaaccccaacgcaaacccaaacgccaacccagccgcauacauaaaacccggcuccgccaacaaaccaaaagacgaacuagacuacgccaacgacauagaagcagccuaccaauacaucaaagccaacagcaaauucauaggaauaaccgagcuauaaggacuagucccuguucccagagcccacuuuuuuuucuuuuuuugaaauaaaauagccugucuuucagaucuaaaaaaaaaaaaaaaaaaaaaaaaaaaaaaaaaaaaaaaaaaaaaaaaaaaaaaaaaaaaaaaaugcaucccccccccccccccccccccccccccccccaaaggcucuuuucagagccaccagaauu

SEQ ID NO: 600 - RNA, 1212 nt, Artificial Sequence
  mRNA Design a-1 (A64-N5-C30-hSL-N5) comprising derived and/or modified sequence from Pf(3D7)__XP_001351122.1__HsALB_Pf-CSP(19-272)_L(AAY)_Pf-CSP(346-3 65)_L(AAY)_PADRE (opt11)
gggagagucccgcagucggcguccagcggcucugcuuguucgugugugugucguugcaggccuuauucaagcuuaccaugaaauggguaaccuucaucucgcuacuguuccucuucucauccgcauacucccucuuccaagaauaccaaugcuacggcucauccucaaacacacgaguacuaaacgaacucaacuacgacaacgccggaaccaaccuauacaacgaacucgaaaugaacuacuacggcaaacaagaaaacugguacucacucaaaaaaaacucccgaucccucggcgaaaacgacgacggaaacaacgaagacaacgaaaaacugagaaaacccaaacacaaaaaacuaaaacaaccagccgacggcaacccagaccccaacgcaaaccccaacguagacccaaacgccaaccccaacguagacccaaacgcaaacccaaacguagaccccaacgccaacccaaacgccaacccaaacgccaaccccaacgcaaacccaaacgcaaacccaaacgcaaacccaaacgccaacccaaacgcaaacccaaacgccaacccgaacgcaaaccccaacgcaaacccaaacgcaaaccccaacgccaacccaaacgcaaacccaaacgcaaaccccaacgcaaacccaaaugcgaacccaaacguggacccgaacgcaaaccccaacgccaacccaaacgcaaaccccaacgccaaccccaacgccaaccccaacgcaaaccccaacgccaaccccaacgccaacccaaacgccaacccaaacgcgaacccaaacgcaaaccccaacgcaaacccaaacgcaaacccaaacgcaaacccaaacgcaaaccccaacgcaaacccaaacgcaaacccaaacgcaaaccccgcagccuacauuaaaccaggcuccgccaacaaacccaaagacgaacucgacuacgccaacgacauagaagcagccuacgccaaauucguagccgcauggacacucaaagccgcagccuaaggacuagucccuguucccagagcccacuuuuuuuucuuuuuuugaaauaaaauagccugucuuucagaucuaaaaaaaaaaaaaaaaaaaaaaaaaaaaaaaaaaaaaaaaaaaaaaaaaaaaaaaaaaaaaaaaugcaucccccccccccccccccccccccccccccccaaaggcucuuuucagagccaccagaauu

SEQ ID NO: 601 - RNA, 1269 nt, Artificial Sequence
  mRNA Design a-1 (A64-N5-C30-hSL-N5) comprising derived and/or modified sequence from Pf(3D7)__XP_001351122.1__HsALB_Pf-CSP(19-272)_L(G4S)_Pf-CSP(310-3 27)_L(G4S)_Pf-CSP(346-375) (opt11)
gggagagucccgcagucggcguccagcggcucugcuuguucgugugugugucguugcaggccuuauucaagcuuaccaugaaaugggucaccuucaucucccuacuauuccucuucucaucagccuacucacucuuccaagaguaccaaugcuacggcucaagcucaaacacacgcguacucaacgaacuaaacuacgacaacgcaggcaccaaccucuacaacgaacucgagaugaacuacuacggcaaacaagaaaacugguacucacucaaaaaaaacucccgcagccucggcgaaaacgacgacggcaacaacgaagauaacgagaaacuacgcaaacccaaacacaaaaaacuaaaacaacccgccgacggaaacccagacccaaacgccaacccaaacguagacccaaacgcaaacccaaacguagacccaaacgccaaccccaacguagacccaaacgccaacccaaacgccaacccaaacgcaaacccaaacgcaaacccaaacgcgaacccaaacgcaaaccccaacgccaacccaaacgcaaacccaaacgccaaccccaacgcaaacccaaacgcaaaccccaacgcaaacccaaacgccaaccccaacgcaaaccccaacgcaaacccaaacgcaaacccaaacgcaaacccaaacgucgacccaaacgcaaaccccaacgcaaacccaaacgcaaacccaaacgccaacccaaacgcaaacccaaacgccaacccaaacgcaaaccccaacgcaaaccccaacgccaacccaaacgcaaaccccaacgcgaacccaaacgcaaacccaaacgcaaacccaaacgcaaaccccaacgcaaaccccaacgcaaacccaaacgcaaacccaaacgcaaacccaggcggcggcggaagcgaacccucggacaaacacauaaaagaauaccucaacaaaauccaaaacucccucggaggcggaggcuccaucaaacccggaagcgcaaacaaacccaaagacgaacucgacuacgcaaacgacaucgagaaaaaaauaugcaaaauggaaaaaugcucauaaggacuagucccuguucccagagcccacuuuuuuuucuuuuuuugaaauaaaauagccugucuuucagaucuaaaaaaaaaaaaaaaaaaaaaaaaaaaaaaaaaaaaaaaaaaaaaaaaaaaaaaaaaaaaaaaaugcaucccccccccccccccccccccccccccccccaaaggcucuuuucagagccaccagaauu

SEQ ID NO: 602 - RNA, 1254 nt, Artificial Sequence
  mRNA Design a-1 (A64-N5-C30-hSL-N5) comprising derived and/or modified sequence from Pf(3D7)__XP_001351122.1__HsALB_Pf-CSP(19-272)_L(G4S)_Pf-CSP(310-3 27)_Pf-CSP(346-375) (opt11)
gggagagucccgcagucggcguccagcggcucugcuuguucgugugugugucguugcaggccuuauucaagcuuaccaugaaauggguaaccuucaucucacuccuauuccucuucuccuccgcauacucgcucuuccaagaauaccaaugcuacggcucaagcucaaacacccgcguccucaacgaacucaacuacgacaacgccgguaccaaccuauacaacgaacucgaaaugaacuacuacggcaaacaagaaaacugguacucacucaaaaaaaacuccaggucccuaggagaaaacgacgauggcaacaacgaagacaacgaaaaacuccgaaagccaaaacacaaaaaacuaaaacagcccgcagacggcaacccagacccaaacgcaaacccaaacguagacccaaacgcgaaccccaacguagacccaaacgcaaacccaaacguagacccaaacgcaaaccccaacgcaaacccaaacgcaaaccccaacgcaaaccccaacgcaaacccaaacgcaaacccaaacgcaaacccaaacgcaaacccaaacgcaaaccccaacgccaaccccaacgcaaacccaaacgcaaacccaaacgcaaacccaaacgcaaacccaaacgcaaaccccaacgccaacccaaacgcaaacccaaacguagacccaaacgcaaacccaaacgcaaacccaaacgcaaaccccaacgccaacccaaacgcaaacccaaacgcaaacccaaacgcaaacccaaacgcaaauccaaacgcuaacccaaacgcaaacccgaacgcaaaccccaaugcaaaccccaacgcaaacccaaacgccaacccaaacgcaaacccaaacgcgaacccaaacgcaaacccaaacgcaaacccaggcggaggcggauccgaacccuccgacaaacacauaaaagaauaccuaaacaaaauccaaaacucucucauaaaacccggaucagccaacaaaccaaaagacgaacuagacuacgccaaugacauagaaaaaaaaauaugcaagauggaaaaaugcagcuaaggacuagucccuguucccagagcccacuuuuuuuucuuuuuuugaaauaaaauagccugucuuucagaucuaaaaaaaaaaaaaaaaaaaaaaaaaaaaaaaaaaaaaaaaaaaaaaaaaaaaaaaaaaaaaaaaugcaucccccccccccccccccccccccccccccccaaaggcucuuuucagagccaccagaauu

SEQ ID NO: 603 - RNA, 1254 nt, Artificial Sequence
  mRNA Design a-1 (A64-N5-C30-hSL-N5) comprising derived and/or modified sequence from Pf(3D7)__XP_001351122.1__HsALB_Pf-CSP(19-325) (opt11)
gggagagucccgcagucggcguccagcggcucugcuuguucgugugugugucguugcaggccuuauucaagcuuaccaugaaauggguaaccuucaucucacuccuguuccuauucucauccgcauacucacucuuccaagaauaccaaugcuacggcucgucuucaaacacccgcguacucaacgaacucaacuacgacaacgccggaaccaaccucuacaacgaacucgaaaugaacuacuacggcaaacaagaaaacugguacucacucaaaaaaaacagccgaagccuaggcgaaaacgacgacggaaacaaugaagacaacgaaaaacuccgcaaacccaaacacaaaaaacucaaacaaccagcagacggaaaccccgacccgaacgcaaacccaaacguagacccaaacgcaaacccaaacguagacccaaacgcgaacccaaacguagaccccaacgcaaacccaaacgcaaacccaaacgcaaacccaaacgccaaccccaacgccaacccaaacgccaacccaaacgcaaacccgaacgcgaacccaaacgcaaaccccaacgcaaacccaaacgcaaacccaaacgcgaacccaaacgccaacccaaacgccaacccaaacgcaaacccaaacgccaacccaaacgcaaaccccaacguggaccccaacgcaaacccaaacgcaaacccaaacgccaaccccaacgcaaacccaaacgcaaacccuaacgcaaacccaaacgcaaaccccaacgcgaacccaaacgcaaacccaaacgcaaacccaaacgcaaaccccaacgcaaacccaaacgccaacccaaacgccaacccaaacgcgaauccaaacgcaaaccccaacgcaaacccaaacgcaaacccgaacaaaaacaaccaagggaacggacaaggacacaacaugccaaacgaccccaaccgcaacgucgacgaaaacgccaacgccaacuccgcaguaaaaaacaacaacaacgaagaacccuccgacaaacacauaaaagaauaccucaacaagauacaaaacuagggacuagucccuguucccagagcccacuuuuuuuucuuuuuuugaaauaaaauagccugucuuucagaucuaaaaaaaaaaaaaaaaaaaaaaaaaaaaaaaaaaaaaaaaaaaaaaaaaaaaaaaaaaaaaaaaugcaucccccccccccccccccccccccccccccccaaaggcucuuuucagagccaccagaauu

SEQ ID NO: 604 - RNA, 1431 nt, Artificial Sequence
  mRNA Design a-1 (A64-N5-C30-hSL-N5) comprising derived and/or modified sequence from Pf(3D7)__XP_001351122.1__HsALB_Pf-CSP(19-384) (opt11)
gggagagucccgcagucggcguccagcggcucugcuuguucgugugugugucguugcaggccuuauucaagcuuaccaugaaauggguaaccuucaucucacuacucuuccuauucucaagcgcguacucacucuuccaagaauaccaaugcuacggcucgagcucaaacacccgcguucucaacgaacuaaacuacgacaacgccggaaccaaccuauacaacgaacuugaaaugaacuacuacggcaaacaagaaaacugguacucgcucaaaaaaaacuccaggagccuaggcgaaaacgacgacggaaacaacgaagacaacgagaaacuaagaaaacccaaacacaaaaaacucaaacagcccgcggacggaaaccccgacccaaacgcaaaccccaacguagacccgaacgccaacccaaacguagacccaaacgcaaacccaaacguagaccccaacgcaaacccgaacgccaacccaaacgcaaacccaaaugcgaaccccaacgcgaacccaaacgcaaacccgaacgcaaaccccaacgccaacccaaacgcaaacccaaacgcaaaccccaacgcaaacccaaacgcgaacccaaacgcaaacccaaacgcgaacccgaacgcaaacccaaacgcaaacccgaacgcaaacccaaacguagacccaaacgccaacccaaacgcaaacccaaacgcaaaccccaacgcaaacccaaacgcaaacccgaacgcaaacccaaacgcaaacccaaacgcgaacccaaacgcaaaccccaacgcaaacccaaacgcaaacccuaacgcaaacccgaacgcaaacccaaacgccaacccaaacgcgaaccccaacgcaaacccaaacgccaacccaaacgccaacccgaacaaaaacaaccaaggaaacggacaaggacacaacaugccaaacgaccccaaccgaaacgucgacgaaaacgcaaacgccaacagugccgucaaaaacaacaacaaugaagaacccucagacaaacacauaaaagaauaccuaaacaaaauccagaacucgcucucaaccgaauggucacccugcagcgucaccugcggcaacggaauacaaguacgcaucaaaccaggcucggccaacaaaccaaaagacgaauuagacuacgcaaacgacaucgaaaaaaaaauaugcaaaauggaaaaaugcagcucagucuucaacguagucaauagcucauaaggacuagucccuguucccagagcccacuuuuuuuucuuuuuuugaaauaaaauagccugucuuucagaucuaaaaaaaaaaaaaaaaaaaaaaaaaaaaaaaaaaaaaaaaaaaaaaaaaaaaaaaaaaaaaaaaugcaucccccccccccccccccccccccccccccccaaaggcucuuuucagagccaccagaauu

SEQ ID NO: 605 - RNA, 1569 nt, Artificial Sequence
  mRNA Design a-1 (A64-N5-C30-hSL-N5) comprising derived and/or modified sequence from Pf(3D7)__XP_001351122.1__HsALB_Pf-CSP(19-384)_TM domain HA (opt11)
gggagagucccgcagucggcguccagcggcucugcuuguucgugugugugucguugcaggccuuauucaagcuuaccaugaagugggucaccuucaucucccuccuauuccucuucucuagcgcguacucacucuuccaagaauaccaaugcuacggauccagcucaaacacacgcguccucaaugaacugaacuacgauaacgccggaaccaaccucuacaacgaacucgaaaugaacuacuacggcaaacaagaaaacugguacucacuaaagaaaaauagcaggucccucggcgaaaacgacgacgggaacaacgaagauaacgaaaaacuacgcaaacccaagcacaagaaacuaaaacagccagcagacggaaacccagaccccaacgccaacccaaacgucgaccccaacgcaaacccaaacguagauccgaacgcaaacccaaacgucgauccaaacgcaaacccaaacgcaaacccaaacgcuaaccccaacgccaacccaaacgcaaacccgaacgcaaaccccaacgcgaacccgaacgcaaacccaaacgcaaacccaaacgccaacccaaacgcaaacccaaacgcaaacccaaacgccaacccaaacgcaaaccccaacgcgaaccccaacgcaaaccccaacgcaaacccaaacgucgacccaaacgcaaaccccaacgcaaaccccaacgcaaaccccaaugcaaacccaaacgcgaaccccaacgcaaacccaaacgcgaacccaaaugcaaaccccaacgccaaccccaacgccaacccgaacgcaaacccaaacgccaacccaaacgccaacccaaacgcaaaucccaacgccaacccaaacgcgaacccgaacgcaaacccaaacgcaaacccgaacaaaaacaaccaaggaaacggucaaggacacaacaugccaaacgaccccaaccgcaacgucgacgaaaacgccaaugccaacagcgccgucaaaaacaacaacaacgaagaacccucagacaaacacaucaaagaguaccuaaacaagauccaaaacucccucuccaccgaauggucccccugcagcguaaccugcggaaacggcauccaaguccgcauaaaaccaggcucagccaacaaaccaaaagaugaacucgacuacgcaaacgacauagaaaagaaaaucugcaaaauggaaaaaugcagcuccguauucaacgugguuaacuccucaaaacuagaauccacccgcaucuaccaaauacucgcaauauacagcacaguagccagcucacucguccuagucgucucccucggagccaucagcuucuggaugugcuccaacggaaguuuacaaugucgcauaugcauauaaggacuagucccuguucccagagcccacuuuuuuuucuuuuuuugaaauaaaauagccugucuuucagaucuaaaaaaaaaaaaaaaaaaaaaaaaaaaaaaaaaaaaaaaaaaaaaaaaaaaaaaaaaaaaaaaaugcaucccccccccccccccccccccccccccccccaaaggcucuuuucagagccaccagaauu

SEQ ID NO: 606 - RNA, 1281 nt, Artificial Sequence
  mRNA Design a-1 (A64-N5-C30-hSL-N5) comprising derived and/or modified sequence from Pf(3D7)__XP_001351122.1__HsALB_Pf-CSP(82-397) (opt11)
gggagagucccgcagucggcguccagcggcucugcuuguucgugugugugucguugcaggccuuauucaagcuuaccaugaaaugggucaccuucaucucacuccuguuccucuucucauccgccuacagcgacaacgaaaaacugcgcaaacccaaacacaagaaacucaaacaaccagccgacggcaaccccgaccccaacgccaacccaaacguagaccccaacgccaaccccaacguagacccaaacgccaacccaaacguggaccccaacgcaaacccaaacgccaacccaaacgccaauccaaacgccaacccaaacgcaaacccaaacgcaaaccccaacgccaacccuaacgccaaccccaacgcaaacccaaacgccaaccccaacgccaaccccaacgcaaaccccaacgcaaacccuaacgccaaccccaacgccaaccccaacgcaaacccaaacgccaaccccaacguagacccaaacgccaaccccaacgcaaaccccaacgccaacccaaacgcaaacccaaacgccaaccccaacgccaaccccaacgcaaacccaaacgcaaacccaaaugcaaaccccaacgccaaccccaacgccaaccccaacgcaaaccccaacgcaaaccccaacgcaaacccgaacgccaacccaaacgccaacccaaacgccaaccccaacgcaaaccccaacaaaaacaaccaaggcaacggacaaggacacaacaugcccaacgaccccaaccgcaacgucgacgaaaacgccaacgccaacuccgccgucaaaaacaacaacaacgaagaacccuccgacaaacacaucaaagaauaccucaacaaaauccaaaacucccucucaaccgaauggucacccugcuccguaaccugcggcaacggcauccaaguccgcaucaaacccggcucagccaacaaacccaaagacgaacucgacuacgccaaugacaucgaaaagaaaauaugcaaaauggaaaaaugcuccuccgucuucaacgucgucaacuccuccaucggccucaucaugguccucucguuccuauuccuaaacuaaggacuagucccuguucccagagcccacuuuuuuuucuuuuuuugaaauaaaauagccugucuuucagaucuaaaaaaaaaaaaaaaaaaaaaaaaaaaaaaaaaaaaaaaaaaaaaaaaaaaaaaaaaaaaaaaaugcaucccccccccccccccccccccccccccccccaaaggcucuuuucagagccaccagaauu

SEQ ID NO: 607 - RNA, 633 nt, Artificial Sequence
  mRNA Design a-1 (A64-N5-C30-hSL-N5) comprising derived and/or modified sequence from Pf(3D7)__XP_001351122.1__HsALB_Pf-CSP(93-192) (opt11)
gggagagucccgcagucggcguccagcggcucugcuuguucgugugugugucguugcaggccuuauucaagcuuaccaugaaauggguaaccuucaucucacuccuauuccuauucucaagcgcauacucaaaacuaaaacaacccgcagacggaaacccagacccaaacgcaaacccaaacguagacccaaacgcaaacccaaacguagacccaaacgcaaacccaaacguagacccaaacgcaaacccaaacgcaaacccaaacgcaaacccaaacgcaaacccaaacgcaaaccccaacgcaaacccaaacgcaaacccaaacgcaaacccaaacgcaaacccaaacgcaaacccaaacgcaaacccaaacgcaaacccaaacgcaaacccaaacgcaaacccaaacgccaacccaaacgcaaacccauaaggacuagucccuguucccagagcccacuuuuuuuucuuuuuuugaaauaaaauagccugucuuucagaucuaaaaaaaaaaaaaaaaaaaaaaaaaaaaaaaaaaaaaaaaaaaaaaaaaaaaaaaaaaaaaaaaugcaucccccccccccccccccccccccccccccccaaaggcucuuuucagagccaccagaauu

SEQ ID NO: 608 - RNA, 873 nt, Artificial Sequence
  mRNA Design a-1 (A64-N5-C30-hSL-N5) comprising derived and/or modified sequence from Pf(3D7)__XP_001351122.1__HsALB_Pf-CSP(93-272) (opt11)
gggagagucccgcagucggcguccagcggcucugcuuguucgugugugugucguugcaggccuuauucaagcuuaccaugaaaugggucaccuucaucucacuccuauuccuauucucauccgcauacucaaaacuaaaacaacccgccgacggaaacccagacccaaacgcaaacccaaacguagacccaaacgcaaacccaaacguagacccaaacgcaaacccaaacguagacccaaacgcaaacccaaacgccaacccaaacgcaaauccaaacgcaaacccaaacgcaaacccaaacgcaaacccaaacgcaaacccaaacgccaacccaaacgccaacccaaacgcaaacccaaacgcaaacccaaacgcaaacccaaacgcaaacccaaacgcaaacccaaacgccaaccccaacgcaaacccaaacgcaaaccccaacguagacccaaacgcaaacccaaacgccaaccccaacgcaaaccccaacgccaaccccaacgccaacccaaacgccaacccaaacgcaaacccaaacgcaaacccaaacgcaaacccaaacgcaaacccaaacgcaaacccaaacgcaaacccaaacgcaaacccaaacgcaaacccaaacgccaacccaaacgcaaacccaaacgcaaacccgaacgcaaacccauaaggacuagucccuguucccagagcccacuuuuuuuucuuuuuuugaaauaaaauagccugucuuucagaucuaaaaaaaaaaaaaaaaaaaaaaaaaaaaaaaaaaaaaaaaaaaaaaaaaaaaaaaaaaaaaaaaugcaucccccccccccccccccccccccccccccccaaaggcucuuuucagagccaccagaauu

SEQ ID NO: 609 - RNA, 1248 nt, Artificial Sequence
  mRNA Design a-1 (A64-N5-C30-hSL-N5) comprising derived and/or modified sequence from Pf(3D7)__XP_001351122.1__HsALB_Pf-CSP(93-397) (opt11)
gggagagucccgcagucggcguccagcggcucugcuuguucgugugugugucguugcaggccuuauucaagcuuaccaugaaaugggucacauucaucucacuccuauuccuauucucaagcgccuacuccaaacucaaacaacccgccgacggcaacccagacccaaacgccaaccccaacgucgacccaaacgccaacccaaacgucgacccaaacgcaaacccaaacgucgaccccaacgccaaccccaacgccaaccccaacgccaacccaaacgccaaucccaacgccaaccccaacgccaacccaaacgcaaaccccaacgccaauccaaacgccaaccccaacgcaaaccccaacgccaaccccaacgcaaacccaaacgcaaacccaaacgcaaaccccaacgccaaccccaacgcaaaccccaacgccaaccccaacgucgaccccaacgccaacccaaacgccaacccaaacgccaaccccaacgccaaccccaacgcaaacccaaacgcgaaccccaacgcaaaccccaacgccaacccgaacgccaacccgaacgcaaacccaaacgccaaccccaacgcaaaccccaacgcaaacccaaacgcgaaccccaacgccaacccaaacgccaacccaaacgcgaacccaaacgccaaccccaacaaaaacaaccaagggaacggacaaggccacaacaugcccaacgaccccaaccgcaacgucgacgaaaacgccaacgccaacuccgccgucaaaaacaacaacaacgaagaacccuccgacaaacacauaaaagaauaccuaaacaaaauccaaaacucacucucuacugaauggucccccugcucagucaccugcggcaacggcauacaaguccgcauaaaacccggcucggccaacaaaccaaaagacgaacuagacuacgcaaacgacaucgaaaaaaaaauaugcaaaauggaaaaaugcuccucagucuucaacguaguaaacuccuccaucggccucauaaugguccucuccuuccuauuccucaacuaaggacuagucccuguucccagagcccacuuuuuuuucuuuuuuugaaauaaaauagccugucuuucagaucuaaaaaaaaaaaaaaaaaaaaaaaaaaaaaaaaaaaaaaaaaaaaaaaaaaaaaaaaaaaaaaaaugcaucccccccccccccccccccccccccccccccaaaggcucuuuucagagccaccagaauu

SEQ ID NO: 610 - RNA, 618 nt, Artificial Sequence
  mRNA Design a-1 (A64-N5-C30-hSL-N5) comprising derived and/or modified sequence from Pf(3D7)__XP_001351122.1__HsALB_Pf-CSP(98-192) (opt11)
gggagagucccgcagucggcguccagcggcucugcuuguucgugugugugucguugcaggccuuauucaagcuuaccaugaaaugggucacauucauaagccuacucuuccucuucagcucagccuacuccgcagacggaaacccagacccaaacgcaaacccaaacguagacccaaacgcaaacccaaacguagacccaaacgcaaacccaaacguagacccaaacgcaaacccaaacgcaaacccaaacgcaaacccaaacgcaaacccaaacgcaaacccaaacgcaaacccaaacgcaaacccaaacgcaaacccaaacgcaaacccaaacgcaaaccccaacgcaaacccaaacgcaaacccaaacgcaaacccaaacgcaaacccaaacgcaaacccaaacgcaaacccauaaggacuagucccuguucccagagcccacuuuuuuuucuuuuuuugaaauaaaauagccugucuuucagaucuaaaaaaaaaaaaaaaaaaaaaaaaaaaaaaaaaaaaaaaaaaaaaaaaaaaaaaaaaaaaaaaaugcaucccccccccccccccccccccccccccccccaaaggcucuuuucagagccaccagaauu

SEQ ID NO: 611 - RNA, 858 nt, Artificial Sequence
  mRNA Design a-1 (A64-N5-C30-hSL-N5) comprising derived and/or modified sequence from Pf(3D7)__XP_001351122.1__HsALB_Pf-CSP(98-272) (opt11)
gggagagucccgcagucggcguccagcggcucugcuuguucgugugugugucguugcaggccuuauucaagcuuaccaugaaauggguaaccuucauaagccuacucuuccuauucucaucagccuacagcgcagacggaaacccagaccccaacgcaaacccaaacguagacccaaacgcaaacccaaacguagaccccaacgcaaacccaaacguagacccaaacgccaacccaaacgcaaacccaaacgcaaacccaaacgccaacccaaacgcaaacccaaacgccaacccaaacgcaaacccaaacgcaaacccaaacgcaaacccaaacgcaaacccaaacgcaaacccaaacgcaaacccaaacgccaacccaaacgcaaacccaaacgcaaacccaaacgcaaacccaaacgccaaccccaacguagacccaaacgccaaccccaacgcaaacccaaacgcaaacccaaacgcaaacccaaacgcaaacccaaacgcaaacccaaacgcaaacccaaacgcaaacccaaacgcaaacccgaacgccaacccaaacgcaaacccaaacgcaaacccaaacgcaaacccaaacgcaaacccaaacgcaaaccccaacgcaaacccaaacgcaaacccaaacgcaaacccauaaggacuagucccuguucccagagcccacuuuuuuuucuuuuuuugaaauaaaauagccugucuuucagaucuaaaaaaaaaaaaaaaaaaaaaaaaaaaaaaaaaaaaaaaaaaaaaaaaaaaaaaaaaaaaaaaaugcaucccccccccccccccccccccccccccccccaaaggcucuuuucagagccaccagaauu

SEQ ID NO: 612 - RNA, 1164 nt, Artificial Sequence
  mRNA Design a-1 (A64-N5-C30-hSL-N5) comprising derived and/or modified sequence from Pf(3D7)__XP_001351122.1__HsALB_Pf-CSP(98-374) (opt11)
gggagagucccgcagucggcguccagcggcucugcuuguucgugugugugucguugcaggccuuauucaagcuuaccaugaaauggguaaccuucauaucccuacucuuccuuuucuccucggccuacuccgcagacggaaacccagacccaaacgcaaaccccaacguagacccaaacgcaaacccaaauguagacccaaacgcaaacccaaacguggacccaaacgcgaaccccaacgcaaaccccaacgcaaacccaaacgccaacccaaacgcaaacccaaacgccaacccaaacgcaaaccccaacgccaaccccaacgccaacccaaacgcaaacccaaacgcaaaccccaacgcaaacccaaacgccaacccaaacgccaacccaaacgccaaccccaacgcaaacccaaacgccaacccaaacguagacccaaacgcaaacccaaacgcaaacccaaacgcaaaccccaacgcaaaccccaacgcaaacccaaacgcaaacccaaacgcaaacccaaacgcaaacccaaacgccaacccaaacgcgaaccccaacgccaacccaaacgcaaacccaaacgccaacccaaacgccaacccaaacgcaaaccccaacgcaaacccaaacgcaaacccaaacgccaacccgaacaaaaacaaccaaggcaacggccaaggacacaacaugccaaacgaccccaaccgcaacguagacgaaaacgccaacgcaaacuccgcagucaaaaacaacaacaacgaagaacccuccgacaaacacauaaaagaauaccuaaacaaaauccaaaacucgcucucaaccgaauggucccccugcuccgucaccugcggcaacggcauccaaguacgcaucaaaccaggcucagcaaacaaaccaaaagacgaacucgacuacgccaacgacauagaaaaaaaaauaugcaaaauggagaaaugcuaaggacuagucccuguucccagagcccacuuuuuuuucuuuuuuugaaauaaaauagccugucuuucagaucuaaaaaaaaaaaaaaaaaaaaaaaaaaaaaaaaaaaaaaaaaaaaaaaaaaaaaaaaaaaaaaaaugcaucccccccccccccccccccccccccccccccaaaggcucuuuucagagccaccagaauu

SEQ ID NO: 613 - RNA, 1233 nt, Artificial Sequence
  mRNA Design a-1 (A64-N5-C30-hSL-N5) comprising derived and/or modified sequence from Pf(3D7)__XP_001351122.1__HsALB_Pf-CSP(98-397) (opt11)
gggagagucccgcagucggcguccagcggcucugcuuguucgugugugugucguugcaggccuuauucaagcuuaccaugaaauggguaaccuucaucagccuacuauuccuauucagcuccgccuacagcgccgacggaaacccagacccaaacgccaaccccaacgucgacccaaacgccaaccccaacguagacccaaacgccaaccccaacgucgaccccaacgccaaccccaacgccaacccaaacgccaacccuaacgccaacccaaacgccaacccgaacgccaaccccaacgcgaacccaaacgccaacccaaacgcaaaccccaacgccaaccccaacgccaaccccaacgcaaaccccaacgcaaacccaaacgccaacccaaacgccaaccccaacgccaaccccaaugcaaacccaaacgucgaccccaacgccaacccaaacgccaaccccaacgccaaccccaacgccaaccccaacgcaaaccccaacgccaaccccaacgcgaaccccaacgccaaccccaacgccaacccaaacgccaaccccaacgccaaccccaacgccaaccccaacgcuaaccccaacgcaaacccaaacgccaacccaaacgccaacccaaacgccaaccccaacgccaacccaaacaaaaacaaccaaggcaacggacaaggacacaacaugccaaacgaccccaaccgcaacgucgacgaaaaugccaacgccaacuccgccgucaaaaacaacaacaacgaagaacccuccgacaaacacaucaaagaauaccuaaacaaaauacaaaacucucucucaaccgaauggucccccugcuccgucacaugcggcaacggcauccaaguccgcaucaaaccaggaucagccaauaaacccaaagacgaacucgacuacgccaacgacauagaaaaaaaaaucugcaaaauggaaaaaugcagcucagucuucaacgucgucaacuccucaaucggacuuauaaugguccuauccuuccucuuccuuaacuaaggacuagucccuguucccagagcccacuuuuuuuucuuuuuuugaaauaaaauagccugucuuucagaucuaaaaaaaaaaaaaaaaaaaaaaaaaaaaaaaaaaaaaaaaaaaaaaaaaaaaaaaaaaaaaaaaugcaucccccccccccccccccccccccccccccccaaaggcucuuuucagagccaccagaauu

SEQ ID NO: 614 - RNA, 1560 nt, Artificial Sequence
  mRNA Design a-1 (A64-N5-C30-hSL-N5) comprising derived and/or modified sequence from Pf(3D7)__XP_001351122.1__HsALB_Pf-CSP(199-377)_L(PVTN)_HBsAg (opt11)
gggagagucccgcagucggcguccagcggcucugcuuguucgugugugugucguugcaggccuuauucaagcuuaccaugaaaugggucacauucaucucgcuccucuuccuauucuccuccgccuacuccgacccuaacgccaaucccaacgccaaccccaacgccaaccccaacgccaaccccaacgccaaccccaaugcaaacccaaacgcaaaccccaacgccaaccccaacgcaaacccaaaugcaaaccccaacgcaaaccccaacgccaaccccaaugccaaccccaacgcuaaccccaacgccaauccaaacgccaaccccaacgcaaaccccaacgccaacccuaacaaaaauaaccaaggcaacggccaaggacacaacaugcccaacgaccccaaccgaaaugucgacgaaaacgcuaacgcuaacagcgccgucaaaaacaacaacaacgaagaacccuccgacaaacacauuaaagaauaccucaacaaaauccaaaacucccucuccaccgaauggucccccugcucuguaacuugcggcaacggcauccaaguccgcauaaaacccggaucagcaaacaaacccaaagacgaacucgacuacgcaaacgacauugagaagaaaaucugcaaaauggaaaaaugcucaucaguacccgucacuaacauggaaaacaucaccuccggcuuccucggcccccuccuaguccuacaagccgguuucuuccuucuuacacgcauccuaaccaucccacaaucccuagacuccugguggacaucuuuaaacuuccuuggaggauccccugucugccucggccaaaacucccaauccccaaccucuaaccacucucccacauccugcccucccauaugccccgguuaccgcuggaugugccuccgccgcuucaucaucuuccucuucauacuccucuuaugccucaucuuccuccucguacuacucgacuaccaagguaugcuacccguaugcccucucauccccggcuccaccacaaccaacaccggccccugcaaaacaugcaccacccccgcacagggcaauuccauguuccccuccugcuguugcaccaaacccacagacggcaacuguaccugcauccccauccccuccucuugggcauuugccaaauaccucugggaaugggccuccguccgauucucuuggcuuucacuccucguucccuucguacaaugguucgucggccuaucacccaccgucuggcucuccgccaucuggaugaugugguacuggggcccuucacuuuacuccauagucagccccuucauaccacuccuccccaucuucuucugccuauggguauacaucuaaggacuagucccuguucccagagcccacuuuuuuuucuuuuuuugaaauaaaauagccugucuuucagaucuaaaaaaaaaaaaaaaaaaaaaaaaaaaaaaaaaaaaaaaaaaaaaaaaaaaaaaaaaaaaaaaaugcaucccccccccccccccccccccccccccccccaaaggcucuuuucagagccaccagaauu

SEQ ID NO: 615 - RNA, 1299 nt, Artificial Sequence
  mRNA Design a-1 (A64-N5-C30-hSL-N5) comprising derived and/or modified sequence from Pb(ANKA)__XP_022712148.1__Pb-CSP (opt11)
gggagagucccgcagucggcguccagcggcucugcuuguucgugugugugucguugcaggccuuauucaagcuuaccaugaaaaaaugcaccauccucgucguagccucccuccuccuagucaacucccuccuccccggauacgggcaaaacaaaucaauucaagcccaacgcaaccucaacgaacucugcuacaacgaaggcaacgacaacaaacuauaccacguacucaacuccaaaaacgguaaaaucuacaaccgcaacacugucaaccgccuacucgccgacgcccccgaaggcaaaaaaaacgaaaaaaaaaacgaaaaaaucgaacgcaacaacaaacucaaacaacccccacccccaccaaaccccaacgacccccccccccccaaucccaaugaccccccaccccccaaccccaacgaccccccccccccaaaccccaacgacccccccccccccaacgccaacgauccaccuccucccaacgcaaacgacccagcaccuccaaacgccaacgaccccgcccccccaaacgcaaacgacccagcccccccaaacgcaaacgaccccgccccccccaacgccaacgacccacccccccccaaccccaacgacccagccccccccaaugccaacgacccccccccucccaaccccaacgaccccgcccccccacaaggaaacaacaacccacaaccccaaccacgaccccaaccccaaccccaaccccaaccacaaccacaaccccaaccccaaccacaaccccgaccacaaccccaaccccaacccggcggcaacaacaacaacaaaaacaacaacaacgacgacuccuacaucccauccgccgaaaaaauccucgaauucgucaaacaaauacgcgacuccauaaccgaagaauggucccaaugcaacgugaccugcggcucaggcauccgaguccgcaaacgcaaaggaucuaacaaaaaagccgaagaccucacccuagaagacaucgacaccgaaaucugcaaaauggacaaaugcuccuccauauucaacaucgucucaaacucacucggcuuugucauccuccucguacucgucuucuucaacuaaggacuagucccuguucccagagcccacuuuuuuuucuuuuuuugaaauaaaauagccugucuuucagaucuaaaaaaaaaaaaaaaaaaaaaaaaaaaaaaaaaaaaaaaaaaaaaaaaaaaaaaaaaaaaaaaaugcaucccccccccccccccccccccccccccccccaaaggcucuuuucagagccaccagaauu

SEQ ID NO: 616 - RNA, 1464 nt, Artificial Sequence
  mRNA Design a-1 (A64-N5-C30-hSL-N5) comprising derived and/or modified sequence from Pb(ANKA)__XP_022712148.1__Pb-CSP_L(G4SG4)_TM domain HA (opt11)
gggagagucccgcagucggcguccagcggcucugcuuguucgugugugugucguugcaggccuuauucaagcuuaccaugaaaaaaugcacaauccuugucguagccucccuacuacucguaaacucacuccuacccggauacggccaaaacaaaucuauccaagcccaacguaaccuuaaugaacuaugcuacaacgaaggcaacgacaacaaacuuuaccacguccugaacuccaaaaacggcaaaaucuacaaccggaacaccguaaaucgccugcucgcugacgcaccagaaggaaaaaaaaacgaaaaaaaaaacgaaaaaauagagcguaacaacaagcucaaacaaccgcccccccccccaaaccccaacgaccccccccccccuaaccccaacgacccaccgccacccaacccaaacgacccccccccaccaaaccccaacgacccaccaccaccgaacgccaacgacccaccuccccccaacgccaacgacccugcaccccccaacgccaacgaucccgccccccccaacgccaacgacccagcacccccaaacgccaacgauccagcuccccccaacgccaacgaccccccaccccccaaccccaacgacccagcccccccaaacgcuaacgacccccccccccccaacccaaacgacccagcccccccccaaggcaacaacaacccucaaccccaaccccgcccgcaaccccaaccccaaccacaaccacaaccucaaccacaaccacaaccccaaccccgcccacaaccacaaccccaaccaggcggcaacaacaacaacaaaaacaacaacaacgacgacuccuacauccccucagcagaaaaaauccucgaguucgucaaacaaauccgcgacucuaucacagaagaauggucccaaugcaacguaaccugcggcucaggcauccgcguccgaaaacgaaaaggcucaaacaaaaaagccgaagaccucacacucgaagacaucgacaccgaaauaugcaaaauggacaaaugcuccuccauauucaacaucgucucaaacucucucgguuucgucaucuuacucguccucguauucuucaacggcggcggaggcuccggcggaggaggcaaacuagaauccaccagaaucuaccaaauccucgccauauacucuaccgucgccagcucccuuguccucguggucucccucggagcaaucuccuucuggaugugcucuaacggcucacuccaaugccguaucugcauuuaaggacuagucccuguucccagagcccacuuuuuuuucuuuuuuugaaauaaaauagccugucuuucagaucuaaaaaaaaaaaaaaaaaaaaaaaaaaaaaaaaaaaaaaaaaaaaaaaaaaaaaaaaaaaaaaaaugcaucccccccccccccccccccccccccccccccaaaggcucuuuucagagccaccagaauu

SEQ ID NO: 617 - RNA, 1284 nt, Artificial Sequence
  mRNA Design a-1 (A64-N5-C30-hSL-N5) comprising derived and/or modified sequence from Pb(ANKA)__XP_022712148.1__HsALB_Pb-CSP(24-340) (opt11)
gggagagucccgcagucggcguccagcggcucugcuuguucgugugugugucguugcaggccuuauucaagcuuaccaugaaaugggucaccuucaucucccuacuauuccucuuuucauccgcuuacucacaaaacaaauccauccaagcccaacgcaaccucaaugaacuaugcuacaacgaaggcaacgacaacaaacucuaccacguccucaacucaaaaaacggaaaaauauacaaccgcaacaccguaaaccgccuacuagccgacgcccccgaaggcaaaaaaaacgaaaaaaaaaacgaaaaaaucgaacgcaacaacaaacuaaaacaacccccccccccccccaaccccaacgacccccccccccccaaccccaacgaccccccacccccaaacccaaacgaccccccuccccccaacccaaacgaccccccaccccccaacgcaaacgacccccccccacccaacgccaacgaccccgccccccccaacgccaacgaucccgccccccccaacgccaacgaccccgccccccccaacgccaacgacccagccccccccaacgcaaacgacccccccccccccaaccccaacgaccccgcaccccccaacgccaacgacccacccccacccaaccccaacgaccccgcacccccacaaggaaacaacaacccccaaccccaaccccgaccccaaccccaaccccaaccccaaccccaaccgcaaccccagccacaaccacaaccccgcccucaaccucaaccccaacccggaggaaacaacaacaacaaaaauaacaacaacgaugacuccuacauccccuccgcagaaaaaauacucgaauucguaaaacaaauccgcgacucaaucaccgaagaauggucccaaugcaacguaaccugcggcuccggcauccgcguccgcaaacgcaaaggcuccaacaagaaagccgaagaccucacacuggaagacauagacaccgaaauaugcaaaauggauaaaugcuccuccaucuucaacaucgucuccaacucucucggcuucguaauacuucucguucucguauucuucaacuaaggacuagucccuguucccagagcccacuuuuuuuucuuuuuuugaaauaaaauagccugucuuucagaucuaaaaaaaaaaaaaaaaaaaaaaaaaaaaaaaaaaaaaaaaaaaaaaaaaaaaaaaaaaaaaaaaugcaucccccccccccccccccccccccccccccccaaaggcucuuuucagagccaccagaauu

SEQ ID NO: 618 - RNA, 1302 nt, Artificial Sequence
  mRNA Design a-1 (A64-N5-C30-hSL-N5) comprising derived and/or modified sequence from Pb(ANKA)__XP_022712148.1__HsIns-iso1_Pb-CSP(24-340) (opt11)
gggagagucccgcagucggcguccagcggcucugcuuguucgugugugugucguugcaggccuuauucaagcuuaccauggcccucuggaugcgacuacucccccuccucgcacuccuagcccucuggggccccgaccccgccgccgcacaaaacaaauccauccaagcccaacgcaaccucaaugaacucugcuacaacgaaggcaacgacaacaaacucuaccacguccucaacucaaaaaacggaaaaaucuacaaccgaaacaccgucaaccgccuccuugccgacgccccagaaggcaaaaaaaacgagaaaaaaaaugaaaaaaucgaacgcaacaacaaacucaaacaaccccccccccccccgaacccuaacgacccccccccccccaaccccaaugaccccccacccccaaacccgaacgaccccccaccccccaaccccaacgaccccccucccccuaacgcaaacgacccuccaccccccaacgccaacgaccccgccccaccaaacgccaaugaccccgccccaccaaacgcaaacgauccagcccccccaaacgcaaacgaccccgcaccacccaacgcaaacgacccccccccccccaaccccaacgaccccgcccccccaaacgccaacgaccccccaccacccaaccccaacgaccccgcacccccacaaggcaacaacaacccacaaccacaaccccgcccccaaccccaaccacaaccccaaccccaaccccaaccacaaccacaaccacaaccccgcccccaaccccaaccccaacccggcggcaacaacaacaacaaaaacaacaauaacgacgacucuuacauccccucagccgaaaaaauacucgaauucgucaaacaaauccgcgacuccaucaccgaagaauggucacaaugcaacgucaccugcggaucaggcauccgaguacgcaaacgcaaaggcuccaacaaaaaagccgaagaccucacccucgaagacaucgacaccgaaauuugcaaaauggacaagugcuccuccauauucaacaucguuucaaacucauuaggauucgucauccuccucguccucgucuucuucaacuaaggacuagucccuguucccagagcccacuuuuuuuucuuuuuuugaaauaaaauagccugucuuucagaucuaaaaaaaaaaaaaaaaaaaaaaaaaaaaaaaaaaaaaaaaaaaaaaaaaaaaaaaaaaaaaaaaugcaucccccccccccccccccccccccccccccccaaaggcucuuuucagagccaccagaauu

SEQ ID NO: 619 - RNA, 1281 nt, Artificial Sequence
  mRNA Design a-1 (A64-N5-C30-hSL-N5) comprising derived and/or modified sequence from Pb(ANKA)__XP_022712148.1__HsSPARC_Pb-CSP(24-340) (opt11)
gggagagucccgcagucggcguccagcggcucugcuuguucgugugugugucguugcaggccuuauucaagcuuaccaugcgcgccuggaucuucuuccuccucugccuugccggccgcgcacuagcccaaaacaaaucuauccaagcccaacgcaaccucaacgaacucugcuacaacgaaggaaacgacaacaaacucuaccauguacucaacuccaaaaacggaaaaaucuacaaccgcaacaccguaaaccgccuacucgcugacgccccugaaggcaaaaaaaacgaaaaaaaaaacgaaaaaaucgaacgcaacaacaaacucaaacaaccuccccccccccccaacccaaacgacccccccccucccaacccaaacgaccccccacccccaaaccccaacgacccccccccccccaacccaaacgacccccccccccccaacgccaacgacccccccccccccaacgccaacgaccccgccccaccaaacgcaaacgauccagcaccccccaacgccaacgaccccgcaccccccaacgcaaacgaccccgccccccccaacgccaacgaccccccgccaccuaacccaaacgacccagcaccccccaacgccaacgaucccccaccccccaaccccaacgacccagcccccccccaaggaaacaacaacccacaaccccaaccccgcccucaaccacaaccacaaccccaaccucaaccccaaccucaaccccaaccccaaccacgaccacaaccccaaccacaaccuggcggcaacaacaacaacaaaaacaacaacaacgacgacucauacaucccauccgcagaaaaaauacucgaauucguaaaacaaaucagagacuccauaacagaagaauggucccaaugcaacgucacuugcggcucaggcauacgcguccgcaaacgcaagggcuccaacaaaaaagccgaagaccuaacacucgaagacaucgacacagaaaucugcaaaauggacaaaugcucaucaaucuucaacaucguauccaacucacucggcuucguaauccuccucguccucgucuucuucaacuaaggacuagucccuguucccagagcccacuuuuuuuucuuuuuuugaaauaaaauagccugucuuucagaucuaaaaaaaaaaaaaaaaaaaaaaaaaaaaaaaaaaaaaaaaaaaaaaaaaaaaaaaaaaaaaaaaugcaucccccccccccccccccccccccccccccccaaaggcucuuuucagagccaccagaauu

SEQ ID NO: 620 - RNA, 1284 nt, Artificial Sequence
  mRNA Design a-1 (A64-N5-C30-hSL-N5) comprising derived and/or modified sequence from Pb(ANKA)__XP_022712148.1__IgE_Pb-CSP(24-340) (opt11)
gggagagucccgcagucggcguccagcggcucugcuuguucgugugugugucguugcaggccuuauucaagcuuaccauggacuggaccuggauccuuuuccuaguagccgccgcaacccgcguccacucacaaaacaaauccauccaagcacagcguaaccucaacgaacucuguuacaacgagggcaacgacaacaaacuauaccacguccugaacuccaaaaacggcaaaaucuacaaccgcaacaccguaaaccgucuccucgccgacgccccagaaggcaaaaaaaaugaaaaaaaaaacgaaaaaaucgaacgaaacaacaaacuaaaacaacccccccccccccccaaccccaacgacccccccccccccaaccccaacgauccccccccccccaaccccaacgacccccccccccccaaucccaacgacccccccccccccaacgcaaacgaccccccccccccuaaugccaacgacccagcaccccccaacgccaacgaccccgccccccccaacgcaaacgaccccgccccccccaacgccaacgaccccgccccaccuaacgcaaacgacccacccccccccaaccccaacgaccccgccccccccaacgcuaacgacccccccccccccaacccaaacgacccagcacccccacaaggcaacaacaacccacaaccccaaccccgcccccaaccucaaccacaaccccaaccacaaccccaaccccaaccccaaccccaaccccgcccacaaccccaaccucaacccggcggcaacaacaacaacaaaaacaacaacaacgacgacuccuacauaccauccgccgaaaaaauccucgaauucgucaaacaaauccgcgacucaaucaccgaagaauggucacaaugcaacgucaccugcggcuccgguauccgcguaagaaaacgcaaaggaucaaacaaaaaagccgaagaccucacccucgaagacauagacaccgaaaucugcaaaauggacaaauguucauccaucuuuaacaucgucuccaacucacucggauucguaauacuacuaguccuaguauucuucaacuaaggacuagucccuguucccagagcccacuuuuuuuucuuuuuuugaaauaaaauagccugucuuucagaucuaaaaaaaaaaaaaaaaaaaaaaaaaaaaaaaaaaaaaaaaaaaaaaaaaaaaaaaaaaaaaaaaugcaucccccccccccccccccccccccccccccccaaaggcucuuuucagagccaccagaauu

SEQ ID NO: 621 - RNA, 1470 nt, Artificial Sequence
  mRNA Design a-1 (A64-N5-C30-hSL-N5) comprising derived and/or modified sequence from Pf(3D7)__XP_001351122.1__Pf-CSP (wt)
aggagagucccgcagucggcguccagcggcucugcuuguucgugugugugucguugcaggccuuauucaagcuuaccaugaugagaaaauuagcuauuuuaucuguuucuuccuuuuuauuuguugaggccuuauuccaggaauaccagugcuauggaaguucgucaaacacaaggguucuaaaugaauuaaauuaugauaaugcaggcacuaauuuauauaaugaauuagaaaugaauuauuaugggaaacaggaaaauugguauagucuuaaaaaaaauaguagaucacuuggagaaaaugaugauggaaauaacgaagacaacgagaaauuaaggaaaccaaaacauaaaaaauuaaagcaaccagcggaugguaauccugauccaaaugcaaacccaaauguagaucccaaugccaacccaaauguagauccaaaugcaaacccaaauguagauccaaaugcaaacccaaaugcaaacccaaaugcaaacccaaaugcaaacccaaaugcaaacccaaaugcaaacccaaaugcaaacccaaaugcaaacccaaaugcaaacccaaaugcaaacccaaaugcaaacccaaaugcaaacccaaaugcaaacccaaaugcaaaccccaaugcaaauccuaaugcaaacccaaaugcaaacccaaacguagauccuaaugcaaauccaaaugcaaacccaaacgcaaaccccaaugcaaauccuaaugcaaaccccaaugcaaauccuaaugcaaauccuaaugccaauccaaaugcaaauccaaaugcaaacccaaacgcaaaccccaaugcaaauccuaaugccaauccaaaugcaaauccaaaugcaaacccaaaugcaaacccaaaugcaaaccccaaugcaaauccuaauaaaaacaaucaagguaauggacaaggucacaauaugccaaaugacccaaaccgaaauguagaugaaaaugcuaaugccaacagugcuguaaaaaauaauaauaacgaagaaccaagugauaagcacauaaaagaauauuuaaacaaaauacaaaauucucuuucaacugaaugguccccauguaguguaacuuguggaaaugguauucaaguuagaauaaagccuggcucugcuaauaaaccuaaagacgaauuagauuaugcaaaugauauugaaaaaaaaauuuguaaaauggaaaaauguuccaguguguuuaaugucguaaauaguucaauaggauuaauaaugguauuauccuucuuguuccuuaauuagggacuagucccuguucccagagcccacuuuuuuuucuuuuuuugaaauaaaauagccugucuuucagaucuaaaaaaaaaaaaaaaaaaaaaaaaaaaaaaaaaaaaaaaaaaaaaaaaaaaaaaaaaaaaaaaaugcaucccccccccccccccccccccccccccccccaaaggcucuuuucagagccaccagaauu

SEQ ID NO: 622 - RNA, 1401 nt, Artificial Sequence
  mRNA Design a-1 (A64-N5-C30-hSL-N5) comprising derived and/or modified sequence from Pf(3D7)__XP_001351122.1__Pf-CSP(1-374) (wt)
aggagagucccgcagucggcguccagcggcucugcuuguucgugugugugucguugcaggccuuauucaagcuuaccaugaugagaaaauuagcuauuuuaucuguuucuuccuuuuuauuuguugaggccuuauuccaggaauaccagugcuauggaaguucgucaaacacaaggguucuaaaugaauuaaauuaugauaaugcaggcacuaauuuauauaaugaauuagaaaugaauuauuaugggaaacaggaaaauugguauagucuuaaaaaaaauaguagaucacuuggagaaaaugaugauggaaauaacgaagacaacgagaaauuaaggaaaccaaaacauaaaaaauuaaagcaaccagcggaugguaauccugauccaaaugcaaacccaaauguagaucccaaugccaacccaaauguagauccaaaugcaaacccaaauguagauccaaaugcaaacccaaaugcaaacccaaaugcaaacccaaaugcaaacccaaaugcaaacccaaaugcaaacccaaaugcaaacccaaaugcaaacccaaaugcaaacccaaaugcaaacccaaaugcaaacccaaaugcaaacccaaaugcaaacccaaaugcaaaccccaaugcaaauccuaaugcaaacccaaaugcaaacccaaacguagauccuaaugcaaauccaaaugcaaacccaaacgcaaaccccaaugcaaauccuaaugcaaaccccaaugcaaauccuaaugcaaauccuaaugccaauccaaaugcaaauccaaaugcaaacccaaacgcaaaccccaaugcaaauccuaaugccaauccaaaugcaaauccaaaugcaaacccaaaugcaaacccaaaugcaaaccccaaugcaaauccuaauaaaaacaaucaagguaauggacaaggucacaauaugccaaaugacccaaaccgaaauguagaugaaaaugcuaaugccaacagugcuguaaaaaauaauaauaacgaagaaccaagugauaagcacauaaaagaauauuuaaacaaaauacaaaauucucuuucaacugaaugguccccauguaguguaacuuguggaaaugguauucaaguuagaauaaagccuggcucugcuaauaaaccuaaagacgaauuagauuaugcaaaugauauugaaaaaaaaauuuguaaaauggaaaaauguugaggacuagucccuguucccagagcccacuuuuuuuucuuuuuuugaaauaaaauagccugucuuucagaucuaaaaaaaaaaaaaaaaaaaaaaaaaaaaaaaaaaaaaaaaaaaaaaaaaaaaaaaaaaaaaaaaugcaucccccccccccccccccccccccccccccccaaaggcucuuuucagagccaccagaauu

SEQ ID NO: 623 - RNA, 1254 nt, Artificial Sequence
  mRNA Design a-1 (A64-N5-C30-hSL-N5) comprising derived and/or modified sequence from Pf(3D7)__XP_001351122.1__Pf-CSP(1-325) (wt)
aggagagucccgcagucggcguccagcggcucugcuuguucgugugugugucguugcaggccuuauucaagcuuaccaugaugagaaaauuagcuauuuuaucuguuucuuccuuuuuauuuguugaggccuuauuccaggaauaccagugcuauggaaguucgucaaacacaaggguucuaaaugaauuaaauuaugauaaugcaggcacuaauuuauauaaugaauuagaaaugaauuauuaugggaaacaggaaaauugguauagucuuaaaaaaaauaguagaucacuuggagaaaaugaugauggaaauaacgaagacaacgagaaauuaaggaaaccaaaacauaaaaaauuaaagcaaccagcggaugguaauccugauccaaaugcaaacccaaauguagaucccaaugccaacccaaauguagauccaaaugcaaacccaaauguagauccaaaugcaaacccaaaugcaaacccaaaugcaaacccaaaugcaaacccaaaugcaaacccaaaugcaaacccaaaugcaaacccaaaugcaaacccaaaugcaaacccaaaugcaaacccaaaugcaaacccaaaugcaaacccaaaugcaaacccaaaugcaaaccccaaugcaaauccuaaugcaaacccaaaugcaaacccaaacguagauccuaaugcaaauccaaaugcaaacccaaacgcaaaccccaaugcaaauccuaaugcaaaccccaaugcaaauccuaaugcaaauccuaaugccaauccaaaugcaaauccaaaugcaaacccaaacgcaaaccccaaugcaaauccuaaugccaauccaaaugcaaauccaaaugcaaacccaaaugcaaacccaaaugcaaaccccaaugcaaauccuaauaaaaacaaucaagguaauggacaaggucacaauaugccaaaugacccaaaccgaaauguagaugaaaaugcuaaugccaacagugcuguaaaaaauaauaauaacgaagaaccaagugauaagcacauaaaagaauauuuaaacaaaauacaaaauugaggacuagucccuguucccagagcccacuuuuuuuucuuuuuuugaaauaaaauagccugucuuucagaucuaaaaaaaaaaaaaaaaaaaaaaaaaaaaaaaaaaaaaaaaaaaaaaaaaaaaaaaaaaaaaaaaugcaucccccccccccccccccccccccccccccccaaaggcucuuuucagagccaccagaauu

SEQ ID NO: 624 - RNA, 1299 nt, Artificial Sequence
  mRNA Design a-1 (A64-N5-C30-hSL-N5) comprising derived and/or modified sequence from Pb(ANKA)__XP_022712148.1__Pb-CSP (wt)
aggagagucccgcagucggcguccagcggcucugcuuguucgugugugugucguugcaggccuuauucaagcuuaccaugaagaaguguaccauuuuaguuguagcgucacuuuuauuaguuaauucucuacuuccaggauauggacaaaauaaaagcauccaagcccaaaggaacuuaaacgagcuauguuacaaugaaggaaaugauaauaaauuguaucacgugcuuaacucuaagaauggaaaaauauacaaucgaaauacagucaacagauuacuugccgaugcucccgaaggaaaaaaaaaugagaaaaaaaacgaaaaaauagagcguaauaauaaauugaaacaaccaccaccaccaccaaacccaaaugacccaccaccaccaaacccaaaugacccaccaccaccaaacccaaaugacccaccaccaccaaacccaaaugacccaccaccaccaaacgcaaaugacccaccaccaccaaacgcaaaugacccagcaccaccaaacgcaaaugacccagcaccaccaaacgcaaaugacccagcaccaccaaacgcaaaugacccagcaccaccaaacgcaaaugacccaccaccaccaaacccaaaugacccagcaccaccaaacgcaaaugacccaccaccaccaaacccaaaugacccagcaccaccacaaggaaauaacaauccacaaccacagccacggccgcagccacaaccacagccacagccacaaccacagccacagccacaaccacagccacgaccacagccacaaccacagccaggugguaauaacaauaacaaaaauaauaauaaugacgauucuuauaucccaagcgcggaaaaaauacuagaauuuguuaaacagaucagggauaguaucacagaggaauggucucaauguaacguaacaugugguucugguauaagaguuagaaaacgaaaagguucaaauaagaaagcagaagauuugaccuuagaagauauugauacugaaauuuguaaaauggauaaauguucaaguauauuuaauauuguaagcaauucauuaggauuuguaauauuauuaguauuaguauucuuuaauuaaggacuagucccuguucccagagcccacuuuuuuuucuuuuuuugaaauaaaauagccugucuuucagaucuaaaaaaaaaaaaaaaaaaaaaaaaaaaaaaaaaaaaaaaaaaaaaaaaaaaaaaaaaaaaaaaaugcaucccccccccccccccccccccccccccccccaaaggcucuuuucagagccaccagaauu

SEQ ID NO: 625 - RNA, 1470 nt, Artificial Sequence
  mRNA Design a-1 (A64-N5-C30-hSL-N5) comprising derived and/or modified sequence from Pf(3D7)__XP_001351122.1__Pf-CSP (opt1) R8143
aggagagucccgcagucggcguccagcggcucugcuuguucgugugugugucguugcaggccuuauucaagcuuaccaugaugcgcaagcuggccauccucagcguguccagcuuccuguucgucgaggcccuguuccaggaguaccagugcuacggcuccagcuccaacacccgggugcucaacgagcugaacuacgacaacgcggggaccaaccuguacaacgagcucgagaugaacuacuacggcaagcaggagaacugguacagccugaagaagaacucccgcagccugggggagaacgacgacggcaacaacgaggacaacgagaagcuccggaagcccaagcacaagaagcugaagcagccggccgacgggaaccccgaccccaacgccaaccccaacguggacccgaacgccaaccccaacgucgaccccaacgccaaccccaacguggacccgaacgcgaaccccaacgccaaccccaacgccaaccccaacgccaacccgaacgcgaaccccaacgccaaccccaacgccaaccccaacgccaacccgaacgccaaccccaacgcgaaccccaacgccaaccccaacgccaacccgaacgccaaccccaacgccaaccccaacgcgaaccccaacgccaacccgaacgccaaccccaacguggaccccaacgccaaccccaacgccaacccgaacgcgaaccccaacgccaaccccaacgccaacccgaacgccaaccccaacgccaaccccaacgcgaaccccaacgccaacccgaacgccaaccccaacgccaaccccaacgcgaaccccaacgccaacccgaacgccaaccccaacgccaaccccaacgccaaccccaacgcgaacccgaacgccaaccccaacaagaacaaccagggcaacggccaggggcacaacaugcccaacgaccccaaccgcaacgucgacgagaacgccaacgccaacuccgccgugaagaacaacaacaacgaggagccgagcgacaagcacaucaaggaguaccugaacaagauccagaacucccucagcacggaguggucccccugcagcgugaccugcggcaacgggauccagguccggaucaagcccggcuccgcgaacaagcccaaggacgagcuggacuacgccaacgacaucgagaagaagaucugcaagauggagaagugcagcuccguguucaacguggucaacagcuccaucgggcugaucauggugcucagcuuccuguuccugaacugaggacuagucccuguucccagagcccacuuuuuuuucuuuuuuugaaauaaaauagccugucuuucagaucuaaaaaaaaaaaaaaaaaaaaaaaaaaaaaaaaaaaaaaaaaaaaaaaaaaaaaaaaaaaaaaaaugcaucccccccccccccccccccccccccccccccaaaggcucuuuucagagccaccagaauu

SEQ ID NO: 626 - RNA, 1401 nt, Artificial Sequence
  mRNA Design a-1 (A64-N5-C30-hSL-N5) comprising derived and/or modified sequence from Pf(3D7)__XP_001351122.1__Pf-CSP(1-374) (opt1)
aggagagucccgcagucggcguccagcggcucugcuuguucgugugugugucguugcaggccuuauucaagcuuaccaugaugcgcaagcuggccauccucagcguguccagcuuccuguucgucgaggcccuguuccaggaguaccagugcuacggcuccagcuccaacacccgggugcucaacgagcugaacuacgacaacgcggggaccaaccuguacaacgagcucgagaugaacuacuacggcaagcaggagaacugguacagccugaagaagaacucccgcagccugggggagaacgacgacggcaacaacgaggacaacgagaagcuccggaagcccaagcacaagaagcugaagcagccggccgacgggaaccccgaccccaacgccaaccccaacguggacccgaacgccaaccccaacgucgaccccaacgccaaccccaacguggacccgaacgcgaaccccaacgccaaccccaacgccaaccccaacgccaacccgaacgcgaaccccaacgccaaccccaacgccaaccccaacgccaacccgaacgccaaccccaacgcgaaccccaacgccaaccccaacgccaacccgaacgccaaccccaacgccaaccccaacgcgaaccccaacgccaacccgaacgccaaccccaacguggaccccaacgccaaccccaacgccaacccgaacgcgaaccccaacgccaaccccaacgccaacccgaacgccaaccccaacgccaaccccaacgcgaaccccaacgccaacccgaacgccaaccccaacgccaaccccaacgcgaaccccaacgccaacccgaacgccaaccccaacgccaaccccaacgccaaccccaacgcgaacccgaacgccaaccccaacaagaacaaccagggcaacggccaggggcacaacaugcccaacgaccccaaccgcaacgucgacgagaacgccaacgccaacuccgccgugaagaacaacaacaacgaggagccgagcgacaagcacaucaaggaguaccugaacaagauccagaacucccucagcacggaguggucccccugcagcgugaccugcggcaacgggauccagguccggaucaagcccggcuccgcgaacaagcccaaggacgagcuggacuacgccaacgacaucgagaagaagaucugcaagauggagaagugcugaggacuagucccuguucccagagcccacuuuuuuuucuuuuuuugaaauaaaauagccugucuuucagaucuaaaaaaaaaaaaaaaaaaaaaaaaaaaaaaaaaaaaaaaaaaaaaaaaaaaaaaaaaaaaaaaaugcaucccccccccccccccccccccccccccccccaaaggcucuuuucagagccaccagaauu

SEQ ID NO: 627 - RNA, 1254 nt, Artificial Sequence
  mRNA Design a-1 (A64-N5-C30-hSL-N5) comprising derived and/or modified sequence from Pf(3D7)__XP_001351122.1__Pf-CSP(1-325) (opt1)
aggagagucccgcagucggcguccagcggcucugcuuguucgugugugugucguugcaggccuuauucaagcuuaccaugaugcgcaagcuggccauccucagcguguccagcuuccuguucgucgaggcccuguuccaggaguaccagugcuacggcuccagcuccaacacccgggugcucaacgagcugaacuacgacaacgcggggaccaaccuguacaacgagcucgagaugaacuacuacggcaagcaggagaacugguacagccugaagaagaacucccgcagccugggggagaacgacgacggcaacaacgaggacaacgagaagcuccggaagcccaagcacaagaagcugaagcagccggccgacgggaaccccgaccccaacgccaaccccaacguggacccgaacgccaaccccaacgucgaccccaacgccaaccccaacguggacccgaacgcgaaccccaacgccaaccccaacgccaaccccaacgccaacccgaacgcgaaccccaacgccaaccccaacgccaaccccaacgccaacccgaacgccaaccccaacgcgaaccccaacgccaaccccaacgccaacccgaacgccaaccccaacgccaaccccaacgcgaaccccaacgccaacccgaacgccaaccccaacguggaccccaacgccaaccccaacgccaacccgaacgcgaaccccaacgccaaccccaacgccaacccgaacgccaaccccaacgccaaccccaacgcgaaccccaacgccaacccgaacgccaaccccaacgccaaccccaacgcgaaccccaacgccaacccgaacgccaaccccaacgccaaccccaacgccaaccccaacgcgaacccgaacgccaaccccaacaagaacaaccagggcaacggccaggggcacaacaugcccaacgaccccaaccgcaacgucgacgagaacgccaacgccaacuccgccgugaagaacaacaacaacgaggagccgagcgacaagcacaucaaggaguaccugaacaagauccagaacugaggacuagucccuguucccagagcccacuuuuuuuucuuuuuuugaaauaaaauagccugucuuucagaucuaaaaaaaaaaaaaaaaaaaaaaaaaaaaaaaaaaaaaaaaaaaaaaaaaaaaaaaaaaaaaaaaugcaucccccccccccccccccccccccccccccccaaaggcucuuuucagagccaccagaauu

SEQ ID NO: 628 - RNA, 1470 nt, Artificial Sequence
  mRNA Design a-1 (A64-N5-C30-hSL-N5) comprising derived and/or modified sequence from Pf(3D7)__XP_001351122.1__HsALB_Pf-CSP(19-397) (opt1) R8229/R8524
aggagagucccgcagucggcguccagcggcucugcuuguucgugugugugucguugcaggccuuauucaagcuuaccaugaagugggugaccuucaucagccugcucuuccuguucuccagcgccuacucccuguuccaggaguaccagugcuacggcuccagcuccaacacccgggugcucaacgagcugaacuacgacaacgcggggaccaaccuguacaacgagcucgagaugaacuacuacggcaagcaggagaacugguacagccugaagaagaacucccgcagccugggggagaacgacgacggcaacaacgaggacaacgagaagcuccggaagcccaagcacaagaagcugaagcagccggccgacgggaaccccgaccccaacgccaaccccaacguggacccgaacgccaaccccaacgucgaccccaacgccaaccccaacguggacccgaacgcgaaccccaacgccaaccccaacgccaaccccaacgccaacccgaacgcgaaccccaacgccaaccccaacgccaaccccaacgccaacccgaacgccaaccccaacgcgaaccccaacgccaaccccaacgccaacccgaacgccaaccccaacgccaaccccaacgcgaaccccaacgccaacccgaacgccaaccccaacguggaccccaacgccaaccccaacgccaacccgaacgcgaaccccaacgccaaccccaacgccaacccgaacgccaaccccaacgccaaccccaacgcgaaccccaacgccaacccgaacgccaaccccaacgccaaccccaacgcgaaccccaacgccaacccgaacgccaaccccaacgccaaccccaacgccaaccccaacgcgaacccgaacgccaaccccaacaagaacaaccagggcaacggccaggggcacaacaugcccaacgaccccaaccgcaacgucgacgagaacgccaacgccaacuccgccgugaagaacaacaacaacgaggagccgagcgacaagcacaucaaggaguaccugaacaagauccagaacucccucagcacggaguggucccccugcagcgugaccugcggcaacgggauccagguccggaucaagcccggcuccgcgaacaagcccaaggacgagcuggacuacgccaacgacaucgagaagaagaucugcaagauggagaagugcagcuccguguucaacguggucaacagcuccaucgggcugaucauggugcucagcuuccuguuccugaacugaggacuagucccuguucccagagcccacuuuuuuuucuuuuuuugaaauaaaauagccugucuuucagaucuaaaaaaaaaaaaaaaaaaaaaaaaaaaaaaaaaaaaaaaaaaaaaaaaaaaaaaaaaaaaaaaaugcaucccccccccccccccccccccccccccccccaaaggcucuuuucagagccaccagaauu

SEQ ID NO: 629 - RNA, 1488 nt, Artificial Sequence
  mRNA Design a-1 (A64-N5-C30-hSL-N5) comprising derived and/or modified sequence from Pf(3D7)__XP_001351122.1__HsIns-iso1_Pf-CSP(19-397) (opt1)
aggagagucccgcagucggcguccagcggcucugcuuguucgugugugugucguugcaggccuuauucaagcuuaccauggcccuguggaugcgccuccugccccugcucgcccugcuggcgcucuggggcccggaccccgccgccgcccuguuccaggaguaccagugcuacggcuccagcuccaacacccgggugcucaacgagcugaacuacgacaacgcggggaccaaccuguacaacgagcucgagaugaacuacuacggcaagcaggagaacugguacagccugaagaagaacucccgcagccugggggagaacgacgacggcaacaacgaggacaacgagaagcuccggaagcccaagcacaagaagcugaagcagccggccgacgggaaccccgaccccaacgccaaccccaacguggacccgaacgccaaccccaacgucgaccccaacgccaaccccaacguggacccgaacgcgaaccccaacgccaaccccaacgccaaccccaacgccaacccgaacgcgaaccccaacgccaaccccaacgccaaccccaacgccaacccgaacgccaaccccaacgcgaaccccaacgccaaccccaacgccaacccgaacgccaaccccaacgccaaccccaacgcgaaccccaacgccaacccgaacgccaaccccaacguggaccccaacgccaaccccaacgccaacccgaacgcgaaccccaacgccaaccccaacgccaacccgaacgccaaccccaacgccaaccccaacgcgaaccccaacgccaacccgaacgccaaccccaacgccaaccccaacgcgaaccccaacgccaacccgaacgccaaccccaacgccaaccccaacgccaaccccaacgcgaacccgaacgccaaccccaacaagaacaaccagggcaacggccaggggcacaacaugcccaacgaccccaaccgcaacgucgacgagaacgccaacgccaacuccgccgugaagaacaacaacaacgaggagccgagcgacaagcacaucaaggaguaccugaacaagauccagaacucccucagcacggaguggucccccugcagcgugaccugcggcaacgggauccagguccggaucaagcccggcuccgcgaacaagcccaaggacgagcuggacuacgccaacgacaucgagaagaagaucugcaagauggagaagugcagcuccguguucaacguggucaacagcuccaucgggcugaucauggugcucagcuuccuguuccugaacugaggacuagucccuguucccagagcccacuuuuuuuucuuuuuuugaaauaaaauagccugucuuucagaucuaaaaaaaaaaaaaaaaaaaaaaaaaaaaaaaaaaaaaaaaaaaaaaaaaaaaaaaaaaaaaaaaugcaucccccccccccccccccccccccccccccccaaaggcucuuuucagagccaccagaauu

SEQ ID NO: 630 - RNA, 1467 nt, Artificial Sequence
  mRNA Design a-1 (A64-N5-C30-hSL-N5) comprising derived and/or modified sequence from Pf(3D7)__XP_001351122.1__HsSPARC_Pf-CSP(19-397) (opt1)
aggagagucccgcagucggcguccagcggcucugcuuguucgugugugugucguugcaggccuuauucaagcuuaccaugcgcgccuggaucuucuuccugcucugccuggccggccgggcccuggcccuguuccaggaguaccagugcuacggcuccagcuccaacacccgggugcucaacgagcugaacuacgacaacgcggggaccaaccuguacaacgagcucgagaugaacuacuacggcaagcaggagaacugguacagccugaagaagaacucccgcagccugggggagaacgacgacggcaacaacgaggacaacgagaagcuccggaagcccaagcacaagaagcugaagcagccggccgacgggaaccccgaccccaacgccaaccccaacguggacccgaacgccaaccccaacgucgaccccaacgccaaccccaacguggacccgaacgcgaaccccaacgccaaccccaacgccaaccccaacgccaacccgaacgcgaaccccaacgccaaccccaacgccaaccccaacgccaacccgaacgccaaccccaacgcgaaccccaacgccaaccccaacgccaacccgaacgccaaccccaacgccaaccccaacgcgaaccccaacgccaacccgaacgccaaccccaacguggaccccaacgccaaccccaacgccaacccgaacgcgaaccccaacgccaaccccaacgccaacccgaacgccaaccccaacgccaaccccaacgcgaaccccaacgccaacccgaacgccaaccccaacgccaaccccaacgcgaaccccaacgccaacccgaacgccaaccccaacgccaaccccaacgccaaccccaacgcgaacccgaacgccaaccccaacaagaacaaccagggcaacggccaggggcacaacaugcccaacgaccccaaccgcaacgucgacgagaacgccaacgccaacuccgccgugaagaacaacaacaacgaggagccgagcgacaagcacaucaaggaguaccugaacaagauccagaacucccucagcacggaguggucccccugcagcgugaccugcggcaacgggauccagguccggaucaagcccggcuccgcgaacaagcccaaggacgagcuggacuacgccaacgacaucgagaagaagaucugcaagauggagaagugcagcuccguguucaacguggucaacagcuccaucgggcugaucauggugcucagcuuccuguuccugaacugaggacuagucccuguucccagagcccacuuuuuuuucuuuuuuugaaauaaaauagccugucuuucagaucuaaaaaaaaaaaaaaaaaaaaaaaaaaaaaaaaaaaaaaaaaaaaaaaaaaaaaaaaaaaaaaaaugcaucccccccccccccccccccccccccccccccaaaggcucuuuucagagccaccagaauu

SEQ ID NO: 631 - RNA, 1470 nt, Artificial Sequence
  mRNA Design a-1 (A64-N5-C30-hSL-N5) comprising derived and/or modified sequence from Pf(3D7)__XP_001351122.1__IgE_Pf-CSP(19-397) (opt1)
aggagagucccgcagucggcguccagcggcucugcuuguucgugugugugucguugcaggccuuauucaagcuuaccauggacuggaccuggauccuguuccucguggccgccgcgacccgcguccacagccuguuccaggaguaccagugcuacggcuccagcuccaacacccgggugcucaacgagcugaacuacgacaacgcggggaccaaccuguacaacgagcucgagaugaacuacuacggcaagcaggagaacugguacagccugaagaagaacucccgcagccugggggagaacgacgacggcaacaacgaggacaacgagaagcuccggaagcccaagcacaagaagcugaagcagccggccgacgggaaccccgaccccaacgccaaccccaacguggacccgaacgccaaccccaacgucgaccccaacgccaaccccaacguggacccgaacgcgaaccccaacgccaaccccaacgccaaccccaacgccaacccgaacgcgaaccccaacgccaaccccaacgccaaccccaacgccaacccgaacgccaaccccaacgcgaaccccaacgccaaccccaacgccaacccgaacgccaaccccaacgccaaccccaacgcgaaccccaacgccaacccgaacgccaaccccaacguggaccccaacgccaaccccaacgccaacccgaacgcgaaccccaacgccaaccccaacgccaacccgaacgccaaccccaacgccaaccccaacgcgaaccccaacgccaacccgaacgccaaccccaacgccaaccccaacgcgaaccccaacgccaacccgaacgccaaccccaacgccaaccccaacgccaaccccaacgcgaacccgaacgccaaccccaacaagaacaaccagggcaacggccaggggcacaacaugcccaacgaccccaaccgcaacgucgacgagaacgccaacgccaacuccgccgugaagaacaacaacaacgaggagccgagcgacaagcacaucaaggaguaccugaacaagauccagaacucccucagcacggaguggucccccugcagcgugaccugcggcaacgggauccagguccggaucaagcccggcuccgcgaacaagcccaaggacgagcuggacuacgccaacgacaucgagaagaagaucugcaagauggagaagugcagcuccguguucaacguggucaacagcuccaucgggcugaucauggugcucagcuuccuguuccugaacugaggacuagucccuguucccagagcccacuuuuuuuucuuuuuuugaaauaaaauagccugucuuucagaucuaaaaaaaaaaaaaaaaaaaaaaaaaaaaaaaaaaaaaaaaaaaaaaaaaaaaaaaaaaaaaaaaugcaucccccccccccccccccccccccccccccccaaaggcucuuuucagagccaccagaauu

SEQ ID NO: 632 - RNA, 1635 nt, Artificial Sequence
  mRNA Design a-1 (A64-N5-C30-hSL-N5) comprising derived and/or modified sequence from Pf(3D7)__XP_001351122.1__Pf-CSP_L(G4SG4)_TM domain HA (opt1)
aggagagucccgcagucggcguccagcggcucugcuuguucgugugugugucguugcaggccuuauucaagcuuaccaugaugcgcaagcuggccauccucagcguguccagcuuccuguucgucgaggcccuguuccaggaguaccagugcuacggcuccagcuccaacacccgggugcucaacgagcugaacuacgacaacgcggggaccaaccuguacaacgagcucgagaugaacuacuacggcaagcaggagaacugguacagccugaagaagaacucccgcagccugggggagaacgacgacggcaacaacgaggacaacgagaagcuccggaagcccaagcacaagaagcugaagcagccggccgacgggaaccccgaccccaacgccaaccccaacguggacccgaacgccaaccccaacgucgaccccaacgccaaccccaacguggacccgaacgcgaaccccaacgccaaccccaacgccaaccccaacgccaacccgaacgcgaaccccaacgccaaccccaacgccaaccccaacgccaacccgaacgccaaccccaacgcgaaccccaacgccaaccccaacgccaacccgaacgccaaccccaacgccaaccccaacgcgaaccccaacgccaacccgaacgccaaccccaacguggaccccaacgccaaccccaacgccaacccgaacgcgaaccccaacgccaaccccaacgccaacccgaacgccaaccccaacgccaaccccaacgcgaaccccaacgccaacccgaacgccaaccccaacgccaaccccaacgcgaaccccaacgccaacccgaacgccaaccccaacgccaaccccaacgccaaccccaacgcgaacccgaacgccaaccccaacaagaacaaccagggcaacggccaggggcacaacaugcccaacgaccccaaccgcaacgucgacgagaacgccaacgccaacuccgccgugaagaacaacaacaacgaggagccgagcgacaagcacaucaaggaguaccugaacaagauccagaacucccucagcacggaguggucccccugcagcgugaccugcggcaacgggauccagguccggaucaagcccggcuccgcgaacaagcccaaggacgagcuggacuacgccaacgacaucgagaagaagaucugcaagauggagaagugcagcuccguguucaacguggucaacagcuccaucgggcugaucauggugcucagcuuccuguuccugaacggcgggggcgggagcggcgggggcggcaagcucgaguccacgcggaucuaccagauccuggcgaucuacagcaccgucgccagcucccuggugcucguggucagccugggggccaucuccuucuggaugugcagcaacggcucccugcagugccgcaucugcaucugaggacuagucccuguucccagagcccacuuuuuuuucuuuuuuugaaauaaaauagccugucuuucagaucuaaaaaaaaaaaaaaaaaaaaaaaaaaaaaaaaaaaaaaaaaaaaaaaaaaaaaaaaaaaaaaaaugcaucccccccccccccccccccccccccccccccaaaggcucuuuucagagccaccagaauu

SEQ ID NO: 633 - RNA, 1509 nt, Artificial Sequence
  mRNA Design a-1 (A64-N5-C30-hSL-N5) comprising derived and/or modified sequence from Pf(3D7)__XP_001351122.1__Pf-CSP(199-377)_L(PVTN)_HBsAg (opt1) R8233
aggagagucccgcagucggcguccagcggcucugcuuguucgugugugugucguugcaggccuuauucaagcuuaccauggaccccaacgccaaccccaacgccaacccgaacgcgaaccccaacgccaaccccaacgccaacccgaacgccaaccccaacgccaaccccaacgcgaaccccaacgccaacccgaacgccaaccccaacgccaaccccaacgcgaaccccaacgccaacccgaacgccaaccccaacgccaaccccaacgccaaccccaacgcgaacccgaacgccaaccccaacaagaacaaccagggcaacggccaggggcacaacaugcccaacgaccccaaccgcaacgucgacgagaacgccaacgccaacuccgccgugaagaacaacaacaacgaggagccgagcgacaagcacaucaaggaguaccugaacaagauccagaacucccucagcacggaguggucccccugcagcgugaccugcggcaacgggauccagguccggaucaagcccggcuccgcgaacaagcccaaggacgagcuggacuacgccaacgacaucgagaagaagaucugcaagauggagaagugcagcuccgugccggugacgaacauggagaacaucaccagcggcuuccuggggccccuccuggugcugcaggccggcuucuuccuccugacccgcauccugaccaucccgcagucccucgacagcugguggaccucccugaacuuccucgggggcagccccgucugccuggggcagaacucccagagccccaccuccaaccacagccccaccuccugcccgcccaucugccccggcuaccgguggaugugccugcgccgguucaucaucuuccuguucauccuccugcugugccucaucuuccugcuggugcuccuggacuaccagggcaugcugcccgugugcccgcucauccccgggagcacgaccaccaacaccggccccugcaagacgugcaccacccccgcccaggggaacuccauguucccgagcugcugcugcaccaagcccacggacggcaacugcacgugcauccccauccccuccagcugggcguucgccaaguaccugugggagugggccuccguccgcuucagcuggcugucccuccuggugccguucgugcagugguucgucgggcugagccccaccguguggcucuccgccaucuggaugaugugguacuggggccccagccuguacagcaucgugucccccuucaucccgcugcuccccaucuucuucugccugugggucuacaucugaggacuagucccuguucccagagcccacuuuuuuuucuuuuuuugaaauaaaauagccugucuuucagaucuaaaaaaaaaaaaaaaaaaaaaaaaaaaaaaaaaaaaaaaaaaaaaaaaaaaaaaaaaaaaaaaaugcaucccccccccccccccccccccccccccccccaaaggcucuuuucagagccaccagaauu

SEQ ID NO: 634 - RNA, 1551 nt, Artificial Sequence
  mRNA Design a-1 (A64-N5-C30-hSL-N5) comprising derived and/or modified sequence from Pf(3D7)__XP_001351122.1__Pf-CSP(199-387)_L(PVTN)_HBsAg (opt1)
aggagagucccgcagucggcguccagcggcucugcuuguucgugugugugucguugcaggccuuauucaagcuuaccaugauggccccggaccccaacgccaaccccaacgccaacccgaacgcgaaccccaacgccaaccccaacgccaacccgaacgccaaccccaacgccaaccccaacgcgaaccccaacgccaacccgaacgccaaccccaacgccaaccccaacgcgaaccccaacgccaacccgaacgccaaccccaacgccaaccccaacgccaaccccaacgcgaacccgaacgccaaccccaacaagaacaaccagggcaacggccaggggcacaacaugcccaacgaccccaaccgcaacgucgacgagaacgccaacgccaacuccgccgugaagaacaacaacaacgaggagccgagcgacaagcacaucaaggaguaccugaacaagauccagaacucccucagcacggaguggucccccugcagcgugaccugcggcaacgggauccagguccggaucaagcccggcuccgcgaacaagcccaaggacgagcuggacuacgccaacgacaucgagaagaagaucugcaagauggagaagugcagcuccguguucaacguggucaacagcuccaucgggcuggggccggugacgaacauggagaacaucaccagcggcuuccuggggccccuccuggugcugcaggccggcuucuuccuccugacccgcauccugaccaucccgcagucccucgacagcugguggaccucccugaacuuccucgggggcagccccgucugccuggggcagaacucccagagccccaccuccaaccacagccccaccuccugcccgcccaucugccccggcuaccgguggaugugccugcgccgguucaucaucuuccuguucauccuccugcugugccucaucuuccugcuggugcuccuggacuaccagggcaugcugcccgugugcccgcucauccccgggagcacgaccaccaacaccggccccugcaagacgugcaccacccccgcccaggggaacuccauguucccgagcugcugcugcaccaagcccacggacggcaacugcacgugcauccccauccccuccagcugggcguucgccaaguaccugugggagugggccuccguccgcuucagcuggcugucccuccuggugccguucgugcagugguucgucgggcugagccccaccguguggcucuccgccaucuggaugaugugguacuggggccccagccuguacagcaucgugucccccuucaucccgcugcuccccaucuucuucugccugugggucuacaucugaggacuagucccuguucccagagcccacuuuuuuuucuuuuuuugaaauaaaauagccugucuuucagaucuaaaaaaaaaaaaaaaaaaaaaaaaaaaaaaaaaaaaaaaaaaaaaaaaaaaaaaaaaaaaaaaaugcaucccccccccccccccccccccccccccccccaaaggcucuuuucagagccaccagaauu

SEQ ID NO: 635 - RNA, 735 nt, Artificial Sequence
  mRNA Design a-1 (A64-N5-C30-hSL-N5) comprising derived and/or modified sequence from Pf(3D7)__XP_001351122.1__HsALB_Pf-CSP(19-152) (opt1)
aggagagucccgcagucggcguccagcggcucugcuuguucgugugugugucguugcaggccuuauucaagcuuaccaugaagugggugaccuucaucagccugcucuuccuguucuccagcgccuacucccuguuccaggaguaccagugcuacggcuccagcuccaacacccgggugcucaacgagcugaacuacgacaacgcggggaccaaccuguacaacgagcucgagaugaacuacuacggcaagcaggagaacugguacagccugaagaagaacucccgcagccugggggagaacgacgacggcaacaacgaggacaacgagaagcuccggaagcccaagcacaagaagcugaagcagccggccgacgggaaccccgaccccaacgccaaccccaacguggacccgaacgccaaccccaacgucgaccccaacgccaaccccaacguggacccgaacgcgaaccccaacgccaaccccaacgccaaccccaacgccaacccgaacgcgaaccccaacgccaaccccugaggacuagucccuguucccagagcccacuuuuuuuucuuuuuuugaaauaaaauagccugucuuucagaucuaaaaaaaaaaaaaaaaaaaaaaaaaaaaaaaaaaaaaaaaaaaaaaaaaaaaaaaaaaaaaaaaugcaucccccccccccccccccccccccccccccccaaaggcucuuuucagagccaccagaauu

SEQ ID NO: 636 - RNA, 855 nt, Artificial Sequence
  mRNA Design a-1 (A64-N5-C30-hSL-N5) comprising derived and/or modified sequence from Pf(3D7)__XP_001351122.1__HsALB_Pf-CSP(19-192) (opt1)
aggagagucccgcagucggcguccagcggcucugcuuguucgugugugugucguugcaggccuuauucaagcuuaccaugaagugggugaccuucaucagccugcucuuccuguucuccagcgccuacucccuguuccaggaguaccagugcuacggcuccagcuccaacacccgggugcucaacgagcugaacuacgacaacgcggggaccaaccuguacaacgagcucgagaugaacuacuacggcaagcaggagaacugguacagccugaagaagaacucccgcagccugggggagaacgacgacggcaacaacgaggacaacgagaagcuccggaagcccaagcacaagaagcugaagcagccggccgacgggaaccccgaccccaacgccaaccccaacguggacccgaacgccaaccccaacgucgaccccaacgccaaccccaacguggacccgaacgcgaaccccaacgccaaccccaacgccaaccccaacgccaacccgaacgcgaaccccaacgccaaccccaacgccaaccccaacgccaacccgaacgccaaccccaacgcgaaccccaacgccaaccccaacgccaacccgaacgccaaccccaacgccaaccccaacgcgaaccccaacgccaacccgugaggacuagucccuguucccagagcccacuuuuuuuucuuuuuuugaaauaaaauagccugucuuucagaucuaaaaaaaaaaaaaaaaaaaaaaaaaaaaaaaaaaaaaaaaaaaaaaaaaaaaaaaaaaaaaaaaugcaucccccccccccccccccccccccccccccccaaaggcucuuuucagagccaccagaauu

SEQ ID NO: 637 - RNA, 1095 nt, Artificial Sequence
  mRNA Design a-1 (A64-N5-C30-hSL-N5) comprising derived and/or modified sequence from Pf(3D7)__XP_001351122.1__HsALB_Pf-CSP(19-272) (opt1) R8232
aggagagucccgcagucggcguccagcggcucugcuuguucgugugugugucguugcaggccuuauucaagcuuaccaugaagugggugaccuucaucagccugcucuuccuguucuccagcgccuacucccuguuccaggaguaccagugcuacggcuccagcuccaacacccgggugcucaacgagcugaacuacgacaacgcggggaccaaccuguacaacgagcucgagaugaacuacuacggcaagcaggagaacugguacagccugaagaagaacucccgcagccugggggagaacgacgacggcaacaacgaggacaacgagaagcuccggaagcccaagcacaagaagcugaagcagccggccgacgggaaccccgaccccaacgccaaccccaacguggacccgaacgccaaccccaacgucgaccccaacgccaaccccaacguggacccgaacgcgaaccccaacgccaaccccaacgccaaccccaacgccaacccgaacgcgaaccccaacgccaaccccaacgccaaccccaacgccaacccgaacgccaaccccaacgcgaaccccaacgccaaccccaacgccaacccgaacgccaaccccaacgccaaccccaacgcgaaccccaacgccaacccgaacgccaaccccaacguggaccccaacgccaaccccaacgccaacccgaacgcgaaccccaacgccaaccccaacgccaacccgaacgccaaccccaacgccaaccccaacgcgaaccccaacgccaacccgaacgccaaccccaacgccaaccccaacgcgaaccccaacgccaacccgaacgccaaccccaacgccaaccccaacgccaaccccaacgcgaacccgaacgccaaccccugaggacuagucccuguucccagagcccacuuuuuuuucuuuuuuugaaauaaaauagccugucuuucagaucuaaaaaaaaaaaaaaaaaaaaaaaaaaaaaaaaaaaaaaaaaaaaaaaaaaaaaaaaaaaaaaaaugcaucccccccccccccccccccccccccccccccaaaggcucuuuucagagccaccagaauu

SEQ ID NO: 638 - RNA, 1257 nt, Artificial Sequence
  mRNA Design a-1 (A64-N5-C30-hSL-N5) comprising derived and/or modified sequence from Pf(3D7)__XP_001351122.1__HsALB_Pf-CSP(19-272)_L(AAY)_Pf-CSP(310-3 27)_L(AAY)_Pf-CSP(346-375) (opt1)
aggagagucccgcagucggcguccagcggcucugcuuguucgugugugugucguugcaggccuuauucaagcuuaccaugaagugggugaccuucaucagccugcucuuccuguucuccagcgccuacucccuguuccaggaguaccagugcuacggcuccagcuccaacacccgggugcucaacgagcugaacuacgacaacgcggggaccaaccuguacaacgagcucgagaugaacuacuacggcaagcaggagaacugguacagccugaagaagaacucccgcagccugggggagaacgacgacggcaacaacgaggacaacgagaagcuccggaagcccaagcacaagaagcugaagcagccggccgacgggaaccccgaccccaacgccaaccccaacguggacccgaacgccaaccccaacgucgaccccaacgccaaccccaacguggacccgaacgcgaaccccaacgccaaccccaacgccaaccccaacgccaacccgaacgcgaaccccaacgccaaccccaacgccaaccccaacgccaacccgaacgccaaccccaacgcgaaccccaacgccaaccccaacgccaacccgaacgccaaccccaacgccaaccccaacgcgaaccccaacgccaacccgaacgccaaccccaacguggaccccaacgccaaccccaacgccaacccgaacgcgaaccccaacgccaaccccaacgccaacccgaacgccaaccccaacgccaaccccaacgcgaaccccaacgccaacccgaacgccaaccccaacgccaaccccaacgcgaaccccaacgccaacccgaacgccaaccccaacgccaaccccaacgccaaccccaacgcgaacccgaacgccaaccccgccgcguaugagccgagcgacaagcacaucaaggaguaccugaacaagauccagaacucccucgcggccuacaucaagcccggcuccgcgaacaagcccaaggacgagcuggacuacgccaacgacaucgagaagaagaucugcaagauggagaagugcagcugaggacuagucccuguucccagagcccacuuuuuuuucuuuuuuugaaauaaaauagccugucuuucagaucuaaaaaaaaaaaaaaaaaaaaaaaaaaaaaaaaaaaaaaaaaaaaaaaaaaaaaaaaaaaaaaaaugcaucccccccccccccccccccccccccccccccaaaggcucuuuucagagccaccagaauu

SEQ ID NO: 639 - RNA, 1218 nt, Artificial Sequence
  mRNA Design a-1 (A64-N5-C30-hSL-N5) comprising derived and/or modified sequence from Pf(3D7)__XP_001351122.1__HsALB_Pf-CSP(19-272)_L(AAY)_Pf-CSP(346-3 65)_L(AAY)_P2 (opt1)
aggagagucccgcagucggcguccagcggcucugcuuguucgugugugugucguugcaggccuuauucaagcuuaccaugaagugggugaccuucaucagccugcucuuccuguucuccagcgccuacucccuguuccaggaguaccagugcuacggcuccagcuccaacacccgggugcucaacgagcugaacuacgacaacgcggggaccaaccuguacaacgagcucgagaugaacuacuacggcaagcaggagaacugguacagccugaagaagaacucccgcagccugggggagaacgacgacggcaacaacgaggacaacgagaagcuccggaagcccaagcacaagaagcugaagcagccggccgacgggaaccccgaccccaacgccaaccccaacguggacccgaacgccaaccccaacgucgaccccaacgccaaccccaacguggacccgaacgcgaaccccaacgccaaccccaacgccaaccccaacgccaacccgaacgcgaaccccaacgccaaccccaacgccaaccccaacgccaacccgaacgccaaccccaacgcgaaccccaacgccaaccccaacgccaacccgaacgccaaccccaacgccaaccccaacgcgaaccccaacgccaacccgaacgccaaccccaacguggaccccaacgccaaccccaacgccaacccgaacgcgaaccccaacgccaaccccaacgccaacccgaacgccaaccccaacgccaaccccaacgcgaaccccaacgccaacccgaacgccaaccccaacgccaaccccaacgcgaaccccaacgccaacccgaacgccaaccccaacgccaaccccaacgccaaccccaacgcgaacccgaacgccaaccccgccgcguauaucaagcccggcuccgcgaacaagcccaaggacgagcuggacuacgccaacgacaucgaggcggccuaccaguacaucaaggccaacagcaaguucaucggcaucaccgagcugugaggacuagucccuguucccagagcccacuuuuuuuucuuuuuuugaaauaaaauagccugucuuucagaucuaaaaaaaaaaaaaaaaaaaaaaaaaaaaaaaaaaaaaaaaaaaaaaaaaaaaaaaaaaaaaaaaugcaucccccccccccccccccccccccccccccccaaaggcucuuuucagagccaccagaauu

SEQ ID NO: 640 - RNA, 1212 nt, Artificial Sequence
  mRNA Design a-1 (A64-N5-C30-hSL-N5) comprising derived and/or modified sequence from Pf(3D7)__XP_001351122.1__HsALB_Pf-CSP(19-272)_L(AAY)_Pf-CSP(346-3 65)_L(AAY)_PADRE (opt1)
aggagagucccgcagucggcguccagcggcucugcuuguucgugugugugucguugcaggccuuauucaagcuuaccaugaagugggugaccuucaucagccugcucuuccuguucuccagcgccuacucccuguuccaggaguaccagugcuacggcuccagcuccaacacccgggugcucaacgagcugaacuacgacaacgcggggaccaaccuguacaacgagcucgagaugaacuacuacggcaagcaggagaacugguacagccugaagaagaacucccgcagccugggggagaacgacgacggcaacaacgaggacaacgagaagcuccggaagcccaagcacaagaagcugaagcagccggccgacgggaaccccgaccccaacgccaaccccaacguggacccgaacgccaaccccaacgucgaccccaacgccaaccccaacguggacccgaacgcgaaccccaacgccaaccccaacgccaaccccaacgccaacccgaacgcgaaccccaacgccaaccccaacgccaaccccaacgccaacccgaacgccaaccccaacgcgaaccccaacgccaaccccaacgccaacccgaacgccaaccccaacgccaaccccaacgcgaaccccaacgccaacccgaacgccaaccccaacguggaccccaacgccaaccccaacgccaacccgaacgcgaaccccaacgccaaccccaacgccaacccgaacgccaaccccaacgccaaccccaacgcgaaccccaacgccaacccgaacgccaaccccaacgccaaccccaacgcgaaccccaacgccaacccgaacgccaaccccaacgccaaccccaacgccaaccccaacgcgaacccgaacgccaaccccgccgcguauaucaagcccggcuccgcgaacaagcccaaggacgagcuggacuacgccaacgacaucgaggcggccuacgccaaguucguggccgccuggacccugaaggcggccgccugaggacuagucccuguucccagagcccacuuuuuuuucuuuuuuugaaauaaaauagccugucuuucagaucuaaaaaaaaaaaaaaaaaaaaaaaaaaaaaaaaaaaaaaaaaaaaaaaaaaaaaaaaaaaaaaaaugcaucccccccccccccccccccccccccccccccaaaggcucuuuucagagccaccagaauu

SEQ ID NO: 641 - RNA, 1269 nt, Artificial Sequence
  mRNA Design a-1 (A64-N5-C30-hSL-N5) comprising derived and/or modified sequence from Pf(3D7)__XP_001351122.1__HsALB_Pf-CSP(19-272)_L(G4S)_Pf-CSP(310-3 27)_L(G4S)_Pf-CSP(346-375) (opt1)
aggagagucccgcagucggcguccagcggcucugcuuguucgugugugugucguugcaggccuuauucaagcuuaccaugaagugggugaccuucaucagccugcucuuccuguucuccagcgccuacucccuguuccaggaguaccagugcuacggcuccagcuccaacacccgggugcucaacgagcugaacuacgacaacgcggggaccaaccuguacaacgagcucgagaugaacuacuacggcaagcaggagaacugguacagccugaagaagaacucccgcagccugggggagaacgacgacggcaacaacgaggacaacgagaagcuccggaagcccaagcacaagaagcugaagcagccggccgacgggaaccccgaccccaacgccaaccccaacguggacccgaacgccaaccccaacgucgaccccaacgccaaccccaacguggacccgaacgcgaaccccaacgccaaccccaacgccaaccccaacgccaacccgaacgcgaaccccaacgccaaccccaacgccaaccccaacgccaacccgaacgccaaccccaacgcgaaccccaacgccaaccccaacgccaacccgaacgccaaccccaacgccaaccccaacgcgaaccccaacgccaacccgaacgccaaccccaacguggaccccaacgccaaccccaacgccaacccgaacgcgaaccccaacgccaaccccaacgccaacccgaacgccaaccccaacgccaaccccaacgcgaaccccaacgccaacccgaacgccaaccccaacgccaaccccaacgcgaaccccaacgccaacccgaacgccaaccccaacgccaaccccaacgccaaccccaacgcgaacccgaacgccaaccccggaggcggaggaucugagccgagcgacaagcacaucaaggaguaccugaacaagauccagaacucccucggcggagguggaaguaucaagcccggcuccgcgaacaagcccaaggacgagcuggacuacgccaacgacaucgagaagaagaucugcaagauggagaagugcagcugaggacuagucccuguucccagagcccacuuuuuuuucuuuuuuugaaauaaaauagccugucuuucagaucuaaaaaaaaaaaaaaaaaaaaaaaaaaaaaaaaaaaaaaaaaaaaaaaaaaaaaaaaaaaaaaaaugcaucccccccccccccccccccccccccccccccaaaggcucuuuucagagccaccagaauu

SEQ ID NO: 642 - RNA, 1254 nt, Artificial Sequence
  mRNA Design a-1 (A64-N5-C30-hSL-N5) comprising derived and/or modified sequence from Pf(3D7)__XP_001351122.1__HsALB_Pf-CSP(19-272)_L(G4S)_Pf-CSP(310-3 27)_Pf-CSP(346-375) (opt1)
aggagagucccgcagucggcguccagcggcucugcuuguucgugugugugucguugcaggccuuauucaagcuuaccaugaagugggugaccuucaucagccugcucuuccuguucuccagcgccuacucccuguuccaggaguaccagugcuacggcuccagcuccaacacccgggugcucaacgagcugaacuacgacaacgcggggaccaaccuguacaacgagcucgagaugaacuacuacggcaagcaggagaacugguacagccugaagaagaacucccgcagccugggggagaacgacgacggcaacaacgaggacaacgagaagcuccggaagcccaagcacaagaagcugaagcagccggccgacgggaaccccgaccccaacgccaaccccaacguggacccgaacgccaaccccaacgucgaccccaacgccaaccccaacguggacccgaacgcgaaccccaacgccaaccccaacgccaaccccaacgccaacccgaacgcgaaccccaacgccaaccccaacgccaaccccaacgccaacccgaacgccaaccccaacgcgaaccccaacgccaaccccaacgccaacccgaacgccaaccccaacgccaaccccaacgcgaaccccaacgccaacccgaacgccaaccccaacguggaccccaacgccaaccccaacgccaacccgaacgcgaaccccaacgccaaccccaacgccaacccgaacgccaaccccaacgccaaccccaacgcgaaccccaacgccaacccgaacgccaaccccaacgccaaccccaacgcgaaccccaacgccaacccgaacgccaaccccaacgccaaccccaacgccaaccccaacgcgaacccgaacgccaaccccggaggcggaggaucugagccgagcgacaagcacaucaaggaguaccugaacaagauccagaacucccucaucaagcccggcuccgcgaacaagcccaaggacgagcuggacuacgccaacgacaucgagaagaagaucugcaagauggagaagugcagcugaggacuagucccuguucccagagcccacuuuuuuuucuuuuuuugaaauaaaauagccugucuuucagaucuaaaaaaaaaaaaaaaaaaaaaaaaaaaaaaaaaaaaaaaaaaaaaaaaaaaaaaaaaaaaaaaaugcaucccccccccccccccccccccccccccccccaaaggcucuuuucagagccaccagaauu

SEQ ID NO: 643 - RNA, 1254 nt, Artificial Sequence
  mRNA Design a-1 (A64-N5-C30-hSL-N5) comprising derived and/or modified sequence from Pf(3D7)__XP_001351122.1__HsALB_Pf-CSP(19-325) (opt1)
aggagagucccgcagucggcguccagcggcucugcuuguucgugugugugucguugcaggccuuauucaagcuuaccaugaagugggugaccuucaucagccugcucuuccuguucuccagcgccuacucccuguuccaggaguaccagugcuacggcuccagcuccaacacccgggugcucaacgagcugaacuacgacaacgcggggaccaaccuguacaacgagcucgagaugaacuacuacggcaagcaggagaacugguacagccugaagaagaacucccgcagccugggggagaacgacgacggcaacaacgaggacaacgagaagcuccggaagcccaagcacaagaagcugaagcagccggccgacgggaaccccgaccccaacgccaaccccaacguggacccgaacgccaaccccaacgucgaccccaacgccaaccccaacguggacccgaacgcgaaccccaacgccaaccccaacgccaaccccaacgccaacccgaacgcgaaccccaacgccaaccccaacgccaaccccaacgccaacccgaacgccaaccccaacgcgaaccccaacgccaaccccaacgccaacccgaacgccaaccccaacgccaaccccaacgcgaaccccaacgccaacccgaacgccaaccccaacguggaccccaacgccaaccccaacgccaacccgaacgcgaaccccaacgccaaccccaacgccaacccgaacgccaaccccaacgccaaccccaacgcgaaccccaacgccaacccgaacgccaaccccaacgccaaccccaacgcgaaccccaacgccaacccgaacgccaaccccaacgccaaccccaacgccaaccccaacgcgaacccgaacgccaaccccaacaagaacaaccagggcaacggccaggggcacaacaugcccaacgaccccaaccgcaacgucgacgagaacgccaacgccaacuccgccgugaagaacaacaacaacgaggagccgagcgacaagcacaucaaggaguaccugaacaagauccagaacugaggacuagucccuguucccagagcccacuuuuuuuucuuuuuuugaaauaaaauagccugucuuucagaucuaaaaaaaaaaaaaaaaaaaaaaaaaaaaaaaaaaaaaaaaaaaaaaaaaaaaaaaaaaaaaaaaugcaucccccccccccccccccccccccccccccccaaaggcucuuuucagagccaccagaauu

SEQ ID NO: 644 - RNA, 1431 nt, Artificial Sequence
  mRNA Design a-1 (A64-N5-C30-hSL-N5) comprising derived and/or modified sequence from Pf(3D7)__XP_001351122.1__HsALB_Pf-CSP(19-384) (opt1) R8230
aggagagucccgcagucggcguccagcggcucugcuuguucgugugugugucguugcaggccuuauucaagcuuaccaugaagugggugaccuucaucagccugcucuuccuguucuccagcgccuacucccuguuccaggaguaccagugcuacggcuccagcuccaacacccgggugcucaacgagcugaacuacgacaacgcggggaccaaccuguacaacgagcucgagaugaacuacuacggcaagcaggagaacugguacagccugaagaagaacucccgcagccugggggagaacgacgacggcaacaacgaggacaacgagaagcuccggaagcccaagcacaagaagcugaagcagccggccgacgggaaccccgaccccaacgccaaccccaacguggacccgaacgccaaccccaacgucgaccccaacgccaaccccaacguggacccgaacgcgaaccccaacgccaaccccaacgccaaccccaacgccaacccgaacgcgaaccccaacgccaaccccaacgccaaccccaacgccaacccgaacgccaaccccaacgcgaaccccaacgccaaccccaacgccaacccgaacgccaaccccaacgccaaccccaacgcgaaccccaacgccaacccgaacgccaaccccaacguggaccccaacgccaaccccaacgccaacccgaacgcgaaccccaacgccaaccccaacgccaacccgaacgccaaccccaacgccaaccccaacgcgaaccccaacgccaacccgaacgccaaccccaacgccaaccccaacgcgaaccccaacgccaacccgaacgccaaccccaacgccaaccccaacgccaaccccaacgcgaacccgaacgccaaccccaacaagaacaaccagggcaacggccaggggcacaacaugcccaacgaccccaaccgcaacgucgacgagaacgccaacgccaacuccgccgugaagaacaacaacaacgaggagccgagcgacaagcacaucaaggaguaccugaacaagauccagaacucccucagcacggaguggucccccugcagcgugaccugcggcaacgggauccagguccggaucaagcccggcuccgcgaacaagcccaaggacgagcuggacuacgccaacgacaucgagaagaagaucugcaagauggagaagugcagcuccguguucaacguggucaacagcuccugaggacuagucccuguucccagagcccacuuuuuuuucuuuuuuugaaauaaaauagccugucuuucagaucuaaaaaaaaaaaaaaaaaaaaaaaaaaaaaaaaaaaaaaaaaaaaaaaaaaaaaaaaaaaaaaaaugcaucccccccccccccccccccccccccccccccaaaggcucuuuucagagccaccagaauu

SEQ ID NO: 645 - RNA, 1569 nt, Artificial Sequence
  mRNA Design a-1 (A64-N5-C30-hSL-N5) comprising derived and/or modified sequence from Pf(3D7)__XP_001351122.1__HsALB_Pf-CSP(19-384)_TM domain HA (opt1) R8231
aggagagucccgcagucggcguccagcggcucugcuuguucgugugugugucguugcaggccuuauucaagcuuaccaugaagugggugaccuucaucagccugcucuuccuguucuccagcgccuacucccuguuccaggaguaccagugcuacggcuccagcuccaacacccgggugcucaacgagcugaacuacgacaacgcggggaccaaccuguacaacgagcucgagaugaacuacuacggcaagcaggagaacugguacagccugaagaagaacucccgcagccugggggagaacgacgacggcaacaacgaggacaacgagaagcuccggaagcccaagcacaagaagcugaagcagccggccgacgggaaccccgaccccaacgccaaccccaacguggacccgaacgccaaccccaacgucgaccccaacgccaaccccaacguggacccgaacgcgaaccccaacgccaaccccaacgccaaccccaacgccaacccgaacgcgaaccccaacgccaaccccaacgccaaccccaacgccaacccgaacgccaaccccaacgcgaaccccaacgccaaccccaacgccaacccgaacgccaaccccaacgccaaccccaacgcgaaccccaacgccaacccgaacgccaaccccaacguggaccccaacgccaaccccaacgccaacccgaacgcgaaccccaacgccaaccccaacgccaacccgaacgccaaccccaacgccaaccccaacgcgaaccccaacgccaacccgaacgccaaccccaacgccaaccccaacgcgaaccccaacgccaacccgaacgccaaccccaacgccaaccccaacgccaaccccaacgcgaacccgaacgccaaccccaacaagaacaaccagggcaacggccaggggcacaacaugcccaacgaccccaaccgcaacgucgacgagaacgccaacgccaacuccgccgugaagaacaacaacaacgaggagccgagcgacaagcacaucaaggaguaccugaacaagauccagaacucccucagcacggaguggucccccugcagcgugaccugcggcaacgggauccagguccggaucaagcccggcuccgcgaacaagcccaaggacgagcuggacuacgccaacgacaucgagaagaagaucugcaagauggagaagugcagcuccguguucaacguggucaacagcuccaagcucgaguccacgcggaucuaccagauccuggcgaucuacagcaccgucgccagcucccuggugcucguggucagccugggggccaucuccuucuggaugugcagcaacggcucccugcagugccgcaucugcaucugaggacuagucccuguucccagagcccacuuuuuuuucuuuuuuugaaauaaaauagccugucuuucagaucuaaaaaaaaaaaaaaaaaaaaaaaaaaaaaaaaaaaaaaaaaaaaaaaaaaaaaaaaaaaaaaaaugcaucccccccccccccccccccccccccccccccaaaggcucuuuucagagccaccagaauu

SEQ ID NO: 646 - RNA, 1281 nt, Artificial Sequence
  mRNA Design a-1 (A64-N5-C30-hSL-N5) comprising derived and/or modified sequence from Pf(3D7)__XP_001351122.1__HsALB_Pf-CSP(82-397) (opt1)
aggagagucccgcagucggcguccagcggcucugcuuguucgugugugugucguugcaggccuuauucaagcuuaccaugaagugggugaccuucaucagccugcucuuccuguucuccagcgccuacuccgacaacgagaagcuccggaagcccaagcacaagaagcugaagcagccggccgacgggaaccccgaccccaacgccaaccccaacguggacccgaacgccaaccccaacgucgaccccaacgccaaccccaacguggacccgaacgcgaaccccaacgccaaccccaacgccaaccccaacgccaacccgaacgcgaaccccaacgccaaccccaacgccaaccccaacgccaacccgaacgccaaccccaacgcgaaccccaacgccaaccccaacgccaacccgaacgccaaccccaacgccaaccccaacgcgaaccccaacgccaacccgaacgccaaccccaacguggaccccaacgccaaccccaacgccaacccgaacgcgaaccccaacgccaaccccaacgccaacccgaacgccaaccccaacgccaaccccaacgcgaaccccaacgccaacccgaacgccaaccccaacgccaaccccaacgcgaaccccaacgccaacccgaacgccaaccccaacgccaaccccaacgccaaccccaacgcgaacccgaacgccaaccccaacaagaacaaccagggcaacggccaggggcacaacaugcccaacgaccccaaccgcaacgucgacgagaacgccaacgccaacuccgccgugaagaacaacaacaacgaggagccgagcgacaagcacaucaaggaguaccugaacaagauccagaacucccucagcacggaguggucccccugcagcgugaccugcggcaacgggauccagguccggaucaagcccggcuccgcgaacaagcccaaggacgagcuggacuacgccaacgacaucgagaagaagaucugcaagauggagaagugcagcuccguguucaacguggucaacagcuccaucgggcugaucauggugcucagcuuccuguuccugaacugaggacuagucccuguucccagagcccacuuuuuuuucuuuuuuugaaauaaaauagccugucuuucagaucuaaaaaaaaaaaaaaaaaaaaaaaaaaaaaaaaaaaaaaaaaaaaaaaaaaaaaaaaaaaaaaaaugcaucccccccccccccccccccccccccccccccaaaggcucuuuucagagccaccagaauu

SEQ ID NO: 647 - RNA, 633 nt, Artificial Sequence
  mRNA Design a-1 (A64-N5-C30-hSL-N5) comprising derived and/or modified sequence from Pf(3D7)__XP_001351122.1__HsALB_Pf-CSP(93-192) (opt1)
aggagagucccgcagucggcguccagcggcucugcuuguucgugugugugucguugcaggccuuauucaagcuuaccaugaagugggugaccuucaucagccugcucuuccuguucuccagcgccuacuccaagcugaagcagccggccgacgggaaccccgaccccaacgccaaccccaacguggacccgaacgccaaccccaacgucgaccccaacgccaaccccaacguggacccgaacgcgaaccccaacgccaaccccaacgccaaccccaacgccaacccgaacgcgaaccccaacgccaaccccaacgccaaccccaacgccaacccgaacgccaaccccaacgcgaaccccaacgccaaccccaacgccaacccgaacgccaaccccaacgccaaccccaacgcgaaccccaacgccaacccgugaggacuagucccuguucccagagcccacuuuuuuuucuuuuuuugaaauaaaauagccugucuuucagaucuaaaaaaaaaaaaaaaaaaaaaaaaaaaaaaaaaaaaaaaaaaaaaaaaaaaaaaaaaaaaaaaaugcaucccccccccccccccccccccccccccccccaaaggcucuuuucagagccaccagaauu

SEQ ID NO: 648 - RNA, 873 nt, Artificial Sequence
  mRNA Design a-1 (A64-N5-C30-hSL-N5) comprising derived and/or modified sequence from Pf(3D7)__XP_001351122.1__HsALB_Pf-CSP(93-272) (opt1)
aggagagucccgcagucggcguccagcggcucugcuuguucgugugugugucguugcaggccuuauucaagcuuaccaugaagugggugaccuucaucagccugcucuuccuguucuccagcgccuacuccaagcugaagcagccggccgacgggaaccccgaccccaacgccaaccccaacguggacccgaacgccaaccccaacgucgaccccaacgccaaccccaacguggacccgaacgcgaaccccaacgccaaccccaacgccaaccccaacgccaacccgaacgcgaaccccaacgccaaccccaacgccaaccccaacgccaacccgaacgccaaccccaacgcgaaccccaacgccaaccccaacgccaacccgaacgccaaccccaacgccaaccccaacgcgaaccccaacgccaacccgaacgccaaccccaacguggaccccaacgccaaccccaacgccaacccgaacgcgaaccccaacgccaaccccaacgccaacccgaacgccaaccccaacgccaaccccaacgcgaaccccaacgccaacccgaacgccaaccccaacgccaaccccaacgcgaaccccaacgccaacccgaacgccaaccccaacgccaaccccaacgccaaccccaacgcgaacccgaacgccaaccccugaggacuagucccuguucccagagcccacuuuuuuuucuuuuuuugaaauaaaauagccugucuuucagaucuaaaaaaaaaaaaaaaaaaaaaaaaaaaaaaaaaaaaaaaaaaaaaaaaaaaaaaaaaaaaaaaaugcaucccccccccccccccccccccccccccccccaaaggcucuuuucagagccaccagaauu

SEQ ID NO: 649 - RNA, 1248 nt, Artificial Sequence
  mRNA Design a-1 (A64-N5-C30-hSL-N5) comprising derived and/or modified sequence from Pf(3D7)__XP_001351122.1__HsALB_Pf-CSP(93-397) (opt1)
aggagagucccgcagucggcguccagcggcucugcuuguucgugugugugucguugcaggccuuauucaagcuuaccaugaagugggugaccuucaucagccugcucuuccuguucuccagcgccuacuccaagcugaagcagccggccgacgggaaccccgaccccaacgccaaccccaacguggacccgaacgccaaccccaacgucgaccccaacgccaaccccaacguggacccgaacgcgaaccccaacgccaaccccaacgccaaccccaacgccaacccgaacgcgaaccccaacgccaaccccaacgccaaccccaacgccaacccgaacgccaaccccaacgcgaaccccaacgccaaccccaacgccaacccgaacgccaaccccaacgccaaccccaacgcgaaccccaacgccaacccgaacgccaaccccaacguggaccccaacgccaaccccaacgccaacccgaacgcgaaccccaacgccaaccccaacgccaacccgaacgccaaccccaacgccaaccccaacgcgaaccccaacgccaacccgaacgccaaccccaacgccaaccccaacgcgaaccccaacgccaacccgaacgccaaccccaacgccaaccccaacgccaaccccaacgcgaacccgaacgccaaccccaacaagaacaaccagggcaacggccaggggcacaacaugcccaacgaccccaaccgcaacgucgacgagaacgccaacgccaacuccgccgugaagaacaacaacaacgaggagccgagcgacaagcacaucaaggaguaccugaacaagauccagaacucccucagcacggaguggucccccugcagcgugaccugcggcaacgggauccagguccggaucaagcccggcuccgcgaacaagcccaaggacgagcuggacuacgccaacgacaucgagaagaagaucugcaagauggagaagugcagcuccguguucaacguggucaacagcuccaucgggcugaucauggugcucagcuuccuguuccugaacugaggacuagucccuguucccagagcccacuuuuuuuucuuuuuuugaaauaaaauagccugucuuucagaucuaaaaaaaaaaaaaaaaaaaaaaaaaaaaaaaaaaaaaaaaaaaaaaaaaaaaaaaaaaaaaaaaugcaucccccccccccccccccccccccccccccccaaaggcucuuuucagagccaccagaauu

SEQ ID NO: 650 - RNA, 618 nt, Artificial Sequence
  mRNA Design a-1 (A64-N5-C30-hSL-N5) comprising derived and/or modified sequence from Pf(3D7)__XP_001351122.1__HsALB_Pf-CSP(98-192) (opt1)
aggagagucccgcagucggcguccagcggcucugcuuguucgugugugugucguugcaggccuuauucaagcuuaccaugaagugggugaccuucaucagccugcucuuccuguucuccagcgccuacuccgccgacgggaaccccgaccccaacgccaaccccaacguggacccgaacgccaaccccaacgucgaccccaacgccaaccccaacguggacccgaacgcgaaccccaacgccaaccccaacgccaaccccaacgccaacccgaacgcgaaccccaacgccaaccccaacgccaaccccaacgccaacccgaacgccaaccccaacgcgaaccccaacgccaaccccaacgccaacccgaacgccaaccccaacgccaaccccaacgcgaaccccaacgccaacccgugaggacuagucccuguucccagagcccacuuuuuuuucuuuuuuugaaauaaaauagccugucuuucagaucuaaaaaaaaaaaaaaaaaaaaaaaaaaaaaaaaaaaaaaaaaaaaaaaaaaaaaaaaaaaaaaaaugcaucccccccccccccccccccccccccccccccaaaggcucuuuucagagccaccagaauu

SEQ ID NO: 651 - RNA, 858 nt, Artificial Sequence
  mRNA Design a-1 (A64-N5-C30-hSL-N5) comprising derived and/or modified sequence from Pf(3D7)__XP_001351122.1__HsALB_Pf-CSP(98-272) (opt1)
aggagagucccgcagucggcguccagcggcucugcuuguucgugugugugucguugcaggccuuauucaagcuuaccaugaagugggugaccuucaucagccugcucuuccuguucuccagcgccuacuccgccgacgggaaccccgaccccaacgccaaccccaacguggacccgaacgccaaccccaacgucgaccccaacgccaaccccaacguggacccgaacgcgaaccccaacgccaaccccaacgccaaccccaacgccaacccgaacgcgaaccccaacgccaaccccaacgccaaccccaacgccaacccgaacgccaaccccaacgcgaaccccaacgccaaccccaacgccaacccgaacgccaaccccaacgccaaccccaacgcgaaccccaacgccaacccgaacgccaaccccaacguggaccccaacgccaaccccaacgccaacccgaacgcgaaccccaacgccaaccccaacgccaacccgaacgccaaccccaacgccaaccccaacgcgaaccccaacgccaacccgaacgccaaccccaacgccaaccccaacgcgaaccccaacgccaacccgaacgccaaccccaacgccaaccccaacgccaaccccaacgcgaacccgaacgccaaccccugaggacuagucccuguucccagagcccacuuuuuuuucuuuuuuugaaauaaaauagccugucuuucagaucuaaaaaaaaaaaaaaaaaaaaaaaaaaaaaaaaaaaaaaaaaaaaaaaaaaaaaaaaaaaaaaaaugcaucccccccccccccccccccccccccccccccaaaggcucuuuucagagccaccagaauu

SEQ ID NO: 652 - RNA, 1164 nt, Artificial Sequence
  mRNA Design a-1 (A64-N5-C30-hSL-N5) comprising derived and/or modified sequence from Pf(3D7)__XP_001351122.1__HsALB_Pf-CSP(98-374) (opt1)
aggagagucccgcagucggcguccagcggcucugcuuguucgugugugugucguugcaggccuuauucaagcuuaccaugaagugggugaccuucaucagccugcucuuccuguucuccagcgccuacuccgccgacgggaaccccgaccccaacgccaaccccaacguggacccgaacgccaaccccaacgucgaccccaacgccaaccccaacguggacccgaacgcgaaccccaacgccaaccccaacgccaaccccaacgccaacccgaacgcgaaccccaacgccaaccccaacgccaaccccaacgccaacccgaacgccaaccccaacgcgaaccccaacgccaaccccaacgccaacccgaacgccaaccccaacgccaaccccaacgcgaaccccaacgccaacccgaacgccaaccccaacguggaccccaacgccaaccccaacgccaacccgaacgcgaaccccaacgccaaccccaacgccaacccgaacgccaaccccaacgccaaccccaacgcgaaccccaacgccaacccgaacgccaaccccaacgccaaccccaacgcgaaccccaacgccaacccgaacgccaaccccaacgccaaccccaacgccaaccccaacgcgaacccgaacgccaaccccaacaagaacaaccagggcaacggccaggggcacaacaugcccaacgaccccaaccgcaacgucgacgagaacgccaacgccaacuccgccgugaagaacaacaacaacgaggagccgagcgacaagcacaucaaggaguaccugaacaagauccagaacucccucagcacggaguggucccccugcagcgugaccugcggcaacgggauccagguccggaucaagcccggcuccgcgaacaagcccaaggacgagcuggacuacgccaacgacaucgagaagaagaucugcaagauggagaagugcugaggacuagucccuguucccagagcccacuuuuuuuucuuuuuuugaaauaaaauagccugucuuucagaucuaaaaaaaaaaaaaaaaaaaaaaaaaaaaaaaaaaaaaaaaaaaaaaaaaaaaaaaaaaaaaaaaugcaucccccccccccccccccccccccccccccccaaaggcucuuuucagagccaccagaauu

SEQ ID NO: 653 - RNA, 1233 nt, Artificial Sequence
  mRNA Design a-1 (A64-N5-C30-hSL-N5) comprising derived and/or modified sequence from Pf(3D7)__XP_001351122.1__HsALB_Pf-CSP(98-397) (opt1)
aggagagucccgcagucggcguccagcggcucugcuuguucgugugugugucguugcaggccuuauucaagcuuaccaugaagugggugaccuucaucagccugcucuuccuguucuccagcgccuacuccgccgacgggaaccccgaccccaacgccaaccccaacguggacccgaacgccaaccccaacgucgaccccaacgccaaccccaacguggacccgaacgcgaaccccaacgccaaccccaacgccaaccccaacgccaacccgaacgcgaaccccaacgccaaccccaacgccaaccccaacgccaacccgaacgccaaccccaacgcgaaccccaacgccaaccccaacgccaacccgaacgccaaccccaacgccaaccccaacgcgaaccccaacgccaacccgaacgccaaccccaacguggaccccaacgccaaccccaacgccaacccgaacgcgaaccccaacgccaaccccaacgccaacccgaacgccaaccccaacgccaaccccaacgcgaaccccaacgccaacccgaacgccaaccccaacgccaaccccaacgcgaaccccaacgccaacccgaacgccaaccccaacgccaaccccaacgccaaccccaacgcgaacccgaacgccaaccccaacaagaacaaccagggcaacggccaggggcacaacaugcccaacgaccccaaccgcaacgucgacgagaacgccaacgccaacuccgccgugaagaacaacaacaacgaggagccgagcgacaagcacaucaaggaguaccugaacaagauccagaacucccucagcacggaguggucccccugcagcgugaccugcggcaacgggauccagguccggaucaagcccggcuccgcgaacaagcccaaggacgagcuggacuacgccaacgacaucgagaagaagaucugcaagauggagaagugcagcuccguguucaacguggucaacagcuccaucgggcugaucauggugcucagcuuccuguuccugaacugaggacuagucccuguucccagagcccacuuuuuuuucuuuuuuugaaauaaaauagccugucuuucagaucuaaaaaaaaaaaaaaaaaaaaaaaaaaaaaaaaaaaaaaaaaaaaaaaaaaaaaaaaaaaaaaaaugcaucccccccccccccccccccccccccccccccaaaggcucuuuucagagccaccagaauu

SEQ ID NO: 654 - RNA, 1560 nt, Artificial Sequence
  mRNA Design a-1 (A64-N5-C30-hSL-N5) comprising derived and/or modified sequence from Pf(3D7)__XP_001351122.1__HsALB_Pf-CSP(199-377)_L(PVTN)_HBsAg (opt1) R8238
aggagagucccgcagucggcguccagcggcucugcuuguucgugugugugucguugcaggccuuauucaagcuuaccaugaaguggguaaccuuuauuucccuucuuuuucucuuuagcucggcuuauuccgaccccaacgccaaccccaacgccaacccgaacgcgaaccccaacgccaaccccaacgccaacccgaacgccaaccccaacgccaaccccaacgcgaaccccaacgccaacccgaacgccaaccccaacgccaaccccaacgcgaaccccaacgccaacccgaacgccaaccccaacgccaaccccaacgccaaccccaacgcgaacccgaacgccaaccccaacaagaacaaccagggcaacggccaggggcacaacaugcccaacgaccccaaccgcaacgucgacgagaacgccaacgccaacuccgccgugaagaacaacaacaacgaggagccgagcgacaagcacaucaaggaguaccugaacaagauccagaacucccucagcacggaguggucccccugcagcgugaccugcggcaacgggauccagguccggaucaagcccggcuccgcgaacaagcccaaggacgagcuggacuacgccaacgacaucgagaagaagaucugcaagauggagaagugcagcuccgugccggugacgaacauggagaacaucaccagcggcuuccuggggccccuccuggugcugcaggccggcuucuuccuccugacccgcauccugaccaucccgcagucccucgacagcugguggaccucccugaacuuccucgggggcagccccgucugccuggggcagaacucccagagccccaccuccaaccacagccccaccuccugcccgcccaucugccccggcuaccgguggaugugccugcgccgguucaucaucuuccuguucauccuccugcugugccucaucuuccugcuggugcuccuggacuaccagggcaugcugcccgugugcccgcucauccccgggagcacgaccaccaacaccggccccugcaagacgugcaccacccccgcccaggggaacuccauguucccgagcugcugcugcaccaagcccacggacggcaacugcacgugcauccccauccccuccagcugggcguucgccaaguaccugugggagugggccuccguccgcuucagcuggcugucccuccuggugccguucgugcagugguucgucgggcugagccccaccguguggcucuccgccaucuggaugaugugguacuggggccccagccuguacagcaucgugucccccuucaucccgcugcuccccaucuucuucugccugugggucuacaucugaggacuagucccuguucccagagcccacuuuuuuuucuuuuuuugaaauaaaauagccugucuuucagaucuaaaaaaaaaaaaaaaaaaaaaaaaaaaaaaaaaaaaaaaaaaaaaaaaaaaaaaaaaaaaaaaaugcaucccccccccccccccccccccccccccccccaaaggcucuuuucagagccaccagaauu

SEQ ID NO: 655 - RNA, 1299 nt, Artificial Sequence
  mRNA Design a-1 (A64-N5-C30-hSL-N5) comprising derived and/or modified sequence from Pb(ANKA)__XP_022712148.1__Pb-CSP (opt1)
aggagagucccgcagucggcguccagcggcucugcuuguucgugugugugucguugcaggccuuauucaagcuuaccaugaagaagugcaccauccugguggucgccagccuccugcuggugaacucccuccugcccggcuacgggcagaacaagagcauccaggcccagcgcaaccugaacgagcucugcuacaacgagggcaacgacaacaagcuguaccacgugcugaacuccaagaacgggaagaucuacaaccggaacaccgucaaccgccuccuggcggacgccccggagggcaagaagaacgagaagaagaacgagaagaucgagcggaacaacaagcugaagcagccgcccccgccgcccaaccccaacgacccgccgccgcccaaccccaacgacccgcccccgcccaacccgaacgacccgcccccgccgaaccccaacgacccgcccccgcccaacgccaacgacccgcccccgcccaacgccaacgaccccgccccgcccaacgcgaacgaccccgccccgccgaacgccaacgaccccgccccgcccaacgcgaacgacccggccccgcccaacgccaacgacccgccgccgcccaaccccaacgacccggccccgcccaacgccaacgacccgccgcccccgaaccccaacgacccggcgccgccccaggggaacaacaacccgcagccccagccccgcccccagccgcagccccagccccagccccagccgcagccccagccccagccccagccgcggccccagccccagccccagccgggcggcaacaacaacaacaagaacaacaacaacgacgacagcuacauccccuccgccgagaagauccucgaguucgugaagcagauccgcgacagcaucacggaggaguggucccagugcaacgugaccugcgggagcggcauccggguccgcaagcggaagggguccaacaagaaggccgaggaccugacccuggaggacaucgacaccgagaucugcaagauggacaagugcagcuccaucuucaacaucgugagcaacucccucggcuucgugauccugcugguccucguguucuucaacugaggacuagucccuguucccagagcccacuuuuuuuucuuuuuuugaaauaaaauagccugucuuucagaucuaaaaaaaaaaaaaaaaaaaaaaaaaaaaaaaaaaaaaaaaaaaaaaaaaaaaaaaaaaaaaaaaugcaucccccccccccccccccccccccccccccccaaaggcucuuuucagagccaccagaauu

SEQ ID NO: 656 - RNA, 1464 nt, Artificial Sequence
  mRNA Design a-1 (A64-N5-C30-hSL-N5) comprising derived and/or modified sequence from Pb(ANKA)__XP_022712148.1__Pb-CSP_L(G4SG4)_TM domain HA (opt1)
aggagagucccgcagucggcguccagcggcucugcuuguucgugugugugucguugcaggccuuauucaagcuuaccaugaagaagugcaccauccugguggucgccagccuccugcuggugaacucccuccugcccggcuacgggcagaacaagagcauccaggcccagcgcaaccugaacgagcucugcuacaacgagggcaacgacaacaagcuguaccacgugcugaacuccaagaacgggaagaucuacaaccggaacaccgucaaccgccuccuggcggacgccccggagggcaagaagaacgagaagaagaacgagaagaucgagcggaacaacaagcugaagcagccgcccccgccgcccaaccccaacgacccgccgccgcccaaccccaacgacccgcccccgcccaacccgaacgacccgcccccgccgaaccccaacgacccgcccccgcccaacgccaacgacccgcccccgcccaacgccaacgaccccgccccgcccaacgcgaacgaccccgccccgccgaacgccaacgaccccgccccgcccaacgcgaacgacccggccccgcccaacgccaacgacccgccgccgcccaaccccaacgacccggccccgcccaacgccaacgacccgccgcccccgaaccccaacgacccggcgccgccccaggggaacaacaacccgcagccccagccccgcccccagccgcagccccagccccagccccagccgcagccccagccccagccccagccgcggccccagccccagccccagccgggcggcaacaacaacaacaagaacaacaacaacgacgacagcuacauccccuccgccgagaagauccucgaguucgugaagcagauccgcgacagcaucacggaggaguggucccagugcaacgugaccugcgggagcggcauccggguccgcaagcggaagggguccaacaagaaggccgaggaccugacccuggaggacaucgacaccgagaucugcaagauggacaagugcagcuccaucuucaacaucgugagcaacucccucggcuucgugauccugcugguccucguguucuucaacggcgggggcgggagcggcgggggcggcaagcucgaguccacgcggaucuaccagauccuggcgaucuacagcaccgucgccagcucccuggugcucguggucagccugggggccaucuccuucuggaugugcagcaacggcucccugcagugccgcaucugcaucugaggacuagucccuguucccagagcccacuuuuuuuucuuuuuuugaaauaaaauagccugucuuucagaucuaaaaaaaaaaaaaaaaaaaaaaaaaaaaaaaaaaaaaaaaaaaaaaaaaaaaaaaaaaaaaaaaugcaucccccccccccccccccccccccccccccccaaaggcucuuuucagagccaccagaauu

SEQ ID NO: 657 - RNA, 1284 nt, Artificial Sequence
  mRNA Design a-1 (A64-N5-C30-hSL-N5) comprising derived and/or modified sequence from Pb(ANKA)__XP_022712148.1__HsALB_Pb-CSP(24-340) (opt1)
aggagagucccgcagucggcguccagcggcucugcuuguucgugugugugucguugcaggccuuauucaagcuuaccaugaagugggugaccuucaucagccugcucuuccuguucuccagcgccuacucccagaacaagagcauccaggcccagcgcaaccugaacgagcucugcuacaacgagggcaacgacaacaagcuguaccacgugcugaacuccaagaacgggaagaucuacaaccggaacaccgucaaccgccuccuggcggacgccccggagggcaagaagaacgagaagaagaacgagaagaucgagcggaacaacaagcugaagcagccgcccccgccgcccaaccccaacgacccgccgccgcccaaccccaacgacccgcccccgcccaacccgaacgacccgcccccgccgaaccccaacgacccgcccccgcccaacgccaacgacccgcccccgcccaacgccaacgaccccgccccgcccaacgcgaacgaccccgccccgccgaacgccaacgaccccgccccgcccaacgcgaacgacccggccccgcccaacgccaacgacccgccgccgcccaaccccaacgacccggccccgcccaacgccaacgacccgccgcccccgaaccccaacgacccggcgccgccccaggggaacaacaacccgcagccccagccccgcccccagccgcagccccagccccagccccagccgcagccccagccccagccccagccgcggccccagccccagccccagccgggcggcaacaacaacaacaagaacaacaacaacgacgacagcuacauccccuccgccgagaagauccucgaguucgugaagcagauccgcgacagcaucacggaggaguggucccagugcaacgugaccugcgggagcggcauccggguccgcaagcggaagggguccaacaagaaggccgaggaccugacccuggaggacaucgacaccgagaucugcaagauggacaagugcagcuccaucuucaacaucgugagcaacucccucggcuucgugauccugcugguccucguguucuucaacugaggacuagucccuguucccagagcccacuuuuuuuucuuuuuuugaaauaaaauagccugucuuucagaucuaaaaaaaaaaaaaaaaaaaaaaaaaaaaaaaaaaaaaaaaaaaaaaaaaaaaaaaaaaaaaaaaugcaucccccccccccccccccccccccccccccccaaaggcucuuuucagagccaccagaauu

SEQ ID NO: 658 - RNA, 1302 nt, Artificial Sequence
  mRNA Design a-1 (A64-N5-C30-hSL-N5) comprising derived and/or modified sequence from Pb(ANKA)__XP_022712148.1__HsIns-iso1_Pb-CSP(24-340) (opt1)
aggagagucccgcagucggcguccagcggcucugcuuguucgugugugugucguugcaggccuuauucaagcuuaccauggcccuguggaugcgccuccugccccugcucgcccugcuggcgcucuggggcccggaccccgccgccgcccagaacaagagcauccaggcccagcgcaaccugaacgagcucugcuacaacgagggcaacgacaacaagcuguaccacgugcugaacuccaagaacgggaagaucuacaaccggaacaccgucaaccgccuccuggcggacgccccggagggcaagaagaacgagaagaagaacgagaagaucgagcggaacaacaagcugaagcagccgcccccgccgcccaaccccaacgacccgccgccgcccaaccccaacgacccgcccccgcccaacccgaacgacccgcccccgccgaaccccaacgacccgcccccgcccaacgccaacgacccgcccccgcccaacgccaacgaccccgccccgcccaacgcgaacgaccccgccccgccgaacgccaacgaccccgccccgcccaacgcgaacgacccggccccgcccaacgccaacgacccgccgccgcccaaccccaacgacccggccccgcccaacgccaacgacccgccgcccccgaaccccaacgacccggcgccgccccaggggaacaacaacccgcagccccagccccgcccccagccgcagccccagccccagccccagccgcagccccagccccagccccagccgcggccccagccccagccccagccgggcggcaacaacaacaacaagaacaacaacaacgacgacagcuacauccccuccgccgagaagauccucgaguucgugaagcagauccgcgacagcaucacggaggaguggucccagugcaacgugaccugcgggagcggcauccggguccgcaagcggaagggguccaacaagaaggccgaggaccugacccuggaggacaucgacaccgagaucugcaagauggacaagugcagcuccaucuucaacaucgugagcaacucccucggcuucgugauccugcugguccucguguucuucaacugaggacuagucccuguucccagagcccacuuuuuuuucuuuuuuugaaauaaaauagccugucuuucagaucuaaaaaaaaaaaaaaaaaaaaaaaaaaaaaaaaaaaaaaaaaaaaaaaaaaaaaaaaaaaaaaaaugcaucccccccccccccccccccccccccccccccaaaggcucuuuucagagccaccagaauu

SEQ ID NO: 659 - RNA, 1281 nt, Artificial Sequence
  mRNA Design a-1 (A64-N5-C30-hSL-N5) comprising derived and/or modified sequence from Pb(ANKA)__XP_022712148.1__HsSPARC_Pb-CSP(24-340) (opt1)
aggagagucccgcagucggcguccagcggcucugcuuguucgugugugugucguugcaggccuuauucaagcuuaccaugcgcgccuggaucuucuuccugcucugccuggccggccgggcccuggcccagaacaagagcauccaggcccagcgcaaccugaacgagcucugcuacaacgagggcaacgacaacaagcuguaccacgugcugaacuccaagaacgggaagaucuacaaccggaacaccgucaaccgccuccuggcggacgccccggagggcaagaagaacgagaagaagaacgagaagaucgagcggaacaacaagcugaagcagccgcccccgccgcccaaccccaacgacccgccgccgcccaaccccaacgacccgcccccgcccaacccgaacgacccgcccccgccgaaccccaacgacccgcccccgcccaacgccaacgacccgcccccgcccaacgccaacgaccccgccccgcccaacgcgaacgaccccgccccgccgaacgccaacgaccccgccccgcccaacgcgaacgacccggccccgcccaacgccaacgacccgccgccgcccaaccccaacgacccggccccgcccaacgccaacgacccgccgcccccgaaccccaacgacccggcgccgccccaggggaacaacaacccgcagccccagccccgcccccagccgcagccccagccccagccccagccgcagccccagccccagccccagccgcggccccagccccagccccagccgggcggcaacaacaacaacaagaacaacaacaacgacgacagcuacauccccuccgccgagaagauccucgaguucgugaagcagauccgcgacagcaucacggaggaguggucccagugcaacgugaccugcgggagcggcauccggguccgcaagcggaagggguccaacaagaaggccgaggaccugacccuggaggacaucgacaccgagaucugcaagauggacaagugcagcuccaucuucaacaucgugagcaacucccucggcuucgugauccugcugguccucguguucuucaacugaggacuagucccuguucccagagcccacuuuuuuuucuuuuuuugaaauaaaauagccugucuuucagaucuaaaaaaaaaaaaaaaaaaaaaaaaaaaaaaaaaaaaaaaaaaaaaaaaaaaaaaaaaaaaaaaaugcaucccccccccccccccccccccccccccccccaaaggcucuuuucagagccaccagaauu

SEQ ID NO: 660 - RNA, 1284 nt, Artificial Sequence
  mRNA Design a-1 (A64-N5-C30-hSL-N5) comprising derived and/or modified sequence from Pb(ANKA)__XP_022712148.1__IgE_Pb-CSP(24-340) (opt1)
aggagagucccgcagucggcguccagcggcucugcuuguucgugugugugucguugcaggccuuauucaagcuuaccauggacuggaccuggauccuguuccucguggccgccgcgacccgcguccacagccagaacaagagcauccaggcccagcgcaaccugaacgagcucugcuacaacgagggcaacgacaacaagcuguaccacgugcugaacuccaagaacgggaagaucuacaaccggaacaccgucaaccgccuccuggcggacgccccggagggcaagaagaacgagaagaagaacgagaagaucgagcggaacaacaagcugaagcagccgcccccgccgcccaaccccaacgacccgccgccgcccaaccccaacgacccgcccccgcccaacccgaacgacccgcccccgccgaaccccaacgacccgcccccgcccaacgccaacgacccgcccccgcccaacgccaacgaccccgccccgcccaacgcgaacgaccccgccccgccgaacgccaacgaccccgccccgcccaacgcgaacgacccggccccgcccaacgccaacgacccgccgccgcccaaccccaacgacccggccccgcccaacgccaacgacccgccgcccccgaaccccaacgacccggcgccgccccaggggaacaacaacccgcagccccagccccgcccccagccgcagccccagccccagccccagccgcagccccagccccagccccagccgcggccccagccccagccccagccgggcggcaacaacaacaacaagaacaacaacaacgacgacagcuacauccccuccgccgagaagauccucgaguucgugaagcagauccgcgacagcaucacggaggaguggucccagugcaacgugaccugcgggagcggcauccggguccgcaagcggaagggguccaacaagaaggccgaggaccugacccuggaggacaucgacaccgagaucugcaagauggacaagugcagcuccaucuucaacaucgugagcaacucccucggcuucgugauccugcugguccucguguucuucaacugaggacuagucccuguucccagagcccacuuuuuuuucuuuuuuugaaauaaaauagccugucuuucagaucuaaaaaaaaaaaaaaaaaaaaaaaaaaaaaaaaaaaaaaaaaaaaaaaaaaaaaaaaaaaaaaaaugcaucccccccccccccccccccccccccccccccaaaggcucuuuucagagccaccagaauu

SEQ ID NO: 661 - RNA, 1470 nt, Artificial Sequence; identical to SEQ ID NO: 625
  mRNA Design a-1 (A64-N5-C30-hSL-N5) comprising derived and/or modified sequence from Pf(3D7)__XP_001351122.1__Pf-CSP (opt1)

SEQ ID NO: 662 - RNA, 1401 nt, Artificial Sequence; identical to SEQ ID NO: 626
  mRNA Design a-1 (A64-N5-C30-hSL-N5) comprising derived and/or modified sequence from Pf(3D7)__XP_001351122.1__Pf-CSP(1-374) (opt1)

SEQ ID NO: 663 - RNA, 1254 nt, Artificial Sequence; identical to SEQ ID NO: 627
  mRNA Design a-1 (A64-N5-C30-hSL-N5) comprising derived and/or modified sequence from Pf(3D7)__XP_001351122.1__Pf-CSP(1-325) (opt1)

SEQ ID NO: 664 - RNA, 1470 nt, Artificial Sequence
  mRNA Design a-1 (A64-N5-C30-hSL-N5) comprising derived and/or modified sequence from Pf(3D7)__XP_001351122.1__HsALB_Pf-CSP(19-397) (opt1)
aggagagucccgcagucggcguccagcggcucugcuuguucgugugugugucguugcaggccuuauucaagcuuaccaugaagugggugaccuucaucagccuccuguuccuguucuccagcgccuacucccuguuccaggaguaccagugcuacggcagcuccagcaacacccgcguccucaacgagcugaacuacgacaacgccgggacgaaccuguacaacgagcucgagaugaacuacuacggcaagcaggagaacugguacucccugaagaagaacagccggucccugggggagaacgacgacggcaacaacgaggacaacgagaagcuccgcaagcccaagcacaagaagcugaagcagccggcggacgggaaccccgaccccaacgccaaccccaacguggacccgaacgccaaccccaacguggaccccaacgccaaccccaacgucgacccgaacgccaaccccaacgcgaaccccaacgccaaccccaacgccaacccgaacgccaaccccaacgcgaaccccaacgccaaccccaacgccaacccgaacgccaaccccaacgccaaccccaacgcgaaccccaacgccaacccgaacgccaaccccaacgccaaccccaacgccaaccccaacgcgaacccgaacgccaaccccaacguggaccccaacgccaaccccaacgccaacccgaacgccaaccccaacgcgaaccccaacgccaacccgaacgccaaccccaacgccaaccccaacgccaaccccaacgcgaacccgaacgccaaccccaacgccaaccccaacgccaaccccaacgcgaacccgaacgccaaccccaacgccaaccccaacgccaaccccaacgccaacccgaacgcgaaccccaacaagaacaaccagggcaacggccaggggcacaacaugcccaacgaccccaaccggaacguggacgagaacgccaacgccaacagcgccgucaagaacaacaacaacgaggagccguccgacaagcacaucaaggaguaccugaacaagauccagaacagccucuccaccgaguggagccccugcuccgugaccugcggcaacgggauccaggugcgcaucaagcccggcagcgccaacaagcccaaggacgagcuggacuacgcgaacgacaucgagaagaagaucugcaagauggagaagugcuccagcgucuucaacguggugaacuccagcaucgggcugaucaugguccucagcuuccuguuccugaacugaggacuagucccuguucccagagcccacuuuuuuuucuuuuuuugaaauaaaauagccugucuuucagaucuaaaaaaaaaaaaaaaaaaaaaaaaaaaaaaaaaaaaaaaaaaaaaaaaaaaaaaaaaaaaaaaaugcaucccccccccccccccccccccccccccccccaaaggcucuuuucagagccaccagaauu

SEQ ID NO: 665 - RNA, 1488 nt, Artificial Sequence
  mRNA Design a-1 (A64-N5-C30-hSL-N5) comprising derived and/or modified sequence from Pf(3D7)__XP_001351122.1__HsIns-iso1_Pf-CSP(19-397) (opt1)
aggagagucccgcagucggcguccagcggcucugcuuguucgugugugugucguugcaggccuuauucaagcuuaccauggcccuguggaugcgccuccugccccugcucgcccugcuggcgcucuggggcccggaccccgccgccgcccuguuccaggaguaccagugcuacgggagcuccagcaacacccgggugcugaacgagcucaacuacgacaacgccggcaccaaccuguacaacgagcuggagaugaacuacuacgggaagcaggagaacugguacucccucaagaagaacagccgcucccugggcgagaacgacgacgggaacaacgaggacaacgagaagcugcggaagcccaagcacaagaagcucaagcagcccgcggacggcaacccggaccccaacgccaaccccaacgucgaccccaacgccaacccgaacguggaccccaacgccaaccccaacguggaccccaacgcgaacccgaacgccaaccccaacgccaaccccaacgccaaccccaacgccaacccgaacgcgaaccccaacgccaaccccaacgccaaccccaacgccaacccgaacgccaaccccaacgcgaaccccaacgccaaccccaacgccaacccgaacgccaaccccaacgccaaccccaacgcgaaccccaacgccaacccgaacgucgaccccaacgccaaccccaacgccaacccgaacgccaaccccaacgcgaaccccaacgccaaccccaacgccaacccgaacgccaaccccaacgcgaaccccaacgccaaccccaacgccaacccgaacgccaaccccaacgccaaccccaacgcgaaccccaacgccaacccgaacgccaaccccaacgccaaccccaacgccaaccccaacgcgaacccgaacaagaacaaccagggcaacgggcagggccacaacaugcccaacgaccccaaccgcaacguggacgagaacgccaacgccaacagcgccgugaagaacaacaacaacgaggagcccuccgacaagcacaucaaggaguaccugaacaagauccagaacagccuguccacggaguggagcccgugcuccgugaccugcgggaacggcauccagguccggaucaagcccgggagcgccaacaagcccaaggacgagcucgacuacgcgaacgacaucgagaagaagaucugcaagauggagaagugcuccagcguguucaacgucgugaacuccagcaucggccugaucauggugcuguccuuccucuuccugaacugaggacuagucccuguucccagagcccacuuuuuuuucuuuuuuugaaauaaaauagccugucuuucagaucuaaaaaaaaaaaaaaaaaaaaaaaaaaaaaaaaaaaaaaaaaaaaaaaaaaaaaaaaaaaaaaaaugcaucccccccccccccccccccccccccccccccaaaggcucuuuucagagccaccagaauu

SEQ ID NO: 666 - RNA, 1467 nt, Artificial Sequence
  mRNA Design a-1 (A64-N5-C30-hSL-N5) comprising derived and/or modified sequence from Pf(3D7)__XP_001351122.1__HsSPARC_Pf-CSP(19-397) (opt1)
aggagagucccgcagucggcguccagcggcucugcuuguucgugugugugucguugcaggccuuauucaagcuuaccaugcgcgccuggaucuucuuccugcucugccuggccggccgggcgcuggcccucuuccaggaguaccagugcuacgggagcuccagcaacacccgcgugcugaacgagcugaacuacgacaacgccggcaccaaccucuacaacgagcuggagaugaacuacuacgggaagcaggagaacugguacucccugaagaagaacagccggucccucggcgagaacgacgacgggaacaacgaggacaacgagaagcugcgcaagcccaagcacaagaagcugaagcagccggccgacggcaaccccgaccccaacgccaaccccaacgucgacccgaacgcgaaccccaacguggaccccaacgccaaccccaacguggacccgaacgccaaccccaacgccaaccccaacgcgaaccccaacgccaacccgaacgccaaccccaacgccaaccccaacgccaaccccaacgcgaacccgaacgccaaccccaacgccaaccccaacgccaaccccaacgccaacccgaacgcgaaccccaacgccaaccccaacgccaaccccaacgccaacccgaacgccaaccccaacgucgaccccaacgcgaaccccaacgccaacccgaacgccaaccccaacgccaaccccaacgccaacccgaacgcgaaccccaacgccaaccccaacgccaaccccaacgccaacccgaacgcgaaccccaacgccaaccccaacgccaaccccaacgccaacccgaacgccaaccccaacgcgaaccccaacgccaaccccaacgccaacccgaacgccaaccccaacaagaacaaccagggcaacgggcagggccacaacaugcccaacgaccccaaccggaacguggacgagaacgccaacgcgaacagcgccgugaagaacaacaacaacgaggagccguccgacaagcacaucaaggaguaccucaacaagauccagaacagccuguccacggaguggagccccugcuccgugaccugcgggaacggcauccagguccgcaucaagcccgggagcgccaacaagcccaaggacgagcuggacuacgccaacgacaucgagaagaagaucugcaagauggagaagugcuccagcguguucaacgucgugaacuccagcaucggccucaucauggugcuguccuuccuguuccucaacugaggacuagucccuguucccagagcccacuuuuuuuucuuuuuuugaaauaaaauagccugucuuucagaucuaaaaaaaaaaaaaaaaaaaaaaaaaaaaaaaaaaaaaaaaaaaaaaaaaaaaaaaaaaaaaaaaugcaucccccccccccccccccccccccccccccccaaaggcucuuuucagagccaccagaauu

SEQ ID NO: 667 - RNA, 1470 nt, Artificial Sequence
  mRNA Design a-1 (A64-N5-C30-hSL-N5) comprising derived and/or modified sequence from Pf(3D7)__XP_001351122.1__IgE_Pf-CSP(19-397) (opt1)
aggagagucccgcagucggcguccagcggcucugcuuguucgugugugugucguugcaggccuuauucaagcuuaccauggacuggaccuggauccuguuccucguggccgccgcgacccgcguccacagccuguuccaggaguaccagugcuacggcuccagcuccaacacgcgggugcugaacgagcucaacuacgacaacgccgggaccaaccuguacaacgagcuggagaugaacuacuacggcaagcaggagaacugguacagccucaagaagaacucccgcagccugggggagaacgacgacggcaacaacgaggacaacgagaagcugcggaagcccaagcacaagaagcucaagcagccggccgacgggaaccccgaccccaacgccaaccccaacguggacccgaacgccaaccccaacgucgaccccaacgcgaaccccaacguggacccgaacgccaaccccaacgccaaccccaacgccaaccccaacgcgaacccgaacgccaaccccaacgccaaccccaacgccaaccccaacgccaacccgaacgcgaaccccaacgccaaccccaacgccaaccccaacgccaacccgaacgccaaccccaacgcgaaccccaacgccaaccccaacgccaacccgaacgccaaccccaacguggaccccaacgccaaccccaacgcgaacccgaacgccaaccccaacgccaaccccaacgccaacccgaacgccaaccccaacgcgaaccccaacgccaaccccaacgccaacccgaacgccaaccccaacgcgaaccccaacgccaaccccaacgccaacccgaacgccaaccccaacgccaaccccaacgcgaaccccaacgccaacccgaacgccaaccccaacaagaacaaccagggcaacggccaggggcacaacaugcccaacgaccccaaccgcaacgucgacgagaacgccaacgccaacuccgcggugaagaacaacaacaacgaggagccgagcgacaagcacaucaaggaguaccugaacaagauccagaacucccugagcaccgaguggucccccugcagcgugaccugcggcaacgggauccagguccggaucaagcccggcuccgccaacaagcccaaggacgagcucgacuacgccaacgacaucgagaagaagaucugcaagauggagaagugcagcuccguguucaacguggucaacagcuccaucgggcugaucauggugcugagcuuccucuuccugaacugaggacuagucccuguucccagagcccacuuuuuuuucuuuuuuugaaauaaaauagccugucuuucagaucuaaaaaaaaaaaaaaaaaaaaaaaaaaaaaaaaaaaaaaaaaaaaaaaaaaaaaaaaaaaaaaaaugcaucccccccccccccccccccccccccccccccaaaggcucuuuucagagccaccagaauu

SEQ ID NO: 668 - RNA, 1635 nt, Artificial Sequence
  mRNA Design a-1 (A64-N5-C30-hSL-N5) comprising derived and/or modified sequence from Pf(3D7)__XP_001351122.1__Pf-CSP_L(G4SG4)_TM domain HA (opt1)
aggagagucccgcagucggcguccagcggcucugcuuguucgugugugugucguugcaggccuuauucaagcuuaccaugaugcgcaagcuggccauccucagcguguccagcuuccuguucgucgaggcccuguuccaggaguaccagugcuacggcuccagcuccaacacccgggugcucaacgagcugaacuacgacaacgcggggaccaaccuguacaacgagcucgagaugaacuacuacggcaagcaggagaacugguacagccugaagaagaacucccgcagccugggggagaacgacgacggcaacaacgaggacaacgagaagcuccggaagcccaagcacaagaagcugaagcagccggccgacgggaaccccgaccccaacgccaaccccaacguggacccgaacgccaaccccaacgucgaccccaacgccaaccccaacguggacccgaacgcgaaccccaacgccaaccccaacgccaaccccaacgccaacccgaacgcgaaccccaacgccaaccccaacgccaaccccaacgccaacccgaacgccaaccccaacgcgaaccccaacgccaaccccaacgccaacccgaacgccaaccccaacgccaaccccaacgcgaaccccaacgccaacccgaacgccaaccccaacguggaccccaacgccaaccccaacgccaacccgaacgcgaaccccaacgccaaccccaacgccaacccgaacgccaaccccaacgccaaccccaacgcgaaccccaacgccaacccgaacgccaaccccaacgccaaccccaacgcgaaccccaacgccaacccgaacgccaaccccaacgccaaccccaacgccaaccccaacgcgaacccgaacgccaaccccaacaagaacaaccagggcaacggccaggggcacaacaugcccaacgaccccaaccgcaacgucgacgagaacgccaacgccaacuccgccgugaagaacaacaacaacgaggagccgagcgacaagcacaucaaggaguaccugaacaagauccagaacucccucagcacggaguggucccccugcagcgugaccugcggcaacgggauccagguccggaucaagcccggcuccgcgaacaagcccaaggacgagcuggacuacgccaacgacaucgagaagaagaucugcaagauggagaagugcagcuccguguucaacguggucaacagcuccaucgggcugaucauggugcucagcuuccuguuccugaacggcggcgggggcagcgggggcggcgggaagcucgaguccacccgcaucuaccagauccuggccaucuacagcaccguggccuccagccugguccucguggugucccugggcgccaucagcuucuggaugugcuccaacgggagccugcagugccggaucugcaucugaggacuagucccuguucccagagcccacuuuuuuuucuuuuuuugaaauaaaauagccugucuuucagaucuaaaaaaaaaaaaaaaaaaaaaaaaaaaaaaaaaaaaaaaaaaaaaaaaaaaaaaaaaaaaaaaaugcaucccccccccccccccccccccccccccccccaaaggcucuuuucagagccaccagaauu

SEQ ID NO: 669 - RNA, 1509 nt, Artificial Sequence
  mRNA Design a-1 (A64-N5-C30-hSL-N5) comprising derived and/or modified sequence from Pf(3D7)__XP_001351122.1__Pf-CSP(199-377)_L(PVTN)_HBsAg (opt1)
aggagagucccgcagucggcguccagcggcucugcuuguucgugugugugucguugcaggccuuauucaagcuuaccauggaccccaacgccaacccgaacgccaaccccaacgcgaaccccaacgccaaccccaacgccaacccgaacgccaaccccaacgccaaccccaacgcgaaccccaacgccaacccgaacgccaaccccaacgccaaccccaacgcgaaccccaacgccaacccgaacgccaaccccaacgccaaccccaacgccaaccccaacgcgaacccgaacgccaaccccaacaagaacaaccagggcaacgggcagggccacaacaugcccaacgaccccaaccgcaacguggacgagaacgccaacgccaacagcgccgucaagaacaacaacaacgaggagccguccgacaagcacaucaaggaguaccugaacaagauccagaacagccucuccaccgaguggagccccugcuccgugaccugcgggaacggcauccaggugcggaucaagcccgggagcgcgaacaagcccaaggacgagcuggacuacgccaacgacaucgagaagaagaucugcaagauggagaagugcuccagcgucccggugacgaacauggagaacaucaccuccggcuuccugggcccccuccuggugcugcaggccggguucuuccuccugacccgcauccugaccaucccccagagccucgacuccugguggacgagccugaacuuccugggcgggucccccgucugccucggccagaacagccaguccccgaccagcaaccacucccccaccagcugcccgcccaucugccccggguaccgguggaugugccugcgccgguucaucaucuuccuguucauccuccugcugugccucaucuuccugcuggugcuccuggacuaccagggcaugcugcccgugugcccccucaucccgggcuccaccacgaccaacaccgggcccugcaagaccugcacgacccccgcccagggcaacagcauguuccccagcugcugcugcaccaagccgaccgacgggaacugcacgugcauccccauccccuccagcugggccuucgcgaaguaccugugggagugggccuccguccgcuucagcuggcugucccuccuggugcccuucgugcagugguucgucggccugagcccgaccguguggcucuccgccaucuggaugaugugguacuggggccccagccuguacuccaucgugagccccuucaucccccugcucccgaucuucuucugccugugggucuacaucugaggacuagucccuguucccagagcccacuuuuuuuucuuuuuuugaaauaaaauagccugucuuucagaucuaaaaaaaaaaaaaaaaaaaaaaaaaaaaaaaaaaaaaaaaaaaaaaaaaaaaaaaaaaaaaaaaugcaucccccccccccccccccccccccccccccccaaaggcucuuuucagagccaccagaauu

SEQ ID NO: 670 - RNA, 1551 nt, Artificial Sequence
  mRNA Design a-1 (A64-N5-C30-hSL-N5) comprising derived and/or modified sequence from Pf(3D7)__XP_001351122.1__Pf-CSP(199-387)_L(PVTN)_HBsAg (opt1)
aggagagucccgcagucggcguccagcggcucugcuuguucgugugugugucguugcaggccuuauucaagcuuaccaugauggcccccgacccgaacgccaaccccaacgcgaaccccaacgccaaccccaacgccaacccgaacgccaaccccaacgccaaccccaacgcgaaccccaacgccaacccgaacgccaaccccaacgccaaccccaacgcgaaccccaacgccaacccgaacgccaaccccaacgccaaccccaacgccaaccccaacgcgaacccgaacgccaaccccaacgccaaccccaacaagaacaaccagggcaacgggcagggccacaacaugcccaacgacccgaaccgcaacguggacgagaacgccaacgccaacagcgcggucaagaacaacaacaacgaggagcccuccgacaagcacaucaaggaguaccugaacaagauccagaacagccucuccaccgaguggagccccugcuccgugaccugcgggaacggcauccaggugcggaucaagcccgggagcgccaacaagccgaaggacgagcuggacuacgccaacgacaucgagaagaagaucugcaagauggagaagugcuccagcgucuucaacguggugaacuccagcaucggccugggccccgucacgaacauggagaacaucaccuccggguuccucggcccccugcuggugcuccaggccggguucuuccugcugacccgcauccucaccaucccccagagccuggacuccugguggacgagccugaacuuccucggcggguccccggugugccugggccagaacagccagucccccaccagcaaccacucccccaccagcugcccgcccaucugccccggcuaccgguggaugugccugcgccgguucaucaucuuccucuucauccugcugcucugccugaucuuccugcucguccugcuggacuaccaggggaugcuccccgugugcccgcugauccccggcagcaccacgaccaacaccgggcccugcaagaccugcacgacccccgcccagggcaacuccauguucccgagcugcugcugcaccaagcccaccgacggcaacugcacgugcauccccauccccuccagcugggcguucgccaaguaccugugggagugggccuccgugcgcuucagcuggcucucccugcuggucccguucgugcagugguucguggggcucagccccaccgucuggcuguccgccaucuggaugaugugguacuggggccccagccuguacuccaucgugagccccuucaucccgcuccugcccaucuucuucugccuguggguguacaucugaggacuagucccuguucccagagcccacuuuuuuuucuuuuuuugaaauaaaauagccugucuuucagaucuaaaaaaaaaaaaaaaaaaaaaaaaaaaaaaaaaaaaaaaaaaaaaaaaaaaaaaaaaaaaaaaaugcaucccccccccccccccccccccccccccccccaaaggcucuuuucagagccaccagaauu

SEQ ID NO: 671 - RNA, 735 nt, Artificial Sequence
  mRNA Design a-1 (A64-N5-C30-hSL-N5) comprising derived and/or modified sequence from Pf(3D7)__XP_001351122.1__HsALB_Pf-CSP(19-152) (opt1)
aggagagucccgcagucggcguccagcggcucugcuuguucgugugugugucguugcaggccuuauucaagcuuaccaugaagugggugaccuucaucagccuccuguuccuguucuccagcgccuacucccuguuccaggaguaccagugcuacggcagcuccagcaacacccgcguccucaacgagcugaacuacgacaacgccgggacgaaccuguacaacgagcucgagaugaacuacuacggcaagcaggagaacugguacucccugaagaagaacagccggucccugggggagaacgacgacggcaacaacgaggacaacgagaagcuccgcaagcccaagcacaagaagcugaagcagccggcggacgggaaccccgaccccaacgccaaccccaacguggacccgaacgccaaccccaacguggaccccaacgccaaccccaacgucgacccgaacgccaaccccaacgcgaaccccaacgccaaccccaacgccaacccgaacgccaaccccaacgcgaaccccugaggacuagucccuguucccagagcccacuuuuuuuucuuuuuuugaaauaaaauagccugucuuucagaucuaaaaaaaaaaaaaaaaaaaaaaaaaaaaaaaaaaaaaaaaaaaaaaaaaaaaaaaaaaaaaaaaugcaucccccccccccccccccccccccccccccccaaaggcucuuuucagagccaccagaauu

SEQ ID NO: 672 - RNA, 855 nt, Artificial Sequence
  mRNA Design a-1 (A64-N5-C30-hSL-N5) comprising derived and/or modified sequence from Pf(3D7)__XP_001351122.1__HsALB_Pf-CSP(19-192) (opt1)
aggagagucccgcagucggcguccagcggcucugcuuguucgugugugugucguugcaggccuuauucaagcuuaccaugaagugggugaccuucaucagccuccuguuccuguucuccagcgccuacucccuguuccaggaguaccagugcuacggcagcuccagcaacacccgcguccucaacgagcugaacuacgacaacgccgggacgaaccuguacaacgagcucgagaugaacuacuacggcaagcaggagaacugguacucccugaagaagaacagccggucccugggggagaacgacgacggcaacaacgaggacaacgagaagcuccgcaagcccaagcacaagaagcugaagcagccggcggacgggaaccccgaccccaacgccaaccccaacguggacccgaacgccaaccccaacguggaccccaacgccaaccccaacgucgacccgaacgccaaccccaacgcgaaccccaacgccaaccccaacgccaacccgaacgccaaccccaacgcgaaccccaacgccaaccccaacgccaacccgaacgccaaccccaacgccaaccccaacgcgaaccccaacgccaacccgaacgccaaccccaacgccaaccccaacgccaaccccaacgcgaacccgugaggacuagucccuguucccagagcccacuuuuuuuucuuuuuuugaaauaaaauagccugucuuucagaucuaaaaaaaaaaaaaaaaaaaaaaaaaaaaaaaaaaaaaaaaaaaaaaaaaaaaaaaaaaaaaaaaugcaucccccccccccccccccccccccccccccccaaaggcucuuuucagagccaccagaauu

SEQ ID NO: 673 - RNA, 1095 nt, Artificial Sequence
  mRNA Design a-1 (A64-N5-C30-hSL-N5) comprising derived and/or modified sequence from Pf(3D7)__XP_001351122.1__HsALB_Pf-CSP(19-272) (opt1)
aggagagucccgcagucggcguccagcggcucugcuuguucgugugugugucguugcaggccuuauucaagcuuaccaugaagugggugaccuucaucagccuccuguuccuguucuccagcgccuacucccuguuccaggaguaccagugcuacggcagcuccagcaacacccgcguccucaacgagcugaacuacgacaacgccgggacgaaccuguacaacgagcucgagaugaacuacuacggcaagcaggagaacugguacucccugaagaagaacagccggucccugggggagaacgacgacggcaacaacgaggacaacgagaagcuccgcaagcccaagcacaagaagcugaagcagccggcggacgggaaccccgaccccaacgccaaccccaacguggacccgaacgccaaccccaacguggaccccaacgccaaccccaacgucgacccgaacgccaaccccaacgcgaaccccaacgccaaccccaacgccaacccgaacgccaaccccaacgcgaaccccaacgccaaccccaacgccaacccgaacgccaaccccaacgccaaccccaacgcgaaccccaacgccaacccgaacgccaaccccaacgccaaccccaacgccaaccccaacgcgaacccgaacgccaaccccaacguggaccccaacgccaaccccaacgccaacccgaacgccaaccccaacgcgaaccccaacgccaacccgaacgccaaccccaacgccaaccccaacgccaaccccaacgcgaacccgaacgccaaccccaacgccaaccccaacgccaaccccaacgcgaacccgaacgccaaccccaacgccaaccccaacgccaaccccaacgccaacccgaacgcgaaccccugaggacuagucccuguucccagagcccacuuuuuuuucuuuuuuugaaauaaaauagccugucuuucagaucuaaaaaaaaaaaaaaaaaaaaaaaaaaaaaaaaaaaaaaaaaaaaaaaaaaaaaaaaaaaaaaaaugcaucccccccccccccccccccccccccccccccaaaggcucuuuucagagccaccagaauu

SEQ ID NO: 674 - RNA, 1257 nt, Artificial Sequence
  mRNA Design a-1 (A64-N5-C30-hSL-N5) comprising derived and/or modified sequence from Pf(3D7)__XP_001351122.1__HsALB_Pf-CSP(19-272)_L(AAY)_Pf-CSP(310-3 27)_L(AAY)_Pf-CSP(346-375) (opt1)
aggagagucccgcagucggcguccagcggcucugcuuguucgugugugugucguugcaggccuuauucaagcuuaccaugaagugggugaccuucaucagccuccuguuccuguucuccagcgccuacucccuguuccaggaguaccagugcuacggcagcuccagcaacacccgcguccucaacgagcugaacuacgacaacgccgggacgaaccuguacaacgagcucgagaugaacuacuacggcaagcaggagaacugguacucccugaagaagaacagccggucccugggggagaacgacgacggcaacaacgaggacaacgagaagcuccgcaagcccaagcacaagaagcugaagcagccggcggacgggaaccccgaccccaacgccaaccccaacguggacccgaacgccaaccccaacguggaccccaacgccaaccccaacgucgacccgaacgccaaccccaacgcgaaccccaacgccaaccccaacgccaacccgaacgccaaccccaacgcgaaccccaacgccaaccccaacgccaacccgaacgccaaccccaacgccaaccccaacgcgaaccccaacgccaacccgaacgccaaccccaacgccaaccccaacgccaaccccaacgcgaacccgaacgccaaccccaacguggaccccaacgccaaccccaacgccaacccgaacgccaaccccaacgcgaaccccaacgccaacccgaacgccaaccccaacgccaaccccaacgccaaccccaacgcgaacccgaacgccaaccccaacgccaaccccaacgccaaccccaacgcgaacccgaacgccaaccccaacgccaaccccaacgccaaccccaacgccaacccgaacgcgaaccccgccgccuacgagcccagcgacaagcacaucaaggaguaccugaacaagauccagaacucccucgccgccuacaucaagcccggcagcgcgaacaagccgaaggacgagcuggacuacgccaacgacaucgagaagaagaucugcaagauggagaagugcuccugaggacuagucccuguucccagagcccacuuuuuuuucuuuuuuugaaauaaaauagccugucuuucagaucuaaaaaaaaaaaaaaaaaaaaaaaaaaaaaaaaaaaaaaaaaaaaaaaaaaaaaaaaaaaaaaaaugcaucccccccccccccccccccccccccccccccaaaggcucuuuucagagccaccagaauu

SEQ ID NO: 675 - RNA, 1218 nt, Artificial Sequence
  mRNA Design a-1 (A64-N5-C30-hSL-N5) comprising derived and/or modified sequence from Pf(3D7)__XP_001351122.1__HsALB_Pf-CSP(19-272)_L(AAY)_Pf-CSP(346-3 65)_L(AAY)_P2 (opt1)
aggagagucccgcagucggcguccagcggcucugcuuguucgugugugugucguugcaggccuuauucaagcuuaccaugaagugggugaccuucaucagccuccuguuccuguucuccagcgccuacucccuguuccaggaguaccagugcuacggcagcuccagcaacacccgcguccucaacgagcugaacuacgacaacgccgggacgaaccuguacaacgagcucgagaugaacuacuacggcaagcaggagaacugguacucccugaagaagaacagccggucccugggggagaacgacgacggcaacaacgaggacaacgagaagcuccgcaagcccaagcacaagaagcugaagcagccggcggacgggaaccccgaccccaacgccaaccccaacguggacccgaacgccaaccccaacguggaccccaacgccaaccccaacgucgacccgaacgccaaccccaacgcgaaccccaacgccaaccccaacgccaacccgaacgccaaccccaacgcgaaccccaacgccaaccccaacgccaacccgaacgccaaccccaacgccaaccccaacgcgaaccccaacgccaacccgaacgccaaccccaacgccaaccccaacgccaaccccaacgcgaacccgaacgccaaccccaacguggaccccaacgccaaccccaacgccaacccgaacgccaaccccaacgcgaaccccaacgccaacccgaacgccaaccccaacgccaaccccaacgccaaccccaacgcgaacccgaacgccaaccccaacgccaaccccaacgccaaccccaacgcgaacccgaacgccaaccccaacgccaaccccaacgccaaccccaacgccaacccgaacgcgaaccccgccgccuacaucaagcccggcagcgccaacaagcccaaggacgagcuggacuacgccaacgacaucgaggcggccuaccaguacaucaaggccaacuccaaguucaucggcaucaccgagcucugaggacuagucccuguucccagagcccacuuuuuuuucuuuuuuugaaauaaaauagccugucuuucagaucuaaaaaaaaaaaaaaaaaaaaaaaaaaaaaaaaaaaaaaaaaaaaaaaaaaaaaaaaaaaaaaaaugcaucccccccccccccccccccccccccccccccaaaggcucuuuucagagccaccagaauu

SEQ ID NO: 676 - RNA, 1212 nt, Artificial Sequence
  mRNA Design a-1 (A64-N5-C30-hSL-N5) comprising derived and/or modified sequence from Pf(3D7)__XP_001351122.1__HsALB_Pf-CSP(19-272)_L(AAY)_Pf-CSP(346-3 65)_L(AAY)_PADRE (opt1)
aggagagucccgcagucggcguccagcggcucugcuuguucgugugugugucguugcaggccuuauucaagcuuaccaugaagugggugaccuucaucagccuccuguuccuguucuccagcgccuacucccuguuccaggaguaccagugcuacggcagcuccagcaacacccgcguccucaacgagcugaacuacgacaacgccgggacgaaccuguacaacgagcucgagaugaacuacuacggcaagcaggagaacugguacucccugaagaagaacagccggucccugggggagaacgacgacggcaacaacgaggacaacgagaagcuccgcaagcccaagcacaagaagcugaagcagccggcggacgggaaccccgaccccaacgccaaccccaacguggacccgaacgccaaccccaacguggaccccaacgccaaccccaacgucgacccgaacgccaaccccaacgcgaaccccaacgccaaccccaacgccaacccgaacgccaaccccaacgcgaaccccaacgccaaccccaacgccaacccgaacgccaaccccaacgccaaccccaacgcgaaccccaacgccaacccgaacgccaaccccaacgccaaccccaacgccaaccccaacgcgaacccgaacgccaaccccaacguggaccccaacgccaaccccaacgccaacccgaacgccaaccccaacgcgaaccccaacgccaacccgaacgccaaccccaacgccaaccccaacgccaaccccaacgcgaacccgaacgccaaccccaacgccaaccccaacgccaaccccaacgcgaacccgaacgccaaccccaacgccaaccccaacgccaaccccaacgccaacccgaacgcgaaccccgccgccuacaucaagcccggcagcgccaacaagcccaaggacgagcuggacuacgccaacgacaucgaggcggccuacgccaaguucguggccgccuggacccucaaggcggccgccugaggacuagucccuguucccagagcccacuuuuuuuucuuuuuuugaaauaaaauagccugucuuucagaucuaaaaaaaaaaaaaaaaaaaaaaaaaaaaaaaaaaaaaaaaaaaaaaaaaaaaaaaaaaaaaaaaugcaucccccccccccccccccccccccccccccccaaaggcucuuuucagagccaccagaauu

SEQ ID NO: 677 - RNA, 1269 nt, Artificial Sequence
  mRNA Design a-1 (A64-N5-C30-hSL-N5) comprising derived and/or modified sequence from Pf(3D7)__XP_001351122.1__HsALB_Pf-CSP(19-272)_L(G4S)_Pf-CSP(310-3 27)_L(G4S)_Pf-CSP(346-375) (opt1)
aggagagucccgcagucggcguccagcggcucugcuuguucgugugugugucguugcaggccuuauucaagcuuaccaugaagugggugaccuucaucagccuccuguuccuguucuccagcgccuacucccuguuccaggaguaccagugcuacggcagcuccagcaacacccgcguccucaacgagcugaacuacgacaacgccgggacgaaccuguacaacgagcucgagaugaacuacuacggcaagcaggagaacugguacucccugaagaagaacagccggucccugggggagaacgacgacggcaacaacgaggacaacgagaagcuccgcaagcccaagcacaagaagcugaagcagccggcggacgggaaccccgaccccaacgccaaccccaacguggacccgaacgccaaccccaacguggaccccaacgccaaccccaacgucgacccgaacgccaaccccaacgcgaaccccaacgccaaccccaacgccaacccgaacgccaaccccaacgcgaaccccaacgccaaccccaacgccaacccgaacgccaaccccaacgccaaccccaacgcgaaccccaacgccaacccgaacgccaaccccaacgccaaccccaacgccaaccccaacgcgaacccgaacgccaaccccaacguggaccccaacgccaaccccaacgccaacccgaacgccaaccccaacgcgaaccccaacgccaacccgaacgccaaccccaacgccaaccccaacgccaaccccaacgcgaacccgaacgccaaccccaacgccaaccccaacgccaaccccaacgcgaacccgaacgccaaccccaacgccaaccccaacgccaaccccaacgccaacccgaacgcgaaccccggcggcgggggcagcgagcccuccgacaagcacaucaaggaguaccugaacaagauccagaacagccucgggggcgggggcuccaucaagcccggcagcgccaacaagccgaaggacgagcuggacuacgccaacgacaucgagaagaagaucugcaagauggagaagugcuccugaggacuagucccuguucccagagcccacuuuuuuuucuuuuuuugaaauaaaauagccugucuuucagaucuaaaaaaaaaaaaaaaaaaaaaaaaaaaaaaaaaaaaaaaaaaaaaaaaaaaaaaaaaaaaaaaaugcaucccccccccccccccccccccccccccccccaaaggcucuuuucagagccaccagaauu

SEQ ID NO: 678 - RNA, 1254 nt, Artificial Sequence
  mRNA Design a-1 (A64-N5-C30-hSL-N5) comprising derived and/or modified sequence from Pf(3D7)__XP_001351122.1__HsALB_Pf-CSP(19-272)_L(G4S)_Pf-CSP(310-3 27)_Pf-CSP(346-375) (opt1)
aggagagucccgcagucggcguccagcggcucugcuuguucgugugugugucguugcaggccuuauucaagcuuaccaugaagugggugaccuucaucagccuccuguuccuguucuccagcgccuacucccuguuccaggaguaccagugcuacggcagcuccagcaacacccgcguccucaacgagcugaacuacgacaacgccgggacgaaccuguacaacgagcucgagaugaacuacuacggcaagcaggagaacugguacucccugaagaagaacagccggucccugggggagaacgacgacggcaacaacgaggacaacgagaagcuccgcaagcccaagcacaagaagcugaagcagccggcggacgggaaccccgaccccaacgccaaccccaacguggacccgaacgccaaccccaacguggaccccaacgccaaccccaacgucgacccgaacgccaaccccaacgcgaaccccaacgccaaccccaacgccaacccgaacgccaaccccaacgcgaaccccaacgccaaccccaacgccaacccgaacgccaaccccaacgccaaccccaacgcgaaccccaacgccaacccgaacgccaaccccaacgccaaccccaacgccaaccccaacgcgaacccgaacgccaaccccaacguggaccccaacgccaaccccaacgccaacccgaacgccaaccccaacgcgaaccccaacgccaacccgaacgccaaccccaacgccaaccccaacgccaaccccaacgcgaacccgaacgccaaccccaacgccaaccccaacgccaaccccaacgcgaacccgaacgccaaccccaacgccaaccccaacgccaaccccaacgccaacccgaacgcgaaccccggcggcgggggcagcgagcccuccgacaagcacaucaaggaguaccugaacaagauccagaacagccucaucaagcccggguccgccaacaagccgaaggacgagcuggacuacgccaacgacaucgagaagaagaucugcaagauggagaagugcagcugaggacuagucccuguucccagagcccacuuuuuuuucuuuuuuugaaauaaaauagccugucuuucagaucuaaaaaaaaaaaaaaaaaaaaaaaaaaaaaaaaaaaaaaaaaaaaaaaaaaaaaaaaaaaaaaaaugcaucccccccccccccccccccccccccccccccaaaggcucuuuucagagccaccagaauu

SEQ ID NO: 679 - RNA, 1254 nt, Artificial Sequence
  mRNA Design a-1 (A64-N5-C30-hSL-N5) comprising derived and/or modified sequence from Pf(3D7)__XP_001351122.1__HsALB_Pf-CSP(19-325) (opt1)
aggagagucccgcagucggcguccagcggcucugcuuguucgugugugugucguugcaggccuuauucaagcuuaccaugaagugggugaccuucaucagccuccuguuccuguucuccagcgccuacucccuguuccaggaguaccagugcuacggcagcuccagcaacacccgcguccucaacgagcugaacuacgacaacgccgggacgaaccuguacaacgagcucgagaugaacuacuacggcaagcaggagaacugguacucccugaagaagaacagccggucccugggggagaacgacgacggcaacaacgaggacaacgagaagcuccgcaagcccaagcacaagaagcugaagcagccggcggacgggaaccccgaccccaacgccaaccccaacguggacccgaacgccaaccccaacguggaccccaacgccaaccccaacgucgacccgaacgccaaccccaacgcgaaccccaacgccaaccccaacgccaacccgaacgccaaccccaacgcgaaccccaacgccaaccccaacgccaacccgaacgccaaccccaacgccaaccccaacgcgaaccccaacgccaacccgaacgccaaccccaacgccaaccccaacgccaaccccaacgcgaacccgaacgccaaccccaacguggaccccaacgccaaccccaacgccaacccgaacgccaaccccaacgcgaaccccaacgccaacccgaacgccaaccccaacgccaaccccaacgccaaccccaacgcgaacccgaacgccaaccccaacgccaaccccaacgccaaccccaacgcgaacccgaacgccaaccccaacgccaaccccaacgccaaccccaacgccaacccgaacgcgaaccccaacaagaacaaccagggcaacggccaggggcacaacaugcccaacgaccccaaccggaacguggacgagaacgccaacgccaacagcgccgucaagaacaacaacaacgaggagccguccgacaagcacaucaaggaguaccugaacaagauccagaacugaggacuagucccuguucccagagcccacuuuuuuuucuuuuuuugaaauaaaauagccugucuuucagaucuaaaaaaaaaaaaaaaaaaaaaaaaaaaaaaaaaaaaaaaaaaaaaaaaaaaaaaaaaaaaaaaaugcaucccccccccccccccccccccccccccccccaaaggcucuuuucagagccaccagaauu

SEQ ID NO: 680 - RNA, 1431 nt, Artificial Sequence
  mRNA Design a-1 (A64-N5-C30-hSL-N5) comprising derived and/or modified sequence from Pf(3D7)__XP_001351122.1__HsALB_Pf-CSP(19-384) (opt1)
aggagagucccgcagucggcguccagcggcucugcuuguucgugugugugucguugcaggccuuauucaagcuuaccaugaagugggugaccuucaucagccuccuguuccuguucuccagcgccuacucccuguuccaggaguaccagugcuacggcagcuccagcaacacccgcguccucaacgagcugaacuacgacaacgccgggacgaaccuguacaacgagcucgagaugaacuacuacggcaagcaggagaacugguacucccugaagaagaacagccggucccugggggagaacgacgacggcaacaacgaggacaacgagaagcuccgcaagcccaagcacaagaagcugaagcagccggcggacgggaaccccgaccccaacgccaaccccaacguggacccgaacgccaaccccaacguggaccccaacgccaaccccaacgucgacccgaacgccaaccccaacgcgaaccccaacgccaaccccaacgccaacccgaacgccaaccccaacgcgaaccccaacgccaaccccaacgccaacccgaacgccaaccccaacgccaaccccaacgcgaaccccaacgccaacccgaacgccaaccccaacgccaaccccaacgccaaccccaacgcgaacccgaacgccaaccccaacguggaccccaacgccaaccccaacgccaacccgaacgccaaccccaacgcgaaccccaacgccaacccgaacgccaaccccaacgccaaccccaacgccaaccccaacgcgaacccgaacgccaaccccaacgccaaccccaacgccaaccccaacgcgaacccgaacgccaaccccaacgccaaccccaacgccaaccccaacgccaacccgaacgcgaaccccaacaagaacaaccagggcaacggccaggggcacaacaugcccaacgaccccaaccggaacguggacgagaacgccaacgccaacagcgccgucaagaacaacaacaacgaggagccguccgacaagcacaucaaggaguaccugaacaagauccagaacagccucuccaccgaguggagccccugcuccgugaccugcggcaacgggauccaggugcgcaucaagcccggcagcgccaacaagcccaaggacgagcuggacuacgcgaacgacaucgagaagaagaucugcaagauggagaagugcuccagcgucuucaacguggugaacuccagcugaggacuagucccuguucccagagcccacuuuuuuuucuuuuuuugaaauaaaauagccugucuuucagaucuaaaaaaaaaaaaaaaaaaaaaaaaaaaaaaaaaaaaaaaaaaaaaaaaaaaaaaaaaaaaaaaaugcaucccccccccccccccccccccccccccccccaaaggcucuuuucagagccaccagaauu

SEQ ID NO: 681 - RNA, 1569 nt, Artificial Sequence
  mRNA Design a-1 (A64-N5-C30-hSL-N5) comprising derived and/or modified sequence from Pf(3D7)__XP_001351122.1__HsALB_Pf-CSP(19-384)_TM domain HA (opt1)
aggagagucccgcagucggcguccagcggcucugcuuguucgugugugugucguugcaggccuuauucaagcuuaccaugaagugggugaccuucaucagccuccuguuccuguucuccagcgccuacucccuguuccaggaguaccagugcuacggcagcuccagcaacacccgcguccucaacgagcugaacuacgacaacgccgggacgaaccuguacaacgagcucgagaugaacuacuacggcaagcaggagaacugguacucccugaagaagaacagccggucccugggggagaacgacgacggcaacaacgaggacaacgagaagcuccgcaagcccaagcacaagaagcugaagcagccggcggacgggaaccccgaccccaacgccaaccccaacguggacccgaacgccaaccccaacguggaccccaacgccaaccccaacgucgacccgaacgccaaccccaacgcgaaccccaacgccaaccccaacgccaacccgaacgccaaccccaacgcgaaccccaacgccaaccccaacgccaacccgaacgccaaccccaacgccaaccccaacgcgaaccccaacgccaacccgaacgccaaccccaacgccaaccccaacgccaaccccaacgcgaacccgaacgccaaccccaacguggaccccaacgccaaccccaacgccaacccgaacgccaaccccaacgcgaaccccaacgccaacccgaacgccaaccccaacgccaaccccaacgccaaccccaacgcgaacccgaacgccaaccccaacgccaaccccaacgccaaccccaacgcgaacccgaacgccaaccccaacgccaaccccaacgccaaccccaacgccaacccgaacgcgaaccccaacaagaacaaccagggcaacggccaggggcacaacaugcccaacgaccccaaccggaacguggacgagaacgccaacgccaacagcgccgucaagaacaacaacaacgaggagccguccgacaagcacaucaaggaguaccugaacaagauccagaacagccucuccaccgaguggagccccugcuccgugaccugcggcaacgggauccaggugcgcaucaagcccggcagcgccaacaagcccaaggacgagcuggacuacgcgaacgacaucgagaagaagaucugcaagauggagaagugcuccagcgucuucaacguggugaacuccagcaagcuggagagcacccggaucuaccagauccucgccaucuacuccacggucgccagcucccuggugcugguggucagccucggggccaucuccuucuggaugugcagcaacggcucccugcagugccgcaucugcaucugaggacuagucccuguucccagagcccacuuuuuuuucuuuuuuugaaauaaaauagccugucuuucagaucuaaaaaaaaaaaaaaaaaaaaaaaaaaaaaaaaaaaaaaaaaaaaaaaaaaaaaaaaaaaaaaaaugcaucccccccccccccccccccccccccccccccaaaggcucuuuucagagccaccagaauu

SEQ ID NO: 682 - RNA, 1281 nt, Artificial Sequence
  mRNA Design a-1 (A64-N5-C30-hSL-N5) comprising derived and/or modified sequence from Pf(3D7)__XP_001351122.1__HsALB_Pf-CSP(82-397) (opt1)
aggagagucccgcagucggcguccagcggcucugcuuguucgugugugugucguugcaggccuuauucaagcuuaccaugaagugggugaccuucaucagccuccuguuccuguucuccagcgccuacuccgacaacgagaagcugcgcaagcccaagcacaagaagcucaagcagccggccgacggcaaccccgaccccaacgcgaaccccaacgucgacccgaacgccaaccccaacguggaccccaacgccaaccccaacguggacccgaacgccaaccccaacgccaaccccaacgcgaaccccaacgccaacccgaacgccaaccccaacgccaaccccaacgcgaaccccaacgccaacccgaacgccaaccccaacgccaaccccaacgccaaccccaacgcgaacccgaacgccaaccccaacgccaaccccaacgccaaccccaacgccaacccgaacgcgaaccccaacgucgaccccaacgccaaccccaacgccaacccgaacgccaaccccaacgccaaccccaacgcgaacccgaacgccaaccccaacgccaaccccaacgccaaccccaacgccaacccgaacgcgaaccccaacgccaaccccaacgccaaccccaacgccaacccgaacgcgaaccccaacgccaaccccaacgccaaccccaacgccaacccgaacgccaaccccaacaagaacaaccaggggaacggccaggggcacaacaugcccaacgaccccaaccggaacguggacgagaacgcgaacgccaacagcgccgugaagaacaacaacaacgaggagccguccgacaagcacaucaaggaguaccugaacaagauccagaacagccuguccaccgaguggagccccugcuccgucacgugcggcaacgggauccaggugcgcaucaagcccggcagcgccaacaagcccaaggacgagcucgacuacgccaacgacaucgagaagaagaucugcaagauggagaagugcuccagcguguucaacgucgugaacuccagcaucggccugaucauggugcuguccuuccucuuccugaacugaggacuagucccuguucccagagcccacuuuuuuuucuuuuuuugaaauaaaauagccugucuuucagaucuaaaaaaaaaaaaaaaaaaaaaaaaaaaaaaaaaaaaaaaaaaaaaaaaaaaaaaaaaaaaaaaaugcaucccccccccccccccccccccccccccccccaaaggcucuuuucagagccaccagaauu

SEQ ID NO: 683 - RNA, 633 nt, Artificial Sequence
  mRNA Design a-1 (A64-N5-C30-hSL-N5) comprising derived and/or modified sequence from Pf(3D7)__XP_001351122.1__HsALB_Pf-CSP(93-192) (opt1)
aggagagucccgcagucggcguccagcggcucugcuuguucgugugugugucguugcaggccuuauucaagcuuaccaugaagugggugaccuucaucagccuccuguuccuguucuccagcgccuacuccaagcugaagcagcccgccgacggcaacccggaccccaacgcgaaccccaacgucgaccccaacgccaacccgaacguggaccccaacgccaaccccaacguggaccccaacgccaacccgaacgccaaccccaacgcgaaccccaacgccaaccccaacgccaacccgaacgccaaccccaacgcgaaccccaacgccaaccccaacgccaacccgaacgccaaccccaacgccaaccccaacgcgaaccccaacgccaacccgaacgccaaccccaacgccaaccccaacgccaaccccugaggacuagucccuguucccagagcccacuuuuuuuucuuuuuuugaaauaaaauagccugucuuucagaucuaaaaaaaaaaaaaaaaaaaaaaaaaaaaaaaaaaaaaaaaaaaaaaaaaaaaaaaaaaaaaaaaugcaucccccccccccccccccccccccccccccccaaaggcucuuuucagagccaccagaauu

SEQ ID NO: 684 - RNA, 873 nt, Artificial Sequence
  mRNA Design a-1 (A64-N5-C30-hSL-N5) comprising derived and/or modified sequence from Pf(3D7)__XP_001351122.1__HsALB_Pf-CSP(93-272) (opt1)
aggagagucccgcagucggcguccagcggcucugcuuguucgugugugugucguugcaggccuuauucaagcuuaccaugaagugggugaccuucaucagccuccuguuccuguucuccagcgccuacuccaagcugaagcagcccgccgacggcaacccggaccccaacgcgaaccccaacgucgaccccaacgccaacccgaacguggaccccaacgccaaccccaacguggaccccaacgccaacccgaacgccaaccccaacgcgaaccccaacgccaaccccaacgccaacccgaacgccaaccccaacgcgaaccccaacgccaaccccaacgccaacccgaacgccaaccccaacgccaaccccaacgcgaaccccaacgccaacccgaacgccaaccccaacgccaaccccaacgccaaccccaacgcgaacccgaacgucgaccccaacgccaaccccaacgccaaccccaacgccaacccgaacgccaaccccaacgcgaaccccaacgccaacccgaacgccaaccccaacgccaaccccaacgccaaccccaacgcgaacccgaacgccaaccccaacgccaaccccaacgccaaccccaacgcgaacccgaacgccaaccccaacgccaaccccaacgccaaccccaacgccaacccgugaggacuagucccuguucccagagcccacuuuuuuuucuuuuuuugaaauaaaauagccugucuuucagaucuaaaaaaaaaaaaaaaaaaaaaaaaaaaaaaaaaaaaaaaaaaaaaaaaaaaaaaaaaaaaaaaaugcaucccccccccccccccccccccccccccccccaaaggcucuuuucagagccaccagaauu

SEQ ID NO: 685 - RNA, 1248 nt, Artificial Sequence
  mRNA Design a-1 (A64-N5-C30-hSL-N5) comprising derived and/or modified sequence from Pf(3D7)__XP_001351122.1__HsALB_Pf-CSP(93-397) (opt1)
aggagagucccgcagucggcguccagcggcucugcuuguucgugugugugucguugcaggccuuauucaagcuuaccaugaagugggugaccuucaucagccuccuguuccuguucuccagcgccuacuccaagcugaagcagcccgccgacggcaacccggaccccaacgcgaaccccaacgucgaccccaacgccaacccgaacguggaccccaacgccaaccccaacguggaccccaacgccaacccgaacgccaaccccaacgcgaaccccaacgccaaccccaacgccaacccgaacgccaaccccaacgcgaaccccaacgccaaccccaacgccaacccgaacgccaaccccaacgccaaccccaacgcgaaccccaacgccaacccgaacgccaaccccaacgccaaccccaacgccaaccccaacgcgaacccgaacgucgaccccaacgccaaccccaacgccaaccccaacgccaacccgaacgccaaccccaacgcgaaccccaacgccaacccgaacgccaaccccaacgccaaccccaacgccaaccccaacgcgaacccgaacgccaaccccaacgccaaccccaacgccaaccccaacgcgaacccgaacgccaaccccaacgccaaccccaacgccaaccccaacgccaacccgaacaagaacaaccaggggaacggccaggggcacaacaugcccaacgaccccaaccgcaacguggacgagaacgcgaacgccaacagcgccgugaagaacaacaacaacgaggagcccuccgacaagcacaucaaggaguaccucaacaagauccagaacagccuguccaccgaguggagcccgugcuccgucacgugcggcaacgggauccaggugcggaucaagcccggcagcgccaacaagcccaaggacgagcuggacuacgccaacgacaucgagaagaagaucugcaagauggagaagugcuccagcguguucaacgucgugaacuccagcaucggccucaucauggugcuguccuuccuguuccucaacugaggacuagucccuguucccagagcccacuuuuuuuucuuuuuuugaaauaaaauagccugucuuucagaucuaaaaaaaaaaaaaaaaaaaaaaaaaaaaaaaaaaaaaaaaaaaaaaaaaaaaaaaaaaaaaaaaugcaucccccccccccccccccccccccccccccccaaaggcucuuuucagagccaccagaauu

SEQ ID NO: 686 - RNA, 618 nt, Artificial Sequence
  mRNA Design a-1 (A64-N5-C30-hSL-N5) comprising derived and/or modified sequence from Pf(3D7)__XP_001351122.1__HsALB_Pf-CSP(98-192) (opt1)
aggagagucccgcagucggcguccagcggcucugcuuguucgugugugugucguugcaggccuuauucaagcuuaccaugaagugggugaccuucaucagccuccuguuccuguucuccagcgccuacuccgccgacggcaaccccgacccgaacgcgaaccccaacgucgaccccaacgccaaccccaacguggacccgaacgccaaccccaacguggaccccaacgccaaccccaacgccaacccgaacgcgaaccccaacgccaaccccaacgccaaccccaacgccaacccgaacgcgaaccccaacgccaaccccaacgccaaccccaacgccaacccgaacgccaaccccaacgcgaaccccaacgccaaccccaacgccaacccgaacgccaaccccaacgccaaccccugaggacuagucccuguucccagagcccacuuuuuuuucuuuuuuugaaauaaaauagccugucuuucagaucuaaaaaaaaaaaaaaaaaaaaaaaaaaaaaaaaaaaaaaaaaaaaaaaaaaaaaaaaaaaaaaaaugcaucccccccccccccccccccccccccccccccaaaggcucuuuucagagccaccagaauu

SEQ ID NO: 687 - RNA, 858 nt, Artificial Sequence
  mRNA Design a-1 (A64-N5-C30-hSL-N5) comprising derived and/or modified sequence from Pf(3D7)__XP_001351122.1__HsALB_Pf-CSP(98-272) (opt1)
aggagagucccgcagucggcguccagcggcucugcuuguucgugugugugucguugcaggccuuauucaagcuuaccaugaagugggugaccuucaucagccuccuguuccuguucuccagcgccuacuccgccgacggcaaccccgacccgaacgcgaaccccaacgucgaccccaacgccaaccccaacguggacccgaacgccaaccccaacguggaccccaacgccaaccccaacgccaacccgaacgcgaaccccaacgccaaccccaacgccaaccccaacgccaacccgaacgcgaaccccaacgccaaccccaacgccaaccccaacgccaacccgaacgccaaccccaacgcgaaccccaacgccaaccccaacgccaacccgaacgccaaccccaacgccaaccccaacgcgaaccccaacgucgacccgaacgccaaccccaacgccaaccccaacgccaaccccaacgccaacccgaacgcgaaccccaacgccaaccccaacgccaacccgaacgccaaccccaacgccaaccccaacgcgaaccccaacgccaacccgaacgccaaccccaacgccaaccccaacgcgaaccccaacgccaacccgaacgccaaccccaacgccaaccccaacgccaaccccugaggacuagucccuguucccagagcccacuuuuuuuucuuuuuuugaaauaaaauagccugucuuucagaucuaaaaaaaaaaaaaaaaaaaaaaaaaaaaaaaaaaaaaaaaaaaaaaaaaaaaaaaaaaaaaaaaugcaucccccccccccccccccccccccccccccccaaaggcucuuuucagagccaccagaauu

SEQ ID NO: 688 - RNA, 1164 nt, Artificial Sequence
  mRNA Design a-1 (A64-N5-C30-hSL-N5) comprising derived and/or modified sequence from Pf(3D7)__XP_001351122.1__HsALB_Pf-CSP(98-374) (opt1)
aggagagucccgcagucggcguccagcggcucugcuuguucgugugugugucguugcaggccuuauucaagcuuaccaugaagugggugaccuucaucagccuccuguuccuguucuccagcgccuacuccgccgacggcaaccccgacccgaacgcgaaccccaacgucgaccccaacgccaaccccaacguggacccgaacgccaaccccaacguggaccccaacgccaaccccaacgccaacccgaacgcgaaccccaacgccaaccccaacgccaaccccaacgccaacccgaacgcgaaccccaacgccaaccccaacgccaaccccaacgccaacccgaacgccaaccccaacgcgaaccccaacgccaaccccaacgccaacccgaacgccaaccccaacgccaaccccaacgcgaaccccaacgucgacccgaacgccaaccccaacgccaaccccaacgccaaccccaacgccaacccgaacgcgaaccccaacgccaaccccaacgccaacccgaacgccaaccccaacgccaaccccaacgcgaaccccaacgccaacccgaacgccaaccccaacgccaaccccaacgcgaaccccaacgccaacccgaacgccaaccccaacgccaaccccaacgccaaccccaacaagaacaaccaggggaacggccaggggcacaacaugccgaacgaccccaaccgcaacguggacgagaacgcgaacgccaacagcgccgugaagaacaacaacaacgaggagcccuccgacaagcacaucaaggaguaccugaacaagauccagaacagccucuccaccgaguggagccccugcuccgucacgugcggcaacgggauccaggugcggaucaagccgggcagcgccaacaagcccaaggacgagcuggacuacgccaacgacaucgagaagaagaucugcaagauggagaagugcugaggacuagucccuguucccagagcccacuuuuuuuucuuuuuuugaaauaaaauagccugucuuucagaucuaaaaaaaaaaaaaaaaaaaaaaaaaaaaaaaaaaaaaaaaaaaaaaaaaaaaaaaaaaaaaaaaugcaucccccccccccccccccccccccccccccccaaaggcucuuuucagagccaccagaauu

SEQ ID NO: 689 - RNA, 1233 nt, Artificial Sequence
  mRNA Design a-1 (A64-N5-C30-hSL-N5) comprising derived and/or modified sequence from Pf(3D7)__XP_001351122.1__HsALB_Pf-CSP(98-397) (opt1)
aggagagucccgcagucggcguccagcggcucugcuuguucgugugugugucguugcaggccuuauucaagcuuaccaugaagugggugaccuucaucagccuccuguuccuguucuccagcgccuacuccgccgacggcaaccccgacccgaacgcgaaccccaacgucgaccccaacgccaaccccaacguggacccgaacgccaaccccaacguggaccccaacgccaaccccaacgccaacccgaacgcgaaccccaacgccaaccccaacgccaaccccaacgccaacccgaacgcgaaccccaacgccaaccccaacgccaaccccaacgccaacccgaacgccaaccccaacgcgaaccccaacgccaaccccaacgccaacccgaacgccaaccccaacgccaaccccaacgcgaaccccaacgucgacccgaacgccaaccccaacgccaaccccaacgccaaccccaacgccaacccgaacgcgaaccccaacgccaaccccaacgccaacccgaacgccaaccccaacgccaaccccaacgcgaaccccaacgccaacccgaacgccaaccccaacgccaaccccaacgcgaaccccaacgccaacccgaacgccaaccccaacgccaaccccaacgccaaccccaacaagaacaaccaggggaacggccaggggcacaacaugccgaacgaccccaaccgcaacguggacgagaacgcgaacgccaacagcgccgugaagaacaacaacaacgaggagcccuccgacaagcacaucaaggaguaccugaacaagauccagaacagccucuccaccgaguggagccccugcuccgucacgugcggcaacgggauccaggugcggaucaagccgggcagcgccaacaagcccaaggacgagcuggacuacgccaacgacaucgagaagaagaucugcaagauggagaagugcuccagcguguucaacgucgugaacuccagcaucggccugaucauggugcucuccuuccuguuccugaacugaggacuagucccuguucccagagcccacuuuuuuuucuuuuuuugaaauaaaauagccugucuuucagaucuaaaaaaaaaaaaaaaaaaaaaaaaaaaaaaaaaaaaaaaaaaaaaaaaaaaaaaaaaaaaaaaaugcaucccccccccccccccccccccccccccccccaaaggcucuuuucagagccaccagaauu

SEQ ID NO: 690 - RNA, 1560 nt, Artificial Sequence
  mRNA Design a-1 (A64-N5-C30-hSL-N5) comprising derived and/or modified sequence from Pf(3D7)__XP_001351122.1__HsALB_Pf-CSP(199-377)_L(PVTN)_HBsAg (opt1)
aggagagucccgcagucggcguccagcggcucugcuuguucgugugugugucguugcaggccuuauucaagcuuaccaugaagugggugaccuucaucagccuccuguuccuguucuccagcgccuacuccgaccccaacgccaacccgaacgcgaaccccaacgccaaccccaacgccaaccccaacgccaacccgaacgccaaccccaacgcgaaccccaacgccaaccccaacgccaacccgaacgccaaccccaacgcgaaccccaacgccaaccccaacgccaacccgaacgccaaccccaacgccaaccccaacgcgaaccccaacgccaacccgaacgccaaccccaacaagaacaaccagggcaacgggcagggccacaacaugcccaacgaccccaaccgcaacgucgacgagaacgccaacgccaacagcgcggugaagaacaacaacaacgaggagccguccgacaagcacaucaaggaguaccugaacaagauccagaacagccucuccaccgaguggagccccugcuccgugaccugcgggaacggcauccagguccggaucaagcccgggagcgccaacaagcccaaggacgagcuggacuacgccaacgacaucgagaagaagaucugcaagauggagaagugcuccagcgugccggugaccaacauggagaacaucaccuccggcuuccugggcccccuccugguccugcaggccggguucuuccuccugacccgcauccugacgaucccccagagccucgacuccugguggaccagccugaacuuccugggcgggucccccgugugccucggccagaacagccaguccccgaccagcaaccacagccccaccuccugcccgcccaucugccccggguaccgguggaugugccugcgccgguucaucaucuuccuguucauccuccugcugugccucaucuuccugcuggugcuccuggacuaccagggcaugcugcccgucugcccccucaucccgggcagcacgaccaccaacaccgggcccugcaagacgugcaccacccccgcccagggcaacuccauguuccccagcugcugcugcaccaagccgacggacgggaacugcacgugcauccccauccccuccagcugggcguucgccaaguaccugugggagugggccuccgugcgcuucagcuggcugucccuccuggugcccuucguccagugguucgugggccugagcccgaccguguggcucuccgccaucuggaugaugugguacuggggccccagccuguacuccaucgucagccccuucaucccccugcucccgaucuucuucugccuguggguguacaucugaggacuagucccuguucccagagcccacuuuuuuuucuuuuuuugaaauaaaauagccugucuuucagaucuaaaaaaaaaaaaaaaaaaaaaaaaaaaaaaaaaaaaaaaaaaaaaaaaaaaaaaaaaaaaaaaaugcaucccccccccccccccccccccccccccccccaaaggcucuuuucagagccaccagaauu

SEQ ID NO: 691 - RNA, 1299 nt, Artificial Sequence
  mRNA Design a-1 (A64-N5-C30-hSL-N5) comprising derived and/or modified sequence from Pb(ANKA)__XP_022712148.1__Pb-CSP (opt1)
aggagagucccgcagucggcguccagcggcucugcuuguucgugugugugucguugcaggccuuauucaagcuuaccaugaagaagugcaccauccugguggucgccagccuccugcuggugaacucccuccugcccggcuacgggcagaacaagagcauccaggcccagcgcaaccugaacgagcucugcuacaacgagggcaacgacaacaagcuguaccacgugcugaacuccaagaacgggaagaucuacaaccggaacaccgucaaccgccuccuggcggacgccccggagggcaagaagaacgagaagaagaacgagaagaucgagcggaacaacaagcugaagcagcccccccccccgcccaaccccaacgaccccccgccccccaaccccaacgacccgcccccccccaacccgaacgaccccccccccccgaaccccaacgacccccccccgcccaacgccaacgacccccccccgcccaacgccaacgaccccgccccgcccaacgcgaacgaccccgcccccccgaacgccaacgaccccgccccccccaacgcgaacgacccggccccccccaacgccaacgaccccccgccccccaaccccaacgacccggccccccccaacgccaacgaccccccgccccccaaccccaacgacccggcgcccccccaggggaacaacaacccgcagccccagccccgcccccagccgcagccccagccccagccccagccgcagccccagccccagccccagccgcggccccagccccagccccagccgggcggcaacaacaacaacaagaacaacaacaacgacgacagcuacauccccuccgccgagaagauccucgaguucgugaagcagauccgcgacagcaucacggaggaguggucccagugcaacgugaccugcgggagcggcauccggguccgcaagcggaagggguccaacaagaaggccgaggaccugacccuggaggacaucgacaccgagaucugcaagauggacaagugcagcuccaucuucaacaucgugagcaacucccucggcuucgugauccugcugguccucguguucuucaacugaggacuagucccuguucccagagcccacuuuuuuuucuuuuuuugaaauaaaauagccugucuuucagaucuaaaaaaaaaaaaaaaaaaaaaaaaaaaaaaaaaaaaaaaaaaaaaaaaaaaaaaaaaaaaaaaaugcaucccccccccccccccccccccccccccccccaaaggcucuuuucagagccaccagaauu

SEQ ID NO: 692 - RNA, 1464 nt, Artificial Sequence
  mRNA Design a-1 (A64-N5-C30-hSL-N5) comprising derived and/or modified sequence from Pb(ANKA)__XP_022712148.1__Pb-CSP_L(G4SG4)_TM domain HA (opt1)
aggagagucccgcagucggcguccagcggcucugcuuguucgugugugugucguugcaggccuuauucaagcuuaccaugaagaagugcaccauccugguggucgccagccuccugcuggugaacucccuccugcccggcuacgggcagaacaagagcauccaggcccagcgcaaccugaacgagcucugcuacaacgagggcaacgacaacaagcuguaccacgugcugaacuccaagaacgggaagaucuacaaccggaacaccgucaaccgccuccuggcggacgccccggagggcaagaagaacgagaagaagaacgagaagaucgagcggaacaacaagcugaagcagcccccccccccgcccaaccccaacgaccccccgccccccaaccccaacgacccgcccccccccaacccgaacgaccccccccccccgaaccccaacgacccccccccgcccaacgccaacgacccccccccgcccaacgccaacgaccccgccccgcccaacgcgaacgaccccgcccccccgaacgccaacgaccccgccccccccaacgcgaacgacccggccccccccaacgccaacgaccccccgccccccaaccccaacgacccggccccccccaacgccaacgaccccccgccccccaaccccaacgacccggcgcccccccaggggaacaacaacccgcagccccagccccgcccccagccgcagccccagccccagccccagccgcagccccagccccagccccagccgcggccccagccccagccccagccgggcggcaacaacaacaacaagaacaacaacaacgacgacagcuacauccccuccgccgagaagauccucgaguucgugaagcagauccgcgacagcaucacggaggaguggucccagugcaacgugaccugcgggagcggcauccggguccgcaagcggaagggguccaacaagaaggccgaggaccugacccuggaggacaucgacaccgagaucugcaagauggacaagugcagcuccaucuucaacaucgugagcaacucccucggcuucgugauccugcugguccucguguucuucaacgggggcggcgggagcggcgggggcggcaagcuggaguccacgcgcaucuaccagauccuggccaucuacagcaccguggccuccagccucguccugguggugucccugggggcgaucagcuucuggaugugcagcaacggcucccuccagugccggaucugcaucugaggacuagucccuguucccagagcccacuuuuuuuucuuuuuuugaaauaaaauagccugucuuucagaucuaaaaaaaaaaaaaaaaaaaaaaaaaaaaaaaaaaaaaaaaaaaaaaaaaaaaaaaaaaaaaaaaugcaucccccccccccccccccccccccccccccccaaaggcucuuuucagagccaccagaauu

SEQ ID NO: 693 - RNA, 1284 nt, Artificial Sequence
  mRNA Design a-1 (A64-N5-C30-hSL-N5) comprising derived and/or modified sequence from Pb(ANKA)__XP_022712148.1__HsALB_Pb-CSP(24-340) (opt1)
aggagagucccgcagucggcguccagcggcucugcuuguucgugugugugucguugcaggccuuauucaagcuuaccaugaagugggugaccuucaucagccugcucuuccuguucuccagcgccuacucccagaacaagagcauccaggcccagcgcaaccugaacgagcucugcuacaacgagggcaacgacaacaagcuguaccacguccugaacuccaagaacgggaagaucuacaaccggaacaccgugaaccgccuccuggcggacgcccccgagggcaagaagaacgagaagaagaacgagaagaucgagcggaacaacaagcugaagcagccgcccccccccccgaaccccaacgacccccccccgcccaaccccaacgaccccccgccccccaaccccaacgacccgcccccccccaacccgaacgaccccccccccccgaacgccaacgaccccccccccccgaacgccaacgaccccgcccccccgaacgcgaacgaccccgccccccccaacgccaacgacccggccccccccaacgcgaacgaccccgccccgcccaacgccaacgacccccccccgcccaaccccaacgaccccgccccgcccaacgccaacgacccccccccgcccaaccccaacgaccccgcgccgccccaggggaacaacaacccccagccgcagccccgcccccagccccagccgcagccccagccccagccccagccgcagccccagccccagccccggccgcagccccagccccagcccggcgggaacaacaacaacaagaacaacaacaacgacgacagcuacaucccguccgccgagaagauccucgaguucgugaagcagauccgcgacagcaucacggaggaguggucccagugcaacgucaccugcggcagcggcauccgggugcgcaagcggaagggguccaacaagaaggccgaggaccugacccuggaggacaucgacaccgagaucugcaagauggacaagugcagcuccaucuucaacaucgugagcaacucccucggcuucgucauccugcuggugcucguguucuucaacugaggacuagucccuguucccagagcccacuuuuuuuucuuuuuuugaaauaaaauagccugucuuucagaucuaaaaaaaaaaaaaaaaaaaaaaaaaaaaaaaaaaaaaaaaaaaaaaaaaaaaaaaaaaaaaaaaugcaucccccccccccccccccccccccccccccccaaaggcucuuuucagagccaccagaauu

SEQ ID NO: 694 - RNA, 1302 nt, Artificial Sequence
  mRNA Design a-1 (A64-N5-C30-hSL-N5) comprising derived and/or modified sequence from Pb(ANKA)__XP_022712148.1__HsIns-iso1_Pb-CSP(24-340) (opt1)
aggagagucccgcagucggcguccagcggcucugcuuguucgugugugugucguugcaggccuuauucaagcuuaccauggcccuguggaugcgccuccugccccugcucgcccugcuggcgcucuggggcccggaccccgccgccgcccagaacaagagcauccaggcccagcggaaccugaacgagcugugcuacaacgaggggaacgacaacaagcucuaccacgugcugaacuccaagaacggcaagaucuacaaccgcaacaccgucaaccggcugcucgcggacgcccccgaggggaagaagaacgagaagaagaacgagaagaucgagcgcaacaacaagcugaagcagcccccgcccccccccaacccgaacgaccccccccccccgaaccccaacgacccccccccgcccaaccccaacgaccccccgccccccaaccccaacgacccgcccccccccaacgccaacgacccgccccccccgaacgccaacgaccccgcgccccccaacgccaacgacccggccccccccaacgccaacgaccccgccccgcccaacgcgaacgaccccgcccccccgaacgccaacgaccccccccccccgaaccccaacgaccccgcccccccgaacgccaacgaccccccccccccgaaccccaacgaccccgcgccgccccagggcaacaacaacccccagccccagccgcggccccagccccagccccagccgcagccccagccccagccccagccgcagccccagccccgcccccagccgcagccccagcccgggggcaacaacaacaacaagaacaacaacaacgacgacagcuacauccccuccgccgagaagauccuggaguucgugaagcagauccgggacagcaucaccgaggaguggucccagugcaacgugacgugcggcagcgggauccgcguccggaagcgcaagggcuccaacaagaaggccgaggaccucacccuggaggacaucgacaccgagaucugcaagauggacaagugcagcuccaucuucaacaucgugagcaacucccugggguucgugauccuccugguccugguguucuucaacugaggacuagucccuguucccagagcccacuuuuuuuucuuuuuuugaaauaaaauagccugucuuucagaucuaaaaaaaaaaaaaaaaaaaaaaaaaaaaaaaaaaaaaaaaaaaaaaaaaaaaaaaaaaaaaaaaugcaucccccccccccccccccccccccccccccccaaaggcucuuuucagagccaccagaauu

SEQ ID NO: 695 - RNA, 1281 nt, Artificial Sequence
  mRNA Design a-1 (A64-N5-C30-hSL-N5) comprising derived and/or modified sequence from Pb(ANKA)__XP_022712148.1__HsSPARC_Pb-CSP(24-340) (opt1)
aggagagucccgcagucggcguccagcggcucugcuuguucgugugugugucguugcaggccuuauucaagcuuaccaugcgcgccuggaucuucuuccugcucugccuggccggccgggcgcuggcccagaacaagagcauccaggcccagcgcaaccucaacgagcugugcuacaacgaggggaacgacaacaagcuguaccacgugcucaacuccaagaacggcaagaucuacaaccggaacaccgucaaccgccugcuggccgacgcccccgaggggaagaagaacgagaagaagaacgagaagaucgagcggaacaacaagcucaagcagccgcccccccccccgaaccccaacgacccccccccgcccaaccccaacgaccccccgccccccaaccccaacgacccgcccccccccaacccgaacgaccccccccccccgaacgcgaacgaccccccccccccgaacgccaacgaccccgcccccccgaacgccaacgaccccgcgccccccaacgccaacgacccggccccccccaacgccaacgaccccgccccgcccaacgcgaacgacccccccccgcccaaccccaacgaccccgccccgcccaacgccaacgacccccccccgcccaaccccaacgaccccgccccgccccagggcaacaacaacccccagccgcagccccgcccccagccccagccgcagccccagccccagccccagccgcagccccagccccagccccggccgcagccccagccccagcccgggggcaacaacaacaacaagaacaacaacaacgacgacagcuacaucccguccgccgagaagauccuggaguucgugaagcagauccgcgacagcaucaccgaggaguggucccagugcaacgugacgugcggcagcgggauccggguccgcaagcggaagggcuccaacaagaaggcggaggaccugacccucgaggacaucgacaccgagaucugcaagauggacaagugcagcuccaucuucaacaucgugagcaacucccugggguucgugauccugcucguccugguguucuucaacugaggacuagucccuguucccagagcccacuuuuuuuucuuuuuuugaaauaaaauagccugucuuucagaucuaaaaaaaaaaaaaaaaaaaaaaaaaaaaaaaaaaaaaaaaaaaaaaaaaaaaaaaaaaaaaaaaugcaucccccccccccccccccccccccccccccccaaaggcucuuuucagagccaccagaauu

SEQ ID NO: 696 - RNA, 1284 nt, Artificial Sequence
  mRNA Design a-1 (A64-N5-C30-hSL-N5) comprising derived and/or modified sequence from Pb(ANKA)__XP_022712148.1__IgE_Pb-CSP(24-340) (opt1)
aggagagucccgcagucggcguccagcggcucugcuuguucgugugugugucguugcaggccuuauucaagcuuaccauggacuggaccuggauccuguuccucguggccgccgcgacccgcguccacagccagaacaaguccauccaggcccagcggaaccugaacgagcugugcuacaacgagggcaacgacaacaagcucuaccacgugcugaacagcaagaacgggaagaucuacaaccgcaacacggugaaccggcugcucgccgacgcccccgagggcaagaagaacgagaagaagaacgagaagaucgagcgcaacaacaagcugaagcagccgcccccccccccgaaccccaacgacccccccccgcccaaccccaacgaccccccgccccccaaccccaacgacccgcccccccccaacccgaacgaccccccccccccgaacgccaacgaccccccccccccgaacgcgaacgaccccgcccccccgaacgccaacgaccccgccccccccaacgcgaacgacccggccccccccaacgccaacgaccccgccccgcccaacgccaacgacccccccccgcccaaccccaacgaccccgcgccgcccaacgccaacgacccccccccgcccaaccccaacgaccccgccccgccccaggggaacaacaacccccagccgcagccccggccccagccccagccgcagccccagccccagccccagccgcagccccagccccagccccgcccgcagccccagccccagcccggcgggaacaacaacaacaagaacaacaacaacgacgacuccuacaucccgagcgccgagaagauccuggaguucgucaagcagauccgggacuccaucaccgaggaguggagccagugcaacgugaccugcggcuccggcauccgcgugcggaagcgcaaggggagcaacaagaaggccgaggaccucacccuggaggacaucgacacggagaucugcaagauggacaagugcuccagcaucuucaacaucgucuccaacagccugggcuucgugauccuccuggugcuggucuucuucaacugaggacuagucccuguucccagagcccacuuuuuuuucuuuuuuugaaauaaaauagccugucuuucagaucuaaaaaaaaaaaaaaaaaaaaaaaaaaaaaaaaaaaaaaaaaaaaaaaaaaaaaaaaaaaaaaaaugcaucccccccccccccccccccccccccccccccaaaggcucuuuucagagccaccagaauu

SEQ ID NO: 697 - RNA, 1470 nt, Artificial Sequence
  mRNA Design a-1 (A64-N5-C30-hSL-N5) comprising derived and/or modified sequence from Pf(3D7)__XP_001351122.1__Pf-CSP (opt2)
aggagagucccgcagucggcguccagcggcucugcuuguucgugugugugucguugcaggccuuauucaagcuuaccaugaugcgcaagcucgccauccucuccgucuccuccuuccucuucgucgaggcccucuuccaggaguaccagugcuacggcuccuccuccaacacccgcguccucaacgagcucaacuacgacaacgccggcaccaaccucuacaacgagcucgagaugaacuacuacggcaagcaggagaacugguacucccucaagaagaacucccgcucccucggcgagaacgacgacggcaacaacgaggacaacgagaagcuccgcaagcccaagcacaagaagcucaagcagcccgccgacggcaaccccgaccccaacgccaaccccaacgucgaccccaacgccaaccccaacgucgaccccaacgccaaccccaacgucgaccccaacgccaaccccaacgccaaccccaacgccaaccccaacgccaaccccaacgccaaccccaacgccaaccccaacgccaaccccaacgccaaccccaacgccaaccccaacgccaaccccaacgccaaccccaacgccaaccccaacgccaaccccaacgccaaccccaacgccaaccccaacgccaaccccaacgccaaccccaacgucgaccccaacgccaaccccaacgccaaccccaacgccaaccccaacgccaaccccaacgccaaccccaacgccaaccccaacgccaaccccaacgccaaccccaacgccaaccccaacgccaaccccaacgccaaccccaacgccaaccccaacgccaaccccaacgccaaccccaacgccaaccccaacgccaaccccaacgccaaccccaacgccaaccccaacaagaacaaccagggcaacggccagggccacaacaugcccaacgaccccaaccgcaacgucgacgagaacgccaacgccaacuccgccgucaagaacaacaacaacgaggagcccuccgacaagcacaucaaggaguaccucaacaagauccagaacucccucuccaccgaguggucccccugcuccgucaccugcggcaacggcauccagguccgcaucaagcccggcuccgccaacaagcccaaggacgagcucgacuacgccaacgacaucgagaagaagaucugcaagauggagaagugcuccuccgucuucaacgucgucaacuccuccaucggccucaucaugguccucuccuuccucuuccucaacugaggacuagucccuguucccagagcccacuuuuuuuucuuuuuuugaaauaaaauagccugucuuucagaucuaaaaaaaaaaaaaaaaaaaaaaaaaaaaaaaaaaaaaaaaaaaaaaaaaaaaaaaaaaaaaaaaugcaucccccccccccccccccccccccccccccccaaaggcucuuuucagagccaccagaauu

SEQ ID NO: 698 - RNA, 1401 nt, Artificial Sequence
  mRNA Design a-1 (A64-N5-C30-hSL-N5) comprising derived and/or modified sequence from Pf(3D7)__XP_001351122.1__Pf-CSP(1-374) (opt2)
aggagagucccgcagucggcguccagcggcucugcuuguucgugugugugucguugcaggccuuauucaagcuuaccaugaugcgcaagcucgccauccucuccgucuccuccuuccucuucgucgaggcccucuuccaggaguaccagugcuacggcuccuccuccaacacccgcguccucaacgagcucaacuacgacaacgccggcaccaaccucuacaacgagcucgagaugaacuacuacggcaagcaggagaacugguacucccucaagaagaacucccgcucccucggcgagaacgacgacggcaacaacgaggacaacgagaagcuccgcaagcccaagcacaagaagcucaagcagcccgccgacggcaaccccgaccccaacgccaaccccaacgucgaccccaacgccaaccccaacgucgaccccaacgccaaccccaacgucgaccccaacgccaaccccaacgccaaccccaacgccaaccccaacgccaaccccaacgccaaccccaacgccaaccccaacgccaaccccaacgccaaccccaacgccaaccccaacgccaaccccaacgccaaccccaacgccaaccccaacgccaaccccaacgccaaccccaacgccaaccccaacgccaaccccaacgccaaccccaacgucgaccccaacgccaaccccaacgccaaccccaacgccaaccccaacgccaaccccaacgccaaccccaacgccaaccccaacgccaaccccaacgccaaccccaacgccaaccccaacgccaaccccaacgccaaccccaacgccaaccccaacgccaaccccaacgccaaccccaacgccaaccccaacgccaaccccaacgccaaccccaacgccaaccccaacaagaacaaccagggcaacggccagggccacaacaugcccaacgaccccaaccgcaacgucgacgagaacgccaacgccaacuccgccgucaagaacaacaacaacgaggagcccuccgacaagcacaucaaggaguaccucaacaagauccagaacucccucuccaccgaguggucccccugcuccgucaccugcggcaacggcauccagguccgcaucaagcccggcuccgccaacaagcccaaggacgagcucgacuacgccaacgacaucgagaagaagaucugcaagauggagaagugcugaggacuagucccuguucccagagcccacuuuuuuuucuuuuuuugaaauaaaauagccugucuuucagaucuaaaaaaaaaaaaaaaaaaaaaaaaaaaaaaaaaaaaaaaaaaaaaaaaaaaaaaaaaaaaaaaaugcaucccccccccccccccccccccccccccccccaaaggcucuuuucagagccaccagaauu

SEQ ID NO: 699 - RNA, 1254 nt, Artificial Sequence
  mRNA Design a-1 (A64-N5-C30-hSL-N5) comprising derived and/or modified sequence from Pf(3D7)__XP_001351122.1__Pf-CSP(1-325) (opt2)
aggagagucccgcagucggcguccagcggcucugcuuguucgugugugugucguugcaggccuuauucaagcuuaccaugaugcgcaagcucgccauccucuccgucuccuccuuccucuucgucgaggcccucuuccaggaguaccagugcuacggcuccuccuccaacacccgcguccucaacgagcucaacuacgacaacgccggcaccaaccucuacaacgagcucgagaugaacuacuacggcaagcaggagaacugguacucccucaagaagaacucccgcucccucggcgagaacgacgacggcaacaacgaggacaacgagaagcuccgcaagcccaagcacaagaagcucaagcagcccgccgacggcaaccccgaccccaacgccaaccccaacgucgaccccaacgccaaccccaacgucgaccccaacgccaaccccaacgucgaccccaacgccaaccccaacgccaaccccaacgccaaccccaacgccaaccccaacgccaaccccaacgccaaccccaacgccaaccccaacgccaaccccaacgccaaccccaacgccaaccccaacgccaaccccaacgccaaccccaacgccaaccccaacgccaaccccaacgccaaccccaacgccaaccccaacgccaaccccaacgucgaccccaacgccaaccccaacgccaaccccaacgccaaccccaacgccaaccccaacgccaaccccaacgccaaccccaacgccaaccccaacgccaaccccaacgccaaccccaacgccaaccccaacgccaaccccaacgccaaccccaacgccaaccccaacgccaaccccaacgccaaccccaacgccaaccccaacgccaaccccaacgccaaccccaacaagaacaaccagggcaacggccagggccacaacaugcccaacgaccccaaccgcaacgucgacgagaacgccaacgccaacuccgccgucaagaacaacaacaacgaggagcccuccgacaagcacaucaaggaguaccucaacaagauccagaacugaggacuagucccuguucccagagcccacuuuuuuuucuuuuuuugaaauaaaauagccugucuuucagaucuaaaaaaaaaaaaaaaaaaaaaaaaaaaaaaaaaaaaaaaaaaaaaaaaaaaaaaaaaaaaaaaaugcaucccccccccccccccccccccccccccccccaaaggcucuuuucagagccaccagaauu

SEQ ID NO: 700 - RNA, 1470 nt, Artificial Sequence
  mRNA Design a-1 (A64-N5-C30-hSL-N5) comprising derived and/or modified sequence from Pf(3D7)__XP_001351122.1__HsALB_Pf-CSP(19-397) (opt2)
aggagagucccgcagucggcguccagcggcucugcuuguucgugugugugucguugcaggccuuauucaagcuuaccaugaagugggucaccuucaucucccuccucuuccucuucuccuccgccuacucccucuuccaggaguaccagugcuacggcuccuccuccaacacccgcguccucaacgagcucaacuacgacaacgccggcaccaaccucuacaacgagcucgagaugaacuacuacggcaagcaggagaacugguacucccucaagaagaacucccgcucccucggcgagaacgacgacggcaacaacgaggacaacgagaagcuccgcaagcccaagcacaagaagcucaagcagcccgccgacggcaaccccgaccccaacgccaaccccaacgucgaccccaacgccaaccccaacgucgaccccaacgccaaccccaacgucgaccccaacgccaaccccaacgccaaccccaacgccaaccccaacgccaaccccaacgccaaccccaacgccaaccccaacgccaaccccaacgccaaccccaacgccaaccccaacgccaaccccaacgccaaccccaacgccaaccccaacgccaaccccaacgccaaccccaacgccaaccccaacgccaaccccaacgccaaccccaacgucgaccccaacgccaaccccaacgccaaccccaacgccaaccccaacgccaaccccaacgccaaccccaacgccaaccccaacgccaaccccaacgccaaccccaacgccaaccccaacgccaaccccaacgccaaccccaacgccaaccccaacgccaaccccaacgccaaccccaacgccaaccccaacgccaaccccaacgccaaccccaacgccaaccccaacaagaacaaccagggcaacggccagggccacaacaugcccaacgaccccaaccgcaacgucgacgagaacgccaacgccaacuccgccgucaagaacaacaacaacgaggagcccuccgacaagcacaucaaggaguaccucaacaagauccagaacucccucuccaccgaguggucccccugcuccgucaccugcggcaacggcauccagguccgcaucaagcccggcuccgccaacaagcccaaggacgagcucgacuacgccaacgacaucgagaagaagaucugcaagauggagaagugcuccuccgucuucaacgucgucaacuccuccaucggccucaucaugguccucuccuuccucuuccucaacugaggacuagucccuguucccagagcccacuuuuuuuucuuuuuuugaaauaaaauagccugucuuucagaucuaaaaaaaaaaaaaaaaaaaaaaaaaaaaaaaaaaaaaaaaaaaaaaaaaaaaaaaaaaaaaaaaugcaucccccccccccccccccccccccccccccccaaaggcucuuuucagagccaccagaauu

SEQ ID NO: 701 - RNA, 1488 nt, Artificial Sequence
  mRNA Design a-1 (A64-N5-C30-hSL-N5) comprising derived and/or modified sequence from Pf(3D7)__XP_001351122.1__HsIns-iso1_Pf-CSP(19-397) (opt2)
aggagagucccgcagucggcguccagcggcucugcuuguucgugugugugucguugcaggccuuauucaagcuuaccauggcccucuggaugcgccuccucccccuccucgcccuccucgcccucuggggccccgaccccgccgccgcccucuuccaggaguaccagugcuacggcuccuccuccaacacccgcguccucaacgagcucaacuacgacaacgccggcaccaaccucuacaacgagcucgagaugaacuacuacggcaagcaggagaacugguacucccucaagaagaacucccgcucccucggcgagaacgacgacggcaacaacgaggacaacgagaagcuccgcaagcccaagcacaagaagcucaagcagcccgccgacggcaaccccgaccccaacgccaaccccaacgucgaccccaacgccaaccccaacgucgaccccaacgccaaccccaacgucgaccccaacgccaaccccaacgccaaccccaacgccaaccccaacgccaaccccaacgccaaccccaacgccaaccccaacgccaaccccaacgccaaccccaacgccaaccccaacgccaaccccaacgccaaccccaacgccaaccccaacgccaaccccaacgccaaccccaacgccaaccccaacgccaaccccaacgccaaccccaacgucgaccccaacgccaaccccaacgccaaccccaacgccaaccccaacgccaaccccaacgccaaccccaacgccaaccccaacgccaaccccaacgccaaccccaacgccaaccccaacgccaaccccaacgccaaccccaacgccaaccccaacgccaaccccaacgccaaccccaacgccaaccccaacgccaaccccaacgccaaccccaacgccaaccccaacaagaacaaccagggcaacggccagggccacaacaugcccaacgaccccaaccgcaacgucgacgagaacgccaacgccaacuccgccgucaagaacaacaacaacgaggagcccuccgacaagcacaucaaggaguaccucaacaagauccagaacucccucuccaccgaguggucccccugcuccgucaccugcggcaacggcauccagguccgcaucaagcccggcuccgccaacaagcccaaggacgagcucgacuacgccaacgacaucgagaagaagaucugcaagauggagaagugcuccuccgucuucaacgucgucaacuccuccaucggccucaucaugguccucuccuuccucuuccucaacugaggacuagucccuguucccagagcccacuuuuuuuucuuuuuuugaaauaaaauagccugucuuucagaucuaaaaaaaaaaaaaaaaaaaaaaaaaaaaaaaaaaaaaaaaaaaaaaaaaaaaaaaaaaaaaaaaugcaucccccccccccccccccccccccccccccccaaaggcucuuuucagagccaccagaauu

SEQ ID NO: 702 - RNA, 1467 nt, Artificial Sequence
  mRNA Design a-1 (A64-N5-C30-hSL-N5) comprising derived and/or modified sequence from Pf(3D7)__XP_001351122.1__HsSPARC_Pf-CSP(19-397) (opt2)
aggagagucccgcagucggcguccagcggcucugcuuguucgugugugugucguugcaggccuuauucaagcuuaccaugcgcgccuggaucuucuuccuccucugccucgccggccgcgcccucgcccucuuccaggaguaccagugcuacggcuccuccuccaacacccgcguccucaacgagcucaacuacgacaacgccggcaccaaccucuacaacgagcucgagaugaacuacuacggcaagcaggagaacugguacucccucaagaagaacucccgcucccucggcgagaacgacgacggcaacaacgaggacaacgagaagcuccgcaagcccaagcacaagaagcucaagcagcccgccgacggcaaccccgaccccaacgccaaccccaacgucgaccccaacgccaaccccaacgucgaccccaacgccaaccccaacgucgaccccaacgccaaccccaacgccaaccccaacgccaaccccaacgccaaccccaacgccaaccccaacgccaaccccaacgccaaccccaacgccaaccccaacgccaaccccaacgccaaccccaacgccaaccccaacgccaaccccaacgccaaccccaacgccaaccccaacgccaaccccaacgccaaccccaacgccaaccccaacgucgaccccaacgccaaccccaacgccaaccccaacgccaaccccaacgccaaccccaacgccaaccccaacgccaaccccaacgccaaccccaacgccaaccccaacgccaaccccaacgccaaccccaacgccaaccccaacgccaaccccaacgccaaccccaacgccaaccccaacgccaaccccaacgccaaccccaacgccaaccccaacgccaaccccaacaagaacaaccagggcaacggccagggccacaacaugcccaacgaccccaaccgcaacgucgacgagaacgccaacgccaacuccgccgucaagaacaacaacaacgaggagcccuccgacaagcacaucaaggaguaccucaacaagauccagaacucccucuccaccgaguggucccccugcuccgucaccugcggcaacggcauccagguccgcaucaagcccggcuccgccaacaagcccaaggacgagcucgacuacgccaacgacaucgagaagaagaucugcaagauggagaagugcuccuccgucuucaacgucgucaacuccuccaucggccucaucaugguccucuccuuccucuuccucaacugaggacuagucccuguucccagagcccacuuuuuuuucuuuuuuugaaauaaaauagccugucuuucagaucuaaaaaaaaaaaaaaaaaaaaaaaaaaaaaaaaaaaaaaaaaaaaaaaaaaaaaaaaaaaaaaaaugcaucccccccccccccccccccccccccccccccaaaggcucuuuucagagccaccagaauu

SEQ ID NO: 703 - RNA, 1470 nt, Artificial Sequence
  mRNA Design a-1 (A64-N5-C30-hSL-N5) comprising derived and/or modified sequence from Pf(3D7)__XP_001351122.1__IgE_Pf-CSP(19-397) (opt2)
aggagagucccgcagucggcguccagcggcucugcuuguucgugugugugucguugcaggccuuauucaagcuuaccauggacuggaccuggauccucuuccucgucgccgccgccacccgcguccacucccucuuccaggaguaccagugcuacggcuccuccuccaacacccgcguccucaacgagcucaacuacgacaacgccggcaccaaccucuacaacgagcucgagaugaacuacuacggcaagcaggagaacugguacucccucaagaagaacucccgcucccucggcgagaacgacgacggcaacaacgaggacaacgagaagcuccgcaagcccaagcacaagaagcucaagcagcccgccgacggcaaccccgaccccaacgccaaccccaacgucgaccccaacgccaaccccaacgucgaccccaacgccaaccccaacgucgaccccaacgccaaccccaacgccaaccccaacgccaaccccaacgccaaccccaacgccaaccccaacgccaaccccaacgccaaccccaacgccaaccccaacgccaaccccaacgccaaccccaacgccaaccccaacgccaaccccaacgccaaccccaacgccaaccccaacgccaaccccaacgccaaccccaacgccaaccccaacgucgaccccaacgccaaccccaacgccaaccccaacgccaaccccaacgccaaccccaacgccaaccccaacgccaaccccaacgccaaccccaacgccaaccccaacgccaaccccaacgccaaccccaacgccaaccccaacgccaaccccaacgccaaccccaacgccaaccccaacgccaaccccaacgccaaccccaacgccaaccccaacgccaaccccaacaagaacaaccagggcaacggccagggccacaacaugcccaacgaccccaaccgcaacgucgacgagaacgccaacgccaacuccgccgucaagaacaacaacaacgaggagcccuccgacaagcacaucaaggaguaccucaacaagauccagaacucccucuccaccgaguggucccccugcuccgucaccugcggcaacggcauccagguccgcaucaagcccggcuccgccaacaagcccaaggacgagcucgacuacgccaacgacaucgagaagaagaucugcaagauggagaagugcuccuccgucuucaacgucgucaacuccuccaucggccucaucaugguccucuccuuccucuuccucaacugaggacuagucccuguucccagagcccacuuuuuuuucuuuuuuugaaauaaaauagccugucuuucagaucuaaaaaaaaaaaaaaaaaaaaaaaaaaaaaaaaaaaaaaaaaaaaaaaaaaaaaaaaaaaaaaaaugcaucccccccccccccccccccccccccccccccaaaggcucuuuucagagccaccagaauu

SEQ ID NO: 704 - RNA, 1635 nt, Artificial Sequence
  mRNA Design a-1 (A64-N5-C30-hSL-N5) comprising derived and/or modified sequence from Pf(3D7)__XP_001351122.1__Pf-CSP_L(G4SG4)_TM domain HA (opt2)
aggagagucccgcagucggcguccagcggcucugcuuguucgugugugugucguugcaggccuuauucaagcuuaccaugaugcgcaagcucgccauccucuccgucuccuccuuccucuucgucgaggcccucuuccaggaguaccagugcuacggcuccuccuccaacacccgcguccucaacgagcucaacuacgacaacgccggcaccaaccucuacaacgagcucgagaugaacuacuacggcaagcaggagaacugguacucccucaagaagaacucccgcucccucggcgagaacgacgacggcaacaacgaggacaacgagaagcuccgcaagcccaagcacaagaagcucaagcagcccgccgacggcaaccccgaccccaacgccaaccccaacgucgaccccaacgccaaccccaacgucgaccccaacgccaaccccaacgucgaccccaacgccaaccccaacgccaaccccaacgccaaccccaacgccaaccccaacgccaaccccaacgccaaccccaacgccaaccccaacgccaaccccaacgccaaccccaacgccaaccccaacgccaaccccaacgccaaccccaacgccaaccccaacgccaaccccaacgccaaccccaacgccaaccccaacgccaaccccaacgucgaccccaacgccaaccccaacgccaaccccaacgccaaccccaacgccaaccccaacgccaaccccaacgccaaccccaacgccaaccccaacgccaaccccaacgccaaccccaacgccaaccccaacgccaaccccaacgccaaccccaacgccaaccccaacgccaaccccaacgccaaccccaacgccaaccccaacgccaaccccaacgccaaccccaacaagaacaaccagggcaacggccagggccacaacaugcccaacgaccccaaccgcaacgucgacgagaacgccaacgccaacuccgccgucaagaacaacaacaacgaggagcccuccgacaagcacaucaaggaguaccucaacaagauccagaacucccucuccaccgaguggucccccugcuccgucaccugcggcaacggcauccagguccgcaucaagcccggcuccgccaacaagcccaaggacgagcucgacuacgccaacgacaucgagaagaagaucugcaagauggagaagugcuccuccgucuucaacgucgucaacuccuccaucggccucaucaugguccucuccuuccucuuccucaacggcggcggcggcuccggcggcggcggcaagcucgaguccacccgcaucuaccagauccucgccaucuacuccaccgucgccuccucccucguccucgucgucucccucggcgccaucuccuucuggaugugcuccaacggcucccuccagugccgcaucugcaucugaggacuagucccuguucccagagcccacuuuuuuuucuuuuuuugaaauaaaauagccugucuuucagaucuaaaaaaaaaaaaaaaaaaaaaaaaaaaaaaaaaaaaaaaaaaaaaaaaaaaaaaaaaaaaaaaaugcaucccccccccccccccccccccccccccccccaaaggcucuuuucagagccaccagaauu

SEQ ID NO: 705 - RNA, 1509 nt, Artificial Sequence
  mRNA Design a-1 (A64-N5-C30-hSL-N5) comprising derived and/or modified sequence from Pf(3D7)__XP_001351122.1__Pf-CSP(199-377)_L(PVTN)_HBsAg (opt2)
aggagagucccgcagucggcguccagcggcucugcuuguucgugugugugucguugcaggccuuauucaagcuuaccauggaccccaacgccaaccccaacgccaaccccaacgccaaccccaacgccaaccccaacgccaaccccaacgccaaccccaacgccaaccccaacgccaaccccaacgccaaccccaacgccaaccccaacgccaaccccaacgccaaccccaacgccaaccccaacgccaaccccaacgccaaccccaacgccaaccccaacgccaaccccaacgccaaccccaacaagaacaaccagggcaacggccagggccacaacaugcccaacgaccccaaccgcaacgucgacgagaacgccaacgccaacuccgccgucaagaacaacaacaacgaggagcccuccgacaagcacaucaaggaguaccucaacaagauccagaacucccucuccaccgaguggucccccugcuccgucaccugcggcaacggcauccagguccgcaucaagcccggcuccgccaacaagcccaaggacgagcucgacuacgccaacgacaucgagaagaagaucugcaagauggagaagugcuccuccguccccgucaccaacauggagaacaucaccuccggcuuccucggcccccuccucguccuccaggccggcuucuuccuccucacccgcauccucaccaucccccagucccucgacuccugguggaccucccucaacuuccucggcggcucccccgucugccucggccagaacucccagucccccaccuccaaccacucccccaccuccugcccccccaucugccccggcuaccgcuggaugugccuccgccgcuucaucaucuuccucuucauccuccuccucugccucaucuuccuccucguccuccucgacuaccagggcaugcuccccgucugcccccucauccccggcuccaccaccaccaacaccggccccugcaagaccugcaccacccccgcccagggcaacuccauguuccccuccugcugcugcaccaagcccaccgacggcaacugcaccugcauccccauccccuccuccugggccuucgccaaguaccucugggagugggccuccguccgcuucuccuggcucucccuccucguccccuucguccagugguucgucggccucucccccaccgucuggcucuccgccaucuggaugaugugguacuggggccccucccucuacuccaucgucucccccuucaucccccuccuccccaucuucuucugccucugggucuacaucugaggacuagucccuguucccagagcccacuuuuuuuucuuuuuuugaaauaaaauagccugucuuucagaucuaaaaaaaaaaaaaaaaaaaaaaaaaaaaaaaaaaaaaaaaaaaaaaaaaaaaaaaaaaaaaaaaugcaucccccccccccccccccccccccccccccccaaaggcucuuuucagagccaccagaauu

SEQ ID NO: 706 - RNA, 1551 nt, Artificial Sequence
  mRNA Design a-1 (A64-N5-C30-hSL-N5) comprising derived and/or modified sequence from Pf(3D7)__XP_001351122.1__Pf-CSP(199-387)_L(PVTN)_HBsAg (opt2)
aggagagucccgcagucggcguccagcggcucugcuuguucgugugugugucguugcaggccuuauucaagcuuaccaugauggcccccgaccccaacgccaaccccaacgccaaccccaacgccaaccccaacgccaaccccaacgccaaccccaacgccaaccccaacgccaaccccaacgccaaccccaacgccaaccccaacgccaaccccaacgccaaccccaacgccaaccccaacgccaaccccaacgccaaccccaacgccaaccccaacgccaaccccaacgccaaccccaacgccaaccccaacaagaacaaccagggcaacggccagggccacaacaugcccaacgaccccaaccgcaacgucgacgagaacgccaacgccaacuccgccgucaagaacaacaacaacgaggagcccuccgacaagcacaucaaggaguaccucaacaagauccagaacucccucuccaccgaguggucccccugcuccgucaccugcggcaacggcauccagguccgcaucaagcccggcuccgccaacaagcccaaggacgagcucgacuacgccaacgacaucgagaagaagaucugcaagauggagaagugcuccuccgucuucaacgucgucaacuccuccaucggccucggccccgucaccaacauggagaacaucaccuccggcuuccucggcccccuccucguccuccaggccggcuucuuccuccucacccgcauccucaccaucccccagucccucgacuccugguggaccucccucaacuuccucggcggcucccccgucugccucggccagaacucccagucccccaccuccaaccacucccccaccuccugcccccccaucugccccggcuaccgcuggaugugccuccgccgcuucaucaucuuccucuucauccuccuccucugccucaucuuccuccucguccuccucgacuaccagggcaugcuccccgucugcccccucauccccggcuccaccaccaccaacaccggccccugcaagaccugcaccacccccgcccagggcaacuccauguuccccuccugcugcugcaccaagcccaccgacggcaacugcaccugcauccccauccccuccuccugggccuucgccaaguaccucugggagugggccuccguccgcuucuccuggcucucccuccucguccccuucguccagugguucgucggccucucccccaccgucuggcucuccgccaucuggaugaugugguacuggggccccucccucuacuccaucgucucccccuucaucccccuccuccccaucuucuucugccucugggucuacaucugaggacuagucccuguucccagagcccacuuuuuuuucuuuuuuugaaauaaaauagccugucuuucagaucuaaaaaaaaaaaaaaaaaaaaaaaaaaaaaaaaaaaaaaaaaaaaaaaaaaaaaaaaaaaaaaaaugcaucccccccccccccccccccccccccccccccaaaggcucuuuucagagccaccagaauu

SEQ ID NO: 707 - RNA, 735 nt, Artificial Sequence
  mRNA Design a-1 (A64-N5-C30-hSL-N5) comprising derived and/or modified sequence from Pf(3D7)__XP_001351122.1__HsALB_Pf-CSP(19-152) (opt2)
aggagagucccgcagucggcguccagcggcucugcuuguucgugugugugucguugcaggccuuauucaagcuuaccaugaagugggucaccuucaucucccuccucuuccucuucuccuccgccuacucccucuuccaggaguaccagugcuacggcuccuccuccaacacccgcguccucaacgagcucaacuacgacaacgccggcaccaaccucuacaacgagcucgagaugaacuacuacggcaagcaggagaacugguacucccucaagaagaacucccgcucccucggcgagaacgacgacggcaacaacgaggacaacgagaagcuccgcaagcccaagcacaagaagcucaagcagcccgccgacggcaaccccgaccccaacgccaaccccaacgucgaccccaacgccaaccccaacgucgaccccaacgccaaccccaacgucgaccccaacgccaaccccaacgccaaccccaacgccaaccccaacgccaaccccaacgccaaccccaacgccaaccccugaggacuagucccuguucccagagcccacuuuuuuuucuuuuuuugaaauaaaauagccugucuuucagaucuaaaaaaaaaaaaaaaaaaaaaaaaaaaaaaaaaaaaaaaaaaaaaaaaaaaaaaaaaaaaaaaaugcaucccccccccccccccccccccccccccccccaaaggcucuuuucagagccaccagaauu

SEQ ID NO: 708 - RNA, 855 nt, Artificial Sequence
  mRNA Design a-1 (A64-N5-C30-hSL-N5) comprising derived and/or modified sequence from Pf(3D7)__XP_001351122.1__HsALB_Pf-CSP(19-192) (opt2)
aggagagucccgcagucggcguccagcggcucugcuuguucgugugugugucguugcaggccuuauucaagcuuaccaugaagugggucaccuucaucucccuccucuuccucuucuccuccgccuacucccucuuccaggaguaccagugcuacggcuccuccuccaacacccgcguccucaacgagcucaacuacgacaacgccggcaccaaccucuacaacgagcucgagaugaacuacuacggcaagcaggagaacugguacucccucaagaagaacucccgcucccucggcgagaacgacgacggcaacaacgaggacaacgagaagcuccgcaagcccaagcacaagaagcucaagcagcccgccgacggcaaccccgaccccaacgccaaccccaacgucgaccccaacgccaaccccaacgucgaccccaacgccaaccccaacgucgaccccaacgccaaccccaacgccaaccccaacgccaaccccaacgccaaccccaacgccaaccccaacgccaaccccaacgccaaccccaacgccaaccccaacgccaaccccaacgccaaccccaacgccaaccccaacgccaaccccaacgccaaccccaacgccaaccccaacgccaaccccaacgccaaccccugaggacuagucccuguucccagagcccacuuuuuuuucuuuuuuugaaauaaaauagccugucuuucagaucuaaaaaaaaaaaaaaaaaaaaaaaaaaaaaaaaaaaaaaaaaaaaaaaaaaaaaaaaaaaaaaaaugcaucccccccccccccccccccccccccccccccaaaggcucuuuucagagccaccagaauu

SEQ ID NO: 709 - RNA, 1095 nt, Artificial Sequence
  mRNA Design a-1 (A64-N5-C30-hSL-N5) comprising derived and/or modified sequence from Pf(3D7)__XP_001351122.1__HsALB_Pf-CSP(19-272) (opt2)
aggagagucccgcagucggcguccagcggcucugcuuguucgugugugugucguugcaggccuuauucaagcuuaccaugaagugggucaccuucaucucccuccucuuccucuucuccuccgccuacucccucuuccaggaguaccagugcuacggcuccuccuccaacacccgcguccucaacgagcucaacuacgacaacgccggcaccaaccucuacaacgagcucgagaugaacuacuacggcaagcaggagaacugguacucccucaagaagaacucccgcucccucggcgagaacgacgacggcaacaacgaggacaacgagaagcuccgcaagcccaagcacaagaagcucaagcagcccgccgacggcaaccccgaccccaacgccaaccccaacgucgaccccaacgccaaccccaacgucgaccccaacgccaaccccaacgucgaccccaacgccaaccccaacgccaaccccaacgccaaccccaacgccaaccccaacgccaaccccaacgccaaccccaacgccaaccccaacgccaaccccaacgccaaccccaacgccaaccccaacgccaaccccaacgccaaccccaacgccaaccccaacgccaaccccaacgccaaccccaacgccaaccccaacgccaaccccaacgucgaccccaacgccaaccccaacgccaaccccaacgccaaccccaacgccaaccccaacgccaaccccaacgccaaccccaacgccaaccccaacgccaaccccaacgccaaccccaacgccaaccccaacgccaaccccaacgccaaccccaacgccaaccccaacgccaaccccaacgccaaccccaacgccaaccccaacgccaaccccaacgccaaccccugaggacuagucccuguucccagagcccacuuuuuuuucuuuuuuugaaauaaaauagccugucuuucagaucuaaaaaaaaaaaaaaaaaaaaaaaaaaaaaaaaaaaaaaaaaaaaaaaaaaaaaaaaaaaaaaaaugcaucccccccccccccccccccccccccccccccaaaggcucuuuucagagccaccagaauu

SEQ ID NO: 710 - RNA, 1257 nt, Artificial Sequence
  mRNA Design a-1 (A64-N5-C30-hSL-N5) comprising derived and/or modified sequence from Pf(3D7)__XP_001351122.1__HsALB_Pf-CSP(19-272)_L(AAY)_Pf-CSP(310-3 27)_L(AAY)_Pf-CSP(346-375) (opt2)
aggagagucccgcagucggcguccagcggcucugcuuguucgugugugugucguugcaggccuuauucaagcuuaccaugaagugggucaccuucaucucccuccucuuccucuucuccuccgccuacucccucuuccaggaguaccagugcuacggcuccuccuccaacacccgcguccucaacgagcucaacuacgacaacgccggcaccaaccucuacaacgagcucgagaugaacuacuacggcaagcaggagaacugguacucccucaagaagaacucccgcucccucggcgagaacgacgacggcaacaacgaggacaacgagaagcuccgcaagcccaagcacaagaagcucaagcagcccgccgacggcaaccccgaccccaacgccaaccccaacgucgaccccaacgccaaccccaacgucgaccccaacgccaaccccaacgucgaccccaacgccaaccccaacgccaaccccaacgccaaccccaacgccaaccccaacgccaaccccaacgccaaccccaacgccaaccccaacgccaaccccaacgccaaccccaacgccaaccccaacgccaaccccaacgccaaccccaacgccaaccccaacgccaaccccaacgccaaccccaacgccaaccccaacgccaaccccaacgucgaccccaacgccaaccccaacgccaaccccaacgccaaccccaacgccaaccccaacgccaaccccaacgccaaccccaacgccaaccccaacgccaaccccaacgccaaccccaacgccaaccccaacgccaaccccaacgccaaccccaacgccaaccccaacgccaaccccaacgccaaccccaacgccaaccccaacgccaaccccaacgccaaccccgccgccuacgagcccuccgacaagcacaucaaggaguaccucaacaagauccagaacucccucgccgccuacaucaagcccggcuccgccaacaagcccaaggacgagcucgacuacgccaacgacaucgagaagaagaucugcaagauggagaagugcuccugaggacuagucccuguucccagagcccacuuuuuuuucuuuuuuugaaauaaaauagccugucuuucagaucuaaaaaaaaaaaaaaaaaaaaaaaaaaaaaaaaaaaaaaaaaaaaaaaaaaaaaaaaaaaaaaaaugcaucccccccccccccccccccccccccccccccaaaggcucuuuucagagccaccagaauu

SEQ ID NO: 711 - RNA, 1218 nt, Artificial Sequence
  mRNA Design a-1 (A64-N5-C30-hSL-N5) comprising derived and/or modified sequence from Pf(3D7)__XP_001351122.1__HsALB_Pf-CSP(19-272)_L(AAY)_Pf-CSP(346-3 65)_L(AAY)_P2 (opt2)
aggagagucccgcagucggcguccagcggcucugcuuguucgugugugugucguugcaggccuuauucaagcuuaccaugaagugggucaccuucaucucccuccucuuccucuucuccuccgccuacucccucuuccaggaguaccagugcuacggcuccuccuccaacacccgcguccucaacgagcucaacuacgacaacgccggcaccaaccucuacaacgagcucgagaugaacuacuacggcaagcaggagaacugguacucccucaagaagaacucccgcucccucggcgagaacgacgacggcaacaacgaggacaacgagaagcuccgcaagcccaagcacaagaagcucaagcagcccgccgacggcaaccccgaccccaacgccaaccccaacgucgaccccaacgccaaccccaacgucgaccccaacgccaaccccaacgucgaccccaacgccaaccccaacgccaaccccaacgccaaccccaacgccaaccccaacgccaaccccaacgccaaccccaacgccaaccccaacgccaaccccaacgccaaccccaacgccaaccccaacgccaaccccaacgccaaccccaacgccaaccccaacgccaaccccaacgccaaccccaacgccaaccccaacgccaaccccaacgucgaccccaacgccaaccccaacgccaaccccaacgccaaccccaacgccaaccccaacgccaaccccaacgccaaccccaacgccaaccccaacgccaaccccaacgccaaccccaacgccaaccccaacgccaaccccaacgccaaccccaacgccaaccccaacgccaaccccaacgccaaccccaacgccaaccccaacgccaaccccaacgccaaccccgccgccuacaucaagcccggcuccgccaacaagcccaaggacgagcucgacuacgccaacgacaucgaggccgccuaccaguacaucaaggccaacuccaaguucaucggcaucaccgagcucugaggacuagucccuguucccagagcccacuuuuuuuucuuuuuuugaaauaaaauagccugucuuucagaucuaaaaaaaaaaaaaaaaaaaaaaaaaaaaaaaaaaaaaaaaaaaaaaaaaaaaaaaaaaaaaaaaugcaucccccccccccccccccccccccccccccccaaaggcucuuuucagagccaccagaauu

SEQ ID NO: 712 - RNA, 1212 nt, Artificial Sequence
  mRNA Design a-1 (A64-N5-C30-hSL-N5) comprising derived and/or modified sequence from Pf(3D7)__XP_001351122.1__HsALB_Pf-CSP(19-272)_L(AAY)_Pf-CSP(346-3 65)_L(AAY)_PADRE (opt2)
aggagagucccgcagucggcguccagcggcucugcuuguucgugugugugucguugcaggccuuauucaagcuuaccaugaagugggucaccuucaucucccuccucuuccucuucuccuccgccuacucccucuuccaggaguaccagugcuacggcuccuccuccaacacccgcguccucaacgagcucaacuacgacaacgccggcaccaaccucuacaacgagcucgagaugaacuacuacggcaagcaggagaacugguacucccucaagaagaacucccgcucccucggcgagaacgacgacggcaacaacgaggacaacgagaagcuccgcaagcccaagcacaagaagcucaagcagcccgccgacggcaaccccgaccccaacgccaaccccaacgucgaccccaacgccaaccccaacgucgaccccaacgccaaccccaacgucgaccccaacgccaaccccaacgccaaccccaacgccaaccccaacgccaaccccaacgccaaccccaacgccaaccccaacgccaaccccaacgccaaccccaacgccaaccccaacgccaaccccaacgccaaccccaacgccaaccccaacgccaaccccaacgccaaccccaacgccaaccccaacgccaaccccaacgccaaccccaacgucgaccccaacgccaaccccaacgccaaccccaacgccaaccccaacgccaaccccaacgccaaccccaacgccaaccccaacgccaaccccaacgccaaccccaacgccaaccccaacgccaaccccaacgccaaccccaacgccaaccccaacgccaaccccaacgccaaccccaacgccaaccccaacgccaaccccaacgccaaccccaacgccaaccccgccgccuacaucaagcccggcuccgccaacaagcccaaggacgagcucgacuacgccaacgacaucgaggccgccuacgccaaguucgucgccgccuggacccucaaggccgccgccugaggacuagucccuguucccagagcccacuuuuuuuucuuuuuuugaaauaaaauagccugucuuucagaucuaaaaaaaaaaaaaaaaaaaaaaaaaaaaaaaaaaaaaaaaaaaaaaaaaaaaaaaaaaaaaaaaugcaucccccccccccccccccccccccccccccccaaaggcucuuuucagagccaccagaauu

SEQ ID NO: 713 - RNA, 1269 nt, Artificial Sequence
  mRNA Design a-1 (A64-N5-C30-hSL-N5) comprising derived and/or modified sequence from Pf(3D7)__XP_001351122.1__HsALB_Pf-CSP(19-272)_L(G4S)_Pf-CSP(310-3 27)_L(G4S)_Pf-CSP(346-375) (opt2)
aggagagucccgcagucggcguccagcggcucugcuuguucgugugugugucguugcaggccuuauucaagcuuaccaugaagugggucaccuucaucucccuccucuuccucuucuccuccgccuacucccucuuccaggaguaccagugcuacggcuccuccuccaacacccgcguccucaacgagcucaacuacgacaacgccggcaccaaccucuacaacgagcucgagaugaacuacuacggcaagcaggagaacugguacucccucaagaagaacucccgcucccucggcgagaacgacgacggcaacaacgaggacaacgagaagcuccgcaagcccaagcacaagaagcucaagcagcccgccgacggcaaccccgaccccaacgccaaccccaacgucgaccccaacgccaaccccaacgucgaccccaacgccaaccccaacgucgaccccaacgccaaccccaacgccaaccccaacgccaaccccaacgccaaccccaacgccaaccccaacgccaaccccaacgccaaccccaacgccaaccccaacgccaaccccaacgccaaccccaacgccaaccccaacgccaaccccaacgccaaccccaacgccaaccccaacgccaaccccaacgccaaccccaacgccaaccccaacgucgaccccaacgccaaccccaacgccaaccccaacgccaaccccaacgccaaccccaacgccaaccccaacgccaaccccaacgccaaccccaacgccaaccccaacgccaaccccaacgccaaccccaacgccaaccccaacgccaaccccaacgccaaccccaacgccaaccccaacgccaaccccaacgccaaccccaacgccaaccccaacgccaaccccggcggcggcggcuccgagcccuccgacaagcacaucaaggaguaccucaacaagauccagaacucccucggcggcggcggcuccaucaagcccggcuccgccaacaagcccaaggacgagcucgacuacgccaacgacaucgagaagaagaucugcaagauggagaagugcuccugaggacuagucccuguucccagagcccacuuuuuuuucuuuuuuugaaauaaaauagccugucuuucagaucuaaaaaaaaaaaaaaaaaaaaaaaaaaaaaaaaaaaaaaaaaaaaaaaaaaaaaaaaaaaaaaaaugcaucccccccccccccccccccccccccccccccaaaggcucuuuucagagccaccagaauu

SEQ ID NO: 714 - RNA, 1254 nt, Artificial Sequence
  mRNA Design a-1 (A64-N5-C30-hSL-N5) comprising derived and/or modified sequence from Pf(3D7)__XP_001351122.1__HsALB_Pf-CSP(19-272)_L(G4S)_Pf-CSP(310-3 27)_Pf-CSP(346-375) (opt2)
aggagagucccgcagucggcguccagcggcucugcuuguucgugugugugucguugcaggccuuauucaagcuuaccaugaagugggucaccuucaucucccuccucuuccucuucuccuccgccuacucccucuuccaggaguaccagugcuacggcuccuccuccaacacccgcguccucaacgagcucaacuacgacaacgccggcaccaaccucuacaacgagcucgagaugaacuacuacggcaagcaggagaacugguacucccucaagaagaacucccgcucccucggcgagaacgacgacggcaacaacgaggacaacgagaagcuccgcaagcccaagcacaagaagcucaagcagcccgccgacggcaaccccgaccccaacgccaaccccaacgucgaccccaacgccaaccccaacgucgaccccaacgccaaccccaacgucgaccccaacgccaaccccaacgccaaccccaacgccaaccccaacgccaaccccaacgccaaccccaacgccaaccccaacgccaaccccaacgccaaccccaacgccaaccccaacgccaaccccaacgccaaccccaacgccaaccccaacgccaaccccaacgccaaccccaacgccaaccccaacgccaaccccaacgccaaccccaacgucgaccccaacgccaaccccaacgccaaccccaacgccaaccccaacgccaaccccaacgccaaccccaacgccaaccccaacgccaaccccaacgccaaccccaacgccaaccccaacgccaaccccaacgccaaccccaacgccaaccccaacgccaaccccaacgccaaccccaacgccaaccccaacgccaaccccaacgccaaccccaacgccaaccccggcggcggcggcuccgagcccuccgacaagcacaucaaggaguaccucaacaagauccagaacucccucaucaagcccggcuccgccaacaagcccaaggacgagcucgacuacgccaacgacaucgagaagaagaucugcaagauggagaagugcuccugaggacuagucccuguucccagagcccacuuuuuuuucuuuuuuugaaauaaaauagccugucuuucagaucuaaaaaaaaaaaaaaaaaaaaaaaaaaaaaaaaaaaaaaaaaaaaaaaaaaaaaaaaaaaaaaaaugcaucccccccccccccccccccccccccccccccaaaggcucuuuucagagccaccagaauu

SEQ ID NO: 715 - RNA, 1254 nt, Artificial Sequence
  mRNA Design a-1 (A64-N5-C30-hSL-N5) comprising derived and/or modified sequence from Pf(3D7)__XP_001351122.1__HsALB_Pf-CSP(19-325) (opt2)
aggagagucccgcagucggcguccagcggcucugcuuguucgugugugugucguugcaggccuuauucaagcuuaccaugaagugggucaccuucaucucccuccucuuccucuucuccuccgccuacucccucuuccaggaguaccagugcuacggcuccuccuccaacacccgcguccucaacgagcucaacuacgacaacgccggcaccaaccucuacaacgagcucgagaugaacuacuacggcaagcaggagaacugguacucccucaagaagaacucccgcucccucggcgagaacgacgacggcaacaacgaggacaacgagaagcuccgcaagcccaagcacaagaagcucaagcagcccgccgacggcaaccccgaccccaacgccaaccccaacgucgaccccaacgccaaccccaacgucgaccccaacgccaaccccaacgucgaccccaacgccaaccccaacgccaaccccaacgccaaccccaacgccaaccccaacgccaaccccaacgccaaccccaacgccaaccccaacgccaaccccaacgccaaccccaacgccaaccccaacgccaaccccaacgccaaccccaacgccaaccccaacgccaaccccaacgccaaccccaacgccaaccccaacgccaaccccaacgucgaccccaacgccaaccccaacgccaaccccaacgccaaccccaacgccaaccccaacgccaaccccaacgccaaccccaacgccaaccccaacgccaaccccaacgccaaccccaacgccaaccccaacgccaaccccaacgccaaccccaacgccaaccccaacgccaaccccaacgccaaccccaacgccaaccccaacgccaaccccaacgccaaccccaacaagaacaaccagggcaacggccagggccacaacaugcccaacgaccccaaccgcaacgucgacgagaacgccaacgccaacuccgccgucaagaacaacaacaacgaggagcccuccgacaagcacaucaaggaguaccucaacaagauccagaacugaggacuagucccuguucccagagcccacuuuuuuuucuuuuuuugaaauaaaauagccugucuuucagaucuaaaaaaaaaaaaaaaaaaaaaaaaaaaaaaaaaaaaaaaaaaaaaaaaaaaaaaaaaaaaaaaaugcaucccccccccccccccccccccccccccccccaaaggcucuuuucagagccaccagaauu

SEQ ID NO: 716 - RNA, 1431 nt, Artificial Sequence
  mRNA Design a-1 (A64-N5-C30-hSL-N5) comprising derived and/or modified sequence from Pf(3D7)__XP_001351122.1__HsALB_Pf-CSP(19-384) (opt2)
aggagagucccgcagucggcguccagcggcucugcuuguucgugugugugucguugcaggccuuauucaagcuuaccaugaagugggucaccuucaucucccuccucuuccucuucuccuccgccuacucccucuuccaggaguaccagugcuacggcuccuccuccaacacccgcguccucaacgagcucaacuacgacaacgccggcaccaaccucuacaacgagcucgagaugaacuacuacggcaagcaggagaacugguacucccucaagaagaacucccgcucccucggcgagaacgacgacggcaacaacgaggacaacgagaagcuccgcaagcccaagcacaagaagcucaagcagcccgccgacggcaaccccgaccccaacgccaaccccaacgucgaccccaacgccaaccccaacgucgaccccaacgccaaccccaacgucgaccccaacgccaaccccaacgccaaccccaacgccaaccccaacgccaaccccaacgccaaccccaacgccaaccccaacgccaaccccaacgccaaccccaacgccaaccccaacgccaaccccaacgccaaccccaacgccaaccccaacgccaaccccaacgccaaccccaacgccaaccccaacgccaaccccaacgccaaccccaacgucgaccccaacgccaaccccaacgccaaccccaacgccaaccccaacgccaaccccaacgccaaccccaacgccaaccccaacgccaaccccaacgccaaccccaacgccaaccccaacgccaaccccaacgccaaccccaacgccaaccccaacgccaaccccaacgccaaccccaacgccaaccccaacgccaaccccaacgccaaccccaacgccaaccccaacaagaacaaccagggcaacggccagggccacaacaugcccaacgaccccaaccgcaacgucgacgagaacgccaacgccaacuccgccgucaagaacaacaacaacgaggagcccuccgacaagcacaucaaggaguaccucaacaagauccagaacucccucuccaccgaguggucccccugcuccgucaccugcggcaacggcauccagguccgcaucaagcccggcuccgccaacaagcccaaggacgagcucgacuacgccaacgacaucgagaagaagaucugcaagauggagaagugcuccuccgucuucaacgucgucaacuccuccugaggacuagucccuguucccagagcccacuuuuuuuucuuuuuuugaaauaaaauagccugucuuucagaucuaaaaaaaaaaaaaaaaaaaaaaaaaaaaaaaaaaaaaaaaaaaaaaaaaaaaaaaaaaaaaaaaugcaucccccccccccccccccccccccccccccccaaaggcucuuuucagagccaccagaauu

SEQ ID NO: 717 - RNA, 1569 nt, Artificial Sequence
  mRNA Design a-1 (A64-N5-C30-hSL-N5) comprising derived and/or modified sequence from Pf(3D7)__XP_001351122.1__HsALB_Pf-CSP(19-384)_TM domain HA (opt2)
aggagagucccgcagucggcguccagcggcucugcuuguucgugugugugucguugcaggccuuauucaagcuuaccaugaagugggucaccuucaucucccuccucuuccucuucuccuccgccuacucccucuuccaggaguaccagugcuacggcuccuccuccaacacccgcguccucaacgagcucaacuacgacaacgccggcaccaaccucuacaacgagcucgagaugaacuacuacggcaagcaggagaacugguacucccucaagaagaacucccgcucccucggcgagaacgacgacggcaacaacgaggacaacgagaagcuccgcaagcccaagcacaagaagcucaagcagcccgccgacggcaaccccgaccccaacgccaaccccaacgucgaccccaacgccaaccccaacgucgaccccaacgccaaccccaacgucgaccccaacgccaaccccaacgccaaccccaacgccaaccccaacgccaaccccaacgccaaccccaacgccaaccccaacgccaaccccaacgccaaccccaacgccaaccccaacgccaaccccaacgccaaccccaacgccaaccccaacgccaaccccaacgccaaccccaacgccaaccccaacgccaaccccaacgccaaccccaacgucgaccccaacgccaaccccaacgccaaccccaacgccaaccccaacgccaaccccaacgccaaccccaacgccaaccccaacgccaaccccaacgccaaccccaacgccaaccccaacgccaaccccaacgccaaccccaacgccaaccccaacgccaaccccaacgccaaccccaacgccaaccccaacgccaaccccaacgccaaccccaacgccaaccccaacaagaacaaccagggcaacggccagggccacaacaugcccaacgaccccaaccgcaacgucgacgagaacgccaacgccaacuccgccgucaagaacaacaacaacgaggagcccuccgacaagcacaucaaggaguaccucaacaagauccagaacucccucuccaccgaguggucccccugcuccgucaccugcggcaacggcauccagguccgcaucaagcccggcuccgccaacaagcccaaggacgagcucgacuacgccaacgacaucgagaagaagaucugcaagauggagaagugcuccuccgucuucaacgucgucaacuccuccaagcucgaguccacccgcaucuaccagauccucgccaucuacuccaccgucgccuccucccucguccucgucgucucccucggcgccaucuccuucuggaugugcuccaacggcucccuccagugccgcaucugcaucugaggacuagucccuguucccagagcccacuuuuuuuucuuuuuuugaaauaaaauagccugucuuucagaucuaaaaaaaaaaaaaaaaaaaaaaaaaaaaaaaaaaaaaaaaaaaaaaaaaaaaaaaaaaaaaaaaugcaucccccccccccccccccccccccccccccccaaaggcucuuuucagagccaccagaauu

SEQ ID NO: 718 - RNA, 1281 nt, Artificial Sequence
  mRNA Design a-1 (A64-N5-C30-hSL-N5) comprising derived and/or modified sequence from Pf(3D7)__XP_001351122.1__HsALB_Pf-CSP(82-397) (opt2)
aggagagucccgcagucggcguccagcggcucugcuuguucgugugugugucguugcaggccuuauucaagcuuaccaugaagugggucaccuucaucucccuccucuuccucuucuccuccgccuacuccgacaacgagaagcuccgcaagcccaagcacaagaagcucaagcagcccgccgacggcaaccccgaccccaacgccaaccccaacgucgaccccaacgccaaccccaacgucgaccccaacgccaaccccaacgucgaccccaacgccaaccccaacgccaaccccaacgccaaccccaacgccaaccccaacgccaaccccaacgccaaccccaacgccaaccccaacgccaaccccaacgccaaccccaacgccaaccccaacgccaaccccaacgccaaccccaacgccaaccccaacgccaaccccaacgccaaccccaacgccaaccccaacgccaaccccaacgucgaccccaacgccaaccccaacgccaaccccaacgccaaccccaacgccaaccccaacgccaaccccaacgccaaccccaacgccaaccccaacgccaaccccaacgccaaccccaacgccaaccccaacgccaaccccaacgccaaccccaacgccaaccccaacgccaaccccaacgccaaccccaacgccaaccccaacgccaaccccaacgccaaccccaacaagaacaaccagggcaacggccagggccacaacaugcccaacgaccccaaccgcaacgucgacgagaacgccaacgccaacuccgccgucaagaacaacaacaacgaggagcccuccgacaagcacaucaaggaguaccucaacaagauccagaacucccucuccaccgaguggucccccugcuccgucaccugcggcaacggcauccagguccgcaucaagcccggcuccgccaacaagcccaaggacgagcucgacuacgccaacgacaucgagaagaagaucugcaagauggagaagugcuccuccgucuucaacgucgucaacuccuccaucggccucaucaugguccucuccuuccucuuccucaacugaggacuagucccuguucccagagcccacuuuuuuuucuuuuuuugaaauaaaauagccugucuuucagaucuaaaaaaaaaaaaaaaaaaaaaaaaaaaaaaaaaaaaaaaaaaaaaaaaaaaaaaaaaaaaaaaaugcaucccccccccccccccccccccccccccccccaaaggcucuuuucagagccaccagaauu

SEQ ID NO: 719 - RNA, 633 nt, Artificial Sequence
  mRNA Design a-1 (A64-N5-C30-hSL-N5) comprising derived and/or modified sequence from Pf(3D7)__XP_001351122.1__HsALB_Pf-CSP(93-192) (opt2)
aggagagucccgcagucggcguccagcggcucugcuuguucgugugugugucguugcaggccuuauucaagcuuaccaugaagugggucaccuucaucucccuccucuuccucuucuccuccgccuacuccaagcucaagcagcccgccgacggcaaccccgaccccaacgccaaccccaacgucgaccccaacgccaaccccaacgucgaccccaacgccaaccccaacgucgaccccaacgccaaccccaacgccaaccccaacgccaaccccaacgccaaccccaacgccaaccccaacgccaaccccaacgccaaccccaacgccaaccccaacgccaaccccaacgccaaccccaacgccaaccccaacgccaaccccaacgccaaccccaacgccaaccccaacgccaaccccaacgccaaccccugaggacuagucccuguucccagagcccacuuuuuuuucuuuuuuugaaauaaaauagccugucuuucagaucuaaaaaaaaaaaaaaaaaaaaaaaaaaaaaaaaaaaaaaaaaaaaaaaaaaaaaaaaaaaaaaaaugcaucccccccccccccccccccccccccccccccaaaggcucuuuucagagccaccagaauu

SEQ ID NO: 720 - RNA, 873 nt, Artificial Sequence
  mRNA Design a-1 (A64-N5-C30-hSL-N5) comprising derived and/or modified sequence from Pf(3D7)__XP_001351122.1__HsALB_Pf-CSP(93-272) (opt2)
aggagagucccgcagucggcguccagcggcucugcuuguucgugugugugucguugcaggccuuauucaagcuuaccaugaagugggucaccuucaucucccuccucuuccucuucuccuccgccuacuccaagcucaagcagcccgccgacggcaaccccgaccccaacgccaaccccaacgucgaccccaacgccaaccccaacgucgaccccaacgccaaccccaacgucgaccccaacgccaaccccaacgccaaccccaacgccaaccccaacgccaaccccaacgccaaccccaacgccaaccccaacgccaaccccaacgccaaccccaacgccaaccccaacgccaaccccaacgccaaccccaacgccaaccccaacgccaaccccaacgccaaccccaacgccaaccccaacgccaaccccaacgccaaccccaacgucgaccccaacgccaaccccaacgccaaccccaacgccaaccccaacgccaaccccaacgccaaccccaacgccaaccccaacgccaaccccaacgccaaccccaacgccaaccccaacgccaaccccaacgccaaccccaacgccaaccccaacgccaaccccaacgccaaccccaacgccaaccccaacgccaaccccaacgccaaccccaacgccaaccccugaggacuagucccuguucccagagcccacuuuuuuuucuuuuuuugaaauaaaauagccugucuuucagaucuaaaaaaaaaaaaaaaaaaaaaaaaaaaaaaaaaaaaaaaaaaaaaaaaaaaaaaaaaaaaaaaaugcaucccccccccccccccccccccccccccccccaaaggcucuuuucagagccaccagaauu

SEQ ID NO: 721 - RNA, 1248 nt, Artificial Sequence
  mRNA Design a-1 (A64-N5-C30-hSL-N5) comprising derived and/or modified sequence from Pf(3D7)__XP_001351122.1__HsALB_Pf-CSP(93-397) (opt2)
aggagagucccgcagucggcguccagcggcucugcuuguucgugugugugucguugcaggccuuauucaagcuuaccaugaagugggucaccuucaucucccuccucuuccucuucuccuccgccuacuccaagcucaagcagcccgccgacggcaaccccgaccccaacgccaaccccaacgucgaccccaacgccaaccccaacgucgaccccaacgccaaccccaacgucgaccccaacgccaaccccaacgccaaccccaacgccaaccccaacgccaaccccaacgccaaccccaacgccaaccccaacgccaaccccaacgccaaccccaacgccaaccccaacgccaaccccaacgccaaccccaacgccaaccccaacgccaaccccaacgccaaccccaacgccaaccccaacgccaaccccaacgccaaccccaacgucgaccccaacgccaaccccaacgccaaccccaacgccaaccccaacgccaaccccaacgccaaccccaacgccaaccccaacgccaaccccaacgccaaccccaacgccaaccccaacgccaaccccaacgccaaccccaacgccaaccccaacgccaaccccaacgccaaccccaacgccaaccccaacgccaaccccaacgccaaccccaacgccaaccccaacaagaacaaccagggcaacggccagggccacaacaugcccaacgaccccaaccgcaacgucgacgagaacgccaacgccaacuccgccgucaagaacaacaacaacgaggagcccuccgacaagcacaucaaggaguaccucaacaagauccagaacucccucuccaccgaguggucccccugcuccgucaccugcggcaacggcauccagguccgcaucaagcccggcuccgccaacaagcccaaggacgagcucgacuacgccaacgacaucgagaagaagaucugcaagauggagaagugcuccuccgucuucaacgucgucaacuccuccaucggccucaucaugguccucuccuuccucuuccucaacugaggacuagucccuguucccagagcccacuuuuuuuucuuuuuuugaaauaaaauagccugucuuucagaucuaaaaaaaaaaaaaaaaaaaaaaaaaaaaaaaaaaaaaaaaaaaaaaaaaaaaaaaaaaaaaaaaugcaucccccccccccccccccccccccccccccccaaaggcucuuuucagagccaccagaauu

SEQ ID NO: 722 - RNA, 618 nt, Artificial Sequence
  mRNA Design a-1 (A64-N5-C30-hSL-N5) comprising derived and/or modified sequence from Pf(3D7)__XP_001351122.1__HsALB_Pf-CSP(98-192) (opt2)
aggagagucccgcagucggcguccagcggcucugcuuguucgugugugugucguugcaggccuuauucaagcuuaccaugaagugggucaccuucaucucccuccucuuccucuucuccuccgccuacuccgccgacggcaaccccgaccccaacgccaaccccaacgucgaccccaacgccaaccccaacgucgaccccaacgccaaccccaacgucgaccccaacgccaaccccaacgccaaccccaacgccaaccccaacgccaaccccaacgccaaccccaacgccaaccccaacgccaaccccaacgccaaccccaacgccaaccccaacgccaaccccaacgccaaccccaacgccaaccccaacgccaaccccaacgccaaccccaacgccaaccccaacgccaaccccugaggacuagucccuguucccagagcccacuuuuuuuucuuuuuuugaaauaaaauagccugucuuucagaucuaaaaaaaaaaaaaaaaaaaaaaaaaaaaaaaaaaaaaaaaaaaaaaaaaaaaaaaaaaaaaaaaugcaucccccccccccccccccccccccccccccccaaaggcucuuuucagagccaccagaauu

SEQ ID NO: 723 - RNA, 858 nt, Artificial Sequence
  mRNA Design a-1 (A64-N5-C30-hSL-N5) comprising derived and/or modified sequence from Pf(3D7)__XP_001351122.1__HsALB_Pf-CSP(98-272) (opt2)
aggagagucccgcagucggcguccagcggcucugcuuguucgugugugugucguugcaggccuuauucaagcuuaccaugaagugggucaccuucaucucccuccucuuccucuucuccuccgccuacuccgccgacggcaaccccgaccccaacgccaaccccaacgucgaccccaacgccaaccccaacgucgaccccaacgccaaccccaacgucgaccccaacgccaaccccaacgccaaccccaacgccaaccccaacgccaaccccaacgccaaccccaacgccaaccccaacgccaaccccaacgccaaccccaacgccaaccccaacgccaaccccaacgccaaccccaacgccaaccccaacgccaaccccaacgccaaccccaacgccaaccccaacgccaaccccaacgccaaccccaacgucgaccccaacgccaaccccaacgccaaccccaacgccaaccccaacgccaaccccaacgccaaccccaacgccaaccccaacgccaaccccaacgccaaccccaacgccaaccccaacgccaaccccaacgccaaccccaacgccaaccccaacgccaaccccaacgccaaccccaacgccaaccccaacgccaaccccaacgccaaccccaacgccaaccccugaggacuagucccuguucccagagcccacuuuuuuuucuuuuuuugaaauaaaauagccugucuuucagaucuaaaaaaaaaaaaaaaaaaaaaaaaaaaaaaaaaaaaaaaaaaaaaaaaaaaaaaaaaaaaaaaaugcaucccccccccccccccccccccccccccccccaaaggcucuuuucagagccaccagaauu

SEQ ID NO: 724 - RNA, 1164 nt, Artificial Sequence
  mRNA Design a-1 (A64-N5-C30-hSL-N5) comprising derived and/or modified sequence from Pf(3D7)__XP_001351122.1__HsALB_Pf-CSP(98-374) (opt2)
aggagagucccgcagucggcguccagcggcucugcuuguucgugugugugucguugcaggccuuauucaagcuuaccaugaagugggucaccuucaucucccuccucuuccucuucuccuccgccuacuccgccgacggcaaccccgaccccaacgccaaccccaacgucgaccccaacgccaaccccaacgucgaccccaacgccaaccccaacgucgaccccaacgccaaccccaacgccaaccccaacgccaaccccaacgccaaccccaacgccaaccccaacgccaaccccaacgccaaccccaacgccaaccccaacgccaaccccaacgccaaccccaacgccaaccccaacgccaaccccaacgccaaccccaacgccaaccccaacgccaaccccaacgccaaccccaacgccaaccccaacgucgaccccaacgccaaccccaacgccaaccccaacgccaaccccaacgccaaccccaacgccaaccccaacgccaaccccaacgccaaccccaacgccaaccccaacgccaaccccaacgccaaccccaacgccaaccccaacgccaaccccaacgccaaccccaacgccaaccccaacgccaaccccaacgccaaccccaacgccaaccccaacgccaaccccaacaagaacaaccagggcaacggccagggccacaacaugcccaacgaccccaaccgcaacgucgacgagaacgccaacgccaacuccgccgucaagaacaacaacaacgaggagcccuccgacaagcacaucaaggaguaccucaacaagauccagaacucccucuccaccgaguggucccccugcuccgucaccugcggcaacggcauccagguccgcaucaagcccggcuccgccaacaagcccaaggacgagcucgacuacgccaacgacaucgagaagaagaucugcaagauggagaagugcugaggacuagucccuguucccagagcccacuuuuuuuucuuuuuuugaaauaaaauagccugucuuucagaucuaaaaaaaaaaaaaaaaaaaaaaaaaaaaaaaaaaaaaaaaaaaaaaaaaaaaaaaaaaaaaaaaugcaucccccccccccccccccccccccccccccccaaaggcucuuuucagagccaccagaauu

SEQ ID NO: 725 - RNA, 1233 nt, Artificial Sequence
  mRNA Design a-1 (A64-N5-C30-hSL-N5) comprising derived and/or modified sequence from Pf(3D7)__XP_001351122.1__HsALB_Pf-CSP(98-397) (opt2)
aggagagucccgcagucggcguccagcggcucugcuuguucgugugugugucguugcaggccuuauucaagcuuaccaugaagugggucaccuucaucucccuccucuuccucuucuccuccgccuacuccgccgacggcaaccccgaccccaacgccaaccccaacgucgaccccaacgccaaccccaacgucgaccccaacgccaaccccaacgucgaccccaacgccaaccccaacgccaaccccaacgccaaccccaacgccaaccccaacgccaaccccaacgccaaccccaacgccaaccccaacgccaaccccaacgccaaccccaacgccaaccccaacgccaaccccaacgccaaccccaacgccaaccccaacgccaaccccaacgccaaccccaacgccaaccccaacgccaaccccaacgucgaccccaacgccaaccccaacgccaaccccaacgccaaccccaacgccaaccccaacgccaaccccaacgccaaccccaacgccaaccccaacgccaaccccaacgccaaccccaacgccaaccccaacgccaaccccaacgccaaccccaacgccaaccccaacgccaaccccaacgccaaccccaacgccaaccccaacgccaaccccaacgccaaccccaacaagaacaaccagggcaacggccagggccacaacaugcccaacgaccccaaccgcaacgucgacgagaacgccaacgccaacuccgccgucaagaacaacaacaacgaggagcccuccgacaagcacaucaaggaguaccucaacaagauccagaacucccucuccaccgaguggucccccugcuccgucaccugcggcaacggcauccagguccgcaucaagcccggcuccgccaacaagcccaaggacgagcucgacuacgccaacgacaucgagaagaagaucugcaagauggagaagugcuccuccgucuucaacgucgucaacuccuccaucggccucaucaugguccucuccuuccucuuccucaacugaggacuagucccuguucccagagcccacuuuuuuuucuuuuuuugaaauaaaauagccugucuuucagaucuaaaaaaaaaaaaaaaaaaaaaaaaaaaaaaaaaaaaaaaaaaaaaaaaaaaaaaaaaaaaaaaaugcaucccccccccccccccccccccccccccccccaaaggcucuuuucagagccaccagaauu

SEQ ID NO: 726 - RNA, 1560 nt, Artificial Sequence
  mRNA Design a-1 (A64-N5-C30-hSL-N5) comprising derived and/or modified sequence from Pf(3D7)__XP_001351122.1__HsALB_Pf-CSP(199-377)_L(PVTN)_HBsAg (opt2)
aggagagucccgcagucggcguccagcggcucugcuuguucgugugugugucguugcaggccuuauucaagcuuaccaugaagugggucaccuucaucucccuccucuuccucuucuccuccgccuacuccgaccccaacgccaaccccaacgccaaccccaacgccaaccccaacgccaaccccaacgccaaccccaacgccaaccccaacgccaaccccaacgccaaccccaacgccaaccccaacgccaaccccaacgccaaccccaacgccaaccccaacgccaaccccaacgccaaccccaacgccaaccccaacgccaaccccaacgccaaccccaacgccaaccccaacaagaacaaccagggcaacggccagggccacaacaugcccaacgaccccaaccgcaacgucgacgagaacgccaacgccaacuccgccgucaagaacaacaacaacgaggagcccuccgacaagcacaucaaggaguaccucaacaagauccagaacucccucuccaccgaguggucccccugcuccgucaccugcggcaacggcauccagguccgcaucaagcccggcuccgccaacaagcccaaggacgagcucgacuacgccaacgacaucgagaagaagaucugcaagauggagaagugcuccuccguccccgucaccaacauggagaacaucaccuccggcuuccucggcccccuccucguccuccaggccggcuucuuccuccucacccgcauccucaccaucccccagucccucgacuccugguggaccucccucaacuuccucggcggcucccccgucugccucggccagaacucccagucccccaccuccaaccacucccccaccuccugcccccccaucugccccggcuaccgcuggaugugccuccgccgcuucaucaucuuccucuucauccuccuccucugccucaucuuccuccucguccuccucgacuaccagggcaugcuccccgucugcccccucauccccggcuccaccaccaccaacaccggccccugcaagaccugcaccacccccgcccagggcaacuccauguuccccuccugcugcugcaccaagcccaccgacggcaacugcaccugcauccccauccccuccuccugggccuucgccaaguaccucugggagugggccuccguccgcuucuccuggcucucccuccucguccccuucguccagugguucgucggccucucccccaccgucuggcucuccgccaucuggaugaugugguacuggggccccucccucuacuccaucgucucccccuucaucccccuccuccccaucuucuucugccucugggucuacaucugaggacuagucccuguucccagagcccacuuuuuuuucuuuuuuugaaauaaaauagccugucuuucagaucuaaaaaaaaaaaaaaaaaaaaaaaaaaaaaaaaaaaaaaaaaaaaaaaaaaaaaaaaaaaaaaaaugcaucccccccccccccccccccccccccccccccaaaggcucuuuucagagccaccagaauu

SEQ ID NO: 727 - RNA, 1299 nt, Artificial Sequence
  mRNA Design a-1 (A64-N5-C30-hSL-N5) comprising derived and/or modified sequence from Pb(ANKA)__XP_022712148.1__Pb-CSP (opt2)
aggagagucccgcagucggcguccagcggcucugcuuguucgugugugugucguugcaggccuuauucaagcuuaccaugaagaagugcaccauccucgucgucgccucccuccuccucgucaacucccuccuccccggcuacggccagaacaaguccauccaggcccagcgcaaccucaacgagcucugcuacaacgagggcaacgacaacaagcucuaccacguccucaacuccaagaacggcaagaucuacaaccgcaacaccgucaaccgccuccucgccgacgcccccgagggcaagaagaacgagaagaagaacgagaagaucgagcgcaacaacaagcucaagcagcccccccccccccccaaccccaacgacccccccccccccaaccccaacgacccccccccccccaaccccaacgacccccccccccccaaccccaacgacccccccccccccaacgccaacgacccccccccccccaacgccaacgaccccgccccccccaacgccaacgaccccgccccccccaacgccaacgaccccgccccccccaacgccaacgaccccgccccccccaacgccaacgacccccccccccccaaccccaacgaccccgccccccccaacgccaacgacccccccccccccaaccccaacgaccccgcccccccccagggcaacaacaacccccagccccagccccgcccccagccccagccccagccccagccccagccccagccccagccccagccccagccccgcccccagccccagccccagcccggcggcaacaacaacaacaagaacaacaacaacgacgacuccuacauccccuccgccgagaagauccucgaguucgucaagcagauccgcgacuccaucaccgaggaguggucccagugcaacgucaccugcggcuccggcauccgcguccgcaagcgcaagggcuccaacaagaaggccgaggaccucacccucgaggacaucgacaccgagaucugcaagauggacaagugcuccuccaucuucaacaucgucuccaacucccucggcuucgucauccuccucguccucgucuucuucaacugaggacuagucccuguucccagagcccacuuuuuuuucuuuuuuugaaauaaaauagccugucuuucagaucuaaaaaaaaaaaaaaaaaaaaaaaaaaaaaaaaaaaaaaaaaaaaaaaaaaaaaaaaaaaaaaaaugcaucccccccccccccccccccccccccccccccaaaggcucuuuucagagccaccagaauu

SEQ ID NO: 728 - RNA, 1464 nt, Artificial Sequence
  mRNA Design a-1 (A64-N5-C30-hSL-N5) comprising derived and/or modified sequence from Pb(ANKA)__XP_022712148.1__Pb-CSP_L(G4SG4)_TM domain HA (opt2)
aggagagucccgcagucggcguccagcggcucugcuuguucgugugugugucguugcaggccuuauucaagcuuaccaugaagaagugcaccauccucgucgucgccucccuccuccucgucaacucccuccuccccggcuacggccagaacaaguccauccaggcccagcgcaaccucaacgagcucugcuacaacgagggcaacgacaacaagcucuaccacguccucaacuccaagaacggcaagaucuacaaccgcaacaccgucaaccgccuccucgccgacgcccccgagggcaagaagaacgagaagaagaacgagaagaucgagcgcaacaacaagcucaagcagcccccccccccccccaaccccaacgacccccccccccccaaccccaacgacccccccccccccaaccccaacgacccccccccccccaaccccaacgacccccccccccccaacgccaacgacccccccccccccaacgccaacgaccccgccccccccaacgccaacgaccccgccccccccaacgccaacgaccccgccccccccaacgccaacgaccccgccccccccaacgccaacgacccccccccccccaaccccaacgaccccgccccccccaacgccaacgacccccccccccccaaccccaacgaccccgcccccccccagggcaacaacaacccccagccccagccccgcccccagccccagccccagccccagccccagccccagccccagccccagccccagccccgcccccagccccagccccagcccggcggcaacaacaacaacaagaacaacaacaacgacgacuccuacauccccuccgccgagaagauccucgaguucgucaagcagauccgcgacuccaucaccgaggaguggucccagugcaacgucaccugcggcuccggcauccgcguccgcaagcgcaagggcuccaacaagaaggccgaggaccucacccucgaggacaucgacaccgagaucugcaagauggacaagugcuccuccaucuucaacaucgucuccaacucccucggcuucgucauccuccucguccucgucuucuucaacggcggcggcggcuccggcggcggcggcaagcucgaguccacccgcaucuaccagauccucgccaucuacuccaccgucgccuccucccucguccucgucgucucccucggcgccaucuccuucuggaugugcuccaacggcucccuccagugccgcaucugcaucugaggacuagucccuguucccagagcccacuuuuuuuucuuuuuuugaaauaaaauagccugucuuucagaucuaaaaaaaaaaaaaaaaaaaaaaaaaaaaaaaaaaaaaaaaaaaaaaaaaaaaaaaaaaaaaaaaugcaucccccccccccccccccccccccccccccccaaaggcucuuuucagagccaccagaauu

SEQ ID NO: 729 - RNA, 1284 nt, Artificial Sequence
  mRNA Design a-1 (A64-N5-C30-hSL-N5) comprising derived and/or modified sequence from Pb(ANKA)__XP_022712148.1__HsALB_Pb-CSP(24-340) (opt2)
aggagagucccgcagucggcguccagcggcucugcuuguucgugugugugucguugcaggccuuauucaagcuuaccaugaagugggucaccuucaucucccuccucuuccucuucuccuccgccuacucccagaacaaguccauccaggcccagcgcaaccucaacgagcucugcuacaacgagggcaacgacaacaagcucuaccacguccucaacuccaagaacggcaagaucuacaaccgcaacaccgucaaccgccuccucgccgacgcccccgagggcaagaagaacgagaagaagaacgagaagaucgagcgcaacaacaagcucaagcagcccccccccccccccaaccccaacgacccccccccccccaaccccaacgacccccccccccccaaccccaacgacccccccccccccaaccccaacgacccccccccccccaacgccaacgacccccccccccccaacgccaacgaccccgccccccccaacgccaacgaccccgccccccccaacgccaacgaccccgccccccccaacgccaacgaccccgccccccccaacgccaacgacccccccccccccaaccccaacgaccccgccccccccaacgccaacgacccccccccccccaaccccaacgaccccgcccccccccagggcaacaacaacccccagccccagccccgcccccagccccagccccagccccagccccagccccagccccagccccagccccagccccgcccccagccccagccccagcccggcggcaacaacaacaacaagaacaacaacaacgacgacuccuacauccccuccgccgagaagauccucgaguucgucaagcagauccgcgacuccaucaccgaggaguggucccagugcaacgucaccugcggcuccggcauccgcguccgcaagcgcaagggcuccaacaagaaggccgaggaccucacccucgaggacaucgacaccgagaucugcaagauggacaagugcuccuccaucuucaacaucgucuccaacucccucggcuucgucauccuccucguccucgucuucuucaacugaggacuagucccuguucccagagcccacuuuuuuuucuuuuuuugaaauaaaauagccugucuuucagaucuaaaaaaaaaaaaaaaaaaaaaaaaaaaaaaaaaaaaaaaaaaaaaaaaaaaaaaaaaaaaaaaaugcaucccccccccccccccccccccccccccccccaaaggcucuuuucagagccaccagaauu

SEQ ID NO: 730 - RNA, 1302 nt, Artificial Sequence
  mRNA Design a-1 (A64-N5-C30-hSL-N5) comprising derived and/or modified sequence from Pb(ANKA)__XP_022712148.1__HsIns-iso1_Pb-CSP(24-340) (opt2)
aggagagucccgcagucggcguccagcggcucugcuuguucgugugugugucguugcaggccuuauucaagcuuaccauggcccucuggaugcgccuccucccccuccucgcccuccucgcccucuggggccccgaccccgccgccgcccagaacaaguccauccaggcccagcgcaaccucaacgagcucugcuacaacgagggcaacgacaacaagcucuaccacguccucaacuccaagaacggcaagaucuacaaccgcaacaccgucaaccgccuccucgccgacgcccccgagggcaagaagaacgagaagaagaacgagaagaucgagcgcaacaacaagcucaagcagcccccccccccccccaaccccaacgacccccccccccccaaccccaacgacccccccccccccaaccccaacgacccccccccccccaaccccaacgacccccccccccccaacgccaacgacccccccccccccaacgccaacgaccccgccccccccaacgccaacgaccccgccccccccaacgccaacgaccccgccccccccaacgccaacgaccccgccccccccaacgccaacgacccccccccccccaaccccaacgaccccgccccccccaacgccaacgacccccccccccccaaccccaacgaccccgcccccccccagggcaacaacaacccccagccccagccccgcccccagccccagccccagccccagccccagccccagccccagccccagccccagccccgcccccagccccagccccagcccggcggcaacaacaacaacaagaacaacaacaacgacgacuccuacauccccuccgccgagaagauccucgaguucgucaagcagauccgcgacuccaucaccgaggaguggucccagugcaacgucaccugcggcuccggcauccgcguccgcaagcgcaagggcuccaacaagaaggccgaggaccucacccucgaggacaucgacaccgagaucugcaagauggacaagugcuccuccaucuucaacaucgucuccaacucccucggcuucgucauccuccucguccucgucuucuucaacugaggacuagucccuguucccagagcccacuuuuuuuucuuuuuuugaaauaaaauagccugucuuucagaucuaaaaaaaaaaaaaaaaaaaaaaaaaaaaaaaaaaaaaaaaaaaaaaaaaaaaaaaaaaaaaaaaugcaucccccccccccccccccccccccccccccccaaaggcucuuuucagagccaccagaauu

SEQ ID NO: 731 - RNA, 1281 nt, Artificial Sequence
  mRNA Design a-1 (A64-N5-C30-hSL-N5) comprising derived and/or modified sequence from Pb(ANKA)__XP_022712148.1__HsSPARC_Pb-CSP(24-340) (opt2)
aggagagucccgcagucggcguccagcggcucugcuuguucgugugugugucguugcaggccuuauucaagcuuaccaugcgcgccuggaucuucuuccuccucugccucgccggccgcgcccucgcccagaacaaguccauccaggcccagcgcaaccucaacgagcucugcuacaacgagggcaacgacaacaagcucuaccacguccucaacuccaagaacggcaagaucuacaaccgcaacaccgucaaccgccuccucgccgacgcccccgagggcaagaagaacgagaagaagaacgagaagaucgagcgcaacaacaagcucaagcagcccccccccccccccaaccccaacgacccccccccccccaaccccaacgacccccccccccccaaccccaacgacccccccccccccaaccccaacgacccccccccccccaacgccaacgacccccccccccccaacgccaacgaccccgccccccccaacgccaacgaccccgccccccccaacgccaacgaccccgccccccccaacgccaacgaccccgccccccccaacgccaacgacccccccccccccaaccccaacgaccccgccccccccaacgccaacgacccccccccccccaaccccaacgaccccgcccccccccagggcaacaacaacccccagccccagccccgcccccagccccagccccagccccagccccagccccagccccagccccagccccagccccgcccccagccccagccccagcccggcggcaacaacaacaacaagaacaacaacaacgacgacuccuacauccccuccgccgagaagauccucgaguucgucaagcagauccgcgacuccaucaccgaggaguggucccagugcaacgucaccugcggcuccggcauccgcguccgcaagcgcaagggcuccaacaagaaggccgaggaccucacccucgaggacaucgacaccgagaucugcaagauggacaagugcuccuccaucuucaacaucgucuccaacucccucggcuucgucauccuccucguccucgucuucuucaacugaggacuagucccuguucccagagcccacuuuuuuuucuuuuuuugaaauaaaauagccugucuuucagaucuaaaaaaaaaaaaaaaaaaaaaaaaaaaaaaaaaaaaaaaaaaaaaaaaaaaaaaaaaaaaaaaaugcaucccccccccccccccccccccccccccccccaaaggcucuuuucagagccaccagaauu

SEQ ID NO: 732 - RNA, 1284 nt, Artificial Sequence
  mRNA Design a-1 (A64-N5-C30-hSL-N5) comprising derived and/or modified sequence from Pb(ANKA)__XP_022712148.1__IgE_Pb-CSP(24-340) (opt2)
aggagagucccgcagucggcguccagcggcucugcuuguucgugugugugucguugcaggccuuauucaagcuuaccauggacuggaccuggauccucuuccucgucgccgccgccacccgcguccacucccagaacaaguccauccaggcccagcgcaaccucaacgagcucugcuacaacgagggcaacgacaacaagcucuaccacguccucaacuccaagaacggcaagaucuacaaccgcaacaccgucaaccgccuccucgccgacgcccccgagggcaagaagaacgagaagaagaacgagaagaucgagcgcaacaacaagcucaagcagcccccccccccccccaaccccaacgacccccccccccccaaccccaacgacccccccccccccaaccccaacgacccccccccccccaaccccaacgacccccccccccccaacgccaacgacccccccccccccaacgccaacgaccccgccccccccaacgccaacgaccccgccccccccaacgccaacgaccccgccccccccaacgccaacgaccccgccccccccaacgccaacgacccccccccccccaaccccaacgaccccgccccccccaacgccaacgacccccccccccccaaccccaacgaccccgcccccccccagggcaacaacaacccccagccccagccccgcccccagccccagccccagccccagccccagccccagccccagccccagccccagccccgcccccagccccagccccagcccggcggcaacaacaacaacaagaacaacaacaacgacgacuccuacauccccuccgccgagaagauccucgaguucgucaagcagauccgcgacuccaucaccgaggaguggucccagugcaacgucaccugcggcuccggcauccgcguccgcaagcgcaagggcuccaacaagaaggccgaggaccucacccucgaggacaucgacaccgagaucugcaagauggacaagugcuccuccaucuucaacaucgucuccaacucccucggcuucgucauccuccucguccucgucuucuucaacugaggacuagucccuguucccagagcccacuuuuuuuucuuuuuuugaaauaaaauagccugucuuucagaucuaaaaaaaaaaaaaaaaaaaaaaaaaaaaaaaaaaaaaaaaaaaaaaaaaaaaaaaaaaaaaaaaugcaucccccccccccccccccccccccccccccccaaaggcucuuuucagagccaccagaauu

SEQ ID NO: 733 - RNA, 1470 nt, Artificial Sequence
  mRNA Design a-1 (A64-N5-C30-hSL-N5) comprising derived and/or modified sequence from Pf(3D7)__XP_001351122.1__Pf-CSP (opt3)
aggagagucccgcagucggcguccagcggcucugcuuguucgugugugugucguugcaggccuuauucaagcuuaccaugaugagaaagcuggccauccucagcguguccucuuuccuuuuugucgaggcucuguuccaggaauaccaaugcuauggcucaaguagcaacaccaggguuuugaaugaguuaaacuacgacaaugcagggacaaaccuguauaaugaacuagagaugaacuacuauggaaaacaggaaaauugguacucccucaagaaaaacucucggucgcugggugagaaugaugacggcaacaaugaggauaacgaaaaacuucgcaagcccaagcacaagaaacugaagcagccugccgacgggaauccagauccgaacgcgaaucccaacguggacccuaacgcuaauccaaacguagaucccaaugccaacccuaauguggacccaaacgcaaaucccaacgccaauccuaacgcuaauccaaacgcaaauccgaacgccaaucccaacgcuaacccuaaugccaacccaaaugcgaaccccaaugcaaacccuaaugccaacccaaaugcuaaccccaaugccaacccgaaugcaaacccuaaugcuaaccccaacgccaauccaaacgcgaauccuaacgccaaucccaacgucgauccaaaugcaaaccccaaugcuaacccuaaugccaacccaaaugcuaacccgaaugccaaccccaacgcaaauccuaacgccaauccaaacgcuaaucccaacgcgaauccuaacgcaaauccaaacgccaaucccaacgcuaauccgaacgccaauccuaacgcaaauccaaacgccaaccccaaugcuaacccuaaugccaaccccaaugcaaacccaaauaaaaacaaucagggaaacggccaaggucauaauaugccuaacgaccccaaucgaaacguggaugagaaugcgaacgcuaacucagccguuaagaauaacaauaacgaggaaccaagcgacaaacacauuaaggaguauuugaauaagauacagaacagucucuccacugaauggucuccguguagcgugacgugcgggaauggaauccagguccguauuaaaccuggcuccgcaaacaagcccaaagaugagcuggacuacgccaaugacaucgaaaagaaaauuuguaagauggagaaaugcucaaguguguuuaacguaguuaauagcucuaucggccugauaauggugcucuccuucuuauuucugaacugaggacuagucccuguucccagagcccacuuuuuuuucuuuuuuugaaauaaaauagccugucuuucagaucuaaaaaaaaaaaaaaaaaaaaaaaaaaaaaaaaaaaaaaaaaaaaaaaaaaaaaaaaaaaaaaaaugcaucccccccccccccccccccccccccccccccaaaggcucuuuucagagccaccagaauu

SEQ ID NO: 734 - RNA, 1401 nt, Artificial Sequence
  mRNA Design a-1 (A64-N5-C30-hSL-N5) comprising derived and/or modified sequence from Pf(3D7)__XP_001351122.1__Pf-CSP(1-374) (opt3)
aggagagucccgcagucggcguccagcggcucugcuuguucgugugugugucguugcaggccuuauucaagcuuaccaugaugagaaagcuggccauccucagcguguccucuuuccuuuuugucgaggcucuguuccaggaauaccaaugcuauggcucaaguagcaacaccaggguuuugaaugaguuaaacuacgacaaugcagggacaaaccuguauaaugaacuagagaugaacuacuauggaaaacaggaaaauugguacucccucaagaaaaacucucggucgcugggugagaaugaugacggcaacaaugaggauaacgaaaaacuucgcaagcccaagcacaagaaacugaagcagccugccgacgggaauccagauccgaacgcgaaucccaacguggacccuaacgcuaauccaaacguagaucccaaugccaacccuaauguggacccaaacgcaaaucccaacgccaauccuaacgcuaauccaaacgcaaauccgaacgccaaucccaacgcuaacccuaaugccaacccaaaugcgaaccccaaugcaaacccuaaugccaacccaaaugcuaaccccaaugccaacccgaaugcaaacccuaaugcuaaccccaacgccaauccaaacgcgaauccuaacgccaaucccaacgucgauccaaaugcaaaccccaaugcuaacccuaaugccaacccaaaugcuaacccgaaugccaaccccaacgcaaauccuaacgccaauccaaacgcuaaucccaacgcgaauccuaacgcaaauccaaacgccaaucccaacgcuaauccgaacgccaauccuaacgcaaauccaaacgccaaccccaaugcuaacccuaaugccaaccccaaugcaaacccaaauaaaaacaaucagggaaacggccaaggucauaauaugccuaacgaccccaaucgaaacguggaugagaaugcgaacgcuaacucagccguuaagaauaacaauaacgaggaaccaagcgacaaacacauuaaggaguauuugaauaagauacagaacagucucuccacugaauggucuccguguagcgugacgugcgggaauggaauccagguccguauuaaaccuggcuccgcaaacaagcccaaagaugagcuggacuacgccaaugacaucgaaaagaaaauuuguaagauggagaaaugcugaggacuagucccuguucccagagcccacuuuuuuuucuuuuuuugaaauaaaauagccugucuuucagaucuaaaaaaaaaaaaaaaaaaaaaaaaaaaaaaaaaaaaaaaaaaaaaaaaaaaaaaaaaaaaaaaaugcaucccccccccccccccccccccccccccccccaaaggcucuuuucagagccaccagaauu

SEQ ID NO: 735 - RNA, 1254 nt, Artificial Sequence
  mRNA Design a-1 (A64-N5-C30-hSL-N5) comprising derived and/or modified sequence from Pf(3D7)__XP_001351122.1__Pf-CSP(1-325) (opt3)
aggagagucccgcagucggcguccagcggcucugcuuguucgugugugugucguugcaggccuuauucaagcuuaccaugaugagaaagcuggccauccucagcguguccucuuuccuuuuugucgaggcucuguuccaggaauaccaaugcuauggcucaaguagcaacaccaggguuuugaaugaguuaaacuacgacaaugcagggacaaaccuguauaaugaacuagagaugaacuacuauggaaaacaggaaaauugguacucccucaagaaaaacucucggucgcugggugagaaugaugacggcaacaaugaggauaacgaaaaacuucgcaagcccaagcacaagaaacugaagcagccugccgacgggaauccagauccgaacgcgaaucccaacguggacccuaacgcuaauccaaacguagaucccaaugccaacccuaauguggacccaaacgcaaaucccaacgccaauccuaacgcuaauccaaacgcaaauccgaacgccaaucccaacgcuaacccuaaugccaacccaaaugcgaaccccaaugcaaacccuaaugccaacccaaaugcuaaccccaaugccaacccgaaugcaaacccuaaugcuaaccccaacgccaauccaaacgcgaauccuaacgccaaucccaacgucgauccaaaugcaaaccccaaugcuaacccuaaugccaacccaaaugcuaacccgaaugccaaccccaacgcaaauccuaacgccaauccaaacgcuaaucccaacgcgaauccuaacgcaaauccaaacgccaaucccaacgcuaauccgaacgccaauccuaacgcaaauccaaacgccaaccccaaugcuaacccuaaugccaaccccaaugcaaacccaaauaaaaacaaucagggaaacggccaaggucauaauaugccuaacgaccccaaucgaaacguggaugagaaugcgaacgcuaacucagccguuaagaauaacaauaacgaggaaccaagcgacaaacacauuaaggaguauuugaauaagauacagaacugaggacuagucccuguucccagagcccacuuuuuuuucuuuuuuugaaauaaaauagccugucuuucagaucuaaaaaaaaaaaaaaaaaaaaaaaaaaaaaaaaaaaaaaaaaaaaaaaaaaaaaaaaaaaaaaaaugcaucccccccccccccccccccccccccccccccaaaggcucuuuucagagccaccagaauu

SEQ ID NO: 736 - RNA, 1470 nt, Artificial Sequence
  mRNA Design a-1 (A64-N5-C30-hSL-N5) comprising derived and/or modified sequence from Pf(3D7)__XP_001351122.1__HsALB_Pf-CSP(19-397) (opt3)
aggagagucccgcagucggcguccagcggcucugcuuguucgugugugugucguugcaggccuuauucaagcuuaccaugaagugggugaccuucaucagccugcucuuucuuuucuccucugccuacucacuguuucaggaguaucaaugcuacggcaguagcuccaacacaagagucuugaaugaauuaaacuaugacaaugcugggacuaaccuguacaaugagcuagaaaugaacuauuacggaaaacaggagaauugguauucucucaagaaaaacucgaggucacugggugaaaaugaugacggcaacaaugaggauaacgagaaacuucggaagcccaagcacaagaaacugaagcagccugcagacgggaauccagauccgaacgccaaucccaacguugacccuaacgcgaauccaaacguggaucccaaugcuaacccuaauguagacccaaacgccaaucccaacgcaaauccuaacgccaauccaaacgcuaauccgaacgcaaaucccaacgccaacccuaaugcuaacccaaaugccaaccccaaugcgaacccuaaugcaaacccaaaugccaaccccaaugcuaacccgaaugccaacccuaaugcaaaccccaacgcuaauccaaacgccaauccuaacgcgaaucccaacguggauccaaaugccaaccccaaugcaaacccuaaugcuaacccaaaugccaacccgaaugcuaaccccaacgccaauccuaacgcaaauccaaacgccaaucccaacgcuaauccuaacgcgaauccaaacgcaaaucccaacgccaauccgaacgcuaauccuaacgccaauccaaacgcaaaccccaaugccaacccuaaugcuaaccccaaugccaacccaaauaaaaacaaucagggaaacggccaaggucauaauaugccuaacgaccccaaucgcaacgucgaugaaaaugcaaacgcgaacagcgcugugaagaauaacaauaacgaggaaccaagugacaaacacauuaaggaguacuugaauaagauacagaacucccucucuacggaguggagcccguguuccguuaccugcgggaauggaauccaggugcgaauuaaaccuggcucagccaacaagcccaaagaugaacuggacuacgcaaaugacaucgagaagaaaauuuguaagauggaaaaaugcaguagcgucuucaacgugguaaauucuuccaucggccugauaaugguucucucauuuuuauuccugaacugaggacuagucccuguucccagagcccacuuuuuuuucuuuuuuugaaauaaaauagccugucuuucagaucuaaaaaaaaaaaaaaaaaaaaaaaaaaaaaaaaaaaaaaaaaaaaaaaaaaaaaaaaaaaaaaaaugcaucccccccccccccccccccccccccccccccaaaggcucuuuucagagccaccagaauu

SEQ ID NO: 737 - RNA, 1488 nt, Artificial Sequence
  mRNA Design a-1 (A64-N5-C30-hSL-N5) comprising derived and/or modified sequence from Pf(3D7)__XP_001351122.1__HsIns-iso1_Pf-CSP(19-397) (opt3)
aggagagucccgcagucggcguccagcggcucugcuuguucgugugugugucguugcaggccuuauucaagcuuaccauggcccuguggaugagacuccuuccccuguuggcuuuacuggcacuauggggcccugacccagccgcggcucucuuccaggaguaccaaugcuaugggagcuccucuaacaccagggugcugaaugaacuuaacuacgauaaugccggaacaaaccuguauaaugaguuggaaaugaacuacuaugguaagcaggagaauugguacucacucaaaaagaacagucggagccugggcgaaaaugacgaugggaacaaugaggacaacgagaaacugcgcaagccgaaacacaagaagcucaaacagcccgcagauggaaauccugacccaaacgccaaucccaacgucgauccuaacgcuaauccaaacguugaccccaaugcaaacccuaauguggauccaaacgccaauccgaacgcuaaucccaacgccaauccuaacgcgaauccaaacgcaaaucccaacgccaacccuaaugcuaacccaaaugccaaccccaaugcaaacccgaaugcuaacccuaaugccaaccccaaugcgaacccaaaugccaacccuaaugcaaaccccaacgcuaauccaaacgccaaucccaacgcuaauccuaacguagacccaaaugccaacccgaaugcaaaccccaaugccaacccuaaugcuaacccaaaugcgaaccccaacgcaaauccuaacgccaauccaaacgcuaaucccaacgccaauccgaacgcaaauccuaacgccaauccaaacgcuaaucccaacgccaauccuaacgcaaaucccaacgcgaacccaaaugcuaacccuaaugccaaccccaaugcaaacccaaauaagaacaaucagggcaacggucaagggcauaauaugccgaacgauccuaaucgaaacguggacgaaaaugccaacgcuaacuccgccgucaaaaauaacaauaacgaggaacccucugauaagcacaucaaagaguauuuaaauaagauucagaacucgcugucaacugaguggagcccauguagugugacgugcggaaauggcauacagguucguaucaagcccggcuccgcaaacaaaccuaaggacgaacuugacuacgcuaaugauauugagaaaaagaucuguaaaauggaaaagugcucuagcguguuuaacgucguaaauuccucaauuggguugaucauggugcugaguuuccuauuucucaacugaggacuagucccuguucccagagcccacuuuuuuuucuuuuuuugaaauaaaauagccugucuuucagaucuaaaaaaaaaaaaaaaaaaaaaaaaaaaaaaaaaaaaaaaaaaaaaaaaaaaaaaaaaaaaaaaaugcaucccccccccccccccccccccccccccccccaaaggcucuuuucagagccaccagaauu

SEQ ID NO: 738 - RNA, 1467 nt, Artificial Sequence
  mRNA Design a-1 (A64-N5-C30-hSL-N5) comprising derived and/or modified sequence from Pf(3D7)__XP_001351122.1__HsSPARC_Pf-CSP(19-397) (opt3)
aggagagucccgcagucggcguccagcggcucugcuuguucgugugugugucguugcaggccuuauucaagcuuaccaugagagccuggaucuucuuucugcucugccuugcuggcagggcacuggccuuguuccaggaguaccaauguuaugggagcuccucuaacacccggguguuaaaugaacugaacuacgacaaugcgggaacaaaccuauauaaugagcucgaaaugaacuacuaugguaagcaggagaauugguacucacugaaaaagaacagucgcagccuuggcgaaaaugaugacgggaacaaugaggauaacgagaaacugcgaaagcccaaacacaagaaguugaaacagccugcugacggaaauccagauccgaacgccaaucccaacgucgacccuaacgcaaauccaaacguugaucccaaugccaacccuaauguggacccaaacgcuaaucccaacgcaaauccuaacgccaauccaaacgcuaauccgaacgccaaucccaacgcgaacccuaaugcaaacccaaaugccaaccccaaugcuaacccuaaugccaacccaaaugcaaaccccaaugcuaacccgaaugccaacccuaaugcgaaccccaacgccaauccaaacgcaaauccuaacgcuaaucccaacguagauccaaaugccaaccccaaugcuaacccuaaugccaacccaaaugcaaacccgaaugccaaccccaacgcuaauccuaacgcgaauccaaacgcaaaucccaacgccaauccuaacgcuaauccaaacgccaaucccaacgcaaauccgaacgccaauccuaacgcuaauccaaacgccaaccccaaugcaaacccuaaugcgaaccccaaugcuaacccaaauaagaacaaucagggcaacggucaagggcauaauaugccuaacgaccccaaucguaacguggaugaaaaugccaacgcaaacuccgccgucaaaaauaacaauaacgaggaaccaucugacaagcacauuaaagaguaucucaauaagauacagaacucgcugucaacugaguggagcccgugcagugugacguguggaaauggcauccagguuagaauuaagccuggcuccgcuaacaaacccaaggaugaacuggacuacgccaaugacaucgagaaaaagauuugcaaaauggaaaaguguucuagcguguuuaacgucguaaauuccucaaucgggcucauaaugguguuaaguuuccuguuucuuaacugaggacuagucccuguucccagagcccacuuuuuuuucuuuuuuugaaauaaaauagccugucuuucagaucuaaaaaaaaaaaaaaaaaaaaaaaaaaaaaaaaaaaaaaaaaaaaaaaaaaaaaaaaaaaaaaaaugcaucccccccccccccccccccccccccccccccaaaggcucuuuucagagccaccagaauu

SEQ ID NO: 739 - RNA, 1470 nt, Artificial Sequence
  mRNA Design a-1 (A64-N5-C30-hSL-N5) comprising derived and/or modified sequence from Pf(3D7)__XP_001351122.1__IgE_Pf-CSP(19-397) (opt3)
aggagagucccgcagucggcguccagcggcucugcuuguucgugugugugucguugcaggccuuauucaagcuuaccauggacuggaccuggauccuguuccucguggccgcugcaacaagaguccacagccuuuuucaggaguaccaaugcuauggcuccucuucaaacacuaggguucugaaugaauugaacuacgauaaugccgggacgaacuuauauaaugagcuggaaaugaacuacuauggaaagcaggagaauugguacagucuaaagaagaacagccggucccucggugaaaaugacgauggcaacaaugaggacaacgagaaacugcgcaagcccaaacauaagaaacuuaaacagccugcggaugggaauccagacccgaacgcuaaucccaacguggauccuaacgccaauccaaacguagaccccaaugcaaacccuaauguggauccaaacgccaaucccaacgcuaauccuaacgcaaauccaaacgccaauccgaacgcuaaucccaacgccaacccuaaugcgaacccaaaugcaaaccccaaugccaacccuaaugcuaacccaaaugccaaccccaaugcaaacccgaaugcuaacccuaaugccaaccccaacgcgaauccaaacgccaauccuaacgcaaaucccaacgucgacccaaaugcuaaccccaaugccaacccuaaugcuaacccaaaugccaacccgaaugcaaaccccaacgccaauccuaacgcuaauccaaacgcgaaucccaacgcaaauccuaacgccaauccaaacgcuaaucccaacgccaauccgaacgcaaauccuaacgccaauccaaacgcuaaccccaaugccaacccuaaugcaaaccccaaugcgaacccaaauaagaacaaucagggaaacggccaaggucacaauaugccuaacgaucccaaucgaaacguggacgaaaaugcuaacgccaacucugcaguuaaaaauaacaauaacgaggaaccaucggauaagcauauuaaagaguaucugaauaagauacagaacucauugagcaccgaguggaguccguguuccgugacaugcgggaauggaauccagguccguauuaagccuggcucugccaacaaacccaaggacgaacucgacuacgcuaaugauaucgagaaaaagauuuguaaaauggaaaagugcagcuccguguucaacguaguuaauucaaguaucggccugauaauggugcugagcuuucucuucuuaaacugaggacuagucccuguucccagagcccacuuuuuuuucuuuuuuugaaauaaaauagccugucuuucagaucuaaaaaaaaaaaaaaaaaaaaaaaaaaaaaaaaaaaaaaaaaaaaaaaaaaaaaaaaaaaaaaaaugcaucccccccccccccccccccccccccccccccaaaggcucuuuucagagccaccagaauu

SEQ ID NO: 740 - RNA, 1635 nt, Artificial Sequence
  mRNA Design a-1 (A64-N5-C30-hSL-N5) comprising derived and/or modified sequence from Pf(3D7)__XP_001351122.1__Pf-CSP_L(G4SG4)_TM domain HA (opt3)
aggagagucccgcagucggcguccagcggcucugcuuguucgugugugugucguugcaggccuuauucaagcuuaccaugaugagaaagcuggccauccucagcguguccucuuuccuuuuugucgaggcucuguuccaggaauaccaaugcuauggcucaaguagcaacaccaggguuuugaaugaguuaaacuacgacaaugcagggacaaaccuguauaaugaacuagagaugaacuacuauggaaagcaggaaaauugguacucccucaagaaaaacucucggucgcugggugagaaugaugacggcaacaaugaggauaacgaaaaacuucgcaagcccaagcacaagaaacugaagcagccugccgacgggaauccagauccgaacgcgaaucccaacguggacccuaacgcuaauccaaacguagaucccaaugccaacccuaauguggacccaaacgcaaaucccaacgccaauccuaacgcuaauccaaacgcaaauccgaacgccaaucccaacgcuaacccuaaugccaacccaaaugcgaaccccaaugcaaacccuaaugccaacccaaaugcuaaccccaaugccaacccgaaugcaaacccuaaugcuaaccccaacgccaauccaaacgcgaauccuaacgccaaucccaacgucgauccaaaugcaaaccccaaugcuaacccuaaugccaacccaaaugcuaacccgaaugccaaccccaacgcaaauccuaacgccaauccaaacgcuaaucccaacgcgaauccuaacgcaaauccaaacgccaaucccaacgcuaauccgaacgccaauccuaacgcaaauccaaacgccaaccccaaugcuaacccuaaugccaaccccaaugcaaacccaaauaaaaacaaucagggaaacggccaaggucauaauaugccuaacgaccccaaucgaaacguggaugagaaugcgaacgcuaacucagccguuaagaauaacaauaacgaggaaccaagcgacaaacacauuaaggaguauuugaauaagauacagaacagucucuccacugaauggucuccguguagcgugacgugcgggaauggaauccagguccguauuaaaccuggcuccgcaaacaagcccaaagaugagcuggacuacgccaaugacaucgaaaagaaaauuuguaagauggagaaaugcucaaguguguuuaacguaguuaauagcucuaucggccugauaauggugcucuccuucuuauuucugaacgggggagguggcucagggggaggcgguaaacuugaaagcaccagaaucuaccagauuuuggcuaucuauaguacagucgccucuucccuggugcuaguggucagccucggggcaauuucguucuggauguguucuaauggaucccugcaaugcaggaucuguauaugaggacuagucccuguucccagagcccacuuuuuuuucuuuuuuugaaauaaaauagccugucuuucagaucuaaaaaaaaaaaaaaaaaaaaaaaaaaaaaaaaaaaaaaaaaaaaaaaaaaaaaaaaaaaaaaaaugcaucccccccccccccccccccccccccccccccaaaggcucuuuucagagccaccagaauu

SEQ ID NO: 741 - RNA, 1509 nt, Artificial Sequence
  mRNA Design a-1 (A64-N5-C30-hSL-N5) comprising derived and/or modified sequence from Pf(3D7)__XP_001351122.1__Pf-CSP(199-377)_L(PVTN)_HBsAg (opt3)
aggagagucccgcagucggcguccagcggcucugcuuguucgugugugugucguugcaggccuuauucaagcuuaccauggaccccaacgccaauccuaacgcuaauccaaacgcaaauccgaacgccaaucccaacgcgaauccuaacgcuaauccaaacgccaaucccaacgcaaauccuaacgccaacccaaaugcuaaccccaaugcaaacccuaaugccaacccaaaugcuaacccgaaugccaaccccaaugcgaacccuaaugcaaacccaaaugccaaccccaacgcuaauccuaacaagaauaaccagggcaaugggcaaggacacaacaugccaaaugaucccaacagaaauguggacgagaacgccaaugcaaacagcgcugucaaaaauaacaauaacgaggaaccguccgauaagcauaucaaagaauaccugaacaagauucaaaauucucucucaaccgaguggaguccuugcagcguuacaugugguaacggcauacaggugaggaucaaacccggguccgccaauaagccaaaggacgaacuugauuaugcgaacgacauugagaaaaagaucugcaaaauggagaaguguucuucgguaccugugacuaauauggaaaacauuacgucaggauuccugggccccuuguuaguccugcaggccggguuuuuccuacucacccggauccugacaauaccacagagccuugauaguugguggacuucccugaauuuucucgguggaucucccgugugcuugggccagaacagccaguccccuaccucaaaucacaguccaacaagcuguccgcccaucugcccuggcuaccgcuggaugugucugcgacguuucauuaucuuucuguucauucucuuacugugccuuaucuuuuugcugguucuacucgacuaucaggggaugcugccaguguguccccuuauaccuggaucuaccacuacaaacaccgguccaugcaaaacguguacuacccccgcacaaggcaauuccauguucccgucaugcugcuguacaaagccuacugaugggaacugcaccuguauuccaauccccagcaguugggcuuuugccaaguaccugugggagugggcuucugucagauucuccugguugagccuccuggugccuuuuguacagugguucguuggauuaucgcccacaguguggcugucugccauuuggaugaugugguauuggggcccaucccucuacucaaucgucaguccuuuuaucccccuucugccaauuuucuucugcuuguggguguauauaugaggacuagucccuguucccagagcccacuuuuuuuucuuuuuuugaaauaaaauagccugucuuucagaucuaaaaaaaaaaaaaaaaaaaaaaaaaaaaaaaaaaaaaaaaaaaaaaaaaaaaaaaaaaaaaaaaugcaucccccccccccccccccccccccccccccccaaaggcucuuuucagagccaccagaauu

SEQ ID NO: 742 - RNA, 1551 nt, Artificial Sequence
  mRNA Design a-1 (A64-N5-C30-hSL-N5) comprising derived and/or modified sequence from Pf(3D7)__XP_001351122.1__Pf-CSP(199-387)_L(PVTN)_HBsAg (opt3)
aggagagucccgcagucggcguccagcggcucugcuuguucgugugugugucguugcaggccuuauucaagcuuaccaugauggcccccgacccuaacgcuaauccaaacgcaaauccgaacgccaaucccaacgcgaauccuaacgcuaauccaaacgccaaucccaacgcaaauccuaacgccaauccaaacgcuaaccccaaugcaaacccuaaugccaacccaaaugcuaacccgaaugccaaccccaaugcgaacccuaaugcaaacccaaaugccaaccccaaugcuaacccuaacgccaauccaaacaagaauaaccagggcaaugggcaaggacacaacaugcccaaugauccgaacagaaauguggacgagaacgcaaaugcuaacagcgccgucaaaaauaacaauaacgaggaaccuuccgauaagcauaucaaagaauaccugaacaagauucaaaauucucucucaaccgaguggagucccugcagcguuacaugugguaacggcauacaggugaggaucaaaccaggguccgcgaauaagccuaaggacgaacuugauuaugccaacgacauugagaaaaagaucugcaaaauggagaaguguucuucgguauucaauguggucaacucaagcauuggacugggccccgugacuaauauggaaaacaucacgaguggguuuuuggguccauuacugguucuacaggcaggauucuuucuccugacccggauacuuacaaucccccagucccuggauucuugguggacuagcuugaauuuccucggcggcuccccugugugccuggggcagaacucacagaguccaaccagcaaucacucuccgacauccugucccccuauuugcccaggauaccgcuggaugugucugcgacguuuuaucauuuuccucuuuaucuuacugcuuugcuugauauuccugcuaguccuccuggacuaucaggguaugcuucccguguguccucugauuccaggcucaaccacuacaaacaccgggcccugcaaaacguguacuaccccggcucaaggaaauagcauguuuccuaguugcugcuguacaaagccaacugauggcaacugcaccuguauccccauuccuucuuccugggccuucgcuaaguacuugugggagugggccagcguaagauuuucguggcucucucuguuaguucccuucgugcagugguuugucggucuguccccaacaguguggcucucagcaaucuggaugaugugguauugggggccuagucuuuacagcaucgugucccccuucauuccacuguugccgauauucuuuugccuaugggucuauaucugaggacuagucccuguucccagagcccacuuuuuuuucuuuuuuugaaauaaaauagccugucuuucagaucuaaaaaaaaaaaaaaaaaaaaaaaaaaaaaaaaaaaaaaaaaaaaaaaaaaaaaaaaaaaaaaaaugcaucccccccccccccccccccccccccccccccaaaggcucuuuucagagccaccagaauu

SEQ ID NO: 743 - RNA, 735 nt, Artificial Sequence
  mRNA Design a-1 (A64-N5-C30-hSL-N5) comprising derived and/or modified sequence from Pf(3D7)__XP_001351122.1__HsALB_Pf-CSP(19-152) (opt3)
aggagagucccgcagucggcguccagcggcucugcuuguucgugugugugucguugcaggccuuauucaagcuuaccaugaagugggugaccuucaucagccugcucuuucuuuucuccucugccuacucacuguuucaggaguaucaaugcuacggcaguagcuccaacacaagagucuugaaugaauuaaacuaugacaaugcugggacuaaccuguacaaugagcuagaaaugaacuauuacggaaaacaggagaauugguauucucucaagaaaaacucgaggucacugggugaaaaugaugacggcaacaaugaggauaacgagaaacuucggaagcccaagcacaagaaacugaagcagccugcagacgggaauccagauccgaacgccaaucccaacguugacccuaacgcgaauccaaacguggaucccaaugcuaacccuaauguagacccaaacgccaaucccaacgcaaauccuaacgccaauccaaacgcuaauccgaacgcaaaucccaacgccaacccuugaggacuagucccuguucccagagcccacuuuuuuuucuuuuuuugaaauaaaauagccugucuuucagaucuaaaaaaaaaaaaaaaaaaaaaaaaaaaaaaaaaaaaaaaaaaaaaaaaaaaaaaaaaaaaaaaaugcaucccccccccccccccccccccccccccccccaaaggcucuuuucagagccaccagaauu

SEQ ID NO: 744 - RNA, 855 nt, Artificial Sequence
  mRNA Design a-1 (A64-N5-C30-hSL-N5) comprising derived and/or modified sequence from Pf(3D7)__XP_001351122.1__HsALB_Pf-CSP(19-192) (opt3)
aggagagucccgcagucggcguccagcggcucugcuuguucgugugugugucguugcaggccuuauucaagcuuaccaugaagugggugaccuucaucagccugcucuuucuuuucuccucugccuacucacuguuucaggaguaucaaugcuacggcaguagcuccaacacaagagucuugaaugaauuaaacuaugacaaugcugggacuaaccuguacaaugagcuagaaaugaacuauuacggaaaacaggagaauugguauucucucaagaaaaacucgaggucacugggugaaaaugaugacggcaacaaugaggauaacgagaaacuucggaagcccaagcacaagaaacugaagcagccugcagacgggaauccagauccgaacgccaaucccaacguugacccuaacgcgaauccaaacguggaucccaaugcuaacccuaauguagacccaaacgccaaucccaacgcaaauccuaacgccaauccaaacgcuaauccgaacgcaaaucccaacgccaacccuaaugcuaacccaaaugccaaccccaaugcgaacccuaaugcaaacccaaaugccaaccccaaugcuaacccgaaugccaacccuaaugcaaaccccaacgcuaauccaaacgccaauccuugaggacuagucccuguucccagagcccacuuuuuuuucuuuuuuugaaauaaaauagccugucuuucagaucuaaaaaaaaaaaaaaaaaaaaaaaaaaaaaaaaaaaaaaaaaaaaaaaaaaaaaaaaaaaaaaaaugcaucccccccccccccccccccccccccccccccaaaggcucuuuucagagccaccagaauu

SEQ ID NO: 745 - RNA, 1095 nt, Artificial Sequence
  mRNA Design a-1 (A64-N5-C30-hSL-N5) comprising derived and/or modified sequence from Pf(3D7)__XP_001351122.1__HsALB_Pf-CSP(19-272) (opt3)
aggagagucccgcagucggcguccagcggcucugcuuguucgugugugugucguugcaggccuuauucaagcuuaccaugaagugggugaccuucaucagccugcucuuucuuuucuccucugccuacucacuguuucaggaguaucaaugcuacggcaguagcuccaacacaagagucuugaaugaauuaaacuaugacaaugcugggacuaaccuguacaaugagcuagaaaugaacuauuacggaaaacaggagaauugguauucucucaagaaaaacucgaggucacugggugaaaaugaugacggcaacaaugaggauaacgagaaacuucggaagcccaagcacaagaaacugaagcagccugcagacgggaauccagauccgaacgccaaucccaacguugacccuaacgcgaauccaaacguggaucccaaugcuaacccuaauguagacccaaacgccaaucccaacgcaaauccuaacgccaauccaaacgcuaauccgaacgcaaaucccaacgccaacccuaaugcuaacccaaaugccaaccccaaugcgaacccuaaugcaaacccaaaugccaaccccaaugcuaacccgaaugccaacccuaaugcaaaccccaacgcuaauccaaacgccaauccuaacgcgaaucccaacguggauccaaaugccaaccccaaugcaaacccuaaugcuaacccaaaugccaacccgaaugcuaaccccaacgccaauccuaacgcaaauccaaacgccaaucccaacgcuaauccuaacgcgaauccaaacgcaaaucccaacgccaauccgaacgcuaauccuaacgccaauccaaacgcaaaccccaaugccaacccuaaugcuaaccccaaugccaacccaugaggacuagucccuguucccagagcccacuuuuuuuucuuuuuuugaaauaaaauagccugucuuucagaucuaaaaaaaaaaaaaaaaaaaaaaaaaaaaaaaaaaaaaaaaaaaaaaaaaaaaaaaaaaaaaaaaugcaucccccccccccccccccccccccccccccccaaaggcucuuuucagagccaccagaauu

SEQ ID NO: 746 - RNA, 1257 nt, Artificial Sequence
  mRNA Design a-1 (A64-N5-C30-hSL-N5) comprising derived and/or modified sequence from Pf(3D7)__XP_001351122.1__HsALB_Pf-CSP(19-272)_L(AAY)_Pf-CSP(310-3 27)_L(AAY)_Pf-CSP(346-375) (opt3)
aggagagucccgcagucggcguccagcggcucugcuuguucgugugugugucguugcaggccuuauucaagcuuaccaugaagugggugaccuucaucagccugcucuuucuuuucuccucugccuacucacuguuucaggaguaucaaugcuacggcaguagcuccaacacaagagucuugaaugaauuaaacuaugacaaugcugggacuaaccuguacaaugagcuagaaaugaacuauuacggaaaacaggagaauugguauucucucaagaaaaacucgaggucacugggugaaaaugaugacggcaacaaugaggauaacgagaaacuucggaagcccaagcacaagaaacugaagcagccugcagacgggaauccagauccgaacgccaaucccaacguugacccuaacgcgaauccaaacguggaucccaaugcuaacccuaauguagacccaaacgccaaucccaacgcaaauccuaacgccaauccaaacgcuaauccgaacgcaaaucccaacgccaacccuaaugcuaacccaaaugccaaccccaaugcgaacccuaaugcaaacccaaaugccaaccccaaugcuaacccgaaugccaacccuaaugcaaaccccaacgcuaauccaaacgccaauccuaacgcgaaucccaacguggauccaaaugccaaccccaaugcaaacccuaaugcuaacccaaaugccaacccgaaugcuaaccccaacgccaauccuaacgcaaauccaaacgccaaucccaacgcuaauccuaacgcgaauccaaacgcaaaucccaacgccaauccgaacgcuaauccuaacgccaauccaaacgcaaaccccaaugccaacccuaaugcuaaccccaaugccaacccagcagcguacgaaccuagcgacaaacauauuaaggaguacuugaauaaaauacagaacagucucgcugccuauaucaagcccggauccgcaaauaagccaaaagaugaacuggacuacgccaacgauauugagaagaaaaucuguaagauggagaaaugcucuugaggacuagucccuguucccagagcccacuuuuuuuucuuuuuuugaaauaaaauagccugucuuucagaucuaaaaaaaaaaaaaaaaaaaaaaaaaaaaaaaaaaaaaaaaaaaaaaaaaaaaaaaaaaaaaaaaugcaucccccccccccccccccccccccccccccccaaaggcucuuuucagagccaccagaauu

SEQ ID NO: 747 - RNA, 1218 nt, Artificial Sequence
  mRNA Design a-1 (A64-N5-C30-hSL-N5) comprising derived and/or modified sequence from Pf(3D7)__XP_001351122.1__HsALB_Pf-CSP(19-272)_L(AAY)_Pf-CSP(346-3 65)_L(AAY)_P2 (opt3)
aggagagucccgcagucggcguccagcggcucugcuuguucgugugugugucguugcaggccuuauucaagcuuaccaugaagugggugaccuucaucagccugcucuuucuuuucuccucugccuacucacuguuucaggaguaucaaugcuacggcaguagcuccaacacaagagucuugaaugaauuaaacuaugacaaugcugggacuaaccuguacaaugagcuagaaaugaacuauuacggaaaacaggagaauugguauucucucaagaaaaacucgaggucacugggugaaaaugaugacggcaacaaugaggauaacgagaaacuucggaagcccaagcacaagaaacugaagcagccugcagacgggaauccagauccgaacgccaaucccaacguugacccuaacgcgaauccaaacguggaucccaaugcuaacccuaauguagacccaaacgccaaucccaacgcaaauccuaacgccaauccaaacgcuaauccgaacgcaaaucccaacgccaacccuaaugcuaacccaaaugccaaccccaaugcgaacccuaaugcaaacccaaaugccaaccccaaugcuaacccgaaugccaacccuaaugcaaaccccaacgcuaauccaaacgccaauccuaacgcgaaucccaacguggauccaaaugccaaccccaaugcaaacccuaaugcuaacccaaaugccaacccgaaugcuaaccccaacgccaauccuaacgcaaauccaaacgccaaucccaacgcuaauccuaacgcgaauccaaacgcaaaucccaacgccaauccgaacgcuaauccuaacgccaauccaaacgcaaaccccaaugccaacccuaaugcuaaccccaaugccaacccagcagcguacauuaaaccuggaagcgcuaauaagcccaaagacgaauuggauuacgccaacgacauagaggcagccuaucaguacaucaaggcuaauaguaaguucauuggcaucacggaacucugaggacuagucccuguucccagagcccacuuuuuuuucuuuuuuugaaauaaaauagccugucuuucagaucuaaaaaaaaaaaaaaaaaaaaaaaaaaaaaaaaaaaaaaaaaaaaaaaaaaaaaaaaaaaaaaaaugcaucccccccccccccccccccccccccccccccaaaggcucuuuucagagccaccagaauu

SEQ ID NO: 748 - RNA, 1212 nt, Artificial Sequence
  mRNA Design a-1 (A64-N5-C30-hSL-N5) comprising derived and/or modified sequence from Pf(3D7)__XP_001351122.1__HsALB_Pf-CSP(19-272)_L(AAY)_Pf-CSP(346-3 65)_L(AAY)_PADRE (opt3)
aggagagucccgcagucggcguccagcggcucugcuuguucgugugugugucguugcaggccuuauucaagcuuaccaugaagugggugaccuucaucagccugcucuuucuuuucuccucugccuacucacuguuucaggaguaucaaugcuacggcaguagcuccaacacaagagucuugaaugaauuaaacuaugacaaugcugggacuaaccuguacaaugagcuagaaaugaacuauuacggaaaacaggagaauugguauucucucaagaaaaacucgaggucacugggugaaaaugaugacggcaacaaugaggauaacgagaaacuucggaagcccaagcacaagaaacugaagcagccugcagacgggaauccagauccgaacgccaaucccaacguugacccuaacgcgaauccaaacguggaucccaaugcuaacccuaauguagacccaaacgccaaucccaacgcaaauccuaacgccaauccaaacgcuaauccgaacgcaaaucccaacgccaacccuaaugcuaacccaaaugccaaccccaaugcgaacccuaaugcaaacccaaaugccaaccccaaugcuaacccgaaugccaacccuaaugcaaaccccaacgcuaauccaaacgccaauccuaacgcgaaucccaacguggauccaaaugccaaccccaaugcaaacccuaaugcuaacccaaaugccaacccgaaugcuaaccccaacgccaauccuaacgcaaauccaaacgccaaucccaacgcuaauccuaacgcgaauccaaacgcaaaucccaacgccaauccgaacgcuaauccuaacgccaauccaaacgcaaaccccaaugccaacccuaaugcuaaccccaaugccaacccagcagcguacauuaaaccuggaagcgcuaauaagcccaaagacgaauuggauuacgccaacgacauagaggcagccuaugcuaaguucgucgccgcauggacgcucaaggcugccgcgugaggacuagucccuguucccagagcccacuuuuuuuucuuuuuuugaaauaaaauagccugucuuucagaucuaaaaaaaaaaaaaaaaaaaaaaaaaaaaaaaaaaaaaaaaaaaaaaaaaaaaaaaaaaaaaaaaugcaucccccccccccccccccccccccccccccccaaaggcucuuuucagagccaccagaauu

SEQ ID NO: 749 - RNA, 1269 nt, Artificial Sequence
  mRNA Design a-1 (A64-N5-C30-hSL-N5) comprising derived and/or modified sequence from Pf(3D7)__XP_001351122.1__HsALB_Pf-CSP(19-272)_L(G4S)_Pf-CSP(310-3 27)_L(G4S)_Pf-CSP(346-375) (opt3)
aggagagucccgcagucggcguccagcggcucugcuuguucgugugugugucguugcaggccuuauucaagcuuaccaugaagugggugaccuucaucagccugcucuuucuuuucuccucugccuacucacuguuucaggaguaucaaugcuacggcaguagcuccaacacaagagucuugaaugaauuaaacuaugacaaugcugggacuaaccuguacaaugagcuagaaaugaacuauuacggaaaacaggagaauugguauucucucaagaaaaacucgaggucacugggugaaaaugaugacggcaacaaugaggauaacgagaaacuucggaagcccaagcacaagaaacugaagcagccugcagacgggaauccagauccgaacgccaaucccaacguugacccuaacgcgaauccaaacguggaucccaaugcuaacccuaauguagacccaaacgccaaucccaacgcaaauccuaacgccaauccaaacgcuaauccgaacgcaaaucccaacgccaacccuaaugcuaacccaaaugccaaccccaaugcgaacccuaaugcaaacccaaaugccaaccccaaugcuaacccgaaugccaacccuaaugcaaaccccaacgcuaauccaaacgccaauccuaacgcgaaucccaacguggauccaaaugccaaccccaaugcaaacccuaaugcuaacccaaaugccaacccgaaugcuaaccccaacgccaauccuaacgcaaauccaaacgccaaucccaacgcuaauccuaacgcgaauccaaacgcaaaucccaacgccaauccgaacgcuaauccuaacgccaauccaaacgcaaaccccaaugccaacccuaaugcuaaccccaaugccaacccaggaggcggugggagcgaaccuagugacaaacauauuaaggaguacuugaauaaaauacagaacucccucggaggcggcgggucuaucaagcccggaagcgcaaauaagccaaaagaugaacuggacuacgcgaacgauauugagaagaaaaucuguaagauggagaaaugcuccugaggacuagucccuguucccagagcccacuuuuuuuucuuuuuuugaaauaaaauagccugucuuucagaucuaaaaaaaaaaaaaaaaaaaaaaaaaaaaaaaaaaaaaaaaaaaaaaaaaaaaaaaaaaaaaaaaugcaucccccccccccccccccccccccccccccccaaaggcucuuuucagagccaccagaauu

SEQ ID NO: 750 - RNA, 1254 nt, Artificial Sequence
  mRNA Design a-1 (A64-N5-C30-hSL-N5) comprising derived and/or modified sequence from Pf(3D7)__XP_001351122.1__HsALB_Pf-CSP(19-272)_L(G4S)_Pf-CSP(310-3 27)_Pf-CSP(346-375) (opt3)
aggagagucccgcagucggcguccagcggcucugcuuguucgugugugugucguugcaggccuuauucaagcuuaccaugaagugggugaccuucaucagccugcucuuucuuuucuccucugccuacucacuguuucaggaguaucaaugcuacggcaguagcuccaacacaagagucuugaaugaauuaaacuaugacaaugcugggacuaaccuguacaaugagcuagaaaugaacuauuacggaaaacaggagaauugguauucucucaagaaaaacucgaggucacugggugaaaaugaugacggcaacaaugaggauaacgagaaacuucggaagcccaagcacaagaaacugaagcagccugcagacgggaauccagauccgaacgccaaucccaacguugacccuaacgcgaauccaaacguggaucccaaugcuaacccuaauguagacccaaacgccaaucccaacgcaaauccuaacgccaauccaaacgcuaauccgaacgcaaaucccaacgccaacccuaaugcuaacccaaaugccaaccccaaugcgaacccuaaugcaaacccaaaugccaaccccaaugcuaacccgaaugccaacccuaaugcaaaccccaacgcuaauccaaacgccaauccuaacgcgaaucccaacguggauccaaaugccaaccccaaugcaaacccuaaugcuaacccaaaugccaacccgaaugcuaaccccaacgccaauccuaacgcaaauccaaacgccaaucccaacgcuaauccuaacgcgaauccaaacgcaaaucccaacgccaauccgaacgcuaauccuaacgccaauccaaacgcaaaccccaaugccaacccuaaugcuaaccccaaugccaacccaggaggcggugggagcgaaccuagugacaaacauauuaaggaguacuugaauaaaauacagaacucccucaucaagcccggaucugcaaauaagccaaaagaugaacuggacuacgcgaacgauauugagaagaaaaucuguaagauggagaaaugcagcugaggacuagucccuguucccagagcccacuuuuuuuucuuuuuuugaaauaaaauagccugucuuucagaucuaaaaaaaaaaaaaaaaaaaaaaaaaaaaaaaaaaaaaaaaaaaaaaaaaaaaaaaaaaaaaaaaugcaucccccccccccccccccccccccccccccccaaaggcucuuuucagagccaccagaauu

SEQ ID NO: 751 - RNA, 1254 nt, Artificial Sequence
  mRNA Design a-1 (A64-N5-C30-hSL-N5) comprising derived and/or modified sequence from Pf(3D7)__XP_001351122.1__HsALB_Pf-CSP(19-325) (opt3)
aggagagucccgcagucggcguccagcggcucugcuuguucgugugugugucguugcaggccuuauucaagcuuaccaugaagugggugaccuucaucagccugcucuuucuuuucuccucugccuacucacuguuucaggaguaucaaugcuacggcaguagcuccaacacaagagucuugaaugaauuaaacuaugacaaugcugggacuaaccuguacaaugagcuagaaaugaacuauuacggaaaacaggagaauugguauucucucaagaaaaacucgaggucacugggugaaaaugaugacggcaacaaugaggauaacgagaaacuucggaagcccaagcacaagaaacugaagcagccugcagacgggaauccagauccgaacgccaaucccaacguugacccuaacgcgaauccaaacguggaucccaaugcuaacccuaauguagacccaaacgccaaucccaacgcaaauccuaacgccaauccaaacgcuaauccgaacgcaaaucccaacgccaacccuaaugcuaacccaaaugccaaccccaaugcgaacccuaaugcaaacccaaaugccaaccccaaugcuaacccgaaugccaacccuaaugcaaaccccaacgcuaauccaaacgccaauccuaacgcgaaucccaacguggauccaaaugccaaccccaaugcaaacccuaaugcuaacccaaaugccaacccgaaugcuaaccccaacgccaauccuaacgcaaauccaaacgccaaucccaacgcuaauccuaacgcgaauccaaacgcaaaucccaacgccaauccgaacgcuaauccuaacgccaauccaaacgcaaaccccaaugccaacccuaaugcuaaccccaaugccaacccaaauaaaaacaaucagggaaacggccaaggucauaauaugccuaacgaccccaaucgcaacgucgaugaaaaugcaaacgcgaacagcgcugugaagaauaacaauaacgaggaaccaagugacaaacacauuaaggaguacuugaauaagauacagaacugaggacuagucccuguucccagagcccacuuuuuuuucuuuuuuugaaauaaaauagccugucuuucagaucuaaaaaaaaaaaaaaaaaaaaaaaaaaaaaaaaaaaaaaaaaaaaaaaaaaaaaaaaaaaaaaaaugcaucccccccccccccccccccccccccccccccaaaggcucuuuucagagccaccagaauu

SEQ ID NO: 752 - RNA, 1431 nt, Artificial Sequence
  mRNA Design a-1 (A64-N5-C30-hSL-N5) comprising derived and/or modified sequence from Pf(3D7)__XP_001351122.1__HsALB_Pf-CSP(19-384) (opt3)
aggagagucccgcagucggcguccagcggcucugcuuguucgugugugugucguugcaggccuuauucaagcuuaccaugaagugggugaccuucaucagccugcucuuucuuuucuccucugccuacucacuguuucaggaguaucaaugcuacggcaguagcuccaacacaagagucuugaaugaauuaaacuaugacaaugcugggacuaaccuguacaaugagcuagaaaugaacuauuacggaaaacaggagaauugguauucucucaagaaaaacucgaggucacugggugaaaaugaugacggcaacaaugaggauaacgagaaacuucggaagcccaagcacaagaaacugaagcagccugcagacgggaauccagauccgaacgccaaucccaacguugacccuaacgcgaauccaaacguggaucccaaugcuaacccuaauguagacccaaacgccaaucccaacgcaaauccuaacgccaauccaaacgcuaauccgaacgcaaaucccaacgccaacccuaaugcuaacccaaaugccaaccccaaugcgaacccuaaugcaaacccaaaugccaaccccaaugcuaacccgaaugccaacccuaaugcaaaccccaacgcuaauccaaacgccaauccuaacgcgaaucccaacguggauccaaaugccaaccccaaugcaaacccuaaugcuaacccaaaugccaacccgaaugcuaaccccaacgccaauccuaacgcaaauccaaacgccaaucccaacgcuaauccuaacgcgaauccaaacgcaaaucccaacgccaauccgaacgcuaauccuaacgccaauccaaacgcaaaccccaaugccaacccuaaugcuaaccccaaugccaacccaaauaaaaacaaucagggaaacggccaaggucauaauaugccuaacgaccccaaucgcaacgucgaugaaaaugcaaacgcgaacagcgcugugaagaauaacaauaacgaggaaccaagugacaaacacauuaaggaguacuugaauaagauacagaacucccucucuacggaguggagcccguguuccguuaccugcgggaauggaauccaggugcgaauuaaaccuggcucagccaacaagcccaaagaugaacuggacuacgcaaaugacaucgagaagaaaauuuguaagauggaaaaaugcaguagcgucuucaacgugguaaauucuuccugaggacuagucccuguucccagagcccacuuuuuuuucuuuuuuugaaauaaaauagccugucuuucagaucuaaaaaaaaaaaaaaaaaaaaaaaaaaaaaaaaaaaaaaaaaaaaaaaaaaaaaaaaaaaaaaaaugcaucccccccccccccccccccccccccccccccaaaggcucuuuucagagccaccagaauu

SEQ ID NO: 753 - RNA, 1569 nt, Artificial Sequence
  mRNA Design a-1 (A64-N5-C30-hSL-N5) comprising derived and/or modified sequence from Pf(3D7)__XP_001351122.1__HsALB_Pf-CSP(19-384)_TM domain HA (opt3)
aggagagucccgcagucggcguccagcggcucugcuuguucgugugugugucguugcaggccuuauucaagcuuaccaugaagugggugaccuucaucagccugcucuuucuuuucuccucugccuacucacuguuucaggaguaucaaugcuacggcaguagcuccaacacaagagucuugaaugaauuaaacuaugacaaugcugggacuaaccuguacaaugagcuagaaaugaacuauuacggaaaacaggagaauugguauucucucaagaaaaacucgaggucacugggugaaaaugaugacggcaacaaugaggauaacgagaaacuucggaagcccaagcacaagaaacugaagcagccugcagacgggaauccagauccgaacgccaaucccaacguugacccuaacgcgaauccaaacguggaucccaaugcuaacccuaauguagacccaaacgccaaucccaacgcaaauccuaacgccaauccaaacgcuaauccgaacgcaaaucccaacgccaacccuaaugcuaacccaaaugccaaccccaaugcgaacccuaaugcaaacccaaaugccaaccccaaugcuaacccgaaugccaacccuaaugcaaaccccaacgcuaauccaaacgccaauccuaacgcgaaucccaacguggauccaaaugccaaccccaaugcaaacccuaaugcuaacccaaaugccaacccgaaugcuaaccccaacgccaauccuaacgcaaauccaaacgccaaucccaacgcuaauccuaacgcgaauccaaacgcaaaucccaacgccaauccgaacgcuaauccuaacgccaauccaaacgcaaaccccaaugccaacccuaaugcuaaccccaaugccaacccaaauaaaaacaaucagggaaacggccaaggucauaauaugccuaacgaccccaaucgcaacgucgaugaaaaugcaaacgcgaacagcgcugugaagaauaacaauaacgaggaaccaagugacaaacacauuaaggaguacuugaauaagauacagaacucccucucuacggaguggagcccguguuccguuaccugcgggaauggaauccaggugcgaauuaaaccuggcucagccaacaagcccaaagaugaacuggacuacgcaaaugacaucgagaagaaaauuuguaagauggaaaaaugcaguagcgucuucaacgugguaaauucuuccaagcuggagucaacacguaucuaucagauacucgccaucuacagcacuguugcuaguucuuuagugcuggucgugucccuuggcgccauuagcuuuuggauguguucgaacgggucuuugcaaugcagaaucuguauuugaggacuagucccuguucccagagcccacuuuuuuuucuuuuuuugaaauaaaauagccugucuuucagaucuaaaaaaaaaaaaaaaaaaaaaaaaaaaaaaaaaaaaaaaaaaaaaaaaaaaaaaaaaaaaaaaaugcaucccccccccccccccccccccccccccccccaaaggcucuuuucagagccaccagaauu

SEQ ID NO: 754 - RNA, 1281 nt, Artificial Sequence
  mRNA Design a-1 (A64-N5-C30-hSL-N5) comprising derived and/or modified sequence from Pf(3D7)__XP_001351122.1__HsALB_Pf-CSP(82-397) (opt3)
aggagagucccgcagucggcguccagcggcucugcuuguucgugugugugucguugcaggccuuauucaagcuuaccaugaagugggugaccuucaucagccugcucuuucuuuucuccucugccuacucagacaacgagaaacugagaaagcccaaacacaagaaauugaagcagccugcugauggcaauccagacccgaacgcaaaucccaacgucgauccuaaugccaacccaaauguugaccccaacgcgaauccuaacguggauccaaaugcuaaccccaaugccaacccuaaugcaaacccaaacgccaauccgaacgcuaaucccaacgcaaauccuaacgccaauccaaacgcuaaucccaacgccaauccuaacgcgaauccaaacgcaaaucccaacgccaacccgaaugcuaacccuaaugccaaccccaaugcaaacccaaaugcuaacccuaaugccaaccccaauguagacccaaacgcgaaucccaacgccaauccuaacgcaaacccaaaugcuaacccgaaugccaaccccaaugcuaacccuaaugccaacccaaaugcaaaccccaaugccaacccuaaugcuaacccaaaugcgaaccccaacgcaaauccgaacgccaauccuaacgcuaauccaaacgccaaucccaacgcaaauccuaacgccaaucccaacgcuaauccaaacaagaauaaccaggggaauggacagggucauaacaugccuaacgaucccaauaggaacguggacgaaaaugccaacgcaaauagugcggucaaaaacaauaacaaugaggaaccaagcgauaagcacauuaaagaguauuuaaacaagauacaaaauucccugucuacagaauggucgccgugcucagugacuuguggcaacgggauccagguucggauuaaaccuggaagcgcuaauaagcccaaggacgagcuagauuacgccaacgacaucgagaaaaagauuugcaaaauggaaaaguguaguuccguguuuaaugucgugaacucuagcaucggccucauaaugguacuguccuuccuuuuucugaacugaggacuagucccuguucccagagcccacuuuuuuuucuuuuuuugaaauaaaauagccugucuuucagaucuaaaaaaaaaaaaaaaaaaaaaaaaaaaaaaaaaaaaaaaaaaaaaaaaaaaaaaaaaaaaaaaaugcaucccccccccccccccccccccccccccccccaaaggcucuuuucagagccaccagaauu

SEQ ID NO: 755 - RNA, 633 nt, Artificial Sequence
  mRNA Design a-1 (A64-N5-C30-hSL-N5) comprising derived and/or modified sequence from Pf(3D7)__XP_001351122.1__HsALB_Pf-CSP(93-192) (opt3)
aggagagucccgcagucggcguccagcggcucugcuuguucgugugugugucguugcaggccuuauucaagcuuaccaugaagugggugaccuucaucagccugcucuuucuuuucuccucugccuacucaaaacugaagcagcccgcugacggcaacccugauccaaaugcaaacccgaaugucgaccccaacgccaauccuaacguugauccaaaugcgaaccccaauguggacccuaacgcuaauccaaacgccaaucccaacgcaaauccuaacgccaacccaaaugcuaacccgaaugcaaaccccaaugccaacccuaaugcuaacccaaaugccaaccccaaugcgaacccuaaugcaaacccaaaugccaaccccaacgcuaauccgaacgccaauccuaacgcaaaucccaacgcuaauccaugaggacuagucccuguucccagagcccacuuuuuuuucuuuuuuugaaauaaaauagccugucuuucagaucuaaaaaaaaaaaaaaaaaaaaaaaaaaaaaaaaaaaaaaaaaaaaaaaaaaaaaaaaaaaaaaaaugcaucccccccccccccccccccccccccccccccaaaggcucuuuucagagccaccagaauu

SEQ ID NO: 756 - RNA, 873 nt, Artificial Sequence
  mRNA Design a-1 (A64-N5-C30-hSL-N5) comprising derived and/or modified sequence from Pf(3D7)__XP_001351122.1__HsALB_Pf-CSP(93-272) (opt3)
aggagagucccgcagucggcguccagcggcucugcuuguucgugugugugucguugcaggccuuauucaagcuuaccaugaagugggugaccuucaucagccugcucuuucuuuucuccucugccuacucaaaacugaagcagcccgcugacggcaacccugauccaaaugcaaacccgaaugucgaccccaacgccaauccuaacguugauccaaaugcgaaccccaauguggacccuaacgcuaauccaaacgccaaucccaacgcaaauccuaacgccaacccaaaugcuaacccgaaugcaaaccccaaugccaacccuaaugcuaacccaaaugccaaccccaaugcgaacccuaaugcaaacccaaaugccaaccccaacgcuaauccgaacgccaauccuaacgcaaaucccaacgcuaauccaaacgccaauccuaacguagaucccaaugcgaacccaaaugccaaccccaaugcaaacccuaacgcuaauccaaacgccaauccgaacgcuaaucccaacgccaauccuaacgcaaauccaaacgccaaucccaacgcuaauccuaacgcgaauccaaacgcaaaccccaaugccaacccgaaugcuaacccuaaugccaacccaaaugcaaaccccaaugccaacccuaaugcuaaccccugaggacuagucccuguucccagagcccacuuuuuuuucuuuuuuugaaauaaaauagccugucuuucagaucuaaaaaaaaaaaaaaaaaaaaaaaaaaaaaaaaaaaaaaaaaaaaaaaaaaaaaaaaaaaaaaaaugcaucccccccccccccccccccccccccccccccaaaggcucuuuucagagccaccagaauu

SEQ ID NO: 757 - RNA, 1248 nt, Artificial Sequence
  mRNA Design a-1 (A64-N5-C30-hSL-N5) comprising derived and/or modified sequence from Pf(3D7)__XP_001351122.1__HsALB_Pf-CSP(93-397) (opt3)
aggagagucccgcagucggcguccagcggcucugcuuguucgugugugugucguugcaggccuuauucaagcuuaccaugaagugggugaccuucaucagccugcucuuucuuuucuccucugccuacucaaaacugaagcagcccgcugacggcaacccugauccaaaugcaaacccgaaugucgaccccaacgccaauccuaacguugauccaaaugcgaaccccaauguggacccuaacgcuaauccaaacgccaaucccaacgcaaauccuaacgccaacccaaaugcuaacccgaaugcaaaccccaaugccaacccuaaugcuaacccaaaugccaaccccaaugcgaacccuaaugcaaacccaaaugccaaccccaacgcuaauccgaacgccaauccuaacgcaaaucccaacgcuaauccaaacgccaauccuaacguagaucccaaugcgaacccaaaugccaaccccaaugcaaacccuaacgcuaauccaaacgccaauccgaacgcuaaucccaacgccaauccuaacgcaaauccaaacgccaaucccaacgcuaauccuaacgcgaauccaaacgcaaaccccaaugccaacccgaaugcuaacccuaaugccaacccaaaugcaaaccccaaugccaacccuaaugcuaaccccaauaaaaacaaucaagggaacggacagggucacaauaugccaaacgacccuaacagaaauguggaugagaacgccaaugcaaacagugcggucaagaauaacaauaacgaggaacccagcgacaaacauauuaaggaauauuugaauaagauacagaacuccuuaucuacagaguggucgccaugcucagugacuuguggcaaugggauccagguuaggauuaaaccgggaagcgcuaacaagccuaaagaugaacuggacuacgccaaugauaucgagaagaaaauuugcaagauggagaaguguaguuccguguuuaacgucguaaauucuagcaucggccuaauaauggugcucuccuuccuguuucuuaacugaggacuagucccuguucccagagcccacuuuuuuuucuuuuuuugaaauaaaauagccugucuuucagaucuaaaaaaaaaaaaaaaaaaaaaaaaaaaaaaaaaaaaaaaaaaaaaaaaaaaaaaaaaaaaaaaaugcaucccccccccccccccccccccccccccccccaaaggcucuuuucagagccaccagaauu

SEQ ID NO: 758 - RNA, 618 nt, Artificial Sequence
  mRNA Design a-1 (A64-N5-C30-hSL-N5) comprising derived and/or modified sequence from Pf(3D7)__XP_001351122.1__HsALB_Pf-CSP(98-192) (opt3)
aggagagucccgcagucggcguccagcggcucugcuuguucgugugugugucguugcaggccuuauucaagcuuaccaugaagugggugaccuucaucagccugcucuuucuuuucuccucugccuacucagcugacggcaaccccgauccuaaugcaaacccaaaugucgacccgaacgccaaucccaacguugauccuaaugcgaacccaaauguggaccccaacgcuaauccuaacgccaauccaaacgcaaaucccaacgccaacccuaaugcuaacccaaaugcaaacccgaaugccaaccccaaugcuaacccuaaugccaacccaaaugcgaaccccaaugcaaacccuaaugccaacccaaacgcuaaucccaacgccaauccgaacgcaaauccuaacgcuaaucccugaggacuagucccuguucccagagcccacuuuuuuuucuuuuuuugaaauaaaauagccugucuuucagaucuaaaaaaaaaaaaaaaaaaaaaaaaaaaaaaaaaaaaaaaaaaaaaaaaaaaaaaaaaaaaaaaaugcaucccccccccccccccccccccccccccccccaaaggcucuuuucagagccaccagaauu

SEQ ID NO: 759 - RNA, 858 nt, Artificial Sequence
  mRNA Design a-1 (A64-N5-C30-hSL-N5) comprising derived and/or modified sequence from Pf(3D7)__XP_001351122.1__HsALB_Pf-CSP(98-272) (opt3)
aggagagucccgcagucggcguccagcggcucugcuuguucgugugugugucguugcaggccuuauucaagcuuaccaugaagugggugaccuucaucagccugcucuuucuuuucuccucugccuacucagcugacggcaaccccgauccuaaugcaaacccaaaugucgacccgaacgccaaucccaacguugauccuaaugcgaacccaaauguggaccccaacgcuaauccuaacgccaauccaaacgcaaaucccaacgccaacccuaaugcuaacccaaaugcaaacccgaaugccaaccccaaugcuaacccuaaugccaacccaaaugcgaaccccaaugcaaacccuaaugccaacccaaacgcuaaucccaacgccaauccgaacgcaaauccuaacgcuaaucccaacgccaauccaaacguagauccuaaugcgaaccccaaugccaacccaaaugcaaaccccaacgcuaauccuaacgccaauccaaacgcuaauccgaacgccaaucccaacgcaaauccuaacgccaauccaaacgcuaaucccaacgcgaauccuaacgcaaacccaaaugccaaccccaaugcuaacccgaaugccaacccuaaugcaaacccaaaugccaaccccaaugcuaacccuugaggacuagucccuguucccagagcccacuuuuuuuucuuuuuuugaaauaaaauagccugucuuucagaucuaaaaaaaaaaaaaaaaaaaaaaaaaaaaaaaaaaaaaaaaaaaaaaaaaaaaaaaaaaaaaaaaugcaucccccccccccccccccccccccccccccccaaaggcucuuuucagagccaccagaauu

SEQ ID NO: 760 - RNA, 1164 nt, Artificial Sequence
  mRNA Design a-1 (A64-N5-C30-hSL-N5) comprising derived and/or modified sequence from Pf(3D7)__XP_001351122.1__HsALB_Pf-CSP(98-374) (opt3)
aggagagucccgcagucggcguccagcggcucugcuuguucgugugugugucguugcaggccuuauucaagcuuaccaugaagugggugaccuucaucagccugcucuuucuuuucuccucugccuacucagcugacggcaaccccgauccuaaugcaaacccaaaugucgacccgaacgccaaucccaacguugauccuaaugcgaacccaaauguggaccccaacgcuaauccuaacgccaauccaaacgcaaaucccaacgccaacccuaaugcuaacccaaaugcaaacccgaaugccaaccccaaugcuaacccuaaugccaacccaaaugcgaaccccaaugcaaacccuaaugccaacccaaacgcuaaucccaacgccaauccgaacgcaaauccuaacgcuaaucccaacgccaauccaaacguagauccuaaugcgaaccccaaugccaacccaaaugcaaaccccaacgcuaauccuaacgccaauccaaacgcuaauccgaacgccaaucccaacgcaaauccuaacgccaauccaaacgcuaaucccaacgcgaauccuaacgcaaacccaaaugccaaccccaaugcuaacccgaaugccaacccuaaugcaaacccaaaugccaaccccaaugcuaacccuaauaaaaacaaucaggggaacggacaaggucacaauaugcccaacgacccaaacagaaauguggaugagaacgccaaugcaaacagugcggucaagaauaacaauaacgaggaaccuagcgacaaacauauuaaggaauaucugaauaaaauacagaacuccuugucuacagaguggucgcccugcucagugacuuguggcaaugggauccagguuaggauuaagccaggaagcgcuaacaagccgaaagaugaauuagacuacgccaaugauaucgagaagaaaauuugcaagauggagaaauguugaggacuagucccuguucccagagcccacuuuuuuuucuuuuuuugaaauaaaauagccugucuuucagaucuaaaaaaaaaaaaaaaaaaaaaaaaaaaaaaaaaaaaaaaaaaaaaaaaaaaaaaaaaaaaaaaaugcaucccccccccccccccccccccccccccccccaaaggcucuuuucagagccaccagaauu

SEQ ID NO: 761 - RNA, 1233 nt, Artificial Sequence
  mRNA Design a-1 (A64-N5-C30-hSL-N5) comprising derived and/or modified sequence from Pf(3D7)__XP_001351122.1__HsALB_Pf-CSP(98-397) (opt3)
aggagagucccgcagucggcguccagcggcucugcuuguucgugugugugucguugcaggccuuauucaagcuuaccaugaagugggugaccuucaucagccugcucuuucuuuucuccucugccuacucagcugacggcaaccccgauccuaaugcaaacccaaaugucgacccgaacgccaaucccaacguugauccuaaugcgaacccaaauguggaccccaacgcuaauccuaacgccaauccaaacgcaaaucccaacgccaacccuaaugcuaacccaaaugcaaacccgaaugccaaccccaaugcuaacccuaaugccaacccaaaugcgaaccccaaugcaaacccuaaugccaacccaaacgcuaaucccaacgccaauccgaacgcaaauccuaacgcuaaucccaacgccaauccaaacguagauccuaaugcgaaccccaaugccaacccaaaugcaaaccccaacgcuaauccuaacgccaauccaaacgcuaauccgaacgccaaucccaacgcaaauccuaacgccaauccaaacgcuaaucccaacgcgaauccuaacgcaaacccaaaugccaaccccaaugcuaacccgaaugccaacccuaaugcaaacccaaaugccaaccccaaugcuaacccuaauaaaaacaaucaggggaacggacaaggucacaauaugcccaacgacccaaacagaaauguggaugagaacgccaaugcaaacagugcggucaagaauaacaauaacgaggaaccuagcgacaaacauauuaaggaauaucugaauaaaauacagaacuccuugucuacagaguggucgcccugcucagugacuuguggcaaugggauccagguuaggauuaagccaggaagcgcuaacaagccgaaagaugaauuagacuacgccaaugauaucgagaagaaaauuugcaagauggagaaauguaguuccguguuuaacgucguaaauucuagcaucggccugauaauggugcuauccuuccucuuucugaacugaggacuagucccuguucccagagcccacuuuuuuuucuuuuuuugaaauaaaauagccugucuuucagaucuaaaaaaaaaaaaaaaaaaaaaaaaaaaaaaaaaaaaaaaaaaaaaaaaaaaaaaaaaaaaaaaaugcaucccccccccccccccccccccccccccccccaaaggcucuuuucagagccaccagaauu

SEQ ID NO: 762 - RNA, 1560 nt, Artificial Sequence
  mRNA Design a-1 (A64-N5-C30-hSL-N5) comprising derived and/or modified sequence from Pf(3D7)__XP_001351122.1__HsALB_Pf-CSP(199-377)_L(PVTN)_HBsAg (opt3)
aggagagucccgcagucggcguccagcggcucugcuuguucgugugugugucguugcaggccuuauucaagcuuaccaugaagugggugaccuucaucagccugcucuuucuuuucuccucugccuacucagaccccaacgcuaauccuaacgcaaauccaaacgccaauccgaacgcgaaucccaacgcuaauccuaacgccaauccaaacgcaaaucccaacgccaauccuaacgcuaacccaaaugcaaaccccaaugccaacccuaaugcuaacccaaaugccaacccgaaugcgaaccccaaugcaaacccuaaugccaacccaaaugcuaaccccaacgccaauccuaacaaaaauaaccagggcaaugggcaaggacacaacaugccaaaugaucccaacagaaaugucgacgagaacgcaaaugcuaacagugccguuaagaauaacaauaacgaggaaccgagcgauaaacauauuaaggaauaucugaacaaaauacaaaauuccuugucuacagaguggucgccuugcucagugacuugugguaacggcauccagguaaggauuaagcccgggagcgcgaauaagccaaaagacgaauuagauuacgccaacgacaucgagaagaaaauuugcaagauggagaaauguaguuccgugccugucacgaauauggaaaacaucaccucuggauuucugggcccccuacucgugcugcaggcagguuucuuucuucugacacggauauugacuaucccacagagccucgauuccugguggaccucacugaauuuccucgggggaagucccguuugccugggccagaacagccagucuccuacauccaaucacucaccaaccagcuguccgcccauuugcccuggcuaucgcuggauguguuuacgacguuuuaucauuuuccuguuuauccuuuugcugugccuaauauuccuccuggugcuucuggacuaccaggggauguugccagucuguccccucauuccuggaaguacuacaaccaacacggguccaugcaagacuuguaccacacccgcucaaggcaauucuauguuuccguccugcugcuguacuaagccuaccgaugggaacugcacauguaucccaauucccagcucgugggccuucgcuaaauaucugugggagugggccucugugagauuuuccugguuaucacugcucguaccuuucguucagugguucgugggacuuagucccaccgucuggcugagcgcaaucuggaugaugugguacuggggcccauccuuguauucuaucgugagcccuuuuauuccccuacugccaauauucuuuugccucuggguguacaucugaggacuagucccuguucccagagcccacuuuuuuuucuuuuuuugaaauaaaauagccugucuuucagaucuaaaaaaaaaaaaaaaaaaaaaaaaaaaaaaaaaaaaaaaaaaaaaaaaaaaaaaaaaaaaaaaaugcaucccccccccccccccccccccccccccccccaaaggcucuuuucagagccaccagaauu

SEQ ID NO: 763 - RNA, 1299 nt, Artificial Sequence
  mRNA Design a-1 (A64-N5-C30-hSL-N5) comprising derived and/or modified sequence from Pb(ANKA)__XP_022712148.1__Pb-CSP (opt3)
aggagagucccgcagucggcguccagcggcucugcuuguucgugugugugucguugcaggccuuauucaagcuuaccaugaagaaaugcaccauccugguggucgccagccuccuucugguuaacuccuuguuacccggcuacgggcagaauaagucuauucaagcucagagaaaccugaaugagcuauguuauaacgaaggaaaugacaacaaacucuaccacgugcuuaauucaaagaacgguaaaauauauaauaggaacacaguaaaucggcugcuggcagaugccccugagggcaagaagaacgaaaagaaaaaugagaaaaucgaacgcaacaauaaguugaaacagccaccgcccccuccaaaccccaacgacccuccacccccuaauccaaacgauccgcccccuccaaaucccaacgacccuccacccccgaauccuaacgaucccccaccucccaaugcgaacgacccacccccuccaaaugcuaacgauccggcacccccuaaugccaacgacccagcucccccuaaugccaacgauccagcacccccgaaugccaacgacccugcuccacccaacgccaaugauccucccccaccuaaccccaaugacccagcgccgccuaacgcaaaugaucccccacccccuaacccaaaugaccccgccccuccgcaggggaacaauaacccacaaccccagccucgaccacagccccagccucaaccgcagccccagccacagccucaaccccagccacagccucguccccaaccacagccgcagccuggaggcaauaacaauaacaagaauaacaacaaugacgauaguuacauucccagcgcugagaagauccucgaguucgugaaacagauuagagacuccaucacugaagaguggucucaaugcaacgucacgugugguucggggauaagggugcggaagcgcaaaggaucaaauaagaaagccgaagaucugacccuggaggacaucgauacagagauuugcaagauggacaaauguagcaguaucuuuaacauuguuuccaauucucucggcuucgugaucuuacugguccuuguguuuuucaacugaggacuagucccuguucccagagcccacuuuuuuuucuuuuuuugaaauaaaauagccugucuuucagaucuaaaaaaaaaaaaaaaaaaaaaaaaaaaaaaaaaaaaaaaaaaaaaaaaaaaaaaaaaaaaaaaaugcaucccccccccccccccccccccccccccccccaaaggcucuuuucagagccaccagaauu

SEQ ID NO: 764 - RNA, 1464 nt, Artificial Sequence
  mRNA Design a-1 (A64-N5-C30-hSL-N5) comprising derived and/or modified sequence from Pb(ANKA)__XP_022712148.1__Pb-CSP_L(G4SG4)_TM domain HA (opt3)
aggagagucccgcagucggcguccagcggcucugcuuguucgugugugugucguugcaggccuuauucaagcuuaccaugaagaaaugcaccauccugguggucgccagccuccuucugguuaacuccuuguuacccggcuacgggcagaauaagucuauucaagcucagagaaaccugaaugagcuauguuauaacgaaggaaaugacaacaaacucuaccacgugcuuaauucaaagaacgguaaaauauauaauaggaacacaguaaaucggcugcuggcagaugccccugagggcaagaagaacgaaaagaaaaaugagaaaaucgaacgcaacaauaaguugaaacagccaccgcccccuccaaaccccaacgacccuccacccccuaauccaaacgauccgcccccuccaaaucccaacgacccuccacccccgaauccuaacgaucccccaccucccaaugcgaacgacccacccccuccaaaugcuaacgauccggcacccccuaaugccaacgacccagcucccccuaaugccaacgauccagcacccccgaaugccaacgacccugcuccacccaacgccaaugauccucccccaccuaaccccaaugacccagcgccgccuaacgcaaaugaucccccacccccuaacccaaaugaccccgccccuccgcaggggaacaauaacccacaaccccagccucgaccacagccccagccucaaccgcagccccagccacagccucaaccccagccacagccucguccccaaccacagccgcagccuggaggcaauaacaauaacaagaauaacaacaaugacgauaguuacauucccagcgcugagaagauccucgaguucgugaaacagauuagagacuccaucacugaagaguggucucaaugcaacgucacgugugguucggggauaagggugcggaagcgcaaaggaucaaauaagaaagccgaagaucugacccuggaggacaucgauacagagauuugcaagauggacaaauguagcaguaucuuuaacauuguuuccaauucucucggcuucgugaucuuacugguccuuguguuuuucaacggcgggggagguagcggcgggggaggcaaguuggaauccacuagaauauaucagauucuggcaaucuacucaaccguagcuaguagccuaguucucguggucucucugggugccauuuccuuuuggaugugcucaaaugggagccuucaguguaggaucugcaucugaggacuagucccuguucccagagcccacuuuuuuuucuuuuuuugaaauaaaauagccugucuuucagaucuaaaaaaaaaaaaaaaaaaaaaaaaaaaaaaaaaaaaaaaaaaaaaaaaaaaaaaaaaaaaaaaaugcaucccccccccccccccccccccccccccccccaaaggcucuuuucagagccaccagaauu

SEQ ID NO: 765 - RNA, 1284 nt, Artificial Sequence
  mRNA Design a-1 (A64-N5-C30-hSL-N5) comprising derived and/or modified sequence from Pb(ANKA)__XP_022712148.1__HsALB_Pb-CSP(24-340) (opt3)
aggagagucccgcagucggcguccagcggcucugcuuguucgugugugugucguugcaggccuuauucaagcuuaccaugaagugggugaccuucaucagccugcucuuucuuuucuccucugccuacucacagaacaaaaguauucaagcucagagaaaucugaacgaguugugcuauaaugaaggcaacgacaauaaguuauaccacguccugaacagcaaaaaugggaagauauauaacaggaauacaguuaaccggcuacucgcagaugcccccgaggguaaaaagaaugaaaagaaaaacgagaagaucgaacgcaauaacaaacugaagcagccuccaccgcccccuaauccaaacgaucccccuccacccaacccuaaugacccaccgcccccuaacccaaaugaucccccuccacccaacccgaaugacccucccccaccuaacgcgaaugaucccccacccccuaacgcuaaugacccagccccgcccaacgcaaaugacccugccccacccaacgcuaaugauccugcaccacccaacgccaaugacccggcuccuccaaacgccaacgaucccccucccccaaauccuaacgaccccgcgccaccgaaugcaaacgauccucccccacccaauccuaacgacccagcucccccucagggaaauaacaauccgcaaccacagccccgaccucagccacagccccaaccucagccgcagccccagccacaaccucagccccagccacguccucaaccccagccacagccgggcgggaacaauaacaauaaaaacaauaacaacgacgauuccuacauuccuucugccgagaagauccuugaguuugugaagcagauuagagacucgaucacugaagaguggucacaauguaauguaacgugcggaagcggcauaagggugcggaaacgcaaggguaguaacaaaaaggccgaagaucugaccuuggaggacaucgauacagagauuuguaaaauggacaagugcuccucuaucuucaauauugucagcaacucccucggguuugugauccugcugguucucguguucuuuaauugaggacuagucccuguucccagagcccacuuuuuuuucuuuuuuugaaauaaaauagccugucuuucagaucuaaaaaaaaaaaaaaaaaaaaaaaaaaaaaaaaaaaaaaaaaaaaaaaaaaaaaaaaaaaaaaaaugcaucccccccccccccccccccccccccccccccaaaggcucuuuucagagccaccagaauu

SEQ ID NO: 766 - RNA, 1302 nt, Artificial Sequence
  mRNA Design a-1 (A64-N5-C30-hSL-N5) comprising derived and/or modified sequence from Pb(ANKA)__XP_022712148.1__HsIns-iso1_Pb-CSP(24-340) (opt3)
aggagagucccgcagucggcguccagcggcucugcuuguucgugugugugucguugcaggccuuauucaagcuuaccauggcccuguggaugagacuccuuccccuguuggcuuuacuggcacuauggggcccugacccagccgcggcucagaacaagagcauccaagcccagaggaaucucaacgagcugugcuacaaugaagggaacgauaauaaacuuuaucacguucugaacuccaagaauggaaaaauuuacaaccggaauaccgucaaccgcuugcucgcagacgccccggaggguaagaaaaaugaaaagaagaacgagaaaauagaacgaaauaacaagcugaaacagcccccuccacccccuaauccaaacgaucccccuccaccgaaccccaaugacccuccacccccuaacccaaaugaucccccgccucccaacccaaaugacccucccccacccaacgcuaaugauccuccaccgcccaacgcaaaugacccugccccacccaacgcuaaugauccugccccacccaacgcgaaugacccggcaccuccaaacgccaaugaucccgcuccucccaacgccaacgacccaccucccccaaauccgaacgauccugcacccccaaaugcuaacgaucccccuccacccaauccuaacgacccggccccaccccagggcaauaacaauccucaaccacagccccguccucagccgcagccccaaccacagccucagccccagccacaaccucagccccagccaagaccgcaaccucagccccagccagggggaaacaauaacaauaagaacaauaacaacgacgacucuuauauccccucagcggagaaaauucuggaguucguuaagcagaucagggauaguauuacagaagaguggagccaauguaaugugacuugcggcuccgguauccggguacgcaagagaaaagggucuaacaagaaagccgaagaccucacguuagaggauauagacaccgagaucuguaagauggauaaaugcucgucaauuuuuaauaucgugagcaacagucugggauucgucauucuuuuggugcugguguuuuucaauugaggacuagucccuguucccagagcccacuuuuuuuucuuuuuuugaaauaaaauagccugucuuucagaucuaaaaaaaaaaaaaaaaaaaaaaaaaaaaaaaaaaaaaaaaaaaaaaaaaaaaaaaaaaaaaaaaugcaucccccccccccccccccccccccccccccccaaaggcucuuuucagagccaccagaauu

SEQ ID NO: 767 - RNA, 1281 nt, Artificial Sequence
  mRNA Design a-1 (A64-N5-C30-hSL-N5) comprising derived and/or modified sequence from Pb(ANKA)__XP_022712148.1__HsSPARC_Pb-CSP(24-340) (opt3)
aggagagucccgcagucggcguccagcggcucugcuuguucgugugugugucguugcaggccuuauucaagcuuaccaugagagccuggaucuucuuucugcucugccuugcuggcagggcacuggcccagaacaagagcauucaagcgcagcggaauuugaacgaguuauguuacaaugaagggaacgacaauaaacuguaucacguucuaaacuccaagaauggaaaaauauacaaccgcaauaccgucaaccgacuccuggcugaugcccccgaggguaagaaaaaugaaaagaagaacgagaaaaucgaacguaauaacaaacuuaagcagccuccaccgcccccuaauccaaacgacccgccuccacccaacccuaaugauccaccgcccccuaacccaaaugaucccccuccacccaacccgaaugacccucccccaccuaacgcaaaugaucccccacccccuaacgccaaugacccagcuccgcccaacgcaaaugacccugccccacccaacgcuaaugauccugccccacccaacgcgaaugacccggcaccuccaaacgccaacgaucccccucccccaaauccuaacgaccccgcuccaccgaaugccaacgauccucccccacccaauccuaacgacccagcacccccucagggcaauaacaauccgcaaccacagcccagaccucagccacagccccaaccucagccgcagccccagccacaaccucagccccagccaaggccucaaccccagccacagcccgggggaaacaauaacaauaagaacaauaacaacgacgauucuuauauuccuucagcugagaaaauccuggaguucguuaagcagauucgggacaguaucacagaagaguggagccaaugcaaugugacuuguggcuccgguauacgcguaagaaagaggaaagggucuaacaagaaagccgaagauuugacgcucgaggacaucgauaccgagauuugcaagauggacaaauguucgucaaucuuuaauauugugagcaacagucugggauucgucauccugcucguguuaguguuuuucaauugaggacuagucccuguucccagagcccacuuuuuuuucuuuuuuugaaauaaaauagccugucuuucagaucuaaaaaaaaaaaaaaaaaaaaaaaaaaaaaaaaaaaaaaaaaaaaaaaaaaaaaaaaaaaaaaaaugcaucccccccccccccccccccccccccccccccaaaggcucuuuucagagccaccagaauu

SEQ ID NO: 768 - RNA, 1284 nt, Artificial Sequence
  mRNA Design a-1 (A64-N5-C30-hSL-N5) comprising derived and/or modified sequence from Pb(ANKA)__XP_022712148.1__IgE_Pb-CSP(24-340) (opt3)
aggagagucccgcagucggcguccagcggcucugcuuguucgugugugugucguugcaggccuuauucaagcuuaccauggacuggaccuggauccuguuccucguggccgcugcaacaagaguccacagccagaacaaguccauucaagcccagaggaaucuuaacgagcugugcuacaaugaaggcaacgauaauaaauuguaucauguuuuaaacucuaagaaugggaaaauauacaaccggaauacugugaaccgccugcuagcggacgcucccgagggaaagaaaaaugaaaagaagaacgagaaaaucgaacgaaauaacaagcucaaacagccuccaccgcccccuaauccaaacgaucccccuccacccaacccuaaugacccaccgcccccuaacccaaaugaucccccuccacccaacccgaaugacccucccccaccuaacgccaaugaucccccacccccuaacgcaaaugacccagccccgcccaacgcuaaugauccugcaccacccaacgccaaugacccugcuccacccaacgccaaugauccggcgccuccaaacgcaaacgaucccccucccccaaauccuaacgaccccgccccaccgaaugcuaacgacccucccccacccaauccuaacgacccagcacccccucaggguaauaacaauccgcaaccacagccccguccucagccacagccccaaccucagccgcagccccagccacaaccucagccccagccaagaccucaaccccagccacagccgggcgggaacaauaacaauaagaacaauaacaacgaugacucauauauuccuagugccgagaaaauccuggaguuuguaaagcagauuagggauagcaucacggaagaguggucccaauguaaugugaccugcggaucuggcauacggguccgcaagagaaaagguucgaacaagaaagcugaagaccuuacacuggaggauaucgacacugagauuuguaagauggauaaaugcucaagcaucuucaauauugugaguaacuccuugggguuuguuauccuccuggugcuggucuucuuuaauugaggacuagucccuguucccagagcccacuuuuuuuucuuuuuuugaaauaaaauagccugucuuucagaucuaaaaaaaaaaaaaaaaaaaaaaaaaaaaaaaaaaaaaaaaaaaaaaaaaaaaaaaaaaaaaaaaugcaucccccccccccccccccccccccccccccccaaaggcucuuuucagagccaccagaauu

SEQ ID NO: 769 - RNA, 1470 nt, Artificial Sequence
  mRNA Design a-1 (A64-N5-C30-hSL-N5) comprising derived and/or modified sequence from Pf(3D7)__XP_001351122.1__Pf-CSP (opt4)
aggagagucccgcagucggcguccagcggcucugcuuguucgugugugugucguugcaggccuuauucaagcuuaccaugaugagaaagcuggccauccugagcgugagcagcuuccuguucguggaggcccuguuccaggaguaccagugcuacggcagcagcagcaacaccagagugcugaacgagcugaacuacgacaacgccggcaccaaccuguacaacgagcuggagaugaacuacuacggcaagcaggagaacugguacagccugaagaagaacagcagaagccugggcgagaacgacgacggcaacaacgaggacaacgagaagcugagaaagcccaagcacaagaagcugaagcagcccgccgacggcaaccccgaccccaacgccaaccccaacguggaccccaacgccaaccccaacguggaccccaacgccaaccccaacguggaccccaacgccaaccccaacgccaaccccaacgccaaccccaacgccaaccccaacgccaaccccaacgccaaccccaacgccaaccccaacgccaaccccaacgccaaccccaacgccaaccccaacgccaaccccaacgccaaccccaacgccaaccccaacgccaaccccaacgccaaccccaacgccaaccccaacgccaaccccaacguggaccccaacgccaaccccaacgccaaccccaacgccaaccccaacgccaaccccaacgccaaccccaacgccaaccccaacgccaaccccaacgccaaccccaacgccaaccccaacgccaaccccaacgccaaccccaacgccaaccccaacgccaaccccaacgccaaccccaacgccaaccccaacgccaaccccaacgccaaccccaacgccaaccccaacaagaacaaccagggcaacggccagggccacaacaugcccaacgaccccaacagaaacguggacgagaacgccaacgccaacagcgccgugaagaacaacaacaacgaggagcccagcgacaagcacaucaaggaguaccugaacaagauccagaacagccugagcaccgaguggagccccugcagcgugaccugcggcaacggcauccaggugagaaucaagcccggcagcgccaacaagcccaaggacgagcuggacuacgccaacgacaucgagaagaagaucugcaagauggagaagugcagcagcguguucaacguggugaacagcagcaucggccugaucauggugcugagcuuccuguuccugaacugaggacuagucccuguucccagagcccacuuuuuuuucuuuuuuugaaauaaaauagccugucuuucagaucuaaaaaaaaaaaaaaaaaaaaaaaaaaaaaaaaaaaaaaaaaaaaaaaaaaaaaaaaaaaaaaaaugcaucccccccccccccccccccccccccccccccaaaggcucuuuucagagccaccagaauu

SEQ ID NO: 770 - RNA, 1401 nt, Artificial Sequence
  mRNA Design a-1 (A64-N5-C30-hSL-N5) comprising derived and/or modified sequence from Pf(3D7)__XP_001351122.1__Pf-CSP(1-374) (opt4)
aggagagucccgcagucggcguccagcggcucugcuuguucgugugugugucguugcaggccuuauucaagcuuaccaugaugagaaagcuggccauccugagcgugagcagcuuccuguucguggaggcccuguuccaggaguaccagugcuacggcagcagcagcaacaccagagugcugaacgagcugaacuacgacaacgccggcaccaaccuguacaacgagcuggagaugaacuacuacggcaagcaggagaacugguacagccugaagaagaacagcagaagccugggcgagaacgacgacggcaacaacgaggacaacgagaagcugagaaagcccaagcacaagaagcugaagcagcccgccgacggcaaccccgaccccaacgccaaccccaacguggaccccaacgccaaccccaacguggaccccaacgccaaccccaacguggaccccaacgccaaccccaacgccaaccccaacgccaaccccaacgccaaccccaacgccaaccccaacgccaaccccaacgccaaccccaacgccaaccccaacgccaaccccaacgccaaccccaacgccaaccccaacgccaaccccaacgccaaccccaacgccaaccccaacgccaaccccaacgccaaccccaacgccaaccccaacguggaccccaacgccaaccccaacgccaaccccaacgccaaccccaacgccaaccccaacgccaaccccaacgccaaccccaacgccaaccccaacgccaaccccaacgccaaccccaacgccaaccccaacgccaaccccaacgccaaccccaacgccaaccccaacgccaaccccaacgccaaccccaacgccaaccccaacgccaaccccaacgccaaccccaacaagaacaaccagggcaacggccagggccacaacaugcccaacgaccccaacagaaacguggacgagaacgccaacgccaacagcgccgugaagaacaacaacaacgaggagcccagcgacaagcacaucaaggaguaccugaacaagauccagaacagccugagcaccgaguggagccccugcagcgugaccugcggcaacggcauccaggugagaaucaagcccggcagcgccaacaagcccaaggacgagcuggacuacgccaacgacaucgagaagaagaucugcaagauggagaagugcugaggacuagucccuguucccagagcccacuuuuuuuucuuuuuuugaaauaaaauagccugucuuucagaucuaaaaaaaaaaaaaaaaaaaaaaaaaaaaaaaaaaaaaaaaaaaaaaaaaaaaaaaaaaaaaaaaugcaucccccccccccccccccccccccccccccccaaaggcucuuuucagagccaccagaauu

SEQ ID NO: 771 - RNA, 1254 nt, Artificial Sequence
  mRNA Design a-1 (A64-N5-C30-hSL-N5) comprising derived and/or modified sequence from Pf(3D7)__XP_001351122.1__Pf-CSP(1-325) (opt4)
aggagagucccgcagucggcguccagcggcucugcuuguucgugugugugucguugcaggccuuauucaagcuuaccaugaugagaaagcuggccauccugagcgugagcagcuuccuguucguggaggcccuguuccaggaguaccagugcuacggcagcagcagcaacaccagagugcugaacgagcugaacuacgacaacgccggcaccaaccuguacaacgagcuggagaugaacuacuacggcaagcaggagaacugguacagccugaagaagaacagcagaagccugggcgagaacgacgacggcaacaacgaggacaacgagaagcugagaaagcccaagcacaagaagcugaagcagcccgccgacggcaaccccgaccccaacgccaaccccaacguggaccccaacgccaaccccaacguggaccccaacgccaaccccaacguggaccccaacgccaaccccaacgccaaccccaacgccaaccccaacgccaaccccaacgccaaccccaacgccaaccccaacgccaaccccaacgccaaccccaacgccaaccccaacgccaaccccaacgccaaccccaacgccaaccccaacgccaaccccaacgccaaccccaacgccaaccccaacgccaaccccaacgccaaccccaacguggaccccaacgccaaccccaacgccaaccccaacgccaaccccaacgccaaccccaacgccaaccccaacgccaaccccaacgccaaccccaacgccaaccccaacgccaaccccaacgccaaccccaacgccaaccccaacgccaaccccaacgccaaccccaacgccaaccccaacgccaaccccaacgccaaccccaacgccaaccccaacgccaaccccaacaagaacaaccagggcaacggccagggccacaacaugcccaacgaccccaacagaaacguggacgagaacgccaacgccaacagcgccgugaagaacaacaacaacgaggagcccagcgacaagcacaucaaggaguaccugaacaagauccagaacugaggacuagucccuguucccagagcccacuuuuuuuucuuuuuuugaaauaaaauagccugucuuucagaucuaaaaaaaaaaaaaaaaaaaaaaaaaaaaaaaaaaaaaaaaaaaaaaaaaaaaaaaaaaaaaaaaugcaucccccccccccccccccccccccccccccccaaaggcucuuuucagagccaccagaauu

SEQ ID NO: 772 - RNA, 1470 nt, Artificial Sequence
  mRNA Design a-1 (A64-N5-C30-hSL-N5) comprising derived and/or modified sequence from Pf(3D7)__XP_001351122.1__HsALB_Pf-CSP(19-397) (opt4)
aggagagucccgcagucggcguccagcggcucugcuuguucgugugugugucguugcaggccuuauucaagcuuaccaugaagugggugaccuucaucagccugcuguuccuguucagcagcgccuacagccuguuccaggaguaccagugcuacggcagcagcagcaacaccagagugcugaacgagcugaacuacgacaacgccggcaccaaccuguacaacgagcuggagaugaacuacuacggcaagcaggagaacugguacagccugaagaagaacagcagaagccugggcgagaacgacgacggcaacaacgaggacaacgagaagcugagaaagcccaagcacaagaagcugaagcagcccgccgacggcaaccccgaccccaacgccaaccccaacguggaccccaacgccaaccccaacguggaccccaacgccaaccccaacguggaccccaacgccaaccccaacgccaaccccaacgccaaccccaacgccaaccccaacgccaaccccaacgccaaccccaacgccaaccccaacgccaaccccaacgccaaccccaacgccaaccccaacgccaaccccaacgccaaccccaacgccaaccccaacgccaaccccaacgccaaccccaacgccaaccccaacgccaaccccaacguggaccccaacgccaaccccaacgccaaccccaacgccaaccccaacgccaaccccaacgccaaccccaacgccaaccccaacgccaaccccaacgccaaccccaacgccaaccccaacgccaaccccaacgccaaccccaacgccaaccccaacgccaaccccaacgccaaccccaacgccaaccccaacgccaaccccaacgccaaccccaacgccaaccccaacaagaacaaccagggcaacggccagggccacaacaugcccaacgaccccaacagaaacguggacgagaacgccaacgccaacagcgccgugaagaacaacaacaacgaggagcccagcgacaagcacaucaaggaguaccugaacaagauccagaacagccugagcaccgaguggagccccugcagcgugaccugcggcaacggcauccaggugagaaucaagcccggcagcgccaacaagcccaaggacgagcuggacuacgccaacgacaucgagaagaagaucugcaagauggagaagugcagcagcguguucaacguggugaacagcagcaucggccugaucauggugcugagcuuccuguuccugaacugaggacuagucccuguucccagagcccacuuuuuuuucuuuuuuugaaauaaaauagccugucuuucagaucuaaaaaaaaaaaaaaaaaaaaaaaaaaaaaaaaaaaaaaaaaaaaaaaaaaaaaaaaaaaaaaaaugcaucccccccccccccccccccccccccccccccaaaggcucuuuucagagccaccagaauu

SEQ ID NO: 773 - RNA, 1488 nt, Artificial Sequence
  mRNA Design a-1 (A64-N5-C30-hSL-N5) comprising derived and/or modified sequence from Pf(3D7)__XP_001351122.1__HsIns-iso1_Pf-CSP(19-397) (opt4)
aggagagucccgcagucggcguccagcggcucugcuuguucgugugugugucguugcaggccuuauucaagcuuaccauggcccuguggaugagacugcugccccugcuggcccugcuggcccuguggggccccgaccccgccgccgcccuguuccaggaguaccagugcuacggcagcagcagcaacaccagagugcugaacgagcugaacuacgacaacgccggcaccaaccuguacaacgagcuggagaugaacuacuacggcaagcaggagaacugguacagccugaagaagaacagcagaagccugggcgagaacgacgacggcaacaacgaggacaacgagaagcugagaaagcccaagcacaagaagcugaagcagcccgccgacggcaaccccgaccccaacgccaaccccaacguggaccccaacgccaaccccaacguggaccccaacgccaaccccaacguggaccccaacgccaaccccaacgccaaccccaacgccaaccccaacgccaaccccaacgccaaccccaacgccaaccccaacgccaaccccaacgccaaccccaacgccaaccccaacgccaaccccaacgccaaccccaacgccaaccccaacgccaaccccaacgccaaccccaacgccaaccccaacgccaaccccaacgccaaccccaacguggaccccaacgccaaccccaacgccaaccccaacgccaaccccaacgccaaccccaacgccaaccccaacgccaaccccaacgccaaccccaacgccaaccccaacgccaaccccaacgccaaccccaacgccaaccccaacgccaaccccaacgccaaccccaacgccaaccccaacgccaaccccaacgccaaccccaacgccaaccccaacgccaaccccaacaagaacaaccagggcaacggccagggccacaacaugcccaacgaccccaacagaaacguggacgagaacgccaacgccaacagcgccgugaagaacaacaacaacgaggagcccagcgacaagcacaucaaggaguaccugaacaagauccagaacagccugagcaccgaguggagccccugcagcgugaccugcggcaacggcauccaggugagaaucaagcccggcagcgccaacaagcccaaggacgagcuggacuacgccaacgacaucgagaagaagaucugcaagauggagaagugcagcagcguguucaacguggugaacagcagcaucggccugaucauggugcugagcuuccuguuccugaacugaggacuagucccuguucccagagcccacuuuuuuuucuuuuuuugaaauaaaauagccugucuuucagaucuaaaaaaaaaaaaaaaaaaaaaaaaaaaaaaaaaaaaaaaaaaaaaaaaaaaaaaaaaaaaaaaaugcaucccccccccccccccccccccccccccccccaaaggcucuuuucagagccaccagaauu

SEQ ID NO: 774 - RNA, 1467 nt, Artificial Sequence
  mRNA Design a-1 (A64-N5-C30-hSL-N5) comprising derived and/or modified sequence from Pf(3D7)__XP_001351122.1__HsSPARC_Pf-CSP(19-397) (opt4)
aggagagucccgcagucggcguccagcggcucugcuuguucgugugugugucguugcaggccuuauucaagcuuaccaugagagccuggaucuucuuccugcugugccuggccggcagagcccuggcccuguuccaggaguaccagugcuacggcagcagcagcaacaccagagugcugaacgagcugaacuacgacaacgccggcaccaaccuguacaacgagcuggagaugaacuacuacggcaagcaggagaacugguacagccugaagaagaacagcagaagccugggcgagaacgacgacggcaacaacgaggacaacgagaagcugagaaagcccaagcacaagaagcugaagcagcccgccgacggcaaccccgaccccaacgccaaccccaacguggaccccaacgccaaccccaacguggaccccaacgccaaccccaacguggaccccaacgccaaccccaacgccaaccccaacgccaaccccaacgccaaccccaacgccaaccccaacgccaaccccaacgccaaccccaacgccaaccccaacgccaaccccaacgccaaccccaacgccaaccccaacgccaaccccaacgccaaccccaacgccaaccccaacgccaaccccaacgccaaccccaacgccaaccccaacguggaccccaacgccaaccccaacgccaaccccaacgccaaccccaacgccaaccccaacgccaaccccaacgccaaccccaacgccaaccccaacgccaaccccaacgccaaccccaacgccaaccccaacgccaaccccaacgccaaccccaacgccaaccccaacgccaaccccaacgccaaccccaacgccaaccccaacgccaaccccaacgccaaccccaacaagaacaaccagggcaacggccagggccacaacaugcccaacgaccccaacagaaacguggacgagaacgccaacgccaacagcgccgugaagaacaacaacaacgaggagcccagcgacaagcacaucaaggaguaccugaacaagauccagaacagccugagcaccgaguggagccccugcagcgugaccugcggcaacggcauccaggugagaaucaagcccggcagcgccaacaagcccaaggacgagcuggacuacgccaacgacaucgagaagaagaucugcaagauggagaagugcagcagcguguucaacguggugaacagcagcaucggccugaucauggugcugagcuuccuguuccugaacugaggacuagucccuguucccagagcccacuuuuuuuucuuuuuuugaaauaaaauagccugucuuucagaucuaaaaaaaaaaaaaaaaaaaaaaaaaaaaaaaaaaaaaaaaaaaaaaaaaaaaaaaaaaaaaaaaugcaucccccccccccccccccccccccccccccccaaaggcucuuuucagagccaccagaauu

SEQ ID NO: 775 - RNA, 1470 nt, Artificial Sequence
  mRNA Design a-1 (A64-N5-C30-hSL-N5) comprising derived and/or modified sequence from Pf(3D7)__XP_001351122.1__IgE_Pf-CSP(19-397) (opt4)
aggagagucccgcagucggcguccagcggcucugcuuguucgugugugugucguugcaggccuuauucaagcuuaccauggacuggaccuggauccuguuccugguggccgccgccaccagagugcacagccuguuccaggaguaccagugcuacggcagcagcagcaacaccagagugcugaacgagcugaacuacgacaacgccggcaccaaccuguacaacgagcuggagaugaacuacuacggcaagcaggagaacugguacagccugaagaagaacagcagaagccugggcgagaacgacgacggcaacaacgaggacaacgagaagcugagaaagcccaagcacaagaagcugaagcagcccgccgacggcaaccccgaccccaacgccaaccccaacguggaccccaacgccaaccccaacguggaccccaacgccaaccccaacguggaccccaacgccaaccccaacgccaaccccaacgccaaccccaacgccaaccccaacgccaaccccaacgccaaccccaacgccaaccccaacgccaaccccaacgccaaccccaacgccaaccccaacgccaaccccaacgccaaccccaacgccaaccccaacgccaaccccaacgccaaccccaacgccaaccccaacgccaaccccaacguggaccccaacgccaaccccaacgccaaccccaacgccaaccccaacgccaaccccaacgccaaccccaacgccaaccccaacgccaaccccaacgccaaccccaacgccaaccccaacgccaaccccaacgccaaccccaacgccaaccccaacgccaaccccaacgccaaccccaacgccaaccccaacgccaaccccaacgccaaccccaacgccaaccccaacaagaacaaccagggcaacggccagggccacaacaugcccaacgaccccaacagaaacguggacgagaacgccaacgccaacagcgccgugaagaacaacaacaacgaggagcccagcgacaagcacaucaaggaguaccugaacaagauccagaacagccugagcaccgaguggagccccugcagcgugaccugcggcaacggcauccaggugagaaucaagcccggcagcgccaacaagcccaaggacgagcuggacuacgccaacgacaucgagaagaagaucugcaagauggagaagugcagcagcguguucaacguggugaacagcagcaucggccugaucauggugcugagcuuccuguuccugaacugaggacuagucccuguucccagagcccacuuuuuuuucuuuuuuugaaauaaaauagccugucuuucagaucuaaaaaaaaaaaaaaaaaaaaaaaaaaaaaaaaaaaaaaaaaaaaaaaaaaaaaaaaaaaaaaaaugcaucccccccccccccccccccccccccccccccaaaggcucuuuucagagccaccagaauu

SEQ ID NO: 776 - RNA, 1635 nt, Artificial Sequence
  mRNA Design a-1 (A64-N5-C30-hSL-N5) comprising derived and/or modified sequence from Pf(3D7)__XP_001351122.1__Pf-CSP_L(G4SG4)_TM domain HA (opt4)
aggagagucccgcagucggcguccagcggcucugcuuguucgugugugugucguugcaggccuuauucaagcuuaccaugaugagaaagcuggccauccugagcgugagcagcuuccuguucguggaggcccuguuccaggaguaccagugcuacggcagcagcagcaacaccagagugcugaacgagcugaacuacgacaacgccggcaccaaccuguacaacgagcuggagaugaacuacuacggcaagcaggagaacugguacagccugaagaagaacagcagaagccugggcgagaacgacgacggcaacaacgaggacaacgagaagcugagaaagcccaagcacaagaagcugaagcagcccgccgacggcaaccccgaccccaacgccaaccccaacguggaccccaacgccaaccccaacguggaccccaacgccaaccccaacguggaccccaacgccaaccccaacgccaaccccaacgccaaccccaacgccaaccccaacgccaaccccaacgccaaccccaacgccaaccccaacgccaaccccaacgccaaccccaacgccaaccccaacgccaaccccaacgccaaccccaacgccaaccccaacgccaaccccaacgccaaccccaacgccaaccccaacgccaaccccaacguggaccccaacgccaaccccaacgccaaccccaacgccaaccccaacgccaaccccaacgccaaccccaacgccaaccccaacgccaaccccaacgccaaccccaacgccaaccccaacgccaaccccaacgccaaccccaacgccaaccccaacgccaaccccaacgccaaccccaacgccaaccccaacgccaaccccaacgccaaccccaacgccaaccccaacaagaacaaccagggcaacggccagggccacaacaugcccaacgaccccaacagaaacguggacgagaacgccaacgccaacagcgccgugaagaacaacaacaacgaggagcccagcgacaagcacaucaaggaguaccugaacaagauccagaacagccugagcaccgaguggagccccugcagcgugaccugcggcaacggcauccaggugagaaucaagcccggcagcgccaacaagcccaaggacgagcuggacuacgccaacgacaucgagaagaagaucugcaagauggagaagugcagcagcguguucaacguggugaacagcagcaucggccugaucauggugcugagcuuccuguuccugaacggcggcggcggcagcggcggcggcggcaagcuggagagcaccagaaucuaccagauccuggccaucuacagcaccguggccagcagccuggugcugguggugagccugggcgccaucagcuucuggaugugcagcaacggcagccugcagugcagaaucugcaucugaggacuagucccuguucccagagcccacuuuuuuuucuuuuuuugaaauaaaauagccugucuuucagaucuaaaaaaaaaaaaaaaaaaaaaaaaaaaaaaaaaaaaaaaaaaaaaaaaaaaaaaaaaaaaaaaaugcaucccccccccccccccccccccccccccccccaaaggcucuuuucagagccaccagaauu

SEQ ID NO: 777 - RNA, 1509 nt, Artificial Sequence
  mRNA Design a-1 (A64-N5-C30-hSL-N5) comprising derived and/or modified sequence from Pf(3D7)__XP_001351122.1__Pf-CSP(199-377)_L(PVTN)_HBsAg (opt4)
aggagagucccgcagucggcguccagcggcucugcuuguucgugugugugucguugcaggccuuauucaagcuuaccauggaccccaacgccaaccccaacgccaaccccaacgccaaccccaacgccaaccccaacgccaaccccaacgccaaccccaacgccaaccccaacgccaaccccaacgccaaccccaacgccaaccccaacgccaaccccaacgccaaccccaacgccaaccccaacgccaaccccaacgccaaccccaacgccaaccccaacgccaaccccaacgccaaccccaacaagaacaaccagggcaacggccagggccacaacaugcccaacgaccccaacagaaacguggacgagaacgccaacgccaacagcgccgugaagaacaacaacaacgaggagcccagcgacaagcacaucaaggaguaccugaacaagauccagaacagccugagcaccgaguggagccccugcagcgugaccugcggcaacggcauccaggugagaaucaagcccggcagcgccaacaagcccaaggacgagcuggacuacgccaacgacaucgagaagaagaucugcaagauggagaagugcagcagcgugcccgugaccaacauggagaacaucaccagcggcuuccugggcccccugcuggugcugcaggccggcuucuuccugcugaccagaauccugaccaucccccagagccuggacagcugguggaccagccugaacuuccugggcggcagccccgugugccugggccagaacagccagagccccaccagcaaccacagccccaccagcugcccccccaucugccccggcuacagauggaugugccugagaagauucaucaucuuccuguucauccugcugcugugccugaucuuccugcuggugcugcuggacuaccagggcaugcugcccgugugcccccugauccccggcagcaccaccaccaacaccggccccugcaagaccugcaccacccccgcccagggcaacagcauguuccccagcugcugcugcaccaagcccaccgacggcaacugcaccugcauccccauccccagcagcugggccuucgccaaguaccugugggagugggccagcgugagauucagcuggcugagccugcuggugcccuucgugcagugguucgugggccugagccccaccguguggcugagcgccaucuggaugaugugguacuggggccccagccuguacagcaucgugagccccuucaucccccugcugcccaucuucuucugccuguggguguacaucugaggacuagucccuguucccagagcccacuuuuuuuucuuuuuuugaaauaaaauagccugucuuucagaucuaaaaaaaaaaaaaaaaaaaaaaaaaaaaaaaaaaaaaaaaaaaaaaaaaaaaaaaaaaaaaaaaugcaucccccccccccccccccccccccccccccccaaaggcucuuuucagagccaccagaauu

SEQ ID NO: 778 - RNA, 1551 nt, Artificial Sequence
  mRNA Design a-1 (A64-N5-C30-hSL-N5) comprising derived and/or modified sequence from Pf(3D7)__XP_001351122.1__Pf-CSP(199-387)_L(PVTN)_HBsAg (opt4)
aggagagucccgcagucggcguccagcggcucugcuuguucgugugugugucguugcaggccuuauucaagcuuaccaugauggcccccgaccccaacgccaaccccaacgccaaccccaacgccaaccccaacgccaaccccaacgccaaccccaacgccaaccccaacgccaaccccaacgccaaccccaacgccaaccccaacgccaaccccaacgccaaccccaacgccaaccccaacgccaaccccaacgccaaccccaacgccaaccccaacgccaaccccaacgccaaccccaacgccaaccccaacaagaacaaccagggcaacggccagggccacaacaugcccaacgaccccaacagaaacguggacgagaacgccaacgccaacagcgccgugaagaacaacaacaacgaggagcccagcgacaagcacaucaaggaguaccugaacaagauccagaacagccugagcaccgaguggagccccugcagcgugaccugcggcaacggcauccaggugagaaucaagcccggcagcgccaacaagcccaaggacgagcuggacuacgccaacgacaucgagaagaagaucugcaagauggagaagugcagcagcguguucaacguggugaacagcagcaucggccugggccccgugaccaacauggagaacaucaccagcggcuuccugggcccccugcuggugcugcaggccggcuucuuccugcugaccagaauccugaccaucccccagagccuggacagcugguggaccagccugaacuuccugggcggcagccccgugugccugggccagaacagccagagccccaccagcaaccacagccccaccagcugcccccccaucugccccggcuacagauggaugugccugagaagauucaucaucuuccuguucauccugcugcugugccugaucuuccugcuggugcugcuggacuaccagggcaugcugcccgugugcccccugauccccggcagcaccaccaccaacaccggccccugcaagaccugcaccacccccgcccagggcaacagcauguuccccagcugcugcugcaccaagcccaccgacggcaacugcaccugcauccccauccccagcagcugggccuucgccaaguaccugugggagugggccagcgugagauucagcuggcugagccugcuggugcccuucgugcagugguucgugggccugagccccaccguguggcugagcgccaucuggaugaugugguacuggggccccagccuguacagcaucgugagccccuucaucccccugcugcccaucuucuucugccuguggguguacaucugaggacuagucccuguucccagagcccacuuuuuuuucuuuuuuugaaauaaaauagccugucuuucagaucuaaaaaaaaaaaaaaaaaaaaaaaaaaaaaaaaaaaaaaaaaaaaaaaaaaaaaaaaaaaaaaaaugcaucccccccccccccccccccccccccccccccaaaggcucuuuucagagccaccagaauu

SEQ ID NO: 779 - RNA, 735 nt, Artificial Sequence
  mRNA Design a-1 (A64-N5-C30-hSL-N5) comprising derived and/or modified sequence from Pf(3D7)__XP_001351122.1__HsALB_Pf-CSP(19-152) (opt4)
aggagagucccgcagucggcguccagcggcucugcuuguucgugugugugucguugcaggccuuauucaagcuuaccaugaagugggugaccuucaucagccugcuguuccuguucagcagcgccuacagccuguuccaggaguaccagugcuacggcagcagcagcaacaccagagugcugaacgagcugaacuacgacaacgccggcaccaaccuguacaacgagcuggagaugaacuacuacggcaagcaggagaacugguacagccugaagaagaacagcagaagccugggcgagaacgacgacggcaacaacgaggacaacgagaagcugagaaagcccaagcacaagaagcugaagcagcccgccgacggcaaccccgaccccaacgccaaccccaacguggaccccaacgccaaccccaacguggaccccaacgccaaccccaacguggaccccaacgccaaccccaacgccaaccccaacgccaaccccaacgccaaccccaacgccaaccccaacgccaaccccugaggacuagucccuguucccagagcccacuuuuuuuucuuuuuuugaaauaaaauagccugucuuucagaucuaaaaaaaaaaaaaaaaaaaaaaaaaaaaaaaaaaaaaaaaaaaaaaaaaaaaaaaaaaaaaaaaugcaucccccccccccccccccccccccccccccccaaaggcucuuuucagagccaccagaauu

SEQ ID NO: 780 - RNA, 855 nt, Artificial Sequence
  mRNA Design a-1 (A64-N5-C30-hSL-N5) comprising derived and/or modified sequence from Pf(3D7)__XP_001351122.1__HsALB_Pf-CSP(19-192) (opt4)
aggagagucccgcagucggcguccagcggcucugcuuguucgugugugugucguugcaggccuuauucaagcuuaccaugaagugggugaccuucaucagccugcuguuccuguucagcagcgccuacagccuguuccaggaguaccagugcuacggcagcagcagcaacaccagagugcugaacgagcugaacuacgacaacgccggcaccaaccuguacaacgagcuggagaugaacuacuacggcaagcaggagaacugguacagccugaagaagaacagcagaagccugggcgagaacgacgacggcaacaacgaggacaacgagaagcugagaaagcccaagcacaagaagcugaagcagcccgccgacggcaaccccgaccccaacgccaaccccaacguggaccccaacgccaaccccaacguggaccccaacgccaaccccaacguggaccccaacgccaaccccaacgccaaccccaacgccaaccccaacgccaaccccaacgccaaccccaacgccaaccccaacgccaaccccaacgccaaccccaacgccaaccccaacgccaaccccaacgccaaccccaacgccaaccccaacgccaaccccaacgccaaccccaacgccaaccccaacgccaaccccugaggacuagucccuguucccagagcccacuuuuuuuucuuuuuuugaaauaaaauagccugucuuucagaucuaaaaaaaaaaaaaaaaaaaaaaaaaaaaaaaaaaaaaaaaaaaaaaaaaaaaaaaaaaaaaaaaugcaucccccccccccccccccccccccccccccccaaaggcucuuuucagagccaccagaauu

SEQ ID NO: 781 - RNA, 1095 nt, Artificial Sequence
  mRNA Design a-1 (A64-N5-C30-hSL-N5) comprising derived and/or modified sequence from Pf(3D7)__XP_001351122.1__HsALB_Pf-CSP(19-272) (opt4)
aggagagucccgcagucggcguccagcggcucugcuuguucgugugugugucguugcaggccuuauucaagcuuaccaugaagugggugaccuucaucagccugcuguuccuguucagcagcgccuacagccuguuccaggaguaccagugcuacggcagcagcagcaacaccagagugcugaacgagcugaacuacgacaacgccggcaccaaccuguacaacgagcuggagaugaacuacuacggcaagcaggagaacugguacagccugaagaagaacagcagaagccugggcgagaacgacgacggcaacaacgaggacaacgagaagcugagaaagcccaagcacaagaagcugaagcagcccgccgacggcaaccccgaccccaacgccaaccccaacguggaccccaacgccaaccccaacguggaccccaacgccaaccccaacguggaccccaacgccaaccccaacgccaaccccaacgccaaccccaacgccaaccccaacgccaaccccaacgccaaccccaacgccaaccccaacgccaaccccaacgccaaccccaacgccaaccccaacgccaaccccaacgccaaccccaacgccaaccccaacgccaaccccaacgccaaccccaacgccaaccccaacgccaaccccaacguggaccccaacgccaaccccaacgccaaccccaacgccaaccccaacgccaaccccaacgccaaccccaacgccaaccccaacgccaaccccaacgccaaccccaacgccaaccccaacgccaaccccaacgccaaccccaacgccaaccccaacgccaaccccaacgccaaccccaacgccaaccccaacgccaaccccaacgccaaccccaacgccaaccccugaggacuagucccuguucccagagcccacuuuuuuuucuuuuuuugaaauaaaauagccugucuuucagaucuaaaaaaaaaaaaaaaaaaaaaaaaaaaaaaaaaaaaaaaaaaaaaaaaaaaaaaaaaaaaaaaaugcaucccccccccccccccccccccccccccccccaaaggcucuuuucagagccaccagaauu

SEQ ID NO: 782 - RNA, 1257 nt, Artificial Sequence
  mRNA Design a-1 (A64-N5-C30-hSL-N5) comprising derived and/or modified sequence from Pf(3D7)__XP_001351122.1__HsALB_Pf-CSP(19-272)_L(AAY)_Pf-CSP(310-3 27)_L(AAY)_Pf-CSP(346-375) (opt4)
aggagagucccgcagucggcguccagcggcucugcuuguucgugugugugucguugcaggccuuauucaagcuuaccaugaagugggugaccuucaucagccugcuguuccuguucagcagcgccuacagccuguuccaggaguaccagugcuacggcagcagcagcaacaccagagugcugaacgagcugaacuacgacaacgccggcaccaaccuguacaacgagcuggagaugaacuacuacggcaagcaggagaacugguacagccugaagaagaacagcagaagccugggcgagaacgacgacggcaacaacgaggacaacgagaagcugagaaagcccaagcacaagaagcugaagcagcccgccgacggcaaccccgaccccaacgccaaccccaacguggaccccaacgccaaccccaacguggaccccaacgccaaccccaacguggaccccaacgccaaccccaacgccaaccccaacgccaaccccaacgccaaccccaacgccaaccccaacgccaaccccaacgccaaccccaacgccaaccccaacgccaaccccaacgccaaccccaacgccaaccccaacgccaaccccaacgccaaccccaacgccaaccccaacgccaaccccaacgccaaccccaacgccaaccccaacguggaccccaacgccaaccccaacgccaaccccaacgccaaccccaacgccaaccccaacgccaaccccaacgccaaccccaacgccaaccccaacgccaaccccaacgccaaccccaacgccaaccccaacgccaaccccaacgccaaccccaacgccaaccccaacgccaaccccaacgccaaccccaacgccaaccccaacgccaaccccaacgccaaccccgccgccuacgagcccagcgacaagcacaucaaggaguaccugaacaagauccagaacagccuggccgccuacaucaagcccggcagcgccaacaagcccaaggacgagcuggacuacgccaacgacaucgagaagaagaucugcaagauggagaagugcagcugaggacuagucccuguucccagagcccacuuuuuuuucuuuuuuugaaauaaaauagccugucuuucagaucuaaaaaaaaaaaaaaaaaaaaaaaaaaaaaaaaaaaaaaaaaaaaaaaaaaaaaaaaaaaaaaaaugcaucccccccccccccccccccccccccccccccaaaggcucuuuucagagccaccagaauu

SEQ ID NO: 783 - RNA, 1218 nt, Artificial Sequence
  mRNA Design a-1 (A64-N5-C30-hSL-N5) comprising derived and/or modified sequence from Pf(3D7)__XP_001351122.1__HsALB_Pf-CSP(19-272)_L(AAY)_Pf-CSP(346-3 65)_L(AAY)_P2 (opt4)
aggagagucccgcagucggcguccagcggcucugcuuguucgugugugugucguugcaggccuuauucaagcuuaccaugaagugggugaccuucaucagccugcuguuccuguucagcagcgccuacagccuguuccaggaguaccagugcuacggcagcagcagcaacaccagagugcugaacgagcugaacuacgacaacgccggcaccaaccuguacaacgagcuggagaugaacuacuacggcaagcaggagaacugguacagccugaagaagaacagcagaagccugggcgagaacgacgacggcaacaacgaggacaacgagaagcugagaaagcccaagcacaagaagcugaagcagcccgccgacggcaaccccgaccccaacgccaaccccaacguggaccccaacgccaaccccaacguggaccccaacgccaaccccaacguggaccccaacgccaaccccaacgccaaccccaacgccaaccccaacgccaaccccaacgccaaccccaacgccaaccccaacgccaaccccaacgccaaccccaacgccaaccccaacgccaaccccaacgccaaccccaacgccaaccccaacgccaaccccaacgccaaccccaacgccaaccccaacgccaaccccaacgccaaccccaacguggaccccaacgccaaccccaacgccaaccccaacgccaaccccaacgccaaccccaacgccaaccccaacgccaaccccaacgccaaccccaacgccaaccccaacgccaaccccaacgccaaccccaacgccaaccccaacgccaaccccaacgccaaccccaacgccaaccccaacgccaaccccaacgccaaccccaacgccaaccccaacgccaaccccgccgccuacaucaagcccggcagcgccaacaagcccaaggacgagcuggacuacgccaacgacaucgaggccgccuaccaguacaucaaggccaacagcaaguucaucggcaucaccgagcugugaggacuagucccuguucccagagcccacuuuuuuuucuuuuuuugaaauaaaauagccugucuuucagaucuaaaaaaaaaaaaaaaaaaaaaaaaaaaaaaaaaaaaaaaaaaaaaaaaaaaaaaaaaaaaaaaaugcaucccccccccccccccccccccccccccccccaaaggcucuuuucagagccaccagaauu

SEQ ID NO: 784 - RNA, 1212 nt, Artificial Sequence
  mRNA Design a-1 (A64-N5-C30-hSL-N5) comprising derived and/or modified sequence from Pf(3D7)__XP_001351122.1__HsALB_Pf-CSP(19-272)_L(AAY)_Pf-CSP(346-3 65)_L(AAY)_PADRE (opt4)
aggagagucccgcagucggcguccagcggcucugcuuguucgugugugugucguugcaggccuuauucaagcuuaccaugaagugggugaccuucaucagccugcuguuccuguucagcagcgccuacagccuguuccaggaguaccagugcuacggcagcagcagcaacaccagagugcugaacgagcugaacuacgacaacgccggcaccaaccuguacaacgagcuggagaugaacuacuacggcaagcaggagaacugguacagccugaagaagaacagcagaagccugggcgagaacgacgacggcaacaacgaggacaacgagaagcugagaaagcccaagcacaagaagcugaagcagcccgccgacggcaaccccgaccccaacgccaaccccaacguggaccccaacgccaaccccaacguggaccccaacgccaaccccaacguggaccccaacgccaaccccaacgccaaccccaacgccaaccccaacgccaaccccaacgccaaccccaacgccaaccccaacgccaaccccaacgccaaccccaacgccaaccccaacgccaaccccaacgccaaccccaacgccaaccccaacgccaaccccaacgccaaccccaacgccaaccccaacgccaaccccaacgccaaccccaacguggaccccaacgccaaccccaacgccaaccccaacgccaaccccaacgccaaccccaacgccaaccccaacgccaaccccaacgccaaccccaacgccaaccccaacgccaaccccaacgccaaccccaacgccaaccccaacgccaaccccaacgccaaccccaacgccaaccccaacgccaaccccaacgccaaccccaacgccaaccccaacgccaaccccgccgccuacaucaagcccggcagcgccaacaagcccaaggacgagcuggacuacgccaacgacaucgaggccgccuacgccaaguucguggccgccuggacccugaaggccgccgccugaggacuagucccuguucccagagcccacuuuuuuuucuuuuuuugaaauaaaauagccugucuuucagaucuaaaaaaaaaaaaaaaaaaaaaaaaaaaaaaaaaaaaaaaaaaaaaaaaaaaaaaaaaaaaaaaaugcaucccccccccccccccccccccccccccccccaaaggcucuuuucagagccaccagaauu

SEQ ID NO: 785 - RNA, 1269 nt, Artificial Sequence
  mRNA Design a-1 (A64-N5-C30-hSL-N5) comprising derived and/or modified sequence from Pf(3D7)__XP_001351122.1__HsALB_Pf-CSP(19-272)_L(G4S)_Pf-CSP(310-3 27)_L(G4S)_Pf-CSP(346-375) (opt4)
aggagagucccgcagucggcguccagcggcucugcuuguucgugugugugucguugcaggccuuauucaagcuuaccaugaagugggugaccuucaucagccugcuguuccuguucagcagcgccuacagccuguuccaggaguaccagugcuacggcagcagcagcaacaccagagugcugaacgagcugaacuacgacaacgccggcaccaaccuguacaacgagcuggagaugaacuacuacggcaagcaggagaacugguacagccugaagaagaacagcagaagccugggcgagaacgacgacggcaacaacgaggacaacgagaagcugagaaagcccaagcacaagaagcugaagcagcccgccgacggcaaccccgaccccaacgccaaccccaacguggaccccaacgccaaccccaacguggaccccaacgccaaccccaacguggaccccaacgccaaccccaacgccaaccccaacgccaaccccaacgccaaccccaacgccaaccccaacgccaaccccaacgccaaccccaacgccaaccccaacgccaaccccaacgccaaccccaacgccaaccccaacgccaaccccaacgccaaccccaacgccaaccccaacgccaaccccaacgccaaccccaacgccaaccccaacguggaccccaacgccaaccccaacgccaaccccaacgccaaccccaacgccaaccccaacgccaaccccaacgccaaccccaacgccaaccccaacgccaaccccaacgccaaccccaacgccaaccccaacgccaaccccaacgccaaccccaacgccaaccccaacgccaaccccaacgccaaccccaacgccaaccccaacgccaaccccaacgccaaccccggcggcggcggcagcgagcccagcgacaagcacaucaaggaguaccugaacaagauccagaacagccugggcggcggcggcagcaucaagcccggcagcgccaacaagcccaaggacgagcuggacuacgccaacgacaucgagaagaagaucugcaagauggagaagugcagcugaggacuagucccuguucccagagcccacuuuuuuuucuuuuuuugaaauaaaauagccugucuuucagaucuaaaaaaaaaaaaaaaaaaaaaaaaaaaaaaaaaaaaaaaaaaaaaaaaaaaaaaaaaaaaaaaaugcaucccccccccccccccccccccccccccccccaaaggcucuuuucagagccaccagaauu

SEQ ID NO: 786 - RNA, 1254 nt, Artificial Sequence
  mRNA Design a-1 (A64-N5-C30-hSL-N5) comprising derived and/or modified sequence from Pf(3D7)__XP_001351122.1__HsALB_Pf-CSP(19-272)_L(G4S)_Pf-CSP(310-3 27)_Pf-CSP(346-375) (opt4)
aggagagucccgcagucggcguccagcggcucugcuuguucgugugugugucguugcaggccuuauucaagcuuaccaugaagugggugaccuucaucagccugcuguuccuguucagcagcgccuacagccuguuccaggaguaccagugcuacggcagcagcagcaacaccagagugcugaacgagcugaacuacgacaacgccggcaccaaccuguacaacgagcuggagaugaacuacuacggcaagcaggagaacugguacagccugaagaagaacagcagaagccugggcgagaacgacgacggcaacaacgaggacaacgagaagcugagaaagcccaagcacaagaagcugaagcagcccgccgacggcaaccccgaccccaacgccaaccccaacguggaccccaacgccaaccccaacguggaccccaacgccaaccccaacguggaccccaacgccaaccccaacgccaaccccaacgccaaccccaacgccaaccccaacgccaaccccaacgccaaccccaacgccaaccccaacgccaaccccaacgccaaccccaacgccaaccccaacgccaaccccaacgccaaccccaacgccaaccccaacgccaaccccaacgccaaccccaacgccaaccccaacgccaaccccaacguggaccccaacgccaaccccaacgccaaccccaacgccaaccccaacgccaaccccaacgccaaccccaacgccaaccccaacgccaaccccaacgccaaccccaacgccaaccccaacgccaaccccaacgccaaccccaacgccaaccccaacgccaaccccaacgccaaccccaacgccaaccccaacgccaaccccaacgccaaccccaacgccaaccccggcggcggcggcagcgagcccagcgacaagcacaucaaggaguaccugaacaagauccagaacagccugaucaagcccggcagcgccaacaagcccaaggacgagcuggacuacgccaacgacaucgagaagaagaucugcaagauggagaagugcagcugaggacuagucccuguucccagagcccacuuuuuuuucuuuuuuugaaauaaaauagccugucuuucagaucuaaaaaaaaaaaaaaaaaaaaaaaaaaaaaaaaaaaaaaaaaaaaaaaaaaaaaaaaaaaaaaaaugcaucccccccccccccccccccccccccccccccaaaggcucuuuucagagccaccagaauu

SEQ ID NO: 787 - RNA, 1254 nt, Artificial Sequence
  mRNA Design a-1 (A64-N5-C30-hSL-N5) comprising derived and/or modified sequence from Pf(3D7)__XP_001351122.1__HsALB_Pf-CSP(19-325) (opt4)
aggagagucccgcagucggcguccagcggcucugcuuguucgugugugugucguugcaggccuuauucaagcuuaccaugaagugggugaccuucaucagccugcuguuccuguucagcagcgccuacagccuguuccaggaguaccagugcuacggcagcagcagcaacaccagagugcugaacgagcugaacuacgacaacgccggcaccaaccuguacaacgagcuggagaugaacuacuacggcaagcaggagaacugguacagccugaagaagaacagcagaagccugggcgagaacgacgacggcaacaacgaggacaacgagaagcugagaaagcccaagcacaagaagcugaagcagcccgccgacggcaaccccgaccccaacgccaaccccaacguggaccccaacgccaaccccaacguggaccccaacgccaaccccaacguggaccccaacgccaaccccaacgccaaccccaacgccaaccccaacgccaaccccaacgccaaccccaacgccaaccccaacgccaaccccaacgccaaccccaacgccaaccccaacgccaaccccaacgccaaccccaacgccaaccccaacgccaaccccaacgccaaccccaacgccaaccccaacgccaaccccaacgccaaccccaacguggaccccaacgccaaccccaacgccaaccccaacgccaaccccaacgccaaccccaacgccaaccccaacgccaaccccaacgccaaccccaacgccaaccccaacgccaaccccaacgccaaccccaacgccaaccccaacgccaaccccaacgccaaccccaacgccaaccccaacgccaaccccaacgccaaccccaacgccaaccccaacgccaaccccaacaagaacaaccagggcaacggccagggccacaacaugcccaacgaccccaacagaaacguggacgagaacgccaacgccaacagcgccgugaagaacaacaacaacgaggagcccagcgacaagcacaucaaggaguaccugaacaagauccagaacugaggacuagucccuguucccagagcccacuuuuuuuucuuuuuuugaaauaaaauagccugucuuucagaucuaaaaaaaaaaaaaaaaaaaaaaaaaaaaaaaaaaaaaaaaaaaaaaaaaaaaaaaaaaaaaaaaugcaucccccccccccccccccccccccccccccccaaaggcucuuuucagagccaccagaauu

SEQ ID NO: 788 - RNA, 1431 nt, Artificial Sequence
  mRNA Design a-1 (A64-N5-C30-hSL-N5) comprising derived and/or modified sequence from Pf(3D7)__XP_001351122.1__HsALB_Pf-CSP(19-384) (opt4)
aggagagucccgcagucggcguccagcggcucugcuuguucgugugugugucguugcaggccuuauucaagcuuaccaugaagugggugaccuucaucagccugcuguuccuguucagcagcgccuacagccuguuccaggaguaccagugcuacggcagcagcagcaacaccagagugcugaacgagcugaacuacgacaacgccggcaccaaccuguacaacgagcuggagaugaacuacuacggcaagcaggagaacugguacagccugaagaagaacagcagaagccugggcgagaacgacgacggcaacaacgaggacaacgagaagcugagaaagcccaagcacaagaagcugaagcagcccgccgacggcaaccccgaccccaacgccaaccccaacguggaccccaacgccaaccccaacguggaccccaacgccaaccccaacguggaccccaacgccaaccccaacgccaaccccaacgccaaccccaacgccaaccccaacgccaaccccaacgccaaccccaacgccaaccccaacgccaaccccaacgccaaccccaacgccaaccccaacgccaaccccaacgccaaccccaacgccaaccccaacgccaaccccaacgccaaccccaacgccaaccccaacgccaaccccaacguggaccccaacgccaaccccaacgccaaccccaacgccaaccccaacgccaaccccaacgccaaccccaacgccaaccccaacgccaaccccaacgccaaccccaacgccaaccccaacgccaaccccaacgccaaccccaacgccaaccccaacgccaaccccaacgccaaccccaacgccaaccccaacgccaaccccaacgccaaccccaacgccaaccccaacaagaacaaccagggcaacggccagggccacaacaugcccaacgaccccaacagaaacguggacgagaacgccaacgccaacagcgccgugaagaacaacaacaacgaggagcccagcgacaagcacaucaaggaguaccugaacaagauccagaacagccugagcaccgaguggagccccugcagcgugaccugcggcaacggcauccaggugagaaucaagcccggcagcgccaacaagcccaaggacgagcuggacuacgccaacgacaucgagaagaagaucugcaagauggagaagugcagcagcguguucaacguggugaacagcagcugaggacuagucccuguucccagagcccacuuuuuuuucuuuuuuugaaauaaaauagccugucuuucagaucuaaaaaaaaaaaaaaaaaaaaaaaaaaaaaaaaaaaaaaaaaaaaaaaaaaaaaaaaaaaaaaaaugcaucccccccccccccccccccccccccccccccaaaggcucuuuucagagccaccagaauu

SEQ ID NO: 789 - RNA, 1569 nt, Artificial Sequence
  mRNA Design a-1 (A64-N5-C30-hSL-N5) comprising derived and/or modified sequence from Pf(3D7)__XP_001351122.1__HsALB_Pf-CSP(19-384)_TM domain HA (opt4)
aggagagucccgcagucggcguccagcggcucugcuuguucgugugugugucguugcaggccuuauucaagcuuaccaugaagugggugaccuucaucagccugcuguuccuguucagcagcgccuacagccuguuccaggaguaccagugcuacggcagcagcagcaacaccagagugcugaacgagcugaacuacgacaacgccggcaccaaccuguacaacgagcuggagaugaacuacuacggcaagcaggagaacugguacagccugaagaagaacagcagaagccugggcgagaacgacgacggcaacaacgaggacaacgagaagcugagaaagcccaagcacaagaagcugaagcagcccgccgacggcaaccccgaccccaacgccaaccccaacguggaccccaacgccaaccccaacguggaccccaacgccaaccccaacguggaccccaacgccaaccccaacgccaaccccaacgccaaccccaacgccaaccccaacgccaaccccaacgccaaccccaacgccaaccccaacgccaaccccaacgccaaccccaacgccaaccccaacgccaaccccaacgccaaccccaacgccaaccccaacgccaaccccaacgccaaccccaacgccaaccccaacgccaaccccaacguggaccccaacgccaaccccaacgccaaccccaacgccaaccccaacgccaaccccaacgccaaccccaacgccaaccccaacgccaaccccaacgccaaccccaacgccaaccccaacgccaaccccaacgccaaccccaacgccaaccccaacgccaaccccaacgccaaccccaacgccaaccccaacgccaaccccaacgccaaccccaacgccaaccccaacaagaacaaccagggcaacggccagggccacaacaugcccaacgaccccaacagaaacguggacgagaacgccaacgccaacagcgccgugaagaacaacaacaacgaggagcccagcgacaagcacaucaaggaguaccugaacaagauccagaacagccugagcaccgaguggagccccugcagcgugaccugcggcaacggcauccaggugagaaucaagcccggcagcgccaacaagcccaaggacgagcuggacuacgccaacgacaucgagaagaagaucugcaagauggagaagugcagcagcguguucaacguggugaacagcagcaagcuggagagcaccagaaucuaccagauccuggccaucuacagcaccguggccagcagccuggugcugguggugagccugggcgccaucagcuucuggaugugcagcaacggcagccugcagugcagaaucugcaucugaggacuagucccuguucccagagcccacuuuuuuuucuuuuuuugaaauaaaauagccugucuuucagaucuaaaaaaaaaaaaaaaaaaaaaaaaaaaaaaaaaaaaaaaaaaaaaaaaaaaaaaaaaaaaaaaaugcaucccccccccccccccccccccccccccccccaaaggcucuuuucagagccaccagaauu

SEQ ID NO: 790 - RNA, 1281 nt, Artificial Sequence
  mRNA Design a-1 (A64-N5-C30-hSL-N5) comprising derived and/or modified sequence from Pf(3D7)__XP_001351122.1__HsALB_Pf-CSP(82-397) (opt4)
aggagagucccgcagucggcguccagcggcucugcuuguucgugugugugucguugcaggccuuauucaagcuuaccaugaagugggugaccuucaucagccugcuguuccuguucagcagcgccuacagcgacaacgagaagcugagaaagcccaagcacaagaagcugaagcagcccgccgacggcaaccccgaccccaacgccaaccccaacguggaccccaacgccaaccccaacguggaccccaacgccaaccccaacguggaccccaacgccaaccccaacgccaaccccaacgccaaccccaacgccaaccccaacgccaaccccaacgccaaccccaacgccaaccccaacgccaaccccaacgccaaccccaacgccaaccccaacgccaaccccaacgccaaccccaacgccaaccccaacgccaaccccaacgccaaccccaacgccaaccccaacgccaaccccaacguggaccccaacgccaaccccaacgccaaccccaacgccaaccccaacgccaaccccaacgccaaccccaacgccaaccccaacgccaaccccaacgccaaccccaacgccaaccccaacgccaaccccaacgccaaccccaacgccaaccccaacgccaaccccaacgccaaccccaacgccaaccccaacgccaaccccaacgccaaccccaacgccaaccccaacaagaacaaccagggcaacggccagggccacaacaugcccaacgaccccaacagaaacguggacgagaacgccaacgccaacagcgccgugaagaacaacaacaacgaggagcccagcgacaagcacaucaaggaguaccugaacaagauccagaacagccugagcaccgaguggagccccugcagcgugaccugcggcaacggcauccaggugagaaucaagcccggcagcgccaacaagcccaaggacgagcuggacuacgccaacgacaucgagaagaagaucugcaagauggagaagugcagcagcguguucaacguggugaacagcagcaucggccugaucauggugcugagcuuccuguuccugaacugaggacuagucccuguucccagagcccacuuuuuuuucuuuuuuugaaauaaaauagccugucuuucagaucuaaaaaaaaaaaaaaaaaaaaaaaaaaaaaaaaaaaaaaaaaaaaaaaaaaaaaaaaaaaaaaaaugcaucccccccccccccccccccccccccccccccaaaggcucuuuucagagccaccagaauu

SEQ ID NO: 791 - RNA, 633 nt, Artificial Sequence
  mRNA Design a-1 (A64-N5-C30-hSL-N5) comprising derived and/or modified sequence from Pf(3D7)__XP_001351122.1__HsALB_Pf-CSP(93-192) (opt4)
aggagagucccgcagucggcguccagcggcucugcuuguucgugugugugucguugcaggccuuauucaagcuuaccaugaagugggugaccuucaucagccugcuguuccuguucagcagcgccuacagcaagcugaagcagcccgccgacggcaaccccgaccccaacgccaaccccaacguggaccccaacgccaaccccaacguggaccccaacgccaaccccaacguggaccccaacgccaaccccaacgccaaccccaacgccaaccccaacgccaaccccaacgccaaccccaacgccaaccccaacgccaaccccaacgccaaccccaacgccaaccccaacgccaaccccaacgccaaccccaacgccaaccccaacgccaaccccaacgccaaccccaacgccaaccccaacgccaaccccugaggacuagucccuguucccagagcccacuuuuuuuucuuuuuuugaaauaaaauagccugucuuucagaucuaaaaaaaaaaaaaaaaaaaaaaaaaaaaaaaaaaaaaaaaaaaaaaaaaaaaaaaaaaaaaaaaugcaucccccccccccccccccccccccccccccccaaaggcucuuuucagagccaccagaauu

SEQ ID NO: 792 - RNA, 873 nt, Artificial Sequence
  mRNA Design a-1 (A64-N5-C30-hSL-N5) comprising derived and/or modified sequence from Pf(3D7)__XP_001351122.1__HsALB_Pf-CSP(93-272) (opt4)
aggagagucccgcagucggcguccagcggcucugcuuguucgugugugugucguugcaggccuuauucaagcuuaccaugaagugggugaccuucaucagccugcuguuccuguucagcagcgccuacagcaagcugaagcagcccgccgacggcaaccccgaccccaacgccaaccccaacguggaccccaacgccaaccccaacguggaccccaacgccaaccccaacguggaccccaacgccaaccccaacgccaaccccaacgccaaccccaacgccaaccccaacgccaaccccaacgccaaccccaacgccaaccccaacgccaaccccaacgccaaccccaacgccaaccccaacgccaaccccaacgccaaccccaacgccaaccccaacgccaaccccaacgccaaccccaacgccaaccccaacgccaaccccaacguggaccccaacgccaaccccaacgccaaccccaacgccaaccccaacgccaaccccaacgccaaccccaacgccaaccccaacgccaaccccaacgccaaccccaacgccaaccccaacgccaaccccaacgccaaccccaacgccaaccccaacgccaaccccaacgccaaccccaacgccaaccccaacgccaaccccaacgccaaccccaacgccaaccccugaggacuagucccuguucccagagcccacuuuuuuuucuuuuuuugaaauaaaauagccugucuuucagaucuaaaaaaaaaaaaaaaaaaaaaaaaaaaaaaaaaaaaaaaaaaaaaaaaaaaaaaaaaaaaaaaaugcaucccccccccccccccccccccccccccccccaaaggcucuuuucagagccaccagaauu

SEQ ID NO: 793 - RNA, 1248 nt, Artificial Sequence
  mRNA Design a-1 (A64-N5-C30-hSL-N5) comprising derived and/or modified sequence from Pf(3D7)__XP_001351122.1__HsALB_Pf-CSP(93-397) (opt4)
aggagagucccgcagucggcguccagcggcucugcuuguucgugugugugucguugcaggccuuauucaagcuuaccaugaagugggugaccuucaucagccugcuguuccuguucagcagcgccuacagcaagcugaagcagcccgccgacggcaaccccgaccccaacgccaaccccaacguggaccccaacgccaaccccaacguggaccccaacgccaaccccaacguggaccccaacgccaaccccaacgccaaccccaacgccaaccccaacgccaaccccaacgccaaccccaacgccaaccccaacgccaaccccaacgccaaccccaacgccaaccccaacgccaaccccaacgccaaccccaacgccaaccccaacgccaaccccaacgccaaccccaacgccaaccccaacgccaaccccaacgccaaccccaacguggaccccaacgccaaccccaacgccaaccccaacgccaaccccaacgccaaccccaacgccaaccccaacgccaaccccaacgccaaccccaacgccaaccccaacgccaaccccaacgccaaccccaacgccaaccccaacgccaaccccaacgccaaccccaacgccaaccccaacgccaaccccaacgccaaccccaacgccaaccccaacgccaaccccaacaagaacaaccagggcaacggccagggccacaacaugcccaacgaccccaacagaaacguggacgagaacgccaacgccaacagcgccgugaagaacaacaacaacgaggagcccagcgacaagcacaucaaggaguaccugaacaagauccagaacagccugagcaccgaguggagccccugcagcgugaccugcggcaacggcauccaggugagaaucaagcccggcagcgccaacaagcccaaggacgagcuggacuacgccaacgacaucgagaagaagaucugcaagauggagaagugcagcagcguguucaacguggugaacagcagcaucggccugaucauggugcugagcuuccuguuccugaacugaggacuagucccuguucccagagcccacuuuuuuuucuuuuuuugaaauaaaauagccugucuuucagaucuaaaaaaaaaaaaaaaaaaaaaaaaaaaaaaaaaaaaaaaaaaaaaaaaaaaaaaaaaaaaaaaaugcaucccccccccccccccccccccccccccccccaaaggcucuuuucagagccaccagaauu

SEQ ID NO: 794 - RNA, 618 nt, Artificial Sequence
  mRNA Design a-1 (A64-N5-C30-hSL-N5) comprising derived and/or modified sequence from Pf(3D7)__XP_001351122.1__HsALB_Pf-CSP(98-192) (opt4)
aggagagucccgcagucggcguccagcggcucugcuuguucgugugugugucguugcaggccuuauucaagcuuaccaugaagugggugaccuucaucagccugcuguuccuguucagcagcgccuacagcgccgacggcaaccccgaccccaacgccaaccccaacguggaccccaacgccaaccccaacguggaccccaacgccaaccccaacguggaccccaacgccaaccccaacgccaaccccaacgccaaccccaacgccaaccccaacgccaaccccaacgccaaccccaacgccaaccccaacgccaaccccaacgccaaccccaacgccaaccccaacgccaaccccaacgccaaccccaacgccaaccccaacgccaaccccaacgccaaccccaacgccaaccccugaggacuagucccuguucccagagcccacuuuuuuuucuuuuuuugaaauaaaauagccugucuuucagaucuaaaaaaaaaaaaaaaaaaaaaaaaaaaaaaaaaaaaaaaaaaaaaaaaaaaaaaaaaaaaaaaaugcaucccccccccccccccccccccccccccccccaaaggcucuuuucagagccaccagaauu

SEQ ID NO: 795 - RNA, 858 nt, Artificial Sequence
  mRNA Design a-1 (A64-N5-C30-hSL-N5) comprising derived and/or modified sequence from Pf(3D7)__XP_001351122.1__HsALB_Pf-CSP(98-272) (opt4)
aggagagucccgcagucggcguccagcggcucugcuuguucgugugugugucguugcaggccuuauucaagcuuaccaugaagugggugaccuucaucagccugcuguuccuguucagcagcgccuacagcgccgacggcaaccccgaccccaacgccaaccccaacguggaccccaacgccaaccccaacguggaccccaacgccaaccccaacguggaccccaacgccaaccccaacgccaaccccaacgccaaccccaacgccaaccccaacgccaaccccaacgccaaccccaacgccaaccccaacgccaaccccaacgccaaccccaacgccaaccccaacgccaaccccaacgccaaccccaacgccaaccccaacgccaaccccaacgccaaccccaacgccaaccccaacgccaaccccaacguggaccccaacgccaaccccaacgccaaccccaacgccaaccccaacgccaaccccaacgccaaccccaacgccaaccccaacgccaaccccaacgccaaccccaacgccaaccccaacgccaaccccaacgccaaccccaacgccaaccccaacgccaaccccaacgccaaccccaacgccaaccccaacgccaaccccaacgccaaccccaacgccaaccccugaggacuagucccuguucccagagcccacuuuuuuuucuuuuuuugaaauaaaauagccugucuuucagaucuaaaaaaaaaaaaaaaaaaaaaaaaaaaaaaaaaaaaaaaaaaaaaaaaaaaaaaaaaaaaaaaaugcaucccccccccccccccccccccccccccccccaaaggcucuuuucagagccaccagaauu

SEQ ID NO: 796 - RNA, 1164 nt, Artificial Sequence
  mRNA Design a-1 (A64-N5-C30-hSL-N5) comprising derived and/or modified sequence from Pf(3D7)__XP_001351122.1__HsALB_Pf-CSP(98-374) (opt4)
aggagagucccgcagucggcguccagcggcucugcuuguucgugugugugucguugcaggccuuauucaagcuuaccaugaagugggugaccuucaucagccugcuguuccuguucagcagcgccuacagcgccgacggcaaccccgaccccaacgccaaccccaacguggaccccaacgccaaccccaacguggaccccaacgccaaccccaacguggaccccaacgccaaccccaacgccaaccccaacgccaaccccaacgccaaccccaacgccaaccccaacgccaaccccaacgccaaccccaacgccaaccccaacgccaaccccaacgccaaccccaacgccaaccccaacgccaaccccaacgccaaccccaacgccaaccccaacgccaaccccaacgccaaccccaacgccaaccccaacguggaccccaacgccaaccccaacgccaaccccaacgccaaccccaacgccaaccccaacgccaaccccaacgccaaccccaacgccaaccccaacgccaaccccaacgccaaccccaacgccaaccccaacgccaaccccaacgccaaccccaacgccaaccccaacgccaaccccaacgccaaccccaacgccaaccccaacgccaaccccaacgccaaccccaacaagaacaaccagggcaacggccagggccacaacaugcccaacgaccccaacagaaacguggacgagaacgccaacgccaacagcgccgugaagaacaacaacaacgaggagcccagcgacaagcacaucaaggaguaccugaacaagauccagaacagccugagcaccgaguggagccccugcagcgugaccugcggcaacggcauccaggugagaaucaagcccggcagcgccaacaagcccaaggacgagcuggacuacgccaacgacaucgagaagaagaucugcaagauggagaagugcugaggacuagucccuguucccagagcccacuuuuuuuucuuuuuuugaaauaaaauagccugucuuucagaucuaaaaaaaaaaaaaaaaaaaaaaaaaaaaaaaaaaaaaaaaaaaaaaaaaaaaaaaaaaaaaaaaugcaucccccccccccccccccccccccccccccccaaaggcucuuuucagagccaccagaauu

SEQ ID NO: 797 - RNA, 1233 nt, Artificial Sequence
  mRNA Design a-1 (A64-N5-C30-hSL-N5) comprising derived and/or modified sequence from Pf(3D7)__XP_001351122.1__HsALB_Pf-CSP(98-397) (opt4)
aggagagucccgcagucggcguccagcggcucugcuuguucgugugugugucguugcaggccuuauucaagcuuaccaugaagugggugaccuucaucagccugcuguuccuguucagcagcgccuacagcgccgacggcaaccccgaccccaacgccaaccccaacguggaccccaacgccaaccccaacguggaccccaacgccaaccccaacguggaccccaacgccaaccccaacgccaaccccaacgccaaccccaacgccaaccccaacgccaaccccaacgccaaccccaacgccaaccccaacgccaaccccaacgccaaccccaacgccaaccccaacgccaaccccaacgccaaccccaacgccaaccccaacgccaaccccaacgccaaccccaacgccaaccccaacgccaaccccaacguggaccccaacgccaaccccaacgccaaccccaacgccaaccccaacgccaaccccaacgccaaccccaacgccaaccccaacgccaaccccaacgccaaccccaacgccaaccccaacgccaaccccaacgccaaccccaacgccaaccccaacgccaaccccaacgccaaccccaacgccaaccccaacgccaaccccaacgccaaccccaacgccaaccccaacaagaacaaccagggcaacggccagggccacaacaugcccaacgaccccaacagaaacguggacgagaacgccaacgccaacagcgccgugaagaacaacaacaacgaggagcccagcgacaagcacaucaaggaguaccugaacaagauccagaacagccugagcaccgaguggagccccugcagcgugaccugcggcaacggcauccaggugagaaucaagcccggcagcgccaacaagcccaaggacgagcuggacuacgccaacgacaucgagaagaagaucugcaagauggagaagugcagcagcguguucaacguggugaacagcagcaucggccugaucauggugcugagcuuccuguuccugaacugaggacuagucccuguucccagagcccacuuuuuuuucuuuuuuugaaauaaaauagccugucuuucagaucuaaaaaaaaaaaaaaaaaaaaaaaaaaaaaaaaaaaaaaaaaaaaaaaaaaaaaaaaaaaaaaaaugcaucccccccccccccccccccccccccccccccaaaggcucuuuucagagccaccagaauu

SEQ ID NO: 798 - RNA, 1560 nt, Artificial Sequence
  mRNA Design a-1 (A64-N5-C30-hSL-N5) comprising derived and/or modified sequence from Pf(3D7)__XP_001351122.1__HsALB_Pf-CSP(199-377)_L(PVTN)_HBsAg (opt4)
aggagagucccgcagucggcguccagcggcucugcuuguucgugugugugucguugcaggccuuauucaagcuuaccaugaagugggugaccuucaucagccugcuguuccuguucagcagcgccuacagcgaccccaacgccaaccccaacgccaaccccaacgccaaccccaacgccaaccccaacgccaaccccaacgccaaccccaacgccaaccccaacgccaaccccaacgccaaccccaacgccaaccccaacgccaaccccaacgccaaccccaacgccaaccccaacgccaaccccaacgccaaccccaacgccaaccccaacgccaaccccaacgccaaccccaacaagaacaaccagggcaacggccagggccacaacaugcccaacgaccccaacagaaacguggacgagaacgccaacgccaacagcgccgugaagaacaacaacaacgaggagcccagcgacaagcacaucaaggaguaccugaacaagauccagaacagccugagcaccgaguggagccccugcagcgugaccugcggcaacggcauccaggugagaaucaagcccggcagcgccaacaagcccaaggacgagcuggacuacgccaacgacaucgagaagaagaucugcaagauggagaagugcagcagcgugcccgugaccaacauggagaacaucaccagcggcuuccugggcccccugcuggugcugcaggccggcuucuuccugcugaccagaauccugaccaucccccagagccuggacagcugguggaccagccugaacuuccugggcggcagccccgugugccugggccagaacagccagagccccaccagcaaccacagccccaccagcugcccccccaucugccccggcuacagauggaugugccugagaagauucaucaucuuccuguucauccugcugcugugccugaucuuccugcuggugcugcuggacuaccagggcaugcugcccgugugcccccugauccccggcagcaccaccaccaacaccggccccugcaagaccugcaccacccccgcccagggcaacagcauguuccccagcugcugcugcaccaagcccaccgacggcaacugcaccugcauccccauccccagcagcugggccuucgccaaguaccugugggagugggccagcgugagauucagcuggcugagccugcuggugcccuucgugcagugguucgugggccugagccccaccguguggcugagcgccaucuggaugaugugguacuggggccccagccuguacagcaucgugagccccuucaucccccugcugcccaucuucuucugccuguggguguacaucugaggacuagucccuguucccagagcccacuuuuuuuucuuuuuuugaaauaaaauagccugucuuucagaucuaaaaaaaaaaaaaaaaaaaaaaaaaaaaaaaaaaaaaaaaaaaaaaaaaaaaaaaaaaaaaaaaugcaucccccccccccccccccccccccccccccccaaaggcucuuuucagagccaccagaauu

SEQ ID NO: 799 - RNA, 1299 nt, Artificial Sequence
  mRNA Design a-1 (A64-N5-C30-hSL-N5) comprising derived and/or modified sequence from Pb(ANKA)__XP_022712148.1__Pb-CSP (opt4)
aggagagucccgcagucggcguccagcggcucugcuuguucgugugugugucguugcaggccuuauucaagcuuaccaugaagaagugcaccauccuggugguggccagccugcugcuggugaacagccugcugcccggcuacggccagaacaagagcauccaggcccagagaaaccugaacgagcugugcuacaacgagggcaacgacaacaagcuguaccacgugcugaacagcaagaacggcaagaucuacaacagaaacaccgugaacagacugcuggccgacgcccccgagggcaagaagaacgagaagaagaacgagaagaucgagagaaacaacaagcugaagcagcccccccccccccccaaccccaacgacccccccccccccaaccccaacgacccccccccccccaaccccaacgacccccccccccccaaccccaacgacccccccccccccaacgccaacgacccccccccccccaacgccaacgaccccgccccccccaacgccaacgaccccgccccccccaacgccaacgaccccgccccccccaacgccaacgaccccgccccccccaacgccaacgacccccccccccccaaccccaacgaccccgccccccccaacgccaacgacccccccccccccaaccccaacgaccccgcccccccccagggcaacaacaacccccagccccagcccagaccccagccccagccccagccccagccccagccccagccccagccccagccccagcccagaccccagccccagccccagcccggcggcaacaacaacaacaagaacaacaacaacgacgacagcuacauccccagcgccgagaagauccuggaguucgugaagcagaucagagacagcaucaccgaggaguggagccagugcaacgugaccugcggcagcggcaucagagugagaaagagaaagggcagcaacaagaaggccgaggaccugacccuggaggacaucgacaccgagaucugcaagauggacaagugcagcagcaucuucaacaucgugagcaacagccugggcuucgugauccugcuggugcugguguucuucaacugaggacuagucccuguucccagagcccacuuuuuuuucuuuuuuugaaauaaaauagccugucuuucagaucuaaaaaaaaaaaaaaaaaaaaaaaaaaaaaaaaaaaaaaaaaaaaaaaaaaaaaaaaaaaaaaaaugcaucccccccccccccccccccccccccccccccaaaggcucuuuucagagccaccagaauu

SEQ ID NO: 800 - RNA, 1464 nt, Artificial Sequence
  mRNA Design a-1 (A64-N5-C30-hSL-N5) comprising derived and/or modified sequence from Pb(ANKA)__XP_022712148.1__Pb-CSP_L(G4SG4)_TM domain HA (opt4)
aggagagucccgcagucggcguccagcggcucugcuuguucgugugugugucguugcaggccuuauucaagcuuaccaugaagaagugcaccauccuggugguggccagccugcugcuggugaacagccugcugcccggcuacggccagaacaagagcauccaggcccagagaaaccugaacgagcugugcuacaacgagggcaacgacaacaagcuguaccacgugcugaacagcaagaacggcaagaucuacaacagaaacaccgugaacagacugcuggccgacgcccccgagggcaagaagaacgagaagaagaacgagaagaucgagagaaacaacaagcugaagcagcccccccccccccccaaccccaacgacccccccccccccaaccccaacgacccccccccccccaaccccaacgacccccccccccccaaccccaacgacccccccccccccaacgccaacgacccccccccccccaacgccaacgaccccgccccccccaacgccaacgaccccgccccccccaacgccaacgaccccgccccccccaacgccaacgaccccgccccccccaacgccaacgacccccccccccccaaccccaacgaccccgccccccccaacgccaacgacccccccccccccaaccccaacgaccccgcccccccccagggcaacaacaacccccagccccagcccagaccccagccccagccccagccccagccccagccccagccccagccccagccccagcccagaccccagccccagccccagcccggcggcaacaacaacaacaagaacaacaacaacgacgacagcuacauccccagcgccgagaagauccuggaguucgugaagcagaucagagacagcaucaccgaggaguggagccagugcaacgugaccugcggcagcggcaucagagugagaaagagaaagggcagcaacaagaaggccgaggaccugacccuggaggacaucgacaccgagaucugcaagauggacaagugcagcagcaucuucaacaucgugagcaacagccugggcuucgugauccugcuggugcugguguucuucaacggcggcggcggcagcggcggcggcggcaagcuggagagcaccagaaucuaccagauccuggccaucuacagcaccguggccagcagccuggugcugguggugagccugggcgccaucagcuucuggaugugcagcaacggcagccugcagugcagaaucugcaucugaggacuagucccuguucccagagcccacuuuuuuuucuuuuuuugaaauaaaauagccugucuuucagaucuaaaaaaaaaaaaaaaaaaaaaaaaaaaaaaaaaaaaaaaaaaaaaaaaaaaaaaaaaaaaaaaaugcaucccccccccccccccccccccccccccccccaaaggcucuuuucagagccaccagaauu

SEQ ID NO: 801 - RNA, 1284 nt, Artificial Sequence
  mRNA Design a-1 (A64-N5-C30-hSL-N5) comprising derived and/or modified sequence from Pb(ANKA)__XP_022712148.1__HsALB_Pb-CSP(24-340) (opt4)
aggagagucccgcagucggcguccagcggcucugcuuguucgugugugugucguugcaggccuuauucaagcuuaccaugaagugggugaccuucaucagccugcuguuccuguucagcagcgccuacagccagaacaagagcauccaggcccagagaaaccugaacgagcugugcuacaacgagggcaacgacaacaagcuguaccacgugcugaacagcaagaacggcaagaucuacaacagaaacaccgugaacagacugcuggccgacgcccccgagggcaagaagaacgagaagaagaacgagaagaucgagagaaacaacaagcugaagcagcccccccccccccccaaccccaacgacccccccccccccaaccccaacgacccccccccccccaaccccaacgacccccccccccccaaccccaacgacccccccccccccaacgccaacgacccccccccccccaacgccaacgaccccgccccccccaacgccaacgaccccgccccccccaacgccaacgaccccgccccccccaacgccaacgaccccgccccccccaacgccaacgacccccccccccccaaccccaacgaccccgccccccccaacgccaacgacccccccccccccaaccccaacgaccccgcccccccccagggcaacaacaacccccagccccagcccagaccccagccccagccccagccccagccccagccccagccccagccccagccccagcccagaccccagccccagccccagcccggcggcaacaacaacaacaagaacaacaacaacgacgacagcuacauccccagcgccgagaagauccuggaguucgugaagcagaucagagacagcaucaccgaggaguggagccagugcaacgugaccugcggcagcggcaucagagugagaaagagaaagggcagcaacaagaaggccgaggaccugacccuggaggacaucgacaccgagaucugcaagauggacaagugcagcagcaucuucaacaucgugagcaacagccugggcuucgugauccugcuggugcugguguucuucaacugaggacuagucccuguucccagagcccacuuuuuuuucuuuuuuugaaauaaaauagccugucuuucagaucuaaaaaaaaaaaaaaaaaaaaaaaaaaaaaaaaaaaaaaaaaaaaaaaaaaaaaaaaaaaaaaaaugcaucccccccccccccccccccccccccccccccaaaggcucuuuucagagccaccagaauu

SEQ ID NO: 802 - RNA, 1302 nt, Artificial Sequence
  mRNA Design a-1 (A64-N5-C30-hSL-N5) comprising derived and/or modified sequence from Pb(ANKA)__XP_022712148.1__HsIns-iso1_Pb-CSP(24-340) (opt4)
aggagagucccgcagucggcguccagcggcucugcuuguucgugugugugucguugcaggccuuauucaagcuuaccauggcccuguggaugagacugcugccccugcuggcccugcuggcccuguggggccccgaccccgccgccgcccagaacaagagcauccaggcccagagaaaccugaacgagcugugcuacaacgagggcaacgacaacaagcuguaccacgugcugaacagcaagaacggcaagaucuacaacagaaacaccgugaacagacugcuggccgacgcccccgagggcaagaagaacgagaagaagaacgagaagaucgagagaaacaacaagcugaagcagcccccccccccccccaaccccaacgacccccccccccccaaccccaacgacccccccccccccaaccccaacgacccccccccccccaaccccaacgacccccccccccccaacgccaacgacccccccccccccaacgccaacgaccccgccccccccaacgccaacgaccccgccccccccaacgccaacgaccccgccccccccaacgccaacgaccccgccccccccaacgccaacgacccccccccccccaaccccaacgaccccgccccccccaacgccaacgacccccccccccccaaccccaacgaccccgcccccccccagggcaacaacaacccccagccccagcccagaccccagccccagccccagccccagccccagccccagccccagccccagccccagcccagaccccagccccagccccagcccggcggcaacaacaacaacaagaacaacaacaacgacgacagcuacauccccagcgccgagaagauccuggaguucgugaagcagaucagagacagcaucaccgaggaguggagccagugcaacgugaccugcggcagcggcaucagagugagaaagagaaagggcagcaacaagaaggccgaggaccugacccuggaggacaucgacaccgagaucugcaagauggacaagugcagcagcaucuucaacaucgugagcaacagccugggcuucgugauccugcuggugcugguguucuucaacugaggacuagucccuguucccagagcccacuuuuuuuucuuuuuuugaaauaaaauagccugucuuucagaucuaaaaaaaaaaaaaaaaaaaaaaaaaaaaaaaaaaaaaaaaaaaaaaaaaaaaaaaaaaaaaaaaugcaucccccccccccccccccccccccccccccccaaaggcucuuuucagagccaccagaauu

SEQ ID NO: 803 - RNA, 1281 nt, Artificial Sequence
  mRNA Design a-1 (A64-N5-C30-hSL-N5) comprising derived and/or modified sequence from Pb(ANKA)__XP_022712148.1__HsSPARC_Pb-CSP(24-340) (opt4)
aggagagucccgcagucggcguccagcggcucugcuuguucgugugugugucguugcaggccuuauucaagcuuaccaugagagccuggaucuucuuccugcugugccuggccggcagagcccuggcccagaacaagagcauccaggcccagagaaaccugaacgagcugugcuacaacgagggcaacgacaacaagcuguaccacgugcugaacagcaagaacggcaagaucuacaacagaaacaccgugaacagacugcuggccgacgcccccgagggcaagaagaacgagaagaagaacgagaagaucgagagaaacaacaagcugaagcagcccccccccccccccaaccccaacgacccccccccccccaaccccaacgacccccccccccccaaccccaacgacccccccccccccaaccccaacgacccccccccccccaacgccaacgacccccccccccccaacgccaacgaccccgccccccccaacgccaacgaccccgccccccccaacgccaacgaccccgccccccccaacgccaacgaccccgccccccccaacgccaacgacccccccccccccaaccccaacgaccccgccccccccaacgccaacgacccccccccccccaaccccaacgaccccgcccccccccagggcaacaacaacccccagccccagcccagaccccagccccagccccagccccagccccagccccagccccagccccagccccagcccagaccccagccccagccccagcccggcggcaacaacaacaacaagaacaacaacaacgacgacagcuacauccccagcgccgagaagauccuggaguucgugaagcagaucagagacagcaucaccgaggaguggagccagugcaacgugaccugcggcagcggcaucagagugagaaagagaaagggcagcaacaagaaggccgaggaccugacccuggaggacaucgacaccgagaucugcaagauggacaagugcagcagcaucuucaacaucgugagcaacagccugggcuucgugauccugcuggugcugguguucuucaacugaggacuagucccuguucccagagcccacuuuuuuuucuuuuuuugaaauaaaauagccugucuuucagaucuaaaaaaaaaaaaaaaaaaaaaaaaaaaaaaaaaaaaaaaaaaaaaaaaaaaaaaaaaaaaaaaaugcaucccccccccccccccccccccccccccccccaaaggcucuuuucagagccaccagaauu

SEQ ID NO: 804 - RNA, 1284 nt, Artificial Sequence
  mRNA Design a-1 (A64-N5-C30-hSL-N5) comprising derived and/or modified sequence from Pb(ANKA)__XP_022712148.1__IgE_Pb-CSP(24-340) (opt4)
aggagagucccgcagucggcguccagcggcucugcuuguucgugugugugucguugcaggccuuauucaagcuuaccauggacuggaccuggauccuguuccugguggccgccgccaccagagugcacagccagaacaagagcauccaggcccagagaaaccugaacgagcugugcuacaacgagggcaacgacaacaagcuguaccacgugcugaacagcaagaacggcaagaucuacaacagaaacaccgugaacagacugcuggccgacgcccccgagggcaagaagaacgagaagaagaacgagaagaucgagagaaacaacaagcugaagcagcccccccccccccccaaccccaacgacccccccccccccaaccccaacgacccccccccccccaaccccaacgacccccccccccccaaccccaacgacccccccccccccaacgccaacgacccccccccccccaacgccaacgaccccgccccccccaacgccaacgaccccgccccccccaacgccaacgaccccgccccccccaacgccaacgaccccgccccccccaacgccaacgacccccccccccccaaccccaacgaccccgccccccccaacgccaacgacccccccccccccaaccccaacgaccccgcccccccccagggcaacaacaacccccagccccagcccagaccccagccccagccccagccccagccccagccccagccccagccccagccccagcccagaccccagccccagccccagcccggcggcaacaacaacaacaagaacaacaacaacgacgacagcuacauccccagcgccgagaagauccuggaguucgugaagcagaucagagacagcaucaccgaggaguggagccagugcaacgugaccugcggcagcggcaucagagugagaaagagaaagggcagcaacaagaaggccgaggaccugacccuggaggacaucgacaccgagaucugcaagauggacaagugcagcagcaucuucaacaucgugagcaacagccugggcuucgugauccugcuggugcugguguucuucaacugaggacuagucccuguucccagagcccacuuuuuuuucuuuuuuugaaauaaaauagccugucuuucagaucuaaaaaaaaaaaaaaaaaaaaaaaaaaaaaaaaaaaaaaaaaaaaaaaaaaaaaaaaaaaaaaaaugcaucccccccccccccccccccccccccccccccaaaggcucuuuucagagccaccagaauu

SEQ ID NO: 805 - RNA, 1470 nt, Artificial Sequence
  mRNA Design a-1 (A64-N5-C30-hSL-N5) comprising derived and/or modified sequence from Pf(3D7)__XP_001351122.1__Pf-CSP (opt5)
aggagagucccgcagucggcguccagcggcucugcuuguucgugugugugucguugcaggccuuauucaagcuuaccaugaugagaaagcuggccauccucagcguguccucuuuccuguuugucgaggcucuuuuccaggaauaccaaugcuauggcagcuccucuaacacccggguucugaaugagcucaacuacgacaaugccgggacaaaccuguauaaugaacuugagaugaacuacuauggaaaacaggaaaauugguacagccugaagaaaaacucccgcucucucggcgagaaugaugacgggaacaaugaggauaacgaaaagcugagaaaacccaagcacaagaaacugaagcagccugcggacggaaauccggaucccaacgcuaauccuaacguggaccccaacgccaauccuaacguggaucccaaugccaacccuaaugucgacccgaacgcuaaucccaacgccaauccuaacgcuaaucccaacgccaauccuaacgcgaaucccaacgccaacccgaaugcuaacccuaaugccaaccccaaugcuaacccuaaugccaaccccaaugcgaaccccaaugccaacccuaaugcuaacccgaaugccaaccccaacgcuaauccuaacgccaaucccaacgccaauccuaacguggaucccaaugcuaacccgaaugcgaacccuaaugccaaccccaaugcuaacccuaaugccaaccccaacgccaauccuaacgcuaaucccaacgccaauccgaacgcgaauccuaacgcuaaucccaacgccaaucccaacgccaauccuaacgcuaauccgaacgccaaucccaacgcuaacccuaaugccaaccccaaugcgaacccuaaugccaaccccaauaaaaacaaucagggcaacgggcaaggacauaauaugccuaacgaccccaaucggaacguugaugagaaugcuaacgccaacagcgcugugaagaauaacaauaacgaggaaccguccgacaaacacauuaaggaguaucucaauaagauccagaacagccugucuacggaaugguccccuuguagcgugaccugcggcaauggcauucagguccgcaucaaacccgggucugccaacaagccuaaagaugagcuugacuacgcgaaugacauugaaaagaaaaucuguaagauggagaaaugcuccagcguuuuuaacguggucaauucuuccaucggacugauuauggugcucagcuuccuguuucuuaacugaggacuagucccuguucccagagcccacuuuuuuuucuuuuuuugaaauaaaauagccugucuuucagaucuaaaaaaaaaaaaaaaaaaaaaaaaaaaaaaaaaaaaaaaaaaaaaaaaaaaaaaaaaaaaaaaaugcaucccccccccccccccccccccccccccccccaaaggcucuuuucagagccaccagaauu

SEQ ID NO: 806 - RNA, 1401 nt, Artificial Sequence
  mRNA Design a-1 (A64-N5-C30-hSL-N5) comprising derived and/or modified sequence from Pf(3D7)__XP_001351122.1__Pf-CSP(1-374) (opt5)
aggagagucccgcagucggcguccagcggcucugcuuguucgugugugugucguugcaggccuuauucaagcuuaccaugaugagaaagcuggccauccucagcguguccucuuuccuguuugucgaggcucuuuuccaggaauaccaaugcuauggcagcuccucuaacacccggguucugaaugagcucaacuacgacaaugccgggacaaaccuguauaaugaacuugagaugaacuacuauggaaaacaggaaaauugguacagccugaagaaaaacucccgcucucucggcgagaaugaugacgggaacaaugaggauaacgaaaagcugagaaaacccaagcacaagaaacugaagcagccugcggacggaaauccggaucccaacgcuaauccuaacguggaccccaacgccaauccuaacguggaucccaaugccaacccuaaugucgacccgaacgcuaaucccaacgccaauccuaacgcuaaucccaacgccaauccuaacgcgaaucccaacgccaacccgaaugcuaacccuaaugccaaccccaaugcuaacccuaaugccaaccccaaugcgaaccccaaugccaacccuaaugcuaacccgaaugccaaccccaacgcuaauccuaacgccaaucccaacgccaauccuaacguggaucccaaugcuaacccgaaugcgaacccuaaugccaaccccaaugcuaacccuaaugccaaccccaacgccaauccuaacgcuaaucccaacgccaauccgaacgcgaauccuaacgcuaaucccaacgccaaucccaacgccaauccuaacgcuaauccgaacgccaaucccaacgcuaacccuaaugccaaccccaaugcgaacccuaaugccaaccccaauaaaaacaaucagggcaacgggcaaggacauaauaugccuaacgaccccaaucggaacguugaugagaaugcuaacgccaacagcgcugugaagaauaacaauaacgaggaaccguccgacaaacacauuaaggaguaucucaauaagauccagaacagccugucuacggaaugguccccuuguagcgugaccugcggcaauggcauucagguccgcaucaaacccgggucugccaacaagccuaaagaugagcuugacuacgcgaaugacauugaaaagaaaaucuguaagauggagaaaugcugaggacuagucccuguucccagagcccacuuuuuuuucuuuuuuugaaauaaaauagccugucuuucagaucuaaaaaaaaaaaaaaaaaaaaaaaaaaaaaaaaaaaaaaaaaaaaaaaaaaaaaaaaaaaaaaaaugcaucccccccccccccccccccccccccccccccaaaggcucuuuucagagccaccagaauu

SEQ ID NO: 807 - RNA, 1254 nt, Artificial Sequence
  mRNA Design a-1 (A64-N5-C30-hSL-N5) comprising derived and/or modified sequence from Pf(3D7)__XP_001351122.1__Pf-CSP(1-325) (opt5)
aggagagucccgcagucggcguccagcggcucugcuuguucgugugugugucguugcaggccuuauucaagcuuaccaugaugagaaagcuggccauccucagcguguccucuuuccuguuugucgaggcucuuuuccaggaauaccaaugcuauggcagcuccucuaacacccggguucugaaugagcucaacuacgacaaugccgggacaaaccuguauaaugaacuugagaugaacuacuauggaaaacaggaaaauugguacagccugaagaaaaacucccgcucucucggcgagaaugaugacgggaacaaugaggauaacgaaaagcugagaaaacccaagcacaagaaacugaagcagccugcggacggaaauccggaucccaacgcuaauccuaacguggaccccaacgccaauccuaacguggaucccaaugccaacccuaaugucgacccgaacgcuaaucccaacgccaauccuaacgcuaaucccaacgccaauccuaacgcgaaucccaacgccaacccgaaugcuaacccuaaugccaaccccaaugcuaacccuaaugccaaccccaaugcgaaccccaaugccaacccuaaugcuaacccgaaugccaaccccaacgcuaauccuaacgccaaucccaacgccaauccuaacguggaucccaaugcuaacccgaaugcgaacccuaaugccaaccccaaugcuaacccuaaugccaaccccaacgccaauccuaacgcuaaucccaacgccaauccgaacgcgaauccuaacgcuaaucccaacgccaaucccaacgccaauccuaacgcuaauccgaacgccaaucccaacgcuaacccuaaugccaaccccaaugcgaacccuaaugccaaccccaauaaaaacaaucagggcaacgggcaaggacauaauaugccuaacgaccccaaucggaacguugaugagaaugcuaacgccaacagcgcugugaagaauaacaauaacgaggaaccguccgacaaacacauuaaggaguaucucaauaagauccagaacugaggacuagucccuguucccagagcccacuuuuuuuucuuuuuuugaaauaaaauagccugucuuucagaucuaaaaaaaaaaaaaaaaaaaaaaaaaaaaaaaaaaaaaaaaaaaaaaaaaaaaaaaaaaaaaaaaugcaucccccccccccccccccccccccccccccccaaaggcucuuuucagagccaccagaauu

SEQ ID NO: 808 - RNA, 1470 nt, Artificial Sequence
  mRNA Design a-1 (A64-N5-C30-hSL-N5) comprising derived and/or modified sequence from Pf(3D7)__XP_001351122.1__HsALB_Pf-CSP(19-397) (opt5)
aggagagucccgcagucggcguccagcggcucugcuuguucgugugugugucguugcaggccuuauucaagcuuaccaugaagugggugaccuucaucagccugcucuuucuguucuccucugccuacagccuuuuucaggaguaucaaugcuacggcuccucuagcaacacaagaguccugaaugaacucaacuaugacaaugcugggacgaaccuguacaaugagcuugaaaugaacuauuacggaaaacaggagaauugguauucccugaagaaaaacucucggagccucggcgaaaaugaugacgggaacaaugaggauaacgagaagcugcgcaaacccaagcacaagaaacugaagcagccugccgacggaaauccggaucccaacgcgaauccuaacguugaccccaacgcuaauccuaacguggaucccaaugccaacccuaauguggacccgaacgccaaucccaacgcuaauccuaacgccaaucccaacgcuaauccuaacgccaaucccaacgcgaacccgaaugccaacccuaaugcuaaccccaaugccaacccuaaugcuaaccccaaugccaaccccaaugcgaacccuaaugccaacccgaaugcuaaccccaacgccaauccuaacgcuaaucccaacgccaauccuaacgucgaucccaaugccaacccgaaugcuaacccuaaugcgaaccccaaugccaacccuaaugcuaaccccaacgccaauccuaacgccaaucccaacgcuaauccgaacgccaauccuaacgcgaaucccaacgcuaaucccaacgccaauccuaacgccaauccgaacgcuaaucccaacgccaacccuaaugcuaaccccaaugccaacccuaaugcgaaccccaauaaaaacaaucagggcaacgggcaaggacauaauaugccuaacgaccccaauagaaacguggaugaaaaugccaacgcuaacuccgccguuaagaauaacaauaacgaggaaccgagcgacaaacacauuaaggaguaccucaauaagauccagaacucucuguccaccgaguggagcccuuguucugugacaugcggcaauggcauucagguccggaucaaacccggguccgcuaacaagccuaaagaugaacuugacuacgccaaugacauugagaagaaaaucuguaagauggaaaaaugcagcucuguguucaacguugucaauuccagcaucggacugauuauggugcucuccuuucuguuccuuaacugaggacuagucccuguucccagagcccacuuuuuuuucuuuuuuugaaauaaaauagccugucuuucagaucuaaaaaaaaaaaaaaaaaaaaaaaaaaaaaaaaaaaaaaaaaaaaaaaaaaaaaaaaaaaaaaaaugcaucccccccccccccccccccccccccccccccaaaggcucuuuucagagccaccagaauu

SEQ ID NO: 809 - RNA, 1488 nt, Artificial Sequence
  mRNA Design a-1 (A64-N5-C30-hSL-N5) comprising derived and/or modified sequence from Pf(3D7)__XP_001351122.1__HsIns-iso1_Pf-CSP(19-397) (opt5)
aggagagucccgcagucggcguccagcggcucugcuuguucgugugugugucguugcaggccuuauucaagcuuaccauggcccuguggaugagacuccugccccuucuggcucuccuggcccuuuggggcccugacccggcggcugcccuguuccaggaguaccaaugcuaugggagcuccucuaacacccgggugcucaaugaacugaacuacgauaaugccggaacaaaccuguauaaugagcucgaaaugaacuacuauggcaagcaggagaauugguacagccugaaaaagaacucccgcucucuuggggaaaaugacgauggaaacaaugaggacaacgagaaacugagaaagcccaaacacaagaagcucaaacagccugcugauggcaaucccgacccuaacgccaaucccaacgucgauccuaacgcuaauccgaacguugaccccaaugccaacccuaauguggaucccaacgcgaauccuaacgccaaucccaacgcuaauccgaacgccaauccuaacgcuaaucccaacgccaacccuaaugcgaaccccaaugccaaccccaaugcuaacccuaaugccaacccgaaugcuaaccccaaugccaacccuaaugccaaccccaaugcuaacccuaacgcgaaucccaacgccaauccgaacgcuaauccuaacguggaccccaaugccaacccuaaugccaaccccaaugcuaacccuaaugccaaccccaaugcgaacccgaacgcuaauccuaacgccaaucccaacgccaaucccaacgcuaauccuaacgccaauccgaacgcuaaucccaacgccaauccuaacgcgaaucccaacgccaauccuaacgcuaaccccaaugccaacccuaaugcuaaccccaaugccaacccgaauaagaacaaucaggggaacggacaaggccauaauaugccuaacgaucccaaucggaacgucgacgaaaaugcgaacgccaacagcgcugugaaaaauaacaauaacgaggaaccuuccgauaagcacaucaaagaguaucugaauaagauucagaacucucuuagcacggaguggucccccuguagcguuaccugcggcaaugggauccaggugcgcauuaagccgggaucugccaacaaaccuaaggacgaacuggacuacgcuaaugauaucgagaaaaagauuuguaaaauggaaaagugcuccagcgucuuuaacgugguuaauucuuccaucggccucaucauggugcugagcuuccuguuucucaacugaggacuagucccuguucccagagcccacuuuuuuuucuuuuuuugaaauaaaauagccugucuuucagaucuaaaaaaaaaaaaaaaaaaaaaaaaaaaaaaaaaaaaaaaaaaaaaaaaaaaaaaaaaaaaaaaaugcaucccccccccccccccccccccccccccccccaaaggcucuuuucagagccaccagaauu

SEQ ID NO: 810 - RNA, 1467 nt, Artificial Sequence
  mRNA Design a-1 (A64-N5-C30-hSL-N5) comprising derived and/or modified sequence from Pf(3D7)__XP_001351122.1__HsSPARC_Pf-CSP(19-397) (opt5)
aggagagucccgcagucggcguccagcggcucugcuuguucgugugugugucguugcaggccuuauucaagcuuaccaugagagccuggaucuucuuucugcucugccuggcuggccgggcccuugcgcuguuccaggaguaccaauguuaugggagcuccucuaacacccgcgugcucaaugaacugaacuacgacaaugcuggaacaaaccuuuauaaugagcuggaaaugaacuacuauggcaagcaggagaauugguacagccucaaaaagaacuccagaucucugggggaaaaugaugacggaaacaaugaggauaacgagaaacugcggaagcccaaacacaagaagcucaaacagccugccgacggcaauccggaucccaacgccaauccuaacgucgaccccaacgcuaauccuaacguugaucccaaugccaacccuaauguggacccgaacgcuaaucccaacgccaauccuaacgcgaaucccaacgccaauccuaacgcuaaucccaacgccaacccgaaugcuaacccuaaugccaaccccaaugcgaacccuaaugccaaccccaaugcuaaccccaaugccaacccuaaugcuaacccgaaugccaaccccaacgccaauccuaacgcuaaucccaacgcgaauccuaacguggaucccaaugccaacccgaaugcuaacccuaaugccaaccccaaugccaacccuaaugcuaaccccaacgccaauccuaacgcgaaucccaacgcuaauccgaacgccaauccuaacgccaaucccaacgcuaaucccaacgccaauccuaacgcuaauccgaacgccaaucccaacgcgaacccuaaugccaaccccaaugcuaacccuaaugccaaccccaauaagaacaaucaggggaacggacaaggccauaauaugccuaacgaccccaaucgcaacgucgaugaaaaugcuaacgccaacagcgcggugaaaaauaacaauaacgaggaaccguccgacaagcacauuaaagaguaucugaauaagauccagaacucucuuagcacggagugguccccuugcagcguuaccuguggcaaugggauucaggugagaaucaagcccggaucugccaacaaaccuaaggaugaacuggacuacgcuaaugacauugagaaaaagaucugcaaaauggaaaaguguuccagcgucuuuaacgugguuaauucuuccaucggccucauuauggugcugagcuuccuuuuucugaacugaggacuagucccuguucccagagcccacuuuuuuuucuuuuuuugaaauaaaauagccugucuuucagaucuaaaaaaaaaaaaaaaaaaaaaaaaaaaaaaaaaaaaaaaaaaaaaaaaaaaaaaaaaaaaaaaaugcaucccccccccccccccccccccccccccccccaaaggcucuuuucagagccaccagaauu

SEQ ID NO: 811 - RNA, 1470 nt, Artificial Sequence
  mRNA Design a-1 (A64-N5-C30-hSL-N5) comprising derived and/or modified sequence from Pf(3D7)__XP_001351122.1__IgE_Pf-CSP(19-397) (opt5)
aggagagucccgcagucggcguccagcggcucugcuuguucgugugugugucguugcaggccuuauucaagcuuaccauggacuggaccuggauccuguuccucguggccgcugccacaagaguccacagccuguuucaggaguaccaaugcuauggcuccucuagcaacacgcggguucuuaaugaacugaacuacgauaaugcggggaccaaccucuauaaugagcuggaaaugaacuacuauggaaagcaggagaauugguacucccuuaaaaagaacucucgcagccugggcgaaaaugacgaugggaacaaugaggacaacgagaaacucagaaagcccaaacauaagaagcugaaacagccugcugauggaaauccggaccccaacgccaauccuaacguggaucccaacgccaauccuaacguggaccccaaugcuaacccuaaugucgauccgaacgccaaucccaacgcuaauccuaacgccaaucccaacgcgaauccuaacgccaaucccaacgcuaacccgaaugccaacccuaaugcuaaccccaaugccaacccuaaugcgaaccccaaugccaaccccaaugcuaacccuaaugccaacccgaaugcuaaccccaacgccaauccuaacgccaaucccaacgcuaauccuaacguggaccccaaugcgaacccgaaugccaacccuaaugcuaaccccaaugccaacccuaaugccaaccccaacgcuaauccuaacgccaaucccaacgcgaauccgaacgcuaauccuaacgccaaucccaacgccaaucccaacgcuaauccuaacgccaauccgaacgcuaaucccaacgccaacccuaaugcgaaccccaaugccaacccuaaugcuaaccccaauaagaacaaucagggcaacgggcaaggacacaauaugccuaacgaucccaaucggaacguugacgaaaaugccaacgcuaacuccgccgugaaaaauaacaauaacgaggaaccgucugauaagcauauuaaagaguaucugaauaagauccagaacagccucuccacagaguggagcccuuguucugugaccugcggcaauggcauucagguccgcaucaagcccggguccgcgaacaaaccuaaggacgaacuggacuacgccaaugauauugagaaaaagaucuguaaaauggaaaagugcagcucuguuuucaacguggucaauuccagcaucggacuuauuauggugcugucuuuucucuuccugaacugaggacuagucccuguucccagagcccacuuuuuuuucuuuuuuugaaauaaaauagccugucuuucagaucuaaaaaaaaaaaaaaaaaaaaaaaaaaaaaaaaaaaaaaaaaaaaaaaaaaaaaaaaaaaaaaaaugcaucccccccccccccccccccccccccccccccaaaggcucuuuucagagccaccagaauu

SEQ ID NO: 812 - RNA, 1635 nt, Artificial Sequence
  mRNA Design a-1 (A64-N5-C30-hSL-N5) comprising derived and/or modified sequence from Pf(3D7)__XP_001351122.1__Pf-CSP_L(G4SG4)_TM domain HA (opt5)
aggagagucccgcagucggcguccagcggcucugcuuguucgugugugugucguugcaggccuuauucaagcuuaccaugaugagaaagcuggccauccucagcguguccucuuuccuguuugucgaggcucuuuuccaggaauaccaaugcuauggcagcuccucuaacacccggguucugaaugagcucaacuacgacaaugccgggacaaaccuguauaaugaacuugagaugaacuacuauggaaaacaggaaaauugguacagccugaagaaaaacucccgcucucucggcgagaaugaugacgggaacaaugaggauaacgaaaagcugagaaaacccaagcacaagaaacugaagcagccugcggacggaaauccggaucccaacgcuaauccuaacguggaccccaacgccaauccuaacguggaucccaaugccaacccuaaugucgacccgaacgcuaaucccaacgccaauccuaacgcuaaucccaacgccaauccuaacgcgaaucccaacgccaacccgaaugcuaacccuaaugccaaccccaaugcuaacccuaaugccaaccccaaugcgaaccccaaugccaacccuaaugcuaacccgaaugccaaccccaacgcuaauccuaacgccaaucccaacgccaauccuaacguggaucccaaugcuaacccgaaugcgaacccuaaugccaaccccaaugcuaacccuaaugccaaccccaacgccaauccuaacgcuaaucccaacgccaauccgaacgcgaauccuaacgcuaaucccaacgccaaucccaacgccaauccuaacgcuaauccgaacgccaaucccaacgcuaacccuaaugccaaccccaaugcgaacccuaaugccaaccccaauaaaaacaaucagggcaacgggcaaggacauaauaugccuaacgaccccaaucggaacguugaugagaaugcuaacgccaacagcgcugugaagaauaacaauaacgaggaaccguccgacaaacacauuaaggaguaucucaauaagauccagaacagccugucuacggaaugguccccuuguagcgugaccugcggcaauggcauucagguccgcaucaaacccgggucugccaacaagccuaaagaugagcuugacuacgcgaaugacauugaaaagaaaaucuguaagauggagaaaugcuccagcguuuuuaacguggucaauucuuccaucggacugauuauggugcucagcuuccuguuucuuaacggcgggggaggcuccgggggaggcggcaagcuggaaucuacaagaaucuaccagauucucgccaucuauagcaccguggcuuccagccugguccugguugugucucucggggccauuuccuucuggauguguagcaauggaucucugcaaugccggaucuguauuugaggacuagucccuguucccagagcccacuuuuuuuucuuuuuuugaaauaaaauagccugucuuucagaucuaaaaaaaaaaaaaaaaaaaaaaaaaaaaaaaaaaaaaaaaaaaaaaaaaaaaaaaaaaaaaaaaugcaucccccccccccccccccccccccccccccccaaaggcucuuuucagagccaccagaauu

SEQ ID NO: 813 - RNA, 1509 nt, Artificial Sequence
  mRNA Design a-1 (A64-N5-C30-hSL-N5) comprising derived and/or modified sequence from Pf(3D7)__XP_001351122.1__Pf-CSP(199-377)_L(PVTN)_HBsAg (opt5)
aggagagucccgcagucggcguccagcggcucugcuuguucgugugugugucguugcaggccuuauucaagcuuaccauggaccccaacgccaauccuaacgcuaauccgaacgccaaucccaacgcgaauccuaacgcuaaucccaacgccaauccuaacgccaaucccaacgcuaauccuaacgccaacccgaaugcuaaccccaaugccaacccuaaugcgaaccccaaugccaacccuaaugcuaaccccaaugccaacccgaaugcuaacccuaaugccaaccccaacgcgaauccuaacaagaauaaccagggcaaugggcaaggacacaacaugcccaaugaucccaacagaaauguggacgagaacgccaaugcuaacagcgccgucaaaaauaacaauaacgaggaaccuuccgauaagcauaucaaagaauaccugaacaagauucaaaauucucucagcaccgagugguccccgugcucuguuacauguggcaacgggauccaggugcggauuaaacccggaagcgcuaauaagccuaaggacgaacuggauuaugccaacgacaucgagaaaaagauuugcaaaauggagaaguguuccucugugcccgucacgaauauggaaaacaucaccagcggcuuccuugggccucugcucgugcugcaggccggauuuuuccuucugacacgcauccucaccauuccccagucccuggauagcugguggacaucucugaauuuucucggcggcuccccgguuugccuggggcagaacagccagucuccuaccuccaaucacagccccacaucuuguccucccaucugcccuggauacagauggaugugucuucggcgcuucauuaucuuucuguucauucuccugcuuugccugaucuuucuccuggugcugcucgacuaucagggcaugcugcccgucuguccgcuuauuccuggguccaccacgaccaacacaggacccugcaaaaccuguacaacccccgcucaaggcaauagcauguucccuuccugcugcuguacgaagccgacagaugggaacugcaccuguauccccaucccuucuagcugggcguuugccaaguaccugugggagugggcuuccgugagauucagcuggcucucucugcuuguucccuuugugcagugguucgucggacuguccccuacaguguggcucagcgccauuuggaugaugugguauuggggccccucucuguacagcaucguguccccuuuuauuccccugcucccgaucuucuucugccugugggucuauauuugaggacuagucccuguucccagagcccacuuuuuuuucuuuuuuugaaauaaaauagccugucuuucagaucuaaaaaaaaaaaaaaaaaaaaaaaaaaaaaaaaaaaaaaaaaaaaaaaaaaaaaaaaaaaaaaaaugcaucccccccccccccccccccccccccccccccaaaggcucuuuucagagccaccagaauu

SEQ ID NO: 814 - RNA, 1551 nt, Artificial Sequence
  mRNA Design a-1 (A64-N5-C30-hSL-N5) comprising derived and/or modified sequence from Pf(3D7)__XP_001351122.1__Pf-CSP(199-387)_L(PVTN)_HBsAg (opt5)
aggagagucccgcagucggcguccagcggcucugcuuguucgugugugugucguugcaggccuuauucaagcuuaccaugauggcccccgacccuaacgcuaauccgaacgccaaucccaacgcgaauccuaacgcuaaucccaacgccaauccuaacgccaaucccaacgcuaauccuaacgccaauccgaacgcuaaccccaaugccaacccuaaugcgaaccccaaugccaacccuaaugcuaaccccaaugccaacccgaaugcuaacccuaaugccaaccccaaugcgaacccuaacgccaaucccaacaagaauaaccagggcaaugggcaaggacacaacaugcccaaugauccuaacagaaauguggacgagaacgcuaaugccaacagcgcugucaaaaauaacaauaacgaggaaccguccgauaagcauaucaaagaauaccugaacaagauucaaaauucucucagcaccgaguggucccccugcucuguuacauguggcaacgggauccaggugcggauuaaaccuggaagcgccaauaagcccaaggacgaacuggauuaugccaacgacaucgagaaaaagauuugcaaaauggagaaguguuccucuguguucaaugucgugaacagcuccaucggccuugggccuguuacgaauauggaaaacaucaccagcggauuucugggcccccuccuggugcuucaggcuggcuucuuucugcucacacgcauucugaccaucccgcagucucuggauuccugguggacaagccucaauuuccuugggggaucuccugucugccugggccagaacucccagagccccaccucuaaucacuccccuacaagcugucccccuauuugccccggguacagauggaugugucugcggcgcuuuaucauuuuccucuuuauccugcuucugugccucauuuuccugcuggugcuccuggacuaucagggaaugcuuccgguuuguccucugauccccggcuccaccacgaccaacacagggcccugcaaaaccuguacaaccccugcgcaaggaaauucuauguuuccgagcugcugcuguacgaagcccacagauggcaacugcaccuguaucccuauucccuccagcugggccuucgcuaaguaccucugggagugggccucugugagauuuuccuggcugagccuucuggucccuuucgugcagugguuugugggccucucucccacagucuggcugagcgccaucuggaugaugugguauugggggccuucccuguacucuauuguuagccccuucaucccgcuccugccuauuuucuuuugccuuuggguguauaucugaggacuagucccuguucccagagcccacuuuuuuuucuuuuuuugaaauaaaauagccugucuuucagaucuaaaaaaaaaaaaaaaaaaaaaaaaaaaaaaaaaaaaaaaaaaaaaaaaaaaaaaaaaaaaaaaaugcaucccccccccccccccccccccccccccccccaaaggcucuuuucagagccaccagaauu

SEQ ID NO: 815 - RNA, 735 nt, Artificial Sequence
  mRNA Design a-1 (A64-N5-C30-hSL-N5) comprising derived and/or modified sequence from Pf(3D7)__XP_001351122.1__HsALB_Pf-CSP(19-152) (opt5)
aggagagucccgcagucggcguccagcggcucugcuuguucgugugugugucguugcaggccuuauucaagcuuaccaugaagugggugaccuucaucagccugcucuuucuguucuccucugccuacagccuuuuucaggaguaucaaugcuacggcuccucuagcaacacaagaguccugaaugaacucaacuaugacaaugcugggacgaaccuguacaaugagcuugaaaugaacuauuacggaaaacaggagaauugguauucccugaagaaaaacucucggagccucggcgaaaaugaugacgggaacaaugaggauaacgagaagcugcgcaaacccaagcacaagaaacugaagcagccugccgacggaaauccggaucccaacgcgaauccuaacguugaccccaacgcuaauccuaacguggaucccaaugccaacccuaauguggacccgaacgccaaucccaacgcuaauccuaacgccaaucccaacgcuaauccuaacgccaaucccaacgcgaacccgugaggacuagucccuguucccagagcccacuuuuuuuucuuuuuuugaaauaaaauagccugucuuucagaucuaaaaaaaaaaaaaaaaaaaaaaaaaaaaaaaaaaaaaaaaaaaaaaaaaaaaaaaaaaaaaaaaugcaucccccccccccccccccccccccccccccccaaaggcucuuuucagagccaccagaauu

SEQ ID NO: 816 - RNA, 855 nt, Artificial Sequence
  mRNA Design a-1 (A64-N5-C30-hSL-N5) comprising derived and/or modified sequence from Pf(3D7)__XP_001351122.1__HsALB_Pf-CSP(19-192) (opt5)
aggagagucccgcagucggcguccagcggcucugcuuguucgugugugugucguugcaggccuuauucaagcuuaccaugaagugggugaccuucaucagccugcucuuucuguucuccucugccuacagccuuuuucaggaguaucaaugcuacggcuccucuagcaacacaagaguccugaaugaacucaacuaugacaaugcugggacgaaccuguacaaugagcuugaaaugaacuauuacggaaaacaggagaauugguauucccugaagaaaaacucucggagccucggcgaaaaugaugacgggaacaaugaggauaacgagaagcugcgcaaacccaagcacaagaaacugaagcagccugccgacggaaauccggaucccaacgcgaauccuaacguugaccccaacgcuaauccuaacguggaucccaaugccaacccuaauguggacccgaacgccaaucccaacgcuaauccuaacgccaaucccaacgcuaauccuaacgccaaucccaacgcgaacccgaaugccaacccuaaugcuaaccccaaugccaacccuaaugcuaaccccaaugccaaccccaaugcgaacccuaaugccaacccgaaugcuaaccccaacgccaauccuaacgcuaaucccugaggacuagucccuguucccagagcccacuuuuuuuucuuuuuuugaaauaaaauagccugucuuucagaucuaaaaaaaaaaaaaaaaaaaaaaaaaaaaaaaaaaaaaaaaaaaaaaaaaaaaaaaaaaaaaaaaugcaucccccccccccccccccccccccccccccccaaaggcucuuuucagagccaccagaauu

SEQ ID NO: 817 - RNA, 1095 nt, Artificial Sequence
  mRNA Design a-1 (A64-N5-C30-hSL-N5) comprising derived and/or modified sequence from Pf(3D7)__XP_001351122.1__HsALB_Pf-CSP(19-272) (opt5)
aggagagucccgcagucggcguccagcggcucugcuuguucgugugugugucguugcaggccuuauucaagcuuaccaugaagugggugaccuucaucagccugcucuuucuguucuccucugccuacagccuuuuucaggaguaucaaugcuacggcuccucuagcaacacaagaguccugaaugaacucaacuaugacaaugcugggacgaaccuguacaaugagcuugaaaugaacuauuacggaaaacaggagaauugguauucccugaagaaaaacucucggagccucggcgaaaaugaugacgggaacaaugaggauaacgagaagcugcgcaaacccaagcacaagaaacugaagcagccugccgacggaaauccggaucccaacgcgaauccuaacguugaccccaacgcuaauccuaacguggaucccaaugccaacccuaauguggacccgaacgccaaucccaacgcuaauccuaacgccaaucccaacgcuaauccuaacgccaaucccaacgcgaacccgaaugccaacccuaaugcuaaccccaaugccaacccuaaugcuaaccccaaugccaaccccaaugcgaacccuaaugccaacccgaaugcuaaccccaacgccaauccuaacgcuaaucccaacgccaauccuaacgucgaucccaaugccaacccgaaugcuaacccuaaugcgaaccccaaugccaacccuaaugcuaaccccaacgccaauccuaacgccaaucccaacgcuaauccgaacgccaauccuaacgcgaaucccaacgcuaaucccaacgccaauccuaacgccaauccgaacgcuaaucccaacgccaacccuaaugcuaaccccaaugccaacccuaaugcgaaccccugaggacuagucccuguucccagagcccacuuuuuuuucuuuuuuugaaauaaaauagccugucuuucagaucuaaaaaaaaaaaaaaaaaaaaaaaaaaaaaaaaaaaaaaaaaaaaaaaaaaaaaaaaaaaaaaaaugcaucccccccccccccccccccccccccccccccaaaggcucuuuucagagccaccagaauu

SEQ ID NO: 818 - RNA, 1257 nt, Artificial Sequence
  mRNA Design a-1 (A64-N5-C30-hSL-N5) comprising derived and/or modified sequence from Pf(3D7)__XP_001351122.1__HsALB_Pf-CSP(19-272)_L(AAY)_Pf-CSP(310-3 27)_L(AAY)_Pf-CSP(346-375) (opt5)
aggagagucccgcagucggcguccagcggcucugcuuguucgugugugugucguugcaggccuuauucaagcuuaccaugaagugggugaccuucaucagccugcucuuucuguucuccucugccuacagccuuuuucaggaguaucaaugcuacggcuccucuagcaacacaagaguccugaaugaacucaacuaugacaaugcugggacgaaccuguacaaugagcuugaaaugaacuauuacggaaaacaggagaauugguauucccugaagaaaaacucucggagccucggcgaaaaugaugacgggaacaaugaggauaacgagaagcugcgcaaacccaagcacaagaaacugaagcagccugccgacggaaauccggaucccaacgcgaauccuaacguugaccccaacgcuaauccuaacguggaucccaaugccaacccuaauguggacccgaacgccaaucccaacgcuaauccuaacgccaaucccaacgcuaauccuaacgccaaucccaacgcgaacccgaaugccaacccuaaugcuaaccccaaugccaacccuaaugcuaaccccaaugccaaccccaaugcgaacccuaaugccaacccgaaugcuaaccccaacgccaauccuaacgcuaaucccaacgccaauccuaacgucgaucccaaugccaacccgaaugcuaacccuaaugcgaaccccaaugccaacccuaaugcuaaccccaacgccaauccuaacgccaaucccaacgcuaauccgaacgccaauccuaacgcgaaucccaacgcuaaucccaacgccaauccuaacgccaauccgaacgcuaaucccaacgccaacccuaaugcuaaccccaaugccaacccuaaugcgaaccccgccgcuuacgaaccuuccgacaaacauauuaaggaguaccucaauaaaauccagaacagccuggccgcuuauauuaagcccggcucugccaauaagccgaaagaugaacuugacuacgcgaacgauaucgagaagaaaauuuguaagauggagaaaugcuccugaggacuagucccuguucccagagcccacuuuuuuuucuuuuuuugaaauaaaauagccugucuuucagaucuaaaaaaaaaaaaaaaaaaaaaaaaaaaaaaaaaaaaaaaaaaaaaaaaaaaaaaaaaaaaaaaaugcaucccccccccccccccccccccccccccccccaaaggcucuuuucagagccaccagaauu

SEQ ID NO: 819 - RNA, 1218 nt, Artificial Sequence
  mRNA Design a-1 (A64-N5-C30-hSL-N5) comprising derived and/or modified sequence from Pf(3D7)__XP_001351122.1__HsALB_Pf-CSP(19-272)_L(AAY)_Pf-CSP(346-3 65)_L(AAY)_P2 (opt5)
aggagagucccgcagucggcguccagcggcucugcuuguucgugugugugucguugcaggccuuauucaagcuuaccaugaagugggugaccuucaucagccugcucuuucuguucuccucugccuacagccuuuuucaggaguaucaaugcuacggcuccucuagcaacacaagaguccugaaugaacucaacuaugacaaugcugggacgaaccuguacaaugagcuugaaaugaacuauuacggaaaacaggagaauugguauucccugaagaaaaacucucggagccucggcgaaaaugaugacgggaacaaugaggauaacgagaagcugcgcaaacccaagcacaagaaacugaagcagccugccgacggaaauccggaucccaacgcgaauccuaacguugaccccaacgcuaauccuaacguggaucccaaugccaacccuaauguggacccgaacgccaaucccaacgcuaauccuaacgccaaucccaacgcuaauccuaacgccaaucccaacgcgaacccgaaugccaacccuaaugcuaaccccaaugccaacccuaaugcuaaccccaaugccaaccccaaugcgaacccuaaugccaacccgaaugcuaaccccaacgccaauccuaacgcuaaucccaacgccaauccuaacgucgaucccaaugccaacccgaaugcuaacccuaaugcgaaccccaaugccaacccuaaugcuaaccccaacgccaauccuaacgccaaucccaacgcuaauccgaacgccaauccuaacgcgaaucccaacgcuaaucccaacgccaauccuaacgccaauccgaacgcuaaucccaacgccaacccuaaugcuaaccccaaugccaacccuaaugcgaaccccgccgcuuacauuaaaccuggcuccgccaauaagcccaaagacgaacucgauuacgcuaacgacaucgaggccgcguaucaguacauuaaggccaauagcaaguucaucgggauuaccgaacugugaggacuagucccuguucccagagcccacuuuuuuuucuuuuuuugaaauaaaauagccugucuuucagaucuaaaaaaaaaaaaaaaaaaaaaaaaaaaaaaaaaaaaaaaaaaaaaaaaaaaaaaaaaaaaaaaaugcaucccccccccccccccccccccccccccccccaaaggcucuuuucagagccaccagaauu

SEQ ID NO: 820 - RNA, 1212 nt, Artificial Sequence
  mRNA Design a-1 (A64-N5-C30-hSL-N5) comprising derived and/or modified sequence from Pf(3D7)__XP_001351122.1__HsALB_Pf-CSP(19-272)_L(AAY)_Pf-CSP(346-3 65)_L(AAY)_PADRE (opt5)
aggagagucccgcagucggcguccagcggcucugcuuguucgugugugugucguugcaggccuuauucaagcuuaccaugaagugggugaccuucaucagccugcucuuucuguucuccucugccuacagccuuuuucaggaguaucaaugcuacggcuccucuagcaacacaagaguccugaaugaacucaacuaugacaaugcugggacgaaccuguacaaugagcuugaaaugaacuauuacggaaaacaggagaauugguauucccugaagaaaaacucucggagccucggcgaaaaugaugacgggaacaaugaggauaacgagaagcugcgcaaacccaagcacaagaaacugaagcagccugccgacggaaauccggaucccaacgcgaauccuaacguugaccccaacgcuaauccuaacguggaucccaaugccaacccuaauguggacccgaacgccaaucccaacgcuaauccuaacgccaaucccaacgcuaauccuaacgccaaucccaacgcgaacccgaaugccaacccuaaugcuaaccccaaugccaacccuaaugcuaaccccaaugccaaccccaaugcgaacccuaaugccaacccgaaugcuaaccccaacgccaauccuaacgcuaaucccaacgccaauccuaacgucgaucccaaugccaacccgaaugcuaacccuaaugcgaaccccaaugccaacccuaaugcuaaccccaacgccaauccuaacgccaaucccaacgcuaauccgaacgccaauccuaacgcgaaucccaacgcuaaucccaacgccaauccuaacgccaauccgaacgcuaaucccaacgccaacccuaaugcuaaccccaaugccaacccuaaugcgaaccccgccgcuuacauuaaaccuggcuccgccaauaagcccaaagacgaacucgauuacgcuaacgacaucgaggccgcguaugccaaguucguggcugccuggacccugaaggcugccgccugaggacuagucccuguucccagagcccacuuuuuuuucuuuuuuugaaauaaaauagccugucuuucagaucuaaaaaaaaaaaaaaaaaaaaaaaaaaaaaaaaaaaaaaaaaaaaaaaaaaaaaaaaaaaaaaaaugcaucccccccccccccccccccccccccccccccaaaggcucuuuucagagccaccagaauu

SEQ ID NO: 821 - RNA, 1269 nt, Artificial Sequence
  mRNA Design a-1 (A64-N5-C30-hSL-N5) comprising derived and/or modified sequence from Pf(3D7)__XP_001351122.1__HsALB_Pf-CSP(19-272)_L(G4S)_Pf-CSP(310-3 27)_L(G4S)_Pf-CSP(346-375) (opt5)
aggagagucccgcagucggcguccagcggcucugcuuguucgugugugugucguugcaggccuuauucaagcuuaccaugaagugggugaccuucaucagccugcucuuucuguucuccucugccuacagccuuuuucaggaguaucaaugcuacggcuccucuagcaacacaagaguccugaaugaacucaacuaugacaaugcugggacgaaccuguacaaugagcuugaaaugaacuauuacggaaaacaggagaauugguauucccugaagaaaaacucucggagccucggcgaaaaugaugacgggaacaaugaggauaacgagaagcugcgcaaacccaagcacaagaaacugaagcagccugccgacggaaauccggaucccaacgcgaauccuaacguugaccccaacgcuaauccuaacguggaucccaaugccaacccuaauguggacccgaacgccaaucccaacgcuaauccuaacgccaaucccaacgcuaauccuaacgccaaucccaacgcgaacccgaaugccaacccuaaugcuaaccccaaugccaacccuaaugcuaaccccaaugccaaccccaaugcgaacccuaaugccaacccgaaugcuaaccccaacgccaauccuaacgcuaaucccaacgccaauccuaacgucgaucccaaugccaacccgaaugcuaacccuaaugcgaaccccaaugccaacccuaaugcuaaccccaacgccaauccuaacgccaaucccaacgcuaauccgaacgccaauccuaacgcgaaucccaacgcuaaucccaacgccaauccuaacgccaauccgaacgcuaaucccaacgccaacccuaaugcuaaccccaaugccaacccuaaugcgaaccccggcgggggaggcuccgaaccuagcgacaaacauauuaaggaguaccucaauaaaauccagaacucucugggcgggggaggcuccauuaagcccgggagcgccaauaagccgaaagaugaacuugacuacgcuaacgauaucgagaagaaaauuuguaagauggagaaaugcucuugaggacuagucccuguucccagagcccacuuuuuuuucuuuuuuugaaauaaaauagccugucuuucagaucuaaaaaaaaaaaaaaaaaaaaaaaaaaaaaaaaaaaaaaaaaaaaaaaaaaaaaaaaaaaaaaaaugcaucccccccccccccccccccccccccccccccaaaggcucuuuucagagccaccagaauu

SEQ ID NO: 822 - RNA, 1254 nt, Artificial Sequence
  mRNA Design a-1 (A64-N5-C30-hSL-N5) comprising derived and/or modified sequence from Pf(3D7)__XP_001351122.1__HsALB_Pf-CSP(19-272)_L(G4S)_Pf-CSP(310-3 27)_Pf-CSP(346-375) (opt5)
aggagagucccgcagucggcguccagcggcucugcuuguucgugugugugucguugcaggccuuauucaagcuuaccaugaagugggugaccuucaucagccugcucuuucuguucuccucugccuacagccuuuuucaggaguaucaaugcuacggcuccucuagcaacacaagaguccugaaugaacucaacuaugacaaugcugggacgaaccuguacaaugagcuugaaaugaacuauuacggaaaacaggagaauugguauucccugaagaaaaacucucggagccucggcgaaaaugaugacgggaacaaugaggauaacgagaagcugcgcaaacccaagcacaagaaacugaagcagccugccgacggaaauccggaucccaacgcgaauccuaacguugaccccaacgcuaauccuaacguggaucccaaugccaacccuaauguggacccgaacgccaaucccaacgcuaauccuaacgccaaucccaacgcuaauccuaacgccaaucccaacgcgaacccgaaugccaacccuaaugcuaaccccaaugccaacccuaaugcuaaccccaaugccaaccccaaugcgaacccuaaugccaacccgaaugcuaaccccaacgccaauccuaacgcuaaucccaacgccaauccuaacgucgaucccaaugccaacccgaaugcuaacccuaaugcgaaccccaaugccaacccuaaugcuaaccccaacgccaauccuaacgccaaucccaacgcuaauccgaacgccaauccuaacgcgaaucccaacgcuaaucccaacgccaauccuaacgccaauccgaacgcuaaucccaacgccaacccuaaugcuaaccccaaugccaacccuaaugcgaaccccggcgggggaggcuccgaaccuagcgacaaacauauuaaggaguaccucaauaaaauccagaacucucugauuaagcccggcuccgccaauaagccgaaagaugaacuugacuacgcuaacgauaucgagaagaaaauuuguaagauggagaaaugcagcugaggacuagucccuguucccagagcccacuuuuuuuucuuuuuuugaaauaaaauagccugucuuucagaucuaaaaaaaaaaaaaaaaaaaaaaaaaaaaaaaaaaaaaaaaaaaaaaaaaaaaaaaaaaaaaaaaugcaucccccccccccccccccccccccccccccccaaaggcucuuuucagagccaccagaauu

SEQ ID NO: 823 - RNA, 1254 nt, Artificial Sequence
  mRNA Design a-1 (A64-N5-C30-hSL-N5) comprising derived and/or modified sequence from Pf(3D7)__XP_001351122.1__HsALB_Pf-CSP(19-325) (opt5)
aggagagucccgcagucggcguccagcggcucugcuuguucgugugugugucguugcaggccuuauucaagcuuaccaugaagugggugaccuucaucagccugcucuuucuguucuccucugccuacagccuuuuucaggaguaucaaugcuacggcuccucuagcaacacaagaguccugaaugaacucaacuaugacaaugcugggacgaaccuguacaaugagcuugaaaugaacuauuacggaaaacaggagaauugguauucccugaagaaaaacucucggagccucggcgaaaaugaugacgggaacaaugaggauaacgagaagcugcgcaaacccaagcacaagaaacugaagcagccugccgacggaaauccggaucccaacgcgaauccuaacguugaccccaacgcuaauccuaacguggaucccaaugccaacccuaauguggacccgaacgccaaucccaacgcuaauccuaacgccaaucccaacgcuaauccuaacgccaaucccaacgcgaacccgaaugccaacccuaaugcuaaccccaaugccaacccuaaugcuaaccccaaugccaaccccaaugcgaacccuaaugccaacccgaaugcuaaccccaacgccaauccuaacgcuaaucccaacgccaauccuaacgucgaucccaaugccaacccgaaugcuaacccuaaugcgaaccccaaugccaacccuaaugcuaaccccaacgccaauccuaacgccaaucccaacgcuaauccgaacgccaauccuaacgcgaaucccaacgcuaaucccaacgccaauccuaacgccaauccgaacgcuaaucccaacgccaacccuaaugcuaaccccaaugccaacccuaaugcgaaccccaauaaaaacaaucagggcaacgggcaaggacauaauaugccuaacgaccccaauagaaacguggaugaaaaugccaacgcuaacuccgccguuaagaauaacaauaacgaggaaccgagcgacaaacacauuaaggaguaccucaauaagauccagaacugaggacuagucccuguucccagagcccacuuuuuuuucuuuuuuugaaauaaaauagccugucuuucagaucuaaaaaaaaaaaaaaaaaaaaaaaaaaaaaaaaaaaaaaaaaaaaaaaaaaaaaaaaaaaaaaaaugcaucccccccccccccccccccccccccccccccaaaggcucuuuucagagccaccagaauu

SEQ ID NO: 824 - RNA, 1431 nt, Artificial Sequence
  mRNA Design a-1 (A64-N5-C30-hSL-N5) comprising derived and/or modified sequence from Pf(3D7)__XP_001351122.1__HsALB_Pf-CSP(19-384) (opt5)
aggagagucccgcagucggcguccagcggcucugcuuguucgugugugugucguugcaggccuuauucaagcuuaccaugaagugggugaccuucaucagccugcucuuucuguucuccucugccuacagccuuuuucaggaguaucaaugcuacggcuccucuagcaacacaagagugcugaaugaacucaacuaugacaaugcugggacgaaccuguacaaugagcuugaaaugaacuauuacggaaaacaggagaauugguauucccugaagaaaaacucucggagccucggcgaaaaugaugacgggaacaaugaggauaacgagaagcugcgcaaacccaagcacaagaaacugaagcagccugccgacggaaauccggaucccaacgcgaauccuaacguugaccccaacgcuaauccuaacguggaucccaaugccaacccuaauguggacccgaacgccaaucccaacgcuaauccuaacgccaaucccaacgcuaauccuaacgccaaucccaacgcgaacccgaaugccaacccuaaugcuaaccccaaugccaacccuaaugcuaaccccaaugccaaccccaaugcgaacccuaaugccaacccgaaugcuaaccccaacgccaauccuaacgcuaaucccaacgccaauccuaacgucgaucccaaugccaacccgaaugcuaacccuaaugcgaaccccaaugccaacccuaaugcuaaccccaacgccaauccuaacgccaaucccaacgcuaauccgaacgccaauccuaacgcgaaucccaacgcuaaucccaacgccaauccuaacgccaauccgaacgcuaaucccaacgccaacccuaaugcuaaccccaaugccaacccuaaugcgaaccccaauaaaaacaaucagggcaacgggcaaggacauaauaugccuaacgaccccaauagaaacguggaugaaaaugccaacgcuaacuccgccguuaagaauaacaauaacgaggaaccgagcgacaaacacauuaaggaguaccucaauaagauccagaacucucuguccaccgaguggagcccuuguucugugacaugcggcaauggcauucagguccggaucaaacccggguccgcuaacaagccuaaagaugaacuugacuacgccaaugacauugagaagaaaaucuguaagauggaaaaaugcagcucuguguucaacguugucaauuccagcugaggacuagucccuguucccagagcccacuuuuuuuucuuuuuuugaaauaaaauagccugucuuucagaucuaaaaaaaaaaaaaaaaaaaaaaaaaaaaaaaaaaaaaaaaaaaaaaaaaaaaaaaaaaaaaaaaugcaucccccccccccccccccccccccccccccccaaaggcucuuuucagagccaccagaauu

SEQ ID NO: 825 - RNA, 1569 nt, Artificial Sequence
  mRNA Design a-1 (A64-N5-C30-hSL-N5) comprising derived and/or modified sequence from Pf(3D7)__XP_001351122.1__HsALB_Pf-CSP(19-384)_TM domain HA (opt5)
aggagagucccgcagucggcguccagcggcucugcuuguucgugugugugucguugcaggccuuauucaagcuuaccaugaagugggugaccuucaucagccugcucuuucuguucuccucugccuacagccuuuuucaggaguaucaaugcuacggcuccucuagcaacacaagaguccugaaugaacucaacuaugacaaugcugggacgaaccuguacaaugagcuugaaaugaacuauuacggaaaacaggagaauugguauucccugaagaaaaacucucggagccucggcgaaaaugaugacgggaacaaugaggauaacgagaagcugcgcaaacccaagcacaagaaacugaagcagccugccgacggaaauccggaucccaacgcgaauccuaacguugaccccaacgcuaauccuaacguggaucccaaugccaacccuaauguggacccgaacgccaaucccaacgcuaauccuaacgccaaucccaacgcuaauccuaacgccaaucccaacgcgaacccgaaugccaacccuaaugcuaaccccaaugccaacccuaaugcuaaccccaaugccaaccccaaugcgaacccuaaugccaacccgaaugcuaaccccaacgccaauccuaacgcuaaucccaacgccaauccuaacgucgaucccaaugccaacccgaaugcuaacccuaaugcgaaccccaaugccaacccuaaugcuaaccccaacgccaauccuaacgccaaucccaacgcuaauccgaacgccaauccuaacgcgaaucccaacgcuaaucccaacgccaauccuaacgccaauccgaacgcuaaucccaacgccaacccuaaugcuaaccccaaugccaacccuaaugcgaaccccaauaaaaacaaucagggcaacgggcaaggacauaauaugccuaacgaccccaauagaaacguggaugaaaaugccaacgcuaacuccgccguuaagaauaacaauaacgaggaaccgagcgacaaacacauuaaggaguaccucaauaagauccagaacucucuguccaccgaguggagcccuuguucugugacaugcggcaauggcauucagguccggaucaaacccggguccgcuaacaagccuaaagaugaacuugacuacgccaaugacauugagaagaaaaucuguaagauggaaaaaugcagcucuguguucaacguugucaauuccagcaagcuggaguccacccgcaucuaucagauucucgcgaucuacucuacaguggccagcucccuggugcuuguggucagccugggagcuauuucuuuuuggauguguuccaacggcagccuccaaugcagaaucuguauuugaggacuagucccuguucccagagcccacuuuuuuuucuuuuuuugaaauaaaauagccugucuuucagaucuaaaaaaaaaaaaaaaaaaaaaaaaaaaaaaaaaaaaaaaaaaaaaaaaaaaaaaaaaaaaaaaaugcaucccccccccccccccccccccccccccccccaaaggcucuuuucagagccaccagaauu

SEQ ID NO: 826 - RNA, 1281 nt, Artificial Sequence
  mRNA Design a-1 (A64-N5-C30-hSL-N5) comprising derived and/or modified sequence from Pf(3D7)__XP_001351122.1__HsALB_Pf-CSP(82-397) (opt5)
aggagagucccgcagucggcguccagcggcucugcuuguucgugugugugucguugcaggccuuauucaagcuuaccaugaagugggugaccuucaucagccugcucuuucuguucuccucugccuacagcgacaacgagaaacuuagaaagcccaaacacaagaaacugaagcagccugcugauggcaauccggaccccaacgccaauccuaacgucgaucccaaugcgaacccuaauguugaccccaacgcuaauccuaacguggauccgaaugccaaccccaaugccaacccuaaugcuaaccccaacgccaauccuaacgcuaaucccaacgccaauccgaacgcgaauccuaacgccaaucccaacgcuaauccuaacgccaaucccaacgcuaaucccaacgccaacccuaaugcgaacccgaaugccaaccccaaugcuaacccuaaugccaaccccaaugcuaacccuaauguggaccccaacgccaauccgaacgccaauccuaacgcuaaccccaaugcgaacccuaaugccaaccccaaugcuaacccuaaugccaaccccaaugccaacccgaaugcuaacccuaaugccaaccccaaugcgaaccccaacgcuaauccuaacgccaauccgaacgccaaucccaacgcuaauccuaacgccaaucccaacgcuaauccuaacgccaaucccaacaagaauaaccaagggaauggacagggccauaacaugccuaacgaucccaaucggaacgucgacgaaaaugcgaacgccaauuccgcugugaaaaacaauaacaaugaggaaccgucugauaagcacauuaaagaguaucucaacaagauccagaauagccuguccacagaauggucuccuugcagcguuacgugugggaacggcauucaggugcgcaucaaacccggauccgccaauaagccuaaggacgagcuugauuacgcuaacgacauugagaaaaagaucugcaaaauggaaaaguguagcucugucuuuaaugugguuaacuccagcaucgggcugauuauggugcucucuuuccuguuucugaacugaggacuagucccuguucccagagcccacuuuuuuuucuuuuuuugaaauaaaauagccugucuuucagaucuaaaaaaaaaaaaaaaaaaaaaaaaaaaaaaaaaaaaaaaaaaaaaaaaaaaaaaaaaaaaaaaaugcaucccccccccccccccccccccccccccccccaaaggcucuuuucagagccaccagaauu

SEQ ID NO: 827 - RNA, 633 nt, Artificial Sequence
  mRNA Design a-1 (A64-N5-C30-hSL-N5) comprising derived and/or modified sequence from Pf(3D7)__XP_001351122.1__HsALB_Pf-CSP(93-192) (opt5)
aggagagucccgcagucggcguccagcggcucugcuuguucgugugugugucguugcaggccuuauucaagcuuaccaugaagugggugaccuucaucagccugcucuuucuguucuccucugccuacagcaaacuuaagcagcccgcugacggcaacccugauccgaaugccaaccccaaugucgacccuaacgcgaaucccaacguugauccuaaugcuaaccccaauguggacccuaacgccaauccgaacgccaaucccaacgcuaauccuaacgccaaccccaaugcuaacccuaaugccaaccccaaugcgaacccgaaugccaacccuaaugcuaaccccaaugccaacccuaaugcuaaccccaaugccaaccccaacgcgaauccuaacgccaauccgaacgcuaaucccaacgccaauccuugaggacuagucccuguucccagagcccacuuuuuuuucuuuuuuugaaauaaaauagccugucuuucagaucuaaaaaaaaaaaaaaaaaaaaaaaaaaaaaaaaaaaaaaaaaaaaaaaaaaaaaaaaaaaaaaaaugcaucccccccccccccccccccccccccccccccaaaggcucuuuucagagccaccagaauu

SEQ ID NO: 828 - RNA, 873 nt, Artificial Sequence
  mRNA Design a-1 (A64-N5-C30-hSL-N5) comprising derived and/or modified sequence from Pf(3D7)__XP_001351122.1__HsALB_Pf-CSP(93-272) (opt5)
aggagagucccgcagucggcguccagcggcucugcuuguucgugugugugucguugcaggccuuauucaagcuuaccaugaagugggugaccuucaucagccugcucuuucuguucuccucugccuacagcaaacuuaagcagcccgcugacggcaacccugauccgaaugccaaccccaaugucgacccuaacgcgaaucccaacguugauccuaaugcuaaccccaauguggacccuaacgccaauccgaacgccaaucccaacgcuaauccuaacgccaaccccaaugcuaacccuaaugccaaccccaaugcgaacccgaaugccaacccuaaugcuaaccccaaugccaacccuaaugcuaaccccaaugccaaccccaacgcgaauccuaacgccaauccgaacgcuaaucccaacgccaauccuaacgcuaaucccaacguggauccuaaugccaaccccaaugccaacccgaaugcuaacccuaacgcgaaucccaacgccaauccuaacgcuaaucccaacgccaauccuaacgccaaucccaacgcuaauccgaacgccaauccuaacgcgaaucccaacgcuaaccccaaugccaacccuaaugccaacccgaaugcuaaccccaaugccaacccuaaugcuaaccccaaugccaacccuugaggacuagucccuguucccagagcccacuuuuuuuucuuuuuuugaaauaaaauagccugucuuucagaucuaaaaaaaaaaaaaaaaaaaaaaaaaaaaaaaaaaaaaaaaaaaaaaaaaaaaaaaaaaaaaaaaugcaucccccccccccccccccccccccccccccccaaaggcucuuuucagagccaccagaauu

SEQ ID NO: 829 - RNA, 1248 nt, Artificial Sequence
  mRNA Design a-1 (A64-N5-C30-hSL-N5) comprising derived and/or modified sequence from Pf(3D7)__XP_001351122.1__HsALB_Pf-CSP(93-397) (opt5)
aggagagucccgcagucggcguccagcggcucugcuuguucgugugugugucguugcaggccuuauucaagcuuaccaugaagugggugaccuucaucagccugcucuuucuguucuccucugccuacagcaaacuuaagcagcccgcugacggcaacccugauccgaaugccaaccccaaugucgacccuaacgcgaaucccaacguugauccuaaugcuaaccccaauguggacccuaacgccaauccgaacgccaaucccaacgcuaauccuaacgccaaccccaaugcuaacccuaaugccaaccccaaugcgaacccgaaugccaacccuaaugcuaaccccaaugccaacccuaaugcuaaccccaaugccaaccccaacgcgaauccuaacgccaauccgaacgcuaaucccaacgccaauccuaacgcuaaucccaacguggauccuaaugccaaccccaaugccaacccgaaugcuaacccuaacgcgaaucccaacgccaauccuaacgcuaaucccaacgccaauccuaacgccaaucccaacgcuaauccgaacgccaauccuaacgcgaaucccaacgcuaaccccaaugccaacccuaaugccaacccgaaugcuaaccccaaugccaacccuaaugcuaaccccaaugccaacccuaauaaaaacaaucaagggaacggacagggccacaauaugcccaacgacccuaacagaaaugucgaugagaacgcgaaugccaacuccgcugugaagaauaacaauaacgaggaacccucugacaaacauauuaaggaauaucugaauaagauccagaacagccucuccacagaguggucuccgugcagcguuacgugugggaauggcauucaggugcggaucaaaccuggauccgccaacaagcccaaagaugaacuggacuacgcuaaugauauugagaagaaaaucugcaagauggagaaguguagcucugucuuuaacgugguuaauuccagcaucgggcuuauuauggugcugucuuuccucuuucugaacugaggacuagucccuguucccagagcccacuuuuuuuucuuuuuuugaaauaaaauagccugucuuucagaucuaaaaaaaaaaaaaaaaaaaaaaaaaaaaaaaaaaaaaaaaaaaaaaaaaaaaaaaaaaaaaaaaugcaucccccccccccccccccccccccccccccccaaaggcucuuuucagagccaccagaauu

SEQ ID NO: 830 - RNA, 618 nt, Artificial Sequence
  mRNA Design a-1 (A64-N5-C30-hSL-N5) comprising derived and/or modified sequence from Pf(3D7)__XP_001351122.1__HsALB_Pf-CSP(98-192) (opt5)
aggagagucccgcagucggcguccagcggcucugcuuguucgugugugugucguugcaggccuuauucaagcuuaccaugaagugggugaccuucaucagccugcucuuucuguucuccucugccuacagcgcugacggcaaccccgauccuaaugccaacccgaaugucgaccccaacgcgaauccuaacguugaucccaaugcuaacccuaauguggaccccaacgccaauccuaacgccaauccgaacgcuaaucccaacgccaacccuaaugcuaaccccaaugccaacccuaaugcgaaccccaaugccaacccgaaugcuaacccuaaugccaaccccaaugcuaacccuaaugccaaccccaacgcgaaucccaacgccaauccuaacgcuaauccgaacgccaaucccugaggacuagucccuguucccagagcccacuuuuuuuucuuuuuuugaaauaaaauagccugucuuucagaucuaaaaaaaaaaaaaaaaaaaaaaaaaaaaaaaaaaaaaaaaaaaaaaaaaaaaaaaaaaaaaaaaugcaucccccccccccccccccccccccccccccccaaaggcucuuuucagagccaccagaauu

SEQ ID NO: 831 - RNA, 858 nt, Artificial Sequence
  mRNA Design a-1 (A64-N5-C30-hSL-N5) comprising derived and/or modified sequence from Pf(3D7)__XP_001351122.1__HsALB_Pf-CSP(98-272) (opt5)
aggagagucccgcagucggcguccagcggcucugcuuguucgugugugugucguugcaggccuuauucaagcuuaccaugaagugggugaccuucaucagccugcucuuucuguucuccucugccuacagcgcugacggcaaccccgauccuaaugccaacccgaaugucgaccccaacgcgaauccuaacguugaucccaaugcuaacccuaauguggaccccaacgccaauccuaacgccaauccgaacgcuaaucccaacgccaacccuaaugcuaaccccaaugccaacccuaaugcgaaccccaaugccaacccgaaugcuaacccuaaugccaaccccaaugcuaacccuaaugccaaccccaacgcgaaucccaacgccaauccuaacgcuaauccgaacgccaaucccaacgcuaauccuaacguggaucccaaugccaacccuaaugccaaccccaaugcuaacccgaacgcgaauccuaacgccaaucccaacgcuaauccuaacgccaaucccaacgccaauccuaacgcuaaucccaacgccaauccgaacgcgaauccuaacgcuaaccccaaugccaaccccaaugccaacccuaaugcuaacccgaaugccaaccccaaugcuaacccuaaugccaaccccugaggacuagucccuguucccagagcccacuuuuuuuucuuuuuuugaaauaaaauagccugucuuucagaucuaaaaaaaaaaaaaaaaaaaaaaaaaaaaaaaaaaaaaaaaaaaaaaaaaaaaaaaaaaaaaaaaugcaucccccccccccccccccccccccccccccccaaaggcucuuuucagagccaccagaauu

SEQ ID NO: 832 - RNA, 1164 nt, Artificial Sequence
  mRNA Design a-1 (A64-N5-C30-hSL-N5) comprising derived and/or modified sequence from Pf(3D7)__XP_001351122.1__HsALB_Pf-CSP(98-374) (opt5)
aggagagucccgcagucggcguccagcggcucugcuuguucgugugugugucguugcaggccuuauucaagcuuaccaugaagugggugaccuucaucagccugcucuuucuguucuccucugccuacagcgcugacggcaaccccgauccuaaugccaacccgaaugucgaccccaacgcgaauccuaacguugaucccaaugcuaacccuaauguggaccccaacgccaauccuaacgccaauccgaacgcuaaucccaacgccaacccuaaugcuaaccccaaugccaacccuaaugcgaaccccaaugccaacccgaaugcuaacccuaaugccaaccccaaugcuaacccuaaugccaaccccaacgcgaaucccaacgccaauccuaacgcuaauccgaacgccaaucccaacgcuaauccuaacguggaucccaaugccaacccuaaugccaaccccaaugcuaacccgaacgcgaauccuaacgccaaucccaacgcuaauccuaacgccaaucccaacgccaauccuaacgcuaaucccaacgccaauccgaacgcgaauccuaacgcuaaccccaaugccaaccccaaugccaacccuaaugcuaacccgaaugccaaccccaaugcuaacccuaaugccaaccccaauaaaaacaaucaggggaacggacaaggccacaauaugccuaacgaccccaacagaaaugucgaugagaacgcgaaugccaacuccgcugugaagaauaacaauaacgaggaaccuucugacaaacauauuaaggaauaucuuaauaaaauccagaacagccuguccacagaguggucucccugcagcguuacgugugggaauggcauucaggugcggaucaagccgggauccgccaacaagccuaaagaugaacucgacuacgcuaaugauauugagaagaaaaucugcaagauggagaaauguugaggacuagucccuguucccagagcccacuuuuuuuucuuuuuuugaaauaaaauagccugucuuucagaucuaaaaaaaaaaaaaaaaaaaaaaaaaaaaaaaaaaaaaaaaaaaaaaaaaaaaaaaaaaaaaaaaugcaucccccccccccccccccccccccccccccccaaaggcucuuuucagagccaccagaauu

SEQ ID NO: 833 - RNA, 1233 nt, Artificial Sequence
  mRNA Design a-1 (A64-N5-C30-hSL-N5) comprising derived and/or modified sequence from Pf(3D7)__XP_001351122.1__HsALB_Pf-CSP(98-397) (opt5)
aggagagucccgcagucggcguccagcggcucugcuuguucgugugugugucguugcaggccuuauucaagcuuaccaugaagugggugaccuucaucagccugcucuuucuguucuccucugccuacagcgcugacggcaaccccgauccuaaugccaacccgaaugucgaccccaacgcgaauccuaacguugaucccaaugcuaacccuaauguggaccccaacgccaauccuaacgccaauccgaacgcuaaucccaacgccaacccuaaugcuaaccccaaugccaacccuaaugcgaaccccaaugccaacccgaaugcuaacccuaaugccaaccccaaugcuaacccuaaugccaaccccaacgcgaaucccaacgccaauccuaacgcuaauccgaacgccaaucccaacgcuaauccuaacguggaucccaaugccaacccuaaugccaaccccaaugcuaacccgaacgcgaauccuaacgccaaucccaacgcuaauccuaacgccaaucccaacgccaauccuaacgcuaaucccaacgccaauccgaacgcgaauccuaacgcuaaccccaaugccaaccccaaugccaacccuaaugcuaacccgaaugccaaccccaaugcuaacccuaaugccaaccccaauaaaaacaaucaggggaacggacaaggccacaauaugccuaacgaccccaacagaaaugucgaugagaacgcgaaugccaacuccgcugugaagaauaacaauaacgaggaaccuucugacaaacauauuaaggaauaucuuaauaaaauccagaacagccuguccacagaguggucucccugcagcguuacgugugggaauggcauucaggugcggaucaagccgggauccgccaacaagccuaaagaugaacucgacuacgcuaaugauauugagaagaaaaucugcaagauggagaaauguagcucugucuuuaacgugguuaauuccagcaucgggcugauuauggugcuuucuuuccuguuucucaacugaggacuagucccuguucccagagcccacuuuuuuuucuuuuuuugaaauaaaauagccugucuuucagaucuaaaaaaaaaaaaaaaaaaaaaaaaaaaaaaaaaaaaaaaaaaaaaaaaaaaaaaaaaaaaaaaaugcaucccccccccccccccccccccccccccccccaaaggcucuuuucagagccaccagaauu

SEQ ID NO: 834 - RNA, 1560 nt, Artificial Sequence
  mRNA Design a-1 (A64-N5-C30-hSL-N5) comprising derived and/or modified sequence from Pf(3D7)__XP_001351122.1__HsALB_Pf-CSP(199-377)_L(PVTN)_HBsAg (opt5)
aggagagucccgcagucggcguccagcggcucugcuuguucgugugugugucguugcaggccuuauucaagcuuaccaugaagugggugaccuucaucagccugcucuuucuguucuccucugccuacagcgaccccaacgcuaauccuaacgccaauccgaacgcgaaucccaacgcuaauccuaacgccaaucccaacgccaauccuaacgcuaaucccaacgccaauccuaacgcuaacccgaaugccaaccccaaugcgaacccuaaugccaaccccaaugcuaacccuaaugccaaccccaaugcuaacccgaaugccaacccuaaugcgaaccccaacgccaauccuaacaaaaauaaccagggcaaugggcaaggacacaacaugcccaaugaucccaacagaaaugucgacgagaacgcuaaugccaacuccgcuguuaagaauaacaauaacgaggaaccuucugauaaacauauuaaggaauaucuuaacaaaauccagaauagccuguccacagaguggucuccgugcagcgugacguguggcaacgggauucaggugcggaucaagcccggauccgccaauaagccuaaagacgaacucgauuacgccaacgacauugagaagaaaaucugcaagauggagaaauguagcucuguccccgugaccaauauggaaaacaucacauccggcuuucuggggccucuucugguucuccaggcuggauucuuucugcugacccgcauucucacaaucccccaaagccuggauucuugguggaccucccuuaauuuccugggcggcagcccggugugccucgggcagaacucucaguccccuacaagcaaucacucccccaccucuuguccucccauuugcccuggauauagauggaugugucugcggcgcuuuaucauuuuccuuuuuauccugcuccugugccugauuuuccuccugguccuucuggacuaccagggcaugcuccccguguguccgcugaucccugggagcacgaccacaaacaccggacccugcaagacauguaccacgcccgcgcaaggcaauuccauguuuccuagcugcugcuguacaaagccgaccgaugggaacugcacauguauccccauuccuucuuccugggccuucgcuaaauaucuuugggagugggccagcguuagauuuucuuggcugagccuccuggugcccuucguccagugguucgugggacuguccccuaccguguggcucucugccaucuggaugaugugguacuggggccccagccuguauuccauugucagcccuuuuaucccccuucugccgauuuucuuuugccucuggguuuacaucugaggacuagucccuguucccagagcccacuuuuuuuucuuuuuuugaaauaaaauagccugucuuucagaucuaaaaaaaaaaaaaaaaaaaaaaaaaaaaaaaaaaaaaaaaaaaaaaaaaaaaaaaaaaaaaaaaugcaucccccccccccccccccccccccccccccccaaaggcucuuuucagagccaccagaauu

SEQ ID NO: 835 - RNA, 1299 nt, Artificial Sequence
  mRNA Design a-1 (A64-N5-C30-hSL-N5) comprising derived and/or modified sequence from Pb(ANKA)__XP_022712148.1__Pb-CSP (opt5)
aggagagucccgcagucggcguccagcggcucugcuuguucgugugugugucguugcaggccuuauucaagcuuaccaugaagaaaugcaccauccugguugucgccagccuccugcuuguuaacucccugcuccccggcuacgggcagaauaagucuauucaagcucagagaaaccugaaugagcuuuguuauaacgaaggaaaugacaacaaacuguaccacgugcucaauagcaagaacggcaaaaucuauaaucggaacacagugaaucgccugcuggccgaugcgccugaggggaagaagaacgaaaagaaaaaugagaaaauugaaagaaacaauaagcucaaacagccgcccccucccccuaaccccaacgacccuccgcccccuaaucccaacgauccucccccgccuaaucccaacgacccucccccucccaauccgaacgaucccccucccccuaaugcuaacgaucccccgccucccaaugccaacgacccugcucccccuaaugccaacgaccccgccccgccuaaugcuaacgaucccgcgcccccuaaugccaacgacccggcucccccuaacgccaaugaucccccucccccuaaccccaaugacccggccccucccaacgcuaaugauccucccccgccuaaccccaaugacccugccccuccccagggaaacaauaacccccaaccgcagccccggccucagccccagccucaaccccagccucagccgcagccccaaccucagccccagccucgcccccaaccgcagccucagcccggcgggaauaacaauaacaagaauaacaacaaugacgauuccuacauccccucugcggagaagauucuggaguucgucaaacagaucagagacagcaucacggaagaguggucccaaugcaacgugaccuguggaucuggcauucggguucgcaagagaaaaggcagcaauaagaaagccgaagaucuuacacuggaggacaucgauaccgagauuugcaagauggacaaauguuccagcaucuuuaacauugugucuaauucccucggguucgucauccugcuugugcugguguuuuucaacugaggacuagucccuguucccagagcccacuuuuuuuucuuuuuuugaaauaaaauagccugucuuucagaucuaaaaaaaaaaaaaaaaaaaaaaaaaaaaaaaaaaaaaaaaaaaaaaaaaaaaaaaaaaaaaaaaugcaucccccccccccccccccccccccccccccccaaaggcucuuuucagagccaccagaauu

SEQ ID NO: 836 - RNA, 1464 nt, Artificial Sequence
  mRNA Design a-1 (A64-N5-C30-hSL-N5) comprising derived and/or modified sequence from Pb(ANKA)__XP_022712148.1__Pb-CSP_L(G4SG4)_TM domain HA (opt5)
aggagagucccgcagucggcguccagcggcucugcuuguucgugugugugucguugcaggccuuauucaagcuuaccaugaagaaaugcaccauccugguggucgccagccuccugcuuguuaacucccugcuccccggcuacgggcagaauaagucuauucaagcucagagaaaccugaaugagcuuuguuauaacgaaggaaaugacaacaaacuguaccacgugcucaauagcaagaacggcaaaaucuauaaucggaacacagugaaucgccugcuggccgaugcgccugaggggaagaagaacgaaaagaaaaaugagaaaauugaaagaaacaauaagcucaaacagccgcccccucccccuaaccccaacgacccuccgcccccuaaucccaacgauccucccccgccuaaucccaacgacccucccccucccaauccgaacgaucccccucccccuaaugcuaacgaucccccgccucccaaugccaacgacccugcucccccuaaugccaacgaccccgccccgccuaaugcuaacgaucccgcgcccccuaaugccaacgacccggcucccccuaacgccaaugaucccccucccccuaaccccaaugacccggccccucccaacgcuaaugauccucccccgccuaaccccaaugacccugccccuccccagggaaacaauaacccccaaccgcagccccggccucagccccagccucaaccccagccucagccgcagccccaaccucagccccagccucgcccccaaccgcagccucagcccggcgggaauaacaauaacaagaauaacaacaaugacgauuccuacauccccucugcggagaagauucuggaguucgucaaacagaucagagacagcaucacggaagaguggucccaaugcaacgugaccuguggaucuggcauucggguucgcaagagaaaaggcagcaauaagaaagccgaagaucuuacacuggaggacaucgauaccgagauuugcaagauggacaaauguuccagcaucuuuaacauugugucuaauucccucggguucgucauccugcuugugcugguguuuuucaacggaggcgggggaagcggcgggggaggcaagcucgaaucuacacggauuuaucagauccuggcuaucuacuccaccguugccagcucucugguccucguggugucccugggcgcuauuagcuuuuggaugugcuccaaugggucucuucagugucgcaucugcauuugaggacuagucccuguucccagagcccacuuuuuuuucuuuuuuugaaauaaaauagccugucuuucagaucuaaaaaaaaaaaaaaaaaaaaaaaaaaaaaaaaaaaaaaaaaaaaaaaaaaaaaaaaaaaaaaaaugcaucccccccccccccccccccccccccccccccaaaggcucuuuucagagccaccagaauu

SEQ ID NO: 837 - RNA, 1284 nt, Artificial Sequence
  mRNA Design a-1 (A64-N5-C30-hSL-N5) comprising derived and/or modified sequence from Pb(ANKA)__XP_022712148.1__HsALB_Pb-CSP(24-340) (opt5)
aggagagucccgcagucggcguccagcggcucugcuuguucgugugugugucguugcaggccuuauucaagcuuaccaugaagugggugaccuucaucagccugcucuuucuguucuccucugccuacagccagaacaaauccauucaagcucagagaaaucuuaacgagcugugcuauaaugaaggcaacgacaauaagcucuaccacguccugaacucuaaaaaugggaagaucuauaaccggaauacaguuaaccgccuucuggccgaugcgcccgagggcaaaaagaaugaaaagaaaaacgagaagauugaaagaaauaacaaacucaagcagccuccgcccccucccaauccuaacgacccucccccgcccaacccuaaugaucccccucccccgaacccuaaugaucccccuccucccaaccccaaugacccgcccccucccaacgcuaaugacccucccccgccuaacgccaaugaucccgccccucccaacgcuaaugacccugcucccccgaacgccaaugauccugccccucccaacgcgaaugaccccgccccgcccaacgcuaacgauccucccccucccaauccuaacgaccccgccccgccuaaugcuaacgaucccccucccccgaauccuaacgaccccgccccuccccagggaaauaacaauccccaaccucagccgcggccccagccucagccccaaccucagccccagccucagccgcaaccccagccucagccccgcccucaaccccagccgcagccugggggaaacaauaacaauaaaaacaauaacaacgacgauagcuacauccccuccgcggagaagauucuggaguuugugaagcagaucagagacucuaucacggaagaguggagccaaugcaaugugaccugcggcuccgggauucggguccgcaaaagaaagggaagcaacaaaaaggccgaagaucugacacucgaggacaucgauaccgagauuuguaaaauggacaaguguucuuccaucuucaauauugugagcaacucucugggcuuuguuauccuucuggugcucgucuucuuuaauugaggacuagucccuguucccagagcccacuuuuuuuucuuuuuuugaaauaaaauagccugucuuucagaucuaaaaaaaaaaaaaaaaaaaaaaaaaaaaaaaaaaaaaaaaaaaaaaaaaaaaaaaaaaaaaaaaugcaucccccccccccccccccccccccccccccccaaaggcucuuuucagagccaccagaauu

SEQ ID NO: 838 - RNA, 1302 nt, Artificial Sequence
  mRNA Design a-1 (A64-N5-C30-hSL-N5) comprising derived and/or modified sequence from Pb(ANKA)__XP_022712148.1__HsIns-iso1_Pb-CSP(24-340) (opt5)
aggagagucccgcagucggcguccagcggcucugcuuguucgugugugugucguugcaggccuuauucaagcuuaccauggcccuguggaugagacuccugccccuucuggcucuccuggcccuuuggggcccugacccggcggcugcccagaacaagagcauccaagcccagcggaaucugaacgagcucugcuacaaugaagggaacgauaauaaacuguaucacgugcugaacuccaagaauggaaaaauuuacaaccgcaauaccgucaacagacuccuggcugacgcccccgagggcaagaaaaaugaaaagaagaacgagaaaaucgaacggaauaacaaacuuaagcagccucccccucccccuaauccgaacgaucccccucccccuaaccccaaugacccgccucccccuaaccccaaugaucccccuccgcccaacccuaaugaucccccucccccgaacgcuaaugacccucccccucccaacgccaaugacccugcgcccccgaacgccaaugauccugcuccucccaacgccaaugaccccgcuccgcccaacgccaaugauccugcgcccccuaacgccaacgaucccccucccccgaauccuaacgaccccgcuccucccaaugccaacgacccgccucccccuaaucccaacgaccccgcuccuccgcaggggaauaacaauccccaaccucagccccgcccucagccccagccucaaccgcagccccagccucagccccaaccucagccccagccgagaccucaaccccagccccagccuggaggcaacaauaacaauaagaacaauaacaacgaugacucuuauauucccagcgccgagaaaauccuggaguucguuaagcagauucgggauuccaucacagaagaguggucucaauguaaugugacgugcgggagcggaauccgcgugagaaagcggaaaggcuccaacaagaaagccgaagaccucacccuggaggauauugacacagagaucuguaagauggauaaaugcucuagcauuuuuaauaucgucuccaacagccuuggcuucgugauucugcucguucugguguuuuucaauugaggacuagucccuguucccagagcccacuuuuuuuucuuuuuuugaaauaaaauagccugucuuucagaucuaaaaaaaaaaaaaaaaaaaaaaaaaaaaaaaaaaaaaaaaaaaaaaaaaaaaaaaaaaaaaaaaugcaucccccccccccccccccccccccccccccccaaaggcucuuuucagagccaccagaauu

SEQ ID NO: 839 - RNA, 1281 nt, Artificial Sequence
  mRNA Design a-1 (A64-N5-C30-hSL-N5) comprising derived and/or modified sequence from Pb(ANKA)__XP_022712148.1__HsSPARC_Pb-CSP(24-340) (opt5)
aggagagucccgcagucggcguccagcggcucugcuuguucgugugugugucguugcaggccuuauucaagcuuaccaugagagccuggaucuucuuucugcucugccuggcuggccgggcccuugcgcagaacaagagcauucaagcucagcgcaaucugaacgagcucuguuacaaugaagggaacgacaauaaacuguaucacgugcuuaacuccaagaauggaaaaaucuacaacagaaauaccgucaaccggcugcucgccgaugcccccgagggcaagaaaaaugaaaagaagaacgagaaaauugaacgcaauaacaagcugaaacagccuccgcccccucccaauccuaacgacccucccccgcccaacccuaaugaucccccucccccgaacccuaaugaucccccuccucccaaccccaaugacccgcccccucccaacgcuaaugacccucccccgccuaacgccaaugaucccgcuccucccaacgccaaugacccugcgcccccgaacgccaaugauccugcuccucccaacgccaaugaccccgcuccgcccaacgccaacgauccucccccucccaauccuaacgaccccgcgccgccuaaugccaacgaucccccucccccgaauccuaacgaccccgcuccuccccaggggaauaacaauccccaaccucagccgagaccccagccucagccccaaccucagccccagccucagccgcaaccccagccucagccccggccucaaccccagccgcagccuggaggcaacaauaacaauaagaacaauaacaacgacgauucuuauauccccagcgccgagaaaauucuggaguucguuaagcagauccgcgacuccaucacagaagaguggucucaaugcaaugugacgugugggagcggaauuagagugcggaagcgcaaaggcuccaacaagaaagcugaagaucucacccuggaggacaucgauacagagauuugcaagauggacaaauguucuagcaucuuuaauauugucuccaacagccuuggcuucgugauccugcucguucugguguuuuucaauugaggacuagucccuguucccagagcccacuuuuuuuucuuuuuuugaaauaaaauagccugucuuucagaucuaaaaaaaaaaaaaaaaaaaaaaaaaaaaaaaaaaaaaaaaaaaaaaaaaaaaaaaaaaaaaaaaugcaucccccccccccccccccccccccccccccccaaaggcucuuuucagagccaccagaauu

SEQ ID NO: 840 - RNA, 1284 nt, Artificial Sequence
  mRNA Design a-1 (A64-N5-C30-hSL-N5) comprising derived and/or modified sequence from Pb(ANKA)__XP_022712148.1__IgE_Pb-CSP(24-340) (opt5)
aggagagucccgcagucggcguccagcggcucugcuuguucgugugugugucguugcaggccuuauucaagcuuaccauggacuggaccuggauccuguuccucguggccgcugccacaagaguccacagccagaacaaguccauucaagcgcagcggaaucugaacgagcuuugcuacaaugaaggcaacgauaauaaacuguaucauguucucaacucuaagaaugggaaaaucuacaaccgcaauacggugaacagacugcuugcugacgcccccgagggaaagaaaaaugaaaagaagaacgagaaaauugaacggaauaacaagcugaaacagccuccgcccccucccaauccuaacgaucccccuccgcccaacccuaaugacccgccucccccgaacccuaaugaucccccuccucccaaccccaaugacccgcccccucccaacgccaaugauccucccccgccuaacgcuaaugaccccgccccucccaacgcuaaugauccugccccucccaacgcgaaugaccccgccccucccaacgcuaaugaucccgccccgcccaacgcuaacgacccucccccucccaauccuaacgaucccgccccgccuaaugcgaacgaucccccucccccgaauccuaacgaccccgccccuccccagggcaauaacaauccccaaccucagccgcgcccccagccucagccccaaccucagccccagccucagccgcaaccccagccucagcccagaccucaaccccagccgcagccugggggaaacaauaacaauaagaacaauaacaacgacgacagcuauauccccuccgcugagaaaauucucgaguuugugaagcagauccgggauucuaucaccgaagaguggagccaauguaaugucacaugcggcuccgggauucgcgugagaaagcggaaaggaucuaacaagaaagccgaagaccugacccuggaggauaucgacacagagauuuguaagauggauaaaugcagcuccaucuucaauauuguuagcaacucucucggcuuugugauccugcuuguccugguguucuuuaauugaggacuagucccuguucccagagcccacuuuuuuuucuuuuuuugaaauaaaauagccugucuuucagaucuaaaaaaaaaaaaaaaaaaaaaaaaaaaaaaaaaaaaaaaaaaaaaaaaaaaaaaaaaaaaaaaaugcaucccccccccccccccccccccccccccccccaaaggcucuuuucagagccaccagaauu

SEQ ID NO: 841 - RNA, 1470 nt, Artificial Sequence
  mRNA Design a-1 (A64-N5-C30-hSL-N5) comprising derived and/or modified sequence from Pf(3D7)__XP_001351122.1__Pf-CSP (opt6)
aggagagucccgcagucggcguccagcggcucugcuuguucgugugugugucguugcaggccuuauucaagcuuaccaugaugagaaaacuugcaauacuaagcguaucuucauuccuauucguagaagcacuauuccaagaauaucaaugcuauggaucaagcuccaacacaagaguacuuaacgaacuaaauuacgacaaugcaggaacaaaccuauacaaugaacuugaaaugaauuacuacggcaaacaagaaaacugguacucccuaaaaaaaaacucaaggucauuaggagaaaacgacgacggaaacaacgaagacaacgaaaaacuacgaaaacccaaacacaaaaaauuaaaacaaccagcagacggaaaccccgacccaaacgcaaacccaaacgucgacccaaacgcaaacccgaacguagacccaaacgcgaacccaaacguagacccaaacgcaaacccaaacgcaaacccaaacgcaaacccaaacgcaaacccaaaugcaaacccaaacgcaaacccaaacgccaauccaaacgccaacccaaacgcaaacccaaacgcaaacccaaacgcaaacccaaacgcaaaccccaacgcaaacccaaacgcuaacccaaacgcaaacccuaaugcaaacccuaacgcaaacccaaacgucgacccgaacgcaaacccaaaugcaaacccaaacgcaaacccaaacgcaaaccccaacgccaacccaaaugcaaacccaaaugcaaauccaaacgcaaacccaaacgcaaacccuaacgcaaacccaaacgcaaaccccaacgcaaacccaaacgcaaacccaaacgccaacccaaacgcaaaccccaaugcaaacccaaacgcaaacccaaacgcaaacccaaacaaaaacaaucaaggcaacggacaaggacacaacaugcccaacgacccaaaccgaaacgucgacgaaaacgccaacgcaaacagcgcaguaaaaaacaacaacaacgaagaacccucagacaaacacauaaaagaauacuuaaacaaaauacaaaacucacuaucuacagaauggucacccuguagcguaaccugcggcaacggaauacaaguaagaauaaaaccaggcucagcaaacaaaccaaaagaugaacuagacuacgccaaugauauagaaaaaaaaauauguaaaauggaaaaauguagcucagucuucaacguagucaacucaucaauaggacuaauaaugguacucuccuuccucuuccuaaauuaaggacuagucccuguucccagagcccacuuuuuuuucuuuuuuugaaauaaaauagccugucuuucagaucuaaaaaaaaaaaaaaaaaaaaaaaaaaaaaaaaaaaaaaaaaaaaaaaaaaaaaaaaaaaaaaaaugcaucccccccccccccccccccccccccccccccaaaggcucuuuucagagccaccagaauu

SEQ ID NO: 842 - RNA, 1401 nt, Artificial Sequence
  mRNA Design a-1 (A64-N5-C30-hSL-N5) comprising derived and/or modified sequence from Pf(3D7)__XP_001351122.1__Pf-CSP(1-374) (opt6)
aggagagucccgcagucggcguccagcggcucugcuuguucgugugugugucguugcaggccuuauucaagcuuaccaugaugagaaaacuagcaauauuaagcguaagcucauuccuauucguugaagcauuauuccaagaauaccaaugcuacggcucaagcucaaacacaagaguauuaaacgaauuaaacuacgacaaugcaggaaccaaccucuacaacgaacuagaaaugaauuauuacggcaaacaagaaaacugguacucacucaaaaaaaacucacgaucccuaggagaaaacgaugacggaaacaaugaagauaacgaaaaauuaagaaaaccaaaacacaaaaaauuaaaacaaccugcagacggaaacccagacccaaacgcaaauccaaauguagacccaaacgcaaaccccaacguagacccaaaugcaaacccaaacguagacccaaacgcaaacccaaaugcaaacccaaacgcaaacccaaacgcaaacccaaacgcaaaccccaacgcaaacccaaacgcaaacccaaacgccaaccccaacgcaaacccaaacgcaaacccgaaugcaaacccaaacgcaaacccaaacgcaaacccaaacgcaaacccaaacgcaaacccaaacgcaaacccaaaugcaaacccaaacguggauccaaacgcaaauccaaacgcaaacccaaacgcaaacccaaacgcaaaccccaacgcaaauccaaacgcaaaccccaaugcaaauccaaacgcaaacccaaacgccaacccaaacgcaaacccgaacgccaauccaaacgcaaacccaaacgcaaacccaaacgcaaacccaaacgccaacccaaacgcaaacccaaacgcaaacccaaacgcaaaccccaacaaaaacaaccaaggaaacggacaaggacacaacaugccaaacgauccaaacagaaacgucgacgaaaacgccaacgcuaacagcgcaguaaaaaacaauaacaacgaagaaccaucagacaaacauauaaaagaauacuuaaacaaaauccaaaacucacuaucaacagaauggucccccuguuccguaacaugcggaaacggaauacaaguacgaaucaaaccaggaucagccaacaaaccgaaagacgaacuagacuaugccaacgauauagaaaaaaaaauaugcaaaauggaaaaaugcugaggacuagucccuguucccagagcccacuuuuuuuucuuuuuuugaaauaaaauagccugucuuucagaucuaaaaaaaaaaaaaaaaaaaaaaaaaaaaaaaaaaaaaaaaaaaaaaaaaaaaaaaaaaaaaaaaugcaucccccccccccccccccccccccccccccccaaaggcucuuuucagagccaccagaauu

SEQ ID NO: 843 - RNA, 1254 nt, Artificial Sequence
  mRNA Design a-1 (A64-N5-C30-hSL-N5) comprising derived and/or modified sequence from Pf(3D7)__XP_001351122.1__Pf-CSP(1-325) (opt6)
aggagagucccgcagucggcguccagcggcucugcuuguucgugugugugucguugcaggccuuauucaagcuuaccaugaugcgaaaauuagcaauacuaagcguaagcucauucuuauucguagaagcacucuuccaagaauaccaaugcuacggaucaagcucaaacacaagaguccuaaacgaauuaaacuaugacaacgcaggaacaaaccuauacaacgaacuagaaaugaacuacuacggaaaacaagaaaacugguacucacucaaaaaaaacagcagaagucuaggagaaaacgacgacggaaacaacgaagacaacgaaaaacuacgaaaaccaaaacacaaaaaacuaaaacaaccagcagacgggaacccagacccaaacgcaaacccaaacguagauccaaacgcaaacccaaauguagacccuaacgcaaacccaaauguagacccaaacgcaaacccuaacgcaaacccaaaugcaaacccaaacgcaaauccaaacgcaaacccaaacgcaaacccaaacgcgaacccaaacgcaaacccaaacgcaaacccaaaugcaaaccccaacgcaaauccaaaugcaaacccaaaugcaaauccaaacgcaaacccaaacgcaaacccaaaugcaaauccaaacgcaaauccaaacguggauccaaacgcaaacccaaacgcaaacccaaacgcaaacccaaacgcaaacccaaacgcaaacccaaacgcaaauccaaacgccaauccaaacgcaaauccaaaugcaaacccaaacgcaaacccaaacgcaaacccaaacgcaaacccaaacgcaaacccaaacgcaaacccaaacgcaaacccaaacgcaaacccaaacgcaaacccaaacgcaaacccaaacaaaaacaaccaaggaaacggacaaggacacaacaugccaaacgacccaaacagaaacguagacgaaaacgccaacgcaaauagcgcagucaaaaacaacaauaacgaagaaccaucggacaaacacauaaaagaauacuuaaacaaaauacaaaacugaggacuagucccuguucccagagcccacuuuuuuuucuuuuuuugaaauaaaauagccugucuuucagaucuaaaaaaaaaaaaaaaaaaaaaaaaaaaaaaaaaaaaaaaaaaaaaaaaaaaaaaaaaaaaaaaaugcaucccccccccccccccccccccccccccccccaaaggcucuuuucagagccaccagaauu

SEQ ID NO: 844 - RNA, 1470 nt, Artificial Sequence
  mRNA Design a-1 (A64-N5-C30-hSL-N5) comprising derived and/or modified sequence from Pf(3D7)__XP_001351122.1__HsALB_Pf-CSP(19-397) (opt6)
aggagagucccgcagucggcguccagcggcucugcuuguucgugugugugucguugcaggccuuauucaagcuuaccaugaaaugggucacauuuauuucacuacuauucuuauucucaagcgcauacucacuauuucaagaauaccaaugcuacggcucauccucaaauacacgaguacuaaaugaacucaacuacgacaacgcaggaaccaaucucuacaacgaauuagaaaugaacuacuacggcaaacaagaaaacugguauucacuaaaaaaaaacaguagaucacuaggagaaaaugacgacggaaacaaugaagacaacgaaaaacuaagaaaaccaaaacacaaaaaauuaaaacaaccagcagacggaaacccagacccaaacgcaaacccuaacguagaucccaaugccaacccaaauguagacccaaacgcaaaccccaacgucgauccaaacgcaaacccaaacgcaaacccaaacgcaaacccaaacgcaaacccaaacgcaaacccaaaugcaaaccccaacgcaaacccaaacgcuaacccaaacgcaaacccaaacgcaaacccaaacgcaaacccaaacgcaaacccaaacgccaacccaaacgccaacccaaacgcaaauccaaacgcaaacccaaaugccaauccaaacguugacccaaacgcaaacccaaacgcaaaccccaacgcaaacccaaacgcaaauccaaacgcgaaccccaacgcaaacccaaacgcaaacccaaaugcaaacccaaacgcuaacccaaaugcaaacccaaacgccaacccaaacgccaacccaaacgcaaaccccaacgcaaacccaaacgcaaacccaaacgccaauccaaacgcaaacccaaaugcaaacccaaacaaaaacaaccaaggaaacggacaaggacacaacaugccaaacgaccccaacagaaacguagaugaaaaugcaaaugcuaacucagccguaaaaaacaauaacaacgaagaaccaucagacaaacacauaaaagaauaccuaaauaaaauacaaaauuccuuaucaacagaaugguccccaugcucaguaacuugcgguaacggcauacaaguaagaauaaaaccaggaucagcaaacaaaccaaaagacgaauuagacuaugcaaacgacauagaaaaaaaaauauguaaaauggaaaaaugcagcucaguauucaacguaguaaauuccucaaucggacucaucaugguauuaucauuccuauuuuuaaauuaaggacuagucccuguucccagagcccacuuuuuuuucuuuuuuugaaauaaaauagccugucuuucagaucuaaaaaaaaaaaaaaaaaaaaaaaaaaaaaaaaaaaaaaaaaaaaaaaaaaaaaaaaaaaaaaaaugcaucccccccccccccccccccccccccccccccaaaggcucuuuucagagccaccagaauu

SEQ ID NO: 845 - RNA, 1488 nt, Artificial Sequence
  mRNA Design a-1 (A64-N5-C30-hSL-N5) comprising derived and/or modified sequence from Pf(3D7)__XP_001351122.1__HsIns-iso1_Pf-CSP(19-397) (opt6)
aggagagucccgcagucggcguccagcggcucugcuuguucgugugugugucguugcaggccuuauucaagcuuaccauggcacuauggaugagacuacuaccacuacuagcacuccuagccuuauggggacccgauccagccgcagcacucuuccaagaauaccaaugcuauggaucauccuccaacacaagaguccuaaacgaauuaaauuacgacaacgcuggaacaaaccuauacaaugaacuagaaaugaauuauuacggaaaacaagaaaauugguacucacuaaaaaaaaacucuagaagccuaggagaaaacgacgacggaaacaacgaagauaacgaaaaacuaagaaaaccaaaacacaaaaaauuaaaacaacccgcagacggcaacccagacccaaaugcaaauccaaacguagacccaaacgcaaauccaaacguagacccaaacgcaaacccaaauguagacccaaacgcaaauccaaacgcaaacccaaaugcaaacccaaaugcaaacccaaacgcaaauccaaacgcaaaucccaacgccaacccaaacgcaaacccaaacgcaaauccaaacgcaaacccaaacgcaaacccaaacgcaaacccaaacgcaaacccaaaugcaaacccaaaugccaauccaaacgccaacccaaacgcaaacccaaacguagacccaaacgcaaacccaaacgccaacccaaacgcaaaccccaaugcaaacccaaacgcaaacccaaacgcaaaccccaacgcaaauccaaacgcaaacccaaacgcaaauccaaacgcaaauccaaacgccaacccaaacgcaaacccaaacgcaaauccaaacgcaaaccccaacgcaaacccaaacgccaacccaaaugcaaacccaaacgcaaaucccaauaaaaacaaccaaggaaacggacaaggacacaacaugccaaacgauccaaacagaaacguagacgaaaacgcaaacgcaaacucagcagucaaaaacaauaacaacgaagaaccaucagacaaacacauaaaagaauaccuaaacaaaauacaaaacucacuauccacagaauggucaccaugcucaguaaccugcggaaacggaauacaaguaagaauaaaaccaggaucagccaacaaaccaaaagacgaacuagacuaugcuaaugacauagaaaaaaaaauaugcaaaauggaaaaaugcuccucaguauucaacgucguaaacucuucaauaggacuaauaaugguacuauccuucuuauuucuaaacuaaggacuagucccuguucccagagcccacuuuuuuuucuuuuuuugaaauaaaauagccugucuuucagaucuaaaaaaaaaaaaaaaaaaaaaaaaaaaaaaaaaaaaaaaaaaaaaaaaaaaaaaaaaaaaaaaaugcaucccccccccccccccccccccccccccccccaaaggcucuuuucagagccaccagaauu

SEQ ID NO: 846 - RNA, 1467 nt, Artificial Sequence
  mRNA Design a-1 (A64-N5-C30-hSL-N5) comprising derived and/or modified sequence from Pf(3D7)__XP_001351122.1__HsSPARC_Pf-CSP(19-397) (opt6)
aggagagucccgcagucggcguccagcggcucugcuuguucgugugugugucguugcaggccuuauucaagcuuaccaugcgcgcauggauauucuuccuccuaugucuagcaggucgagcacuugcacucuuccaagaauaccaauguuacggauccucaagcaacacacgaguacuaaacgaacuaaacuacgauaacgcaggaaccaacuuauacaacgaacuagaaaugaacuacuacggcaaacaagaaaacugguacucacucaaaaaaaacagcagaagccuaggagaaaaugacgacggaaacaacgaagauaacgaaaaauuacgaaaacccaaacacaaaaaauuaaaacaacccgcagauggaaauccagacccgaacgcaaacccaaacguagacccaaacgcaaacccaaacguugacccaaacgcaaacccaaacguagacccaaacgcaaacccuaacgccaacccaaacgcaaacccaaacgcaaacccaaaugcgaacccaaaugcaaacccaaacgccaacccaaaugcaaaccccaacgcaaauccaaacgcaaacccaaaugcaaacccaaacgcaaacccaaacgcaaacccaaacgcaaacccaaacgccaaccccaaugcaaacccaaacgcaaacccaaacgucgacccaaacgcaaacccaaacgcaaacccaaacgcaaauccaaacgcaaauccaaacgcaaacccuaacgcaaacccaaacgcaaacccaaaugcaaauccaaacgcaaacccaaacgcaaacccaaacgcaaauccaaacgcaaacccaaacgcaaacccaaacgcaaacccuaaugcaaacccaaaugcaaauccaaacgcaaacccaaaugcaaaccccaacaaaaacaaccaaggaaacggacaaggacacaauaugccaaacgacccaaacagaaacguagacgaaaacgcaaacgccaacagcgcaguaaaaaacaacaacaacgaagaaccaucagacaaacacauaaaagaauaccuaaacaaaauacaaaacucacuaucaacagaauggucucccugcuccguaacaugcggaaacggcauacaaguacgaauaaaaccuggaucagccaacaaaccaaaagacgaacuagacuaugcaaaugacauagaaaaaaaaauaugcaaaauggaaaaaugcaguucagucuucaacguagucaacagcucaauaggccuaauaaugguacucucauuccuauucuuaaacuaaggacuagucccuguucccagagcccacuuuuuuuucuuuuuuugaaauaaaauagccugucuuucagaucuaaaaaaaaaaaaaaaaaaaaaaaaaaaaaaaaaaaaaaaaaaaaaaaaaaaaaaaaaaaaaaaaugcaucccccccccccccccccccccccccccccccaaaggcucuuuucagagccaccagaauu

SEQ ID NO: 847 - RNA, 1470 nt, Artificial Sequence
  mRNA Design a-1 (A64-N5-C30-hSL-N5) comprising derived and/or modified sequence from Pf(3D7)__XP_001351122.1__IgE_Pf-CSP(19-397) (opt6)
aggagagucccgcagucggcguccagcggcucugcuuguucgugugugugucguugcaggccuuauucaagcuuaccauggauuggacauggauucucuuccucguagcagcagccacaagaguacacucuuuauuucaagaauaccaaugcuacggaucaagcucaaacacacgcguacuaaacgaacuaaacuacgacaacgcaggaacaaacuuauacaacgaacuagaaaugaacuauuauggcaaacaagaaaacugguacucacuaaaaaaaaacuccagaagcuuaggagaaaacgacgacggaaacaacgaagacaacgaaaaacuacgcaaaccuaaacacaaaaaacuaaaacaaccugcagacggaaacccagacccaaacgcgaacccaaacguagauccaaacgcaaacccaaacguagaucccaacgcaaacccgaacguagacccuaacgcaaauccaaacgcaaaccccaacgcaaacccgaacgcaaacccaaacgcaaacccaaacgcaaacccaaacgcaaacccaaacgcaaacccaaacgccaacccaaacgcaaauccaaacgcuaacccaaaugcaaacccuaacgcaaacccaaacgccaacccaaacgcaaacccaaacgcaaacccaaacgcaaaucccaauguagacccaaacgcaaacccaaacgcaaacccaaacgcuaacccaaaugcaaacccaaacgcaaacccaaacgcaaacccaaacgcuaaccccaacgcaaacccgaacgcaaacccaaaugcaaacccaaacgcaaacccaaaugcaaacccaaacgcaaacccaaacgcaaaccccaaugccaacccaaacgcaaauccaaaugccaauccaaacgcaaacccaaacaaaaacaaccaaggaaauggacaaggacauaacaugccaaacgaccccaaccgaaauguagacgaaaacgccaacgcaaauagugcagucaaaaacaauaacaaugaagaacccucagauaaacauauaaaagaauacuuaaacaaaauacaaaacucacuaucaaccgaguggucuccuugcucaguaacauguggaaacggaauacaaguacgaauaaaaccaggaucagcaaacaaaccgaaagacgaacuagacuacgccaacgacauagaaaagaaaauauguaaaauggagaaauguaguucaguauucaacgugguaaacagcucaauaggccuaauaaugguacucucuuuccuauuccuaaacuaaggacuagucccuguucccagagcccacuuuuuuuucuuuuuuugaaauaaaauagccugucuuucagaucuaaaaaaaaaaaaaaaaaaaaaaaaaaaaaaaaaaaaaaaaaaaaaaaaaaaaaaaaaaaaaaaaugcaucccccccccccccccccccccccccccccccaaaggcucuuuucagagccaccagaauu

SEQ ID NO: 848 - RNA, 1635 nt, Artificial Sequence
  mRNA Design a-1 (A64-N5-C30-hSL-N5) comprising derived and/or modified sequence from Pf(3D7)__XP_001351122.1__Pf-CSP_L(G4SG4)_TM domain HA (opt6)
aggagagucccgcagucggcguccagcggcucugcuuguucgugugugugucguugcaggccuuauucaagcuuaccaugaugcguaaacuagcaauacuaucugucaguucauucuuauucguagaagcacuauuccaagaauaccaauguuacggaucuucaucaaacacaagaguacucaacgaauuaaacuacgauaacgcuggaaccaauuuauacaacgaacuagaaaugaacuacuauggaaaacaagaaaacugguauucacuaaaaaaaaacagcagaaguuuaggagaaaaugacgacggaaacaaugaagacaaugaaaaauuacgaaaaccaaaacacaaaaaauuaaaacaacccgccgacggaaauccagacccaaacgcaaacccaaauguagacccaaacgcaaacccaaauguagaucccaacgcaaacccaaacguagaucccaaugcaaacccaaacgcaaacccaaaugcaaaccccaacgcaaacccaaaugcaaacccuaacgcaaacccgaacgcaaacccaaacgcaaaucccaaugcaaaccccaacgcaaauccaaaugcaaacccuaacgcaaauccgaacgcaaauccaaacgcaaacccaaacgcaaacccaaacgcaaacccaaacgcaaacccaaacgucgacccaaacgccaauccaaacgcaaaccccaaugcaaacccaaaugcaaacccaaacgcaaacccaaaugccaacccaaacgcaaacccaaacgcaaacccaaacgcaaacccaaacgcaaacccaaaugcaaacccaaaugcaaacccaaacgccaacccaaacgcaaacccaaacgcaaacccaaacgccaacccaaacgcaaacccuaacgcaaauccaaacaaaaacaaccaagggaacggacaaggacacaacaugccaaacgacccaaacagaaacguagacgaaaacgccaacgcaaacucagcugucaaaaacaauaacaacgaagaacccuccgauaaacacauaaaagaauaccuaaacaaaauccaaaacucccuuucuacagaauggucacccugcucaguaacaugcggcaacggcauacaaguuagaaucaaaccaggaucagcaaauaaaccaaaagacgaauuagacuaugccaacgacauagaaaaaaaaauauguaaaauggaaaaaugcucaucaguuuucaacguaguaaacagcucaaucggauuaauaaugguacuaucauucuuauuuuuaaacggaggaggaggcuccggcggagguggaaaacuagaaucaacuagaauauaccaaauauuagcaauauacucaacaguagcaucaucacucguauuaguaguaucgcuaggagcaauaaguuucuggaugugcucuaacggaagccuacaaugccgaauaugcauauaaggacuagucccuguucccagagcccacuuuuuuuucuuuuuuugaaauaaaauagccugucuuucagaucuaaaaaaaaaaaaaaaaaaaaaaaaaaaaaaaaaaaaaaaaaaaaaaaaaaaaaaaaaaaaaaaaugcaucccccccccccccccccccccccccccccccaaaggcucuuuucagagccaccagaauu

SEQ ID NO: 849 - RNA, 1509 nt, Artificial Sequence
  mRNA Design a-1 (A64-N5-C30-hSL-N5) comprising derived and/or modified sequence from Pf(3D7)__XP_001351122.1__Pf-CSP(199-377)_L(PVTN)_HBsAg (opt6)
aggagagucccgcagucggcguccagcggcucugcuuguucgugugugugucguugcaggccuuauucaagcuuaccauggacccaaacgccaaccccaacgcaaacccaaaugcaaacccaaacgcuaaccccaacgcaaacccaaacgcuaacccuaacgcaaauccaaacgcaaaucccaacgcaaauccaaacgcaaacccaaacgcaaacccaaaugccaacccaaacgcaaacccuaacgcaaaucccaacgcaaauccaaaugcaaaccccaaugcaaacccaaacgcaaauccaaacaaaaauaaucaaggaaauggacaaggacauaacaugccaaacgacccuaaccgaaacgucgacgaaaaugcaaacgcaaacuccgcaguaaaaaacaacaacaacgaagaaccuuccgacaaacacauaaaagaauaccuaaacaaaauacaaaacucucuauccacugaauggucaccaugcucaguaaccugcggaaauggcauacaaguaagaauaaaaccaggaucugcaaauaaaccuaaagacgaacuagauuacgcaaaugacauagaaaaaaaaauaugcaaaauggaaaaaugcucaucagucccaguaacaaacauggaaaacaucacaucaggauucuuaggaccacuacucguauuacaagcaggauucuuucuuuuaacaagaauauuaacaauaccacaaucccuagacucaugguggacaucauuaaacuuccuagguggaucaccagucugccucggacaaaacucacaaucaccaacaucaaaccacucaccaacauccugcccaccaauuuguccaggauacagauggaugugccuacgaagauucauaauauucuuauuuauauuacuacuaugucucauauuuuuacucguacuauuagacuaucagggcauguuacccguauguccacuaauaccaggcucaaccaccacaaacacagguccaugcaaaaccugcaccacaccagcacaaggaaacuccauguuucccucauguugcugcaccaaacccaccgauggaaacugcaccugcauaccaaucccaucuucaugggcauucgcaaaauaucuaugggaaugggcauccguaagauuuucauggcuaucacuauuaguaccauucguacaaugguucguaggauuaucaccaacaguaugguuaucagcaauauggaugaugugguacuggggaccaucacuauacucaauaguauccccuuucauaccauuacucccaauauuuuucugccuuuggguauacauauaaggacuagucccuguucccagagcccacuuuuuuuucuuuuuuugaaauaaaauagccugucuuucagaucuaaaaaaaaaaaaaaaaaaaaaaaaaaaaaaaaaaaaaaaaaaaaaaaaaaaaaaaaaaaaaaaaugcaucccccccccccccccccccccccccccccccaaaggcucuuuucagagccaccagaauu

SEQ ID NO: 850 - RNA, 1551 nt, Artificial Sequence
  mRNA Design a-1 (A64-N5-C30-hSL-N5) comprising derived and/or modified sequence from Pf(3D7)__XP_001351122.1__Pf-CSP(199-387)_L(PVTN)_HBsAg (opt6)
aggagagucccgcagucggcguccagcggcucugcuuguucgugugugugucguugcaggccuuauucaagcuuaccaugauggcaccagauccaaacgcaaacccaaacgcaaacccaaacgcaaauccaaaugcaaacccaaacgcaaaucccaaugcaaacccuaacgcaaacccaaacgccaacccaaaugccaacccaaacgcaaacccaaacgcaaauccaaacgcaaacccaaacgcuaacccaaaugcaaaccccaacgcaaauccaaacgcaaacccaaacgcaaauccaaacgcuaacccaaacaaaaauaaccaaggaaacggacaaggacacaauaugccaaaugacccaaauagaaacguagacgaaaacgcaaacgcaaauucagcagucaaaaacaauaacaacgaagaaccauccgauaaacacauaaaagaauacuuaaacaaaauccaaaacucacuaucaacugaauggucaccuuguucaguaacauguggcaacggaauacaaguaagaauaaaaccagguucagccaacaaaccuaaagacgaacuagacuacgcaaacgacauagaaaaaaaaaucugcaaaauggaaaaaugcucaucaguauuuaauguaguaaacucaucaauaggacuaggcccuguaacaaacauggaaaacauaaccucaggauucuuaggcccacuacuaguacuccaagcaggauucuuucuucuaacaagaauauuaaccauuccucaaucauuagacucaugguggacaucccuuaacuuucuaggaggaagccccguaugcuuaggacaaaacagccaauccccaacauccaaccacuccccaacaucaugccccccaauaugcccaggauacagauggaugugccuaagaagauucaucauauuccuauuuauucucuuacucugcuuaauauucuuacucguauuacucgacuaccaaggaauguuaccaguaugcccacuaauaccaggauccacaacaacaaacacgggaccaugcaaaacaugcacaacaccugcccaaggaaauuccauguucccaucaugcugcugcacaaaaccaaccgacggcaacugcacaugcauaccaauaccaucaagcugggccuucgcaaaauaccuaugggaaugggcaucagugagauucucauggcucucauuacuagucccauucguacaaugguuuguaggauuaucaccaacaguuuggcucagcgcaauauggaugaugugguacuggggccccucuuuauauucaauaguauccccauuuauaccacuacucccaauauucuucuguuuauggguauacauauaaggacuagucccuguucccagagcccacuuuuuuuucuuuuuuugaaauaaaauagccugucuuucagaucuaaaaaaaaaaaaaaaaaaaaaaaaaaaaaaaaaaaaaaaaaaaaaaaaaaaaaaaaaaaaaaaaugcaucccccccccccccccccccccccccccccccaaaggcucuuuucagagccaccagaauu

SEQ ID NO: 851 - RNA, 735 nt, Artificial Sequence
  mRNA Design a-1 (A64-N5-C30-hSL-N5) comprising derived and/or modified sequence from Pf(3D7)__XP_001351122.1__HsALB_Pf-CSP(19-152) (opt6)
aggagagucccgcagucggcguccagcggcucugcuuguucgugugugugucguugcaggccuuauucaagcuuaccaugaaauggguaacauucauaucacuacuauuccuauucuccagcgcauacucacuauuccaagaauaccaaugcuacggaucaagcucaaacacacgaguacuaaacgaacuaaacuacgacaacgcaggaaccaaccuauacaacgaacuagaaaugaacuacuacggaaaacaagaaaacugguacucacuaaaaaaaaacagcagaucacuaggagaaaacgacgacggaaacaacgaagacaacgaaaaacuaagaaaaccaaaacacaaaaaacuaaaacaacccgcagacggaaacccagacccaaacgcaaacccaaacguagacccaaaugcaaacccaaacguagacccaaacgcaaacccaaacguagacccaaacgcaaacccaaacgcaaacccaaacgcaaacccaaacgcaaacccaaacgcaaacccaaacgcaaacccauaaggacuagucccuguucccagagcccacuuuuuuuucuuuuuuugaaauaaaauagccugucuuucagaucuaaaaaaaaaaaaaaaaaaaaaaaaaaaaaaaaaaaaaaaaaaaaaaaaaaaaaaaaaaaaaaaaugcaucccccccccccccccccccccccccccccccaaaggcucuuuucagagccaccagaauu

SEQ ID NO: 852 - RNA, 855 nt, Artificial Sequence
  mRNA Design a-1 (A64-N5-C30-hSL-N5) comprising derived and/or modified sequence from Pf(3D7)__XP_001351122.1__HsALB_Pf-CSP(19-192) (opt6)
aggagagucccgcagucggcguccagcggcucugcuuguucgugugugugucguugcaggccuuauucaagcuuaccaugaaauggguaacauucaucucacuacuauucuuauucucaucagcauacucacuauuccaagaauaccaaugcuacggaucaucaucaaacacacgaguacucaacgaacuaaacuacgacaacgcaggaacaaaccuauacaacgaacuagaaaugaacuacuacggaaaacaagaaaacugguauucacuaaaaaaaaacucaagaucacuaggagaaaacgacgacggaaacaacgaagacaacgaaaaacuaagaaaaccaaaacacaaaaaacuaaaacaaccagcagacggaaacccagacccaaacgcaaacccaaacguagacccaaacgccaacccaaacguagacccaaacgcaaacccaaacguagacccaaacgcaaacccaaacgcaaacccaaacgcaaacccaaacgcaaacccaaacgcaaacccaaacgcaaacccaaacgcaaacccaaacgcaaacccaaacgcaaacccaaacgcaaacccaaacgcaaacccaaacgcaaauccaaacgcaaacccaaacgcaaacccaaacgcaaacccaaacgcaaaccccuaaggacuagucccuguucccagagcccacuuuuuuuucuuuuuuugaaauaaaauagccugucuuucagaucuaaaaaaaaaaaaaaaaaaaaaaaaaaaaaaaaaaaaaaaaaaaaaaaaaaaaaaaaaaaaaaaaugcaucccccccccccccccccccccccccccccccaaaggcucuuuucagagccaccagaauu

SEQ ID NO: 853 - RNA, 1095 nt, Artificial Sequence
  mRNA Design a-1 (A64-N5-C30-hSL-N5) comprising derived and/or modified sequence from Pf(3D7)__XP_001351122.1__HsALB_Pf-CSP(19-272) (opt6)
aggagagucccgcagucggcguccagcggcucugcuuguucgugugugugucguugcaggccuuauucaagcuuaccaugaaauggguaacauucauaucacuacuauuccuauucucaagcgcauauucacuauuccaagaauaccaaugcuacggaucaagcucaaacacaagaguacuuaacgaacuaaacuacgacaacgcaggaacaaaccuauacaacgaacuugaaaugaacuacuacggaaaacaagaaaacugguacucacuaaaaaaaaauagcagaagcuuaggagaaaacgacgacggaaacaacgaagacaacgaaaaauuaagaaaaccuaaacacaaaaaacuaaaacaacccgcagacggaaacccagacccuaacgccaacccaaauguagacccaaacgcaaacccaaacguagacccaaacgcaaaccccaacguagacccaaacgcaaacccaaacgcaaacccaaacgcaaacccaaacgcaaaccccaacgcaaacccaaacgcaaacccaaacgcaaacccaaacgcaaacccaaacgcaaacccaaacgcaaacccaaacgcaaacccaaacgcaaacccaaacgcgaacccaaacgcaaacccaaacgcaaacccaaacgcaaacccaaacgcaaacccaaacguagacccaaaugcaaaccccaacgcaaacccaaacgcaaacccaaaugcaaaccccaacgcaaacccaaacgcaaacccaaacgcaaacccaaacgcaaacccaaaugcaaacccaaacgcaaacccaaacgccaacccaaacgcaaacccaaacgcaaacccaaacgcaaacccaaacgcaaacccgaacgcaaacccaaacgcaaacccaaacgcaaacccauaaggacuagucccuguucccagagcccacuuuuuuuucuuuuuuugaaauaaaauagccugucuuucagaucuaaaaaaaaaaaaaaaaaaaaaaaaaaaaaaaaaaaaaaaaaaaaaaaaaaaaaaaaaaaaaaaaugcaucccccccccccccccccccccccccccccccaaaggcucuuuucagagccaccagaauu

SEQ ID NO: 854 - RNA, 1257 nt, Artificial Sequence
  mRNA Design a-1 (A64-N5-C30-hSL-N5) comprising derived and/or modified sequence from Pf(3D7)__XP_001351122.1__HsALB_Pf-CSP(19-272)_L(AAY)_Pf-CSP(310-3 27)_L(AAY)_Pf-CSP(346-375) (opt6)
aggagagucccgcagucggcguccagcggcucugcuuguucgugugugugucguugcaggccuuauucaagcuuaccaugaaauggguaacauuuauaucacuccuauuccuuuuuucgucagcauacucacuauuccaagaauaucaaugcuacggaucaagcuccaacacaagaguacuaaacgaacuaaacuacgacaacgcaggaacaaaccuauacaacgaacuagaaaugaacuacuacggaaaacaagaaaacugguacucacuaaaaaaaaacagccgaagcuuaggagaaaaugacgacggaaacaacgaagacaacgaaaaauuacgcaaacccaaacacaaaaaacugaaacaaccagcagacggaaacccagacccaaacgcaaacccaaacguagacccaaacgcaaacccaaacguagacccaaacgcaaacccaaacguagacccaaacgcaaacccaaacgcgaacccaaacgccaacccaaacgcaaacccaaacgcaaacccaaacgcaaacccaaacgcaaacccaaacgcaaacccaaacgccaacccgaacgcaaacccaaacgcaaacccaaacgcaaauccaaacgcaaacccaaacgcaaacccaaacgccaacccaaacgcaaacccaaacgcaaacccaaauguggacccaaacgcaaacccaaacgcaaacccaaacgcaaacccaaaugcaaacccaaacgcaaacccaaacgcaaacccaaacgcaaacccaaacgcaaacccaaaugcaaacccaaacgcaaauccaaacgcaaacccaaacgcaaacccaaacgcaaacccaaacgcaaacccuaacgcaaacccaaacgcaaacccaaacgccaaccccaaugcaaacccagcagcauacgaaccaucagacaaacacauaaaagaauaccuaaacaaaauacaaaacucacucgcagcauauauaaagccaggaagcgccaacaaaccaaaagacgaacuagauuacgcaaacgacauagaaaaaaaaaucuguaaaauggaaaaaugcucauaaggacuagucccuguucccagagcccacuuuuuuuucuuuuuuugaaauaaaauagccugucuuucagaucuaaaaaaaaaaaaaaaaaaaaaaaaaaaaaaaaaaaaaaaaaaaaaaaaaaaaaaaaaaaaaaaaugcaucccccccccccccccccccccccccccccccaaaggcucuuuucagagccaccagaauu

SEQ ID NO: 855 - RNA, 1218 nt, Artificial Sequence
  mRNA Design a-1 (A64-N5-C30-hSL-N5) comprising derived and/or modified sequence from Pf(3D7)__XP_001351122.1__HsALB_Pf-CSP(19-272)_L(AAY)_Pf-CSP(346-3 65)_L(AAY)_P2 (opt6)
aggagagucccgcagucggcguccagcggcucugcuuguucgugugugugucguugcaggccuuauucaagcuuaccaugaaauggguaacauucauaucacuauuauuccuuuucucaucagcuuacucacuauuccaagaauaccaaugcuacggaucauccucaaacacaagaguacuaaacgaacuaaacuacgacaacgccggaaccaaccuauacaacgaacucgaaaugaacuacuacggaaaacaagaaaacugguacucacuaaaaaaaaacagccgaucccuaggagaaaacgacgacggaaauaacgaagacaaugaaaaauuaagaaaaccaaaacacaaaaaacuaaaacaaccagcagacggaaacccagacccaaacgcaaacccaaacguagauccaaacgcaaacccaaacguagacccaaacgcaaacccaaacguagacccaaacgcuaacccaaacgcaaacccaaacgcaaacccaaacgcaaacccaaacgcaaacccaaacgcaaacccgaacgcaaaccccaacgcaaacccaaacgcaaacccaaacgcaaaccccaacgcaaacccaaacgcaaacccgaacgcaaacccaaacgcaaacccaaacgcaaacccaaacgcaaacccaaacgcaaacccaaacguagacccaaacgccaacccaaacgcaaacccaaacgcaaacccaaacgcaaacccaaacgcaaacccaaacgcaaacccaaacgcaaacccaaacgcaaacccaaacgcaaacccaaacgcaaaccccaacgcaaacccaaaugcaaacccaaacgcaaacccaaaugcaaaccccaacgcaaacccaaaugccaauccaaacgcaaacccaaacgcaaacccagccgcauacauaaaaccaggauccgcaaacaaaccaaaagacgaacuagacuacgcaaacgacauagaagcagcauaccaauauauaaaagccaacuccaaauucauagguauaacagaacucuaaggacuagucccuguucccagagcccacuuuuuuuucuuuuuuugaaauaaaauagccugucuuucagaucuaaaaaaaaaaaaaaaaaaaaaaaaaaaaaaaaaaaaaaaaaaaaaaaaaaaaaaaaaaaaaaaaugcaucccccccccccccccccccccccccccccccaaaggcucuuuucagagccaccagaauu

SEQ ID NO: 856 - RNA, 1212 nt, Artificial Sequence
  mRNA Design a-1 (A64-N5-C30-hSL-N5) comprising derived and/or modified sequence from Pf(3D7)__XP_001351122.1__HsALB_Pf-CSP(19-272)_L(AAY)_Pf-CSP(346-3 65)_L(AAY)_PADRE (opt6)
aggagagucccgcagucggcguccagcggcucugcuuguucgugugugugucguugcaggccuuauucaagcuuaccaugaaauggguaaccuucauaucacuacuauucuuauucucaucagcauacucacucuuccaagaauaccaaugcuacggcucaagcucaaacacaagaguacuaaacgaauuaaacuaugacaacgccggaacaaaccuauacaaugaauuagaaaugaacuacuacggcaaacaagaaaacugguacucacucaaaaaaaacuccagaaguuuaggagaaaaugacgacggaaacaaugaagacaaugaaaaauuacgaaaaccaaaacacaaaaaacuaaaacaacccgccgacggaaaccccgacccgaacgcaaacccaaacguagacccaaacgcaaacccaaacguagacccaaaugcaaacccaaacguagacccaaacgcaaacccaaacgcaaacccaaacgcaaauccaaacgcaaacccaaaugcaaacccaaaugcaaauccaaacgcaaaccccaacgcaaacccaaacgcaaacccaaaugcaaauccaaacgccaacccaaaugcaaacccaaacgcaaauccaaacgcaaacccaaacgcaaauccaaacgcaaacccaaaugcaaacccaaacguagauccaaacgcaaacccaaacgccaacccaaacgcaaacccgaacgcaaacccaaacgcaaacccaaacgccaacccaaacgccaacccaaacgccaacccaaacgcaaacccaaacgcaaacccaaacgcaaacccaaacgcaaacccaaaugcaaacccuaacgcaaacccaaacgcaaacccaaacgcaaacccaaacgccaacccaaacgcaaauccagcagcauacauaaaaccaggaucagcaaacaaaccaaaagaugaacuagacuacgcaaaugacaucgaagcagccuacgcuaaauucguagcagccuggacacuaaaagcagcagccuaaggacuagucccuguucccagagcccacuuuuuuuucuuuuuuugaaauaaaauagccugucuuucagaucuaaaaaaaaaaaaaaaaaaaaaaaaaaaaaaaaaaaaaaaaaaaaaaaaaaaaaaaaaaaaaaaaugcaucccccccccccccccccccccccccccccccaaaggcucuuuucagagccaccagaauu

SEQ ID NO: 857 - RNA, 1269 nt, Artificial Sequence
  mRNA Design a-1 (A64-N5-C30-hSL-N5) comprising derived and/or modified sequence from Pf(3D7)__XP_001351122.1__HsALB_Pf-CSP(19-272)_L(G4S)_Pf-CSP(310-3 27)_L(G4S)_Pf-CSP(346-375) (opt6)
aggagagucccgcagucggcguccagcggcucugcuuguucgugugugugucguugcaggccuuauucaagcuuaccaugaaauggguaaccuucaucucacuacuauuccuauucucaagcgcauacucacucuuucaagaauaccaaugcuacggcucaagcucaaacacacgaguacuaaacgaacuaaacuacgacaacgcaggaacaaaccuauauaacgaacucgaaaugaacuacuacggcaaacaagaaaauugguacucacuaaaaaaaaacagcagaagcuuaggagaaaacgacgacggaaacaacgaagauaacgaaaaacuaagaaaaccaaaacacaaaaaacuaaaacaacccgcagacggaaacccagacccaaacgcaaauccaaauguagacccgaacgcaaacccaaacguagacccaaaugcgaacccaaacgucgacccaaacgcaaacccaaaugcaaacccaaaugcgaacccaaacgcaaacccaaacgcaaauccaaacgcaaauccaaaugcaaacccaaacgcgaauccaaacgcaaacccaaacgcaaacccaaacgcaaacccaaacgcaaacccaaacgcaaacccaaacgcaaacccgaacgcuaacccaaacgcaaacccaaacgcaaacccaaacguagauccaaacgcgaacccaaacgcaaacccaaaugcaaacccaaacgcaaacccaaacgcaaacccaaacgcaaacccaaacgcaaacccaaacgcaaacccaaacgcgaacccaaacgcaaauccaaaugcaaacccaaacgcaaacccaaacgcaaacccaaacgcaaacccaaaugcaaacccaaacgcaaacccaaaugcaaacccaaacgcaaacccaggaggaggaggaucagaacccucagacaaacacauaaaagaauaccuaaacaaaauacaaaacucacuaggaggaggaggaucgaucaaaccaggaagcgcaaacaaaccaaaagacgaacucgacuacgcaaacgauauagaaaaaaaaauaugcaaaauggaaaaaugcucguaaggacuagucccuguucccagagcccacuuuuuuuucuuuuuuugaaauaaaauagccugucuuucagaucuaaaaaaaaaaaaaaaaaaaaaaaaaaaaaaaaaaaaaaaaaaaaaaaaaaaaaaaaaaaaaaaaugcaucccccccccccccccccccccccccccccccaaaggcucuuuucagagccaccagaauu

SEQ ID NO: 858 - RNA, 1254 nt, Artificial Sequence
  mRNA Design a-1 (A64-N5-C30-hSL-N5) comprising derived and/or modified sequence from Pf(3D7)__XP_001351122.1__HsALB_Pf-CSP(19-272)_L(G4S)_Pf-CSP(310-3 27)_Pf-CSP(346-375) (opt6)
aggagagucccgcagucggcguccagcggcucugcuuguucgugugugugucguugcaggccuuauucaagcuuaccaugaaauggguaacauucauaucacuccuauuccuauucuccucagcauacucccucuuccaagaauaccaaugcuacggcucaagcucaaacacacgaguacuaaacgaacuaaauuacgacaacgccggaacaaaccuauauaaugaacuagaaaugaauuacuacggaaaacaagaaaacugguacucacuuaaaaaaaacucaagaucauuaggagaaaacgacgacggcaacaacgaagacaacgaaaaacuaagaaaaccaaaacacaaaaaacuaaaacaacccgcagacggaaauccagauccaaacgcaaacccaaacguagacccaaacgcaaacccaaacguagacccaaacgcaaacccaaacgucgacccaaacgccaacccaaacgcaaacccaaacgcaaacccaaacgcaaacccaaacgccaacccaaacgcaaacccaaacgcaaacccaaacgcaaacccaaacgcaaacccaaacgcaaacccaaacgcaaacccgaacgcaaacccaaacgcaaauccuaacgcaaacccaaacgcaaacccaaacgcaaauccgaacgcaaacccaaacguagacccaaacgcaaacccaaacgcaaacccaaacgcaaacccaaacgcaaacccaaacgcaaacccuaacgcaaacccaaaugcaaacccaaacgcgaacccaaaugcaaacccaaaugcaaacccaaacgcaaacccaaacgcaaacccaaacgcaaauccaaacgcaaauccaaacgcaaacccaaacgcaaacccaaacgcaaacccaaacgccaacccaggaggagguggaagcgaaccauccgacaaacacauaaaagaauaccuaaacaaaauacaaaacucacuaauaaaacccggcucagcaaacaaaccaaaagacgaacuagacuacgccaacgacauagaaaaaaaaauauguaaaauggaaaaaugcucauaaggacuagucccuguucccagagcccacuuuuuuuucuuuuuuugaaauaaaauagccugucuuucagaucuaaaaaaaaaaaaaaaaaaaaaaaaaaaaaaaaaaaaaaaaaaaaaaaaaaaaaaaaaaaaaaaaugcaucccccccccccccccccccccccccccccccaaaggcucuuuucagagccaccagaauu

SEQ ID NO: 859 - RNA, 1254 nt, Artificial Sequence
  mRNA Design a-1 (A64-N5-C30-hSL-N5) comprising derived and/or modified sequence from Pf(3D7)__XP_001351122.1__HsALB_Pf-CSP(19-325) (opt6)
aggagagucccgcagucggcguccagcggcucugcuuguucgugugugugucguugcaggccuuauucaagcuuaccaugaaauggguaacauucauaucacuccuauuccuauucucaagcgcauacucauuauuccaagaauaccaaugcuacggaucaucaucuaacacaagaguacucaacgaacuaaacuacgacaacgcaggaacuaaucucuacaacgaacuagaaaugaacuacuacggaaaacaagaaaacugguauucacuaaaaaaaaacagccgaucauuaggagaaaacgacgacggcaacaacgaagacaacgaaaaacuacgaaaaccaaaacacaaaaaauuaaaacagccagccgacggaaacccagacccaaacgcaaacccaaacguagacccaaacgcaaacccaaacguagacccaaacgcaaacccaaacguagacccaaacgcaaacccaaacgcaaacccaaacgcaaauccaaacgcaaacccaaacgccaacccaaacgcaaacccaaacgcaaaccccaacgcaaacccaaacgcaaacccaaacgcaaacccaaaugccaacccaaacgcaaacccaaacgcaaacccaaacgcaaacccaaacgcaaacccaaaugcaaacccaaacgcaaacccaaacguagacccaaacgcaaacccaaaugcaaacccaaacgcaaaccccaacgcaaacccaaacgcaaacccaaacgcaaacccaaacgcaaacccaaacgccaacccaaacgcaaacccaaacgcaaacccaaacgcaaacccaaacgcaaacccaaacgcaaauccaaacgcaaacccaaacgcaaacccaaacgcaaacccaaacgcaaacccaaacgcaaacccaaauaaaaacaaucaaggaaacggacaaggacacaacaugccaaacgauccaaaucgcaacguagacgaaaacgcaaacgcaaacagcgcagucaaaaacaacaacaacgaagaaccaucagacaaacacauaaaagaauaccuaaauaaaauacaaaacuagggacuagucccuguucccagagcccacuuuuuuuucuuuuuuugaaauaaaauagccugucuuucagaucuaaaaaaaaaaaaaaaaaaaaaaaaaaaaaaaaaaaaaaaaaaaaaaaaaaaaaaaaaaaaaaaaugcaucccccccccccccccccccccccccccccccaaaggcucuuuucagagccaccagaauu

SEQ ID NO: 860 - RNA, 1431 nt, Artificial Sequence
  mRNA Design a-1 (A64-N5-C30-hSL-N5) comprising derived and/or modified sequence from Pf(3D7)__XP_001351122.1__HsALB_Pf-CSP(19-384) (opt6)
aggagagucccgcagucggcguccagcggcucugcuuguucgugugugugucguugcaggccuuauucaagcuuaccaugaaauggguaaccuuuauaucacucuuauuccuauuuucaucagcauacucacucuuccaagaauaucaaugcuacggaucaucaucaaacacaagaguccucaaugaauuaaacuaugacaaugcaggaaccaaccuauacaacgaauuagaaaugaacuacuacggcaaacaagaaaacugguacucacucaaaaaaaacucaagauccuuaggagaaaaugaugacggaaacaacgaagacaacgaaaaacuccgaaaaccaaaacacaaaaaacuaaaacaacccgccgacggaaacccagaccccaacgcaaacccaaauguagaccccaacgcaaacccaaacguagacccaaacgcaaacccaaacguagacccaaacgcaaauccaaacgccaacccaaacgcaaacccaaacgccaacccaaacgcaaacccaaacgcaaacccaaacgcaaacccaaacgcaaacccaaaugcaaacccaaaugcaaacccaaacgcaaacccaaacgcaaacccaaacgcaaacccaaacgcaaacccaaaugcaaacccaaacgcaaacccaaacgcaaacccaaacguagacccaaaugcaaacccaaacgcaaacccaaacgcaaauccaaaugcaaauccaaacgcaaauccaaacgcaaacccaaacgcaaacccaaacgcaaacccaaacgcaaauccaaaugcaaacccaaacgcaaacccaaacgcaaacccaaacgcuaacccaaacgccaauccaaacgcaaacccaaacgcaaacccuaaugcaaacccaaacgccaacccaaauaaaaauaaccaaggaaacggacaaggacacaacaugccaaacgacccaaacagaaacgucgaugaaaacgcaaacgcaaauuccgcagucaaaaacaacaacaacgaagaaccaucagacaaacacauaaaagaauaccucaacaaaauacaaaacucccuaucaacagaauggucacccugcuccguuacaugcgguaacggcauacaaguaagaauaaaaccaggaucagcuaacaaacccaaagacgaacuagacuacgccaacgacauagaaaaaaaaauaugcaaaauggaaaaaugcuccucaguauucaacguaguaaacucaucauaaggacuagucccuguucccagagcccacuuuuuuuucuuuuuuugaaauaaaauagccugucuuucagaucuaaaaaaaaaaaaaaaaaaaaaaaaaaaaaaaaaaaaaaaaaaaaaaaaaaaaaaaaaaaaaaaaugcaucccccccccccccccccccccccccccccccaaaggcucuuuucagagccaccagaauu

SEQ ID NO: 861 - RNA, 1569 nt, Artificial Sequence
  mRNA Design a-1 (A64-N5-C30-hSL-N5) comprising derived and/or modified sequence from Pf(3D7)__XP_001351122.1__HsALB_Pf-CSP(19-384)_TM domain HA (opt6)
aggagagucccgcagucggcguccagcggcucugcuuguucgugugugugucguugcaggccuuauucaagcuuaccaugaaauggguaacauuuauaucacuacuuuuccuauucucaucagcauacucacucuuccaagaauaucaaugcuauggauccucaucaaacacaagaguacucaacgaauuaaacuacgauaaugccggaacaaaccuauauaacgaacuagaaaugaacuacuacggaaaacaagaaaauugguacucauuaaaaaaaaacuccagaucccuuggagaaaacgacgauggaaacaacgaagauaacgaaaaauuaagaaaaccaaaacacaaaaaauugaaacaaccagcagacgguaacccagacccaaacgccaacccaaacguagacccaaacgcgaauccaaacgucgacccaaacgcaaaucccaacguagacccaaaugcaaauccaaaugccaauccaaacgcaaacccaaacgcaaacccaaaugcaaacccaaacgccaacccaaacgcaaauccaaacgcaaacccaaacgcaaacccaaacgccaacccaaacgccaaccccaaugcaaacccaaaugcaaacccaaacgcaaacccaaacgcaaauccaaacgcaaacccaaacgccaacccaaacguagacccaaacgcaaauccaaacgcaaacccaaacgccaauccaaacgcaaacccaaacgccaacccaaaugcaaaucccaacgcaaacccaaacgcaaauccaaaugcaaaccccaacgcaaauccaaacgcaaacccaaacgcaaauccaaacgcaaauccaaaugcaaacccaaacgcaaacccuaaugcaaacccaaacgcaaacccaaacgccaacccaaacaaaaacaaccaaggaaacggacaaggucacaauaugccaaaugacccaaaccgaaacguagacgaaaacgcaaaugccaauagcgcaguaaaaaacaauaacaacgaagaaccuucagauaaacacauaaaagaauaccuaaacaaaauacaaaacucccuaucaacagaauggucaccuuguucagucacauguggaaacggaauacaaguaagaauaaaaccaggaucagcaaacaaaccaaaagacgaacuagauuacgcaaacgauauagaaaaaaaaauauguaaaauggaaaaaugcuccucagucuucaacguagucaacaguuccaaacuagaaucaaccagaaucuaccaaauacuagcaauauauuccacaguagcaagcucacucguauuaguagucucccuaggagcaauaucauucuggaugugcucaaacggaagcuuacaaugccgaauauguauauaaggacuagucccuguucccagagcccacuuuuuuuucuuuuuuugaaauaaaauagccugucuuucagaucuaaaaaaaaaaaaaaaaaaaaaaaaaaaaaaaaaaaaaaaaaaaaaaaaaaaaaaaaaaaaaaaaugcaucccccccccccccccccccccccccccccccaaaggcucuuuucagagccaccagaauu

SEQ ID NO: 862 - RNA, 1281 nt, Artificial Sequence
  mRNA Design a-1 (A64-N5-C30-hSL-N5) comprising derived and/or modified sequence from Pf(3D7)__XP_001351122.1__HsALB_Pf-CSP(82-397) (opt6)
aggagagucccgcagucggcguccagcggcucugcuuguucgugugugugucguugcaggccuuauucaagcuuaccaugaaauggguaacauucauaucacuacuauuccucuucaguucagccuauagcgauaacgaaaaacuaagaaaaccaaaacacaaaaaacucaaacaaccagcagacggaaacccagacccaaacgcaaacccaaacguagacccaaacgcaaacccaaacguagacccaaacgcaaauccaaacguagacccaaaugcaaaccccaacgcaaacccaaacgcaaacccaaacgcaaacccaaacgcaaacccaaaugcgaacccaaaugcaaauccaaacgcaaacccaaacgcaaacccaaacgcaaacccaaacgcuaacccaaacgcaaacccaaacgcaaacccaaaugcaaacccaaacgcaaacccaaacgcaaaccccaacgcaaacccaaacguagacccaaacgcaaacccaaacgcaaacccaaacgcaaacccaaacgccaacccaaaugccaacccaaacgcaaacccaaaugcaaaccccaacgcaaacccaaacgccaacccaaacgcaaacccaaacgcaaacccaaacgcaaaccccaaugcaaacccaaacgcaaacccaaaugcaaauccaaacgcaaacccaaacgcaaacccaaacgcaaacccaaacaaaaacaaccaaggaaacggacaaggacacaacaugccaaacgacccaaaucgaaacgucgaugaaaacgccaacgcaaacucagcaguaaaaaacaacaacaacgaagaaccaucugacaaacacauaaaagaauaccuaaacaaaauacaaaacucauuauccaccgaauggucaccauguucaguaacaugcggcaacggaauacaagucagaauaaaaccaggcucagcaaauaaaccaaaagacgaacuagacuacgcaaacgacauagaaaaaaaaauaugcaaaauggaaaaauguucaucagucuucaacguaguaaacucaucaauaggacucauaaugguacuaucauuccuauucuuaaacuaaggacuagucccuguucccagagcccacuuuuuuuucuuuuuuugaaauaaaauagccugucuuucagaucuaaaaaaaaaaaaaaaaaaaaaaaaaaaaaaaaaaaaaaaaaaaaaaaaaaaaaaaaaaaaaaaaugcaucccccccccccccccccccccccccccccccaaaggcucuuuucagagccaccagaauu

SEQ ID NO: 863 - RNA, 633 nt, Artificial Sequence
  mRNA Design a-1 (A64-N5-C30-hSL-N5) comprising derived and/or modified sequence from Pf(3D7)__XP_001351122.1__HsALB_Pf-CSP(93-192) (opt6)
aggagagucccgcagucggcguccagcggcucugcuuguucgugugugugucguugcaggccuuauucaagcuuaccaugaaauggguaacauucaucucacuacuauuccuauucucaagcgcauacucaaaacuaaaacaaccagcagacggaaacccagacccaaacgcaaacccaaacguagacccaaacgcaaacccaaacguagacccaaacgcaaacccaaacguagacccaaacgcaaacccaaacgcaaacccaaacgcaaacccaaacgcaaacccaaacgcaaacccaaacgcaaacccaaacgcaaacccaaacgcaaacccaaacgcaaacccaaacgcaaacccaaacgcaaacccaaacgcaaacccaaacgcaaacccaaacgcaaacccaaacgcaaacccaaacgcaaacccauaaggacuagucccuguucccagagcccacuuuuuuuucuuuuuuugaaauaaaauagccugucuuucagaucuaaaaaaaaaaaaaaaaaaaaaaaaaaaaaaaaaaaaaaaaaaaaaaaaaaaaaaaaaaaaaaaaugcaucccccccccccccccccccccccccccccccaaaggcucuuuucagagccaccagaauu

SEQ ID NO: 864 - RNA, 873 nt, Artificial Sequence
  mRNA Design a-1 (A64-N5-C30-hSL-N5) comprising derived and/or modified sequence from Pf(3D7)__XP_001351122.1__HsALB_Pf-CSP(93-272) (opt6)
aggagagucccgcagucggcguccagcggcucugcuuguucgugugugugucguugcaggccuuauucaagcuuaccaugaaaugggucacauucauaucacuccuauuccuauucucaagcgcauacucaaaacuaaaacaaccagcagacggaaacccagacccaaacgcaaacccaaacguagacccaaacgcaaacccaaacguagacccaaacgcaaacccaaacguagacccaaacgcaaacccaaacgcaaacccaaacgccaacccaaacgcaaacccaaacgcaaacccaaacgcaaacccaaacgcaaacccaaacgcaaacccaaacgcaaacccaaacgcaaacccaaacgcaaacccaaacgcaaacccaaacgcaaauccaaacgcaaacccaaacgccaacccaaacgcaaacccaaacgcaaacccaaacguagacccaaacgcaaacccaaacgcaaacccaaacgcaaacccaaacgcaaacccaaacgcaaacccaaacgcaaacccaaacgcaaacccaaacgcaaacccaaacgcaaauccaaacgcaaacccaaacgcaaacccaaacgcaaacccaaacgcaaacccaaacgcaaacccaaacgcaaacccaaacgcaaacccaaacgcaaacccaaacgcaaacccauaaggacuagucccuguucccagagcccacuuuuuuuucuuuuuuugaaauaaaauagccugucuuucagaucuaaaaaaaaaaaaaaaaaaaaaaaaaaaaaaaaaaaaaaaaaaaaaaaaaaaaaaaaaaaaaaaaugcaucccccccccccccccccccccccccccccccaaaggcucuuuucagagccaccagaauu

SEQ ID NO: 865 - RNA, 1248 nt, Artificial Sequence
  mRNA Design a-1 (A64-N5-C30-hSL-N5) comprising derived and/or modified sequence from Pf(3D7)__XP_001351122.1__HsALB_Pf-CSP(93-397) (opt6)
aggagagucccgcagucggcguccagcggcucugcuuguucgugugugugucguugcaggccuuauucaagcuuaccaugaaauggguaacauucauaucacuccuauuccuauucucaucagcauacucaaaacuaaaacaacccgcagacggaaacccagacccaaacgccaacccaaacguagacccaaacgcaaacccgaacguagacccaaacgcaaaccccaacguagacccaaacgcaaacccaaaugcaaacccaaacgcaaacccaaacgcaaacccaaacgcaaacccaaacgcaaacccaaacgcaaacccaaacgcaaacccaaacgcaaacccaaacgcgaaucccaacgcaaauccaaacgcaaacccaaacgcaaauccaaacgcaaacccgaacgcaaacccaaacgcaaacccaaacgcaaacccaaacguagauccaaacgcaaauccaaacgcaaacccaaacgcaaauccaaacgcaaacccaaacgcaaacccaaacgcaaaccccaacgcaaacccaaacgcaaacccaaacgcaaacccaaacgcaaauccaaacgccaacccaaacgcaaacccaaacgcaaacccaaacgcgaacccaaacgcgaacccaaacgcaaacccaaacgcaaacccaaacgcaaacccaaacaaaaacaaccaagggaacggacaaggacacaacaugccaaacgauccaaacagaaacguagacgaaaacgcaaacgcaaacucagcaguaaaaaacaacaacaacgaagaaccaucagacaaacacauaaaagaauaccuaaacaaaauacaaaacucacucucaacagaauggucaccaugcaguguaacaugcggaaauggaauacaaguacguauaaaaccaggaucagcaaacaaaccaaaagacgaauuagacuacgccaacgauauagaaaaaaaaauaugcaaaauggaaaaaugcagcucagucuucaacguagucaacagcucaauaggacuaauaaugguccucucauucuuauuucuaaacugaggacuagucccuguucccagagcccacuuuuuuuucuuuuuuugaaauaaaauagccugucuuucagaucuaaaaaaaaaaaaaaaaaaaaaaaaaaaaaaaaaaaaaaaaaaaaaaaaaaaaaaaaaaaaaaaaugcaucccccccccccccccccccccccccccccccaaaggcucuuuucagagccaccagaauu

SEQ ID NO: 866 - RNA, 618 nt, Artificial Sequence
  mRNA Design a-1 (A64-N5-C30-hSL-N5) comprising derived and/or modified sequence from Pf(3D7)__XP_001351122.1__HsALB_Pf-CSP(98-192) (opt6)
aggagagucccgcagucggcguccagcggcucugcuuguucgugugugugucguugcaggccuuauucaagcuuaccaugaaauggguaacauucauaagccuacuauuccuauucagcucagcauacagcgcagacggaaacccagacccaaacgcaaacccaaacguagacccaaacgcaaacccaaacguagacccaaacgcaaacccaaacguagacccaaacgcaaacccaaacgcaaacccaaacgcaaacccaaacgcaaacccaaacgcaaacccaaacgcaaacccaaacgcaaacccaaacgcaaacccaaacgcaaacccaaacgcaaacccaaacgcaaacccaaacgcaaacccaaacgcaaacccaaacgcaaacccaaacgcaaacccaaacgcaaacccauaaggacuagucccuguucccagagcccacuuuuuuuucuuuuuuugaaauaaaauagccugucuuucagaucuaaaaaaaaaaaaaaaaaaaaaaaaaaaaaaaaaaaaaaaaaaaaaaaaaaaaaaaaaaaaaaaaugcaucccccccccccccccccccccccccccccccaaaggcucuuuucagagccaccagaauu

SEQ ID NO: 867 - RNA, 858 nt, Artificial Sequence
  mRNA Design a-1 (A64-N5-C30-hSL-N5) comprising derived and/or modified sequence from Pf(3D7)__XP_001351122.1__HsALB_Pf-CSP(98-272) (opt6)
aggagagucccgcagucggcguccagcggcucugcuuguucgugugugugucguugcaggccuuauucaagcuuaccaugaaauggguaacauucauaucacuacuauuccuauucagcucagccuacagcgcagacggaaacccagacccaaacgcaaacccaaacguagacccaaacgcaaacccaaacgucgacccaaacgcaaacccaaacguagacccaaacgcaaacccaaacgcaaacccaaacgcaaacccaaacgcaaacccaaacgcaaacccaaacgcaaacccaaacgcaaacccaaacgcaaacccaaacgcaaacccaaacgcaaacccaaacgcaaacccaaacgcaaacccaaacgcaaacccaaacgcaaacccaaacgcaaacccaaacgcaaacccaaacgcaaacccaaacguagacccaaaugcaaacccaaacgcaaacccaaacgcaaacccaaacgcaaacccaaacgcaaacccaaacgcaaacccaaacgcaaacccaaacgcaaacccaaacgcaaacccaaacgcaaacccaaacgcaaacccaaacgcgaacccaaacgcaaacccaaacgcaaacccaaacgcaaacccaaacgcaaacccaaaugcaaacccaaacgcaaacccauaaggacuagucccuguucccagagcccacuuuuuuuucuuuuuuugaaauaaaauagccugucuuucagaucuaaaaaaaaaaaaaaaaaaaaaaaaaaaaaaaaaaaaaaaaaaaaaaaaaaaaaaaaaaaaaaaaugcaucccccccccccccccccccccccccccccccaaaggcucuuuucagagccaccagaauu

SEQ ID NO: 868 - RNA, 1164 nt, Artificial Sequence
  mRNA Design a-1 (A64-N5-C30-hSL-N5) comprising derived and/or modified sequence from Pf(3D7)__XP_001351122.1__HsALB_Pf-CSP(98-374) (opt6)
aggagagucccgcagucggcguccagcggcucugcuuguucgugugugugucguugcaggccuuauucaagcuuaccaugaaaugggucacauucauaucccuacuauuccuauucucaucagcauauucagcagauggaaacccagacccaaacgccaacccaaacguagacccaaacgcaaacccaaacguagacccaaacgcaaacccaaacguagacccaaacgcaaacccaaacgcaaacccaaacgcaaacccaaacgcaaacccaaacgcaaacccaaacgcaaacccaaacgcaaacccaaacgcaaacccaaacgcaaacccaaacgcaaacccaaacgcaaacccaaaugcaaauccaaacgcaaauccaaacgcaaacccaaacgccaacccaaacgcaaauccaaacgcaaacccaaacguagacccgaacgcaaacccgaacgcaaacccaaacgcaaacccaaaugcaaacccaaacgcaaacccaaacgccaacccaaacgcaaacccaaacgcaaacccaaaugcaaacccaaacgcaaacccaaacgccaacccaaacgcaaacccaaacgcaaacccaaacgcaaacccaaacgcaaacccaaaugcaaacccaaacgcaaacccaaacgcaaacccaaacaaaaacaaccaaggaaauggacaaggccacaacaugccaaacgacccaaacagaaacguagacgaaaacgcaaacgcaaacuccgcagucaaaaacaacaacaacgaagaaccauccgacaaacacauaaaagaauaccucaauaaaauacaaaacucacuaucaacagaaugguccccaugcucaguaacaugcggaaacggaauacaaguaagaauaaaaccaggauccgcaaacaaaccaaaagacgaacuagacuacgcaaacgauauagaaaaaaaaauaugcaaaauggaaaaaugcuaaggacuagucccuguucccagagcccacuuuuuuuucuuuuuuugaaauaaaauagccugucuuucagaucuaaaaaaaaaaaaaaaaaaaaaaaaaaaaaaaaaaaaaaaaaaaaaaaaaaaaaaaaaaaaaaaaugcaucccccccccccccccccccccccccccccccaaaggcucuuuucagagccaccagaauu

SEQ ID NO: 869 - RNA, 1233 nt, Artificial Sequence
  mRNA Design a-1 (A64-N5-C30-hSL-N5) comprising derived and/or modified sequence from Pf(3D7)__XP_001351122.1__HsALB_Pf-CSP(98-397) (opt6)
aggagagucccgcagucggcguccagcggcucugcuuguucgugugugugucguugcaggccuuauucaagcuuaccaugaaauggguaaccuucauaucauuacuauuccuuuucagcucggcauacucagcagacggcaacccagacccaaacgcaaacccaaacgucgacccaaaugcgaacccaaacguagacccaaacgcaaacccaaacguagauccaaacgcaaacccaaacgcaaacccaaacgcaaacccaaacgcaaacccaaacgccaacccaaaugcaaacccaaacgcaaaccccaacgcaaacccaaacgcaaacccaaacgcaaacccaaacgcaaaucccaacgcaaauccaaacgcaaacccaaaugcaaacccaaacgccaacccaaacgcaaacccaaacgcaaaccccaaugucgacccaaacgcaaacccaaacgcaaacccaaacgcaaacccaaacgcaaauccaaacgcaaaccccaacgcaaacccaaacgcaaacccaaacgcaaacccaaacgcaaacccaaacgcaaacccaaacgcaaacccaaacgcaaacccaaacgcaaacccaaacgcaaacccaaacgcaaauccaaacgcaaacccaaacgcaaacccaaacgcaaacccaaacaaaaacaaccaaggaaauggacaaggacacaacaugccaaaugaccccaacagaaacgucgacgaaaacgccaacgcaaacagcgcaguaaaaaacaacaacaaugaagaaccaucagacaaacacauaaaagaauaccuaaacaaaauucaaaacucacuaucaaccgaaugguccccaugcucaguaacaugcggaaacgguauacaaguacgaauaaaaccaggaucagcaaacaaaccaaaagacgaacuagacuacgcaaacgacauagaaaaaaaaauaugcaaaauggaaaaaugcucaucaguuuuuaacguagucaauagcucaaucggacucauaaugguacuaucauuucucuuccuaaauuaaggacuagucccuguucccagagcccacuuuuuuuucuuuuuuugaaauaaaauagccugucuuucagaucuaaaaaaaaaaaaaaaaaaaaaaaaaaaaaaaaaaaaaaaaaaaaaaaaaaaaaaaaaaaaaaaaugcaucccccccccccccccccccccccccccccccaaaggcucuuuucagagccaccagaauu

SEQ ID NO: 870 - RNA, 1560 nt, Artificial Sequence
  mRNA Design a-1 (A64-N5-C30-hSL-N5) comprising derived and/or modified sequence from Pf(3D7)__XP_001351122.1__HsALB_Pf-CSP(199-377)_L(PVTN)_HBsAg (opt6)
aggagagucccgcagucggcguccagcggcucugcuuguucgugugugugucguugcaggccuuauucaagcuuaccaugaaauggguaacauuuauauccuuacuauuucucuucuccucagcuuacucugacccaaacgcaaaucccaacgcaaacccaaaugcaaacccaaacgcaaauccaaacgcaaacccaaaugcuaaucccaacgcaaacccaaacgcaaaccccaaugccaacccaaacgcuaacccaaacgcaaacccaaacgccaacccaaaugcaaacccaaacgcaaacccaaacgcaaauccaaaugcaaacccaaacgcaaauccaaacgcaaacccaaacaaaaacaaccaaggaaacggacaaggccauaauaugccuaaugaccccaacagaaacguagacgaaaaugcuaacgccaacucagcaguaaaaaacaacaauaacgaagaaccaucagauaaacacauaaaagaauacuuaaacaaaauacaaaauucauuaucaacagaauggucaccaugcucagucaccugcggaaacgguauacaaguacgcauaaaaccaggcucagcaaauaaaccaaaagacgaacuagauuacgcuaacgacauagaaaaaaaaauaugcaaaauggaaaaaugcucaucaguaccaguaacaaauauggaaaacauaacaucaggauuccuaggcccacucuuaguacuacaagcaggauuuuuucuucuaacaagaaucuuaacuauaccccaaucacucgacucaugguggaccucacuaaauuuccucggaggaucuccaguaugccucggacaaaauucacaaucaccaacauccaaucacucacccaccuccugcccaccaaucugcccaggauacagauggaugugcuuacgaagauucauaauauuccuauucauacuacuucuaugcuuaauauuccuucucguccuacucgacuaucaaggaaugcucccuguaugcccacucauaccaggauccacaacaacuaacacaggacccuguaaaacaugcacaacacccgcccaaggaaauucaauguuccccucuugcugcugcacaaaaccaacagacggaaauugcacaugcauuccaauuccaucaucuugggcauuugcaaaauacuuaugggaaugggcaucaguccgauucucgugguuaucuuuacuaguaccauucguucaaugguuuguaggacuuucaccuacaguaugguuaucugcaauauggaugaugugguacuggggaccaucauuauacucaaucguaucaccauuuauaccacuacuacccauauuuuucugccuauggguauacauauaaggacuagucccuguucccagagcccacuuuuuuuucuuuuuuugaaauaaaauagccugucuuucagaucuaaaaaaaaaaaaaaaaaaaaaaaaaaaaaaaaaaaaaaaaaaaaaaaaaaaaaaaaaaaaaaaaugcaucccccccccccccccccccccccccccccccaaaggcucuuuucagagccaccagaauu

SEQ ID NO: 871 - RNA, 1299 nt, Artificial Sequence
  mRNA Design a-1 (A64-N5-C30-hSL-N5) comprising derived and/or modified sequence from Pb(ANKA)__XP_022712148.1__Pb-CSP (opt6)
aggagagucccgcagucggcguccagcggcucugcuuguucgugugugugucguugcaggccuuauucaagcuuaccaugaaaaaaugcacaaucuuaguaguagcaucacuccuacuagucaacucucuccuaccaggauacggccaaaacaaauccauacaagcccaacgcaaccuaaacgaauuaugcuauaacgaaggcaacgacaacaaauuauaccauguauuaaacucaaaaaacggaaaaauauacaacagaaacacaguaaacagacuacucgcagacgcacccgaaggaaaaaaaaaugaaaaaaaaaacgaaaaaauagaacgcaacaacaaacuuaaacaaccaccaccacccccaaaccccaacgacccaccacccccaaaccccaacgauccaccccccccaaaccccaacgacccaccacccccaaacccaaacgaccccccaccaccaaaugcaaacgacccaccaccaccaaacgcaaacgacccagcaccacccaacgccaacgaccccgcaccaccaaacgcaaacgauccagcucccccaaacgcaaacgauccagcaccaccaaacgccaacgacccaccaccaccaaacccaaacgacccagcaccaccaaacgcaaaugacccaccaccccccaacccaaacgaccccgccccaccacaagguaacaacaacccacaaccacaaccacgcccacaaccacaaccacaaccacaaccacaaccccaaccacaaccacaaccacaaccacgcccacaaccccaaccucaaccaggaggcaauaacaacaacaaaaacaauaauaacgaugacuccuacauaccaucugccgaaaaaauccucgaauucguaaaacaaauaagagacucaauaacagaagaauggucacaauguaacguaacaugcggaucaggcauacgaguaagaaaacgcaaaggaucaaacaaaaaagcagaagaccuaacacucgaagacauugacacagaaaucugcaaaauggacaaaugcucaucaauauucaacauagucucaaacucauuaggauucguaauccuacuaguacucguauucuucaacuaaggacuagucccuguucccagagcccacuuuuuuuucuuuuuuugaaauaaaauagccugucuuucagaucuaaaaaaaaaaaaaaaaaaaaaaaaaaaaaaaaaaaaaaaaaaaaaaaaaaaaaaaaaaaaaaaaugcaucccccccccccccccccccccccccccccccaaaggcucuuuucagagccaccagaauu

SEQ ID NO: 872 - RNA, 1464 nt, Artificial Sequence
  mRNA Design a-1 (A64-N5-C30-hSL-N5) comprising derived and/or modified sequence from Pb(ANKA)__XP_022712148.1__Pb-CSP_L(G4SG4)_TM domain HA (opt6)
aggagagucccgcagucggcguccagcggcucugcuuguucgugugugugucguugcaggccuuauucaagcuuaccaugaaaaaaugcaccauacuagucguagccucacuacuacuagucaauucauuauuaccaggauacggccaaaauaaauccauacaagcacaaagaaaucucaaugaauuaugcuacaacgaaggaaacgacaauaaacuauaccacguauuaaacucaaaaaauggaaaaauauacaaccgaaacaccguaaaccguuuauuagcagacgcaccagaaggaaaaaaaaacgaaaaaaaaaacgaaaaaauugaaagaaacaauaaacucaaacaaccaccucccccacccaacccaaacgacccacccccacccaacccaaacgacccaccacccccaaaccccaacgauccccccccacccaauccaaacgauccaccaccaccaaacgcaaacgacccaccaccaccaaacgcaaacgacccagcaccaccaaacgcaaacgaccccgcaccaccaaacgcaaacgauccagcaccacccaacgcaaacgacccagcacccccaaacgccaacgaccccccaccaccaaacccaaacgaccccgcaccuccaaacgcaaacgacccaccaccaccaaacccuaacgacccagcccccccacaaggaaacaacaauccucaaccacaaccacgcccucaaccacaaccccaaccucaaccacaaccacaaccacaaccccaaccacaaccacgaccacaaccucaaccucaaccaggaggcaacaacaacaacaaaaacaacaacaacgacgacucauacauaccaucagcagaaaaaauacuagaauucgucaaacaaauaagagacucuauaacugaagaauggucccaaugcaauguaacuugcggaucaggcaucagagucagaaaacgcaaaggauccaacaaaaaagccgaagaccuaacccucgaagauauagacacagaaaucugcaaaauggacaaaugcucaucaauuuucaauauagucucaaauucacuaggauucgucaucuuacuaguacuaguauucuuuaauggaggaggaggaucaggaggaggaggaaaacuagaaucaacccgaauauaccaaauacuagcaauauacucaaccguagcaucaucacucguacuagugguauccuuaggagcaauaagcuuuuggaugugcuccaacggcucucuacaaugucgaauaugcauaugaggacuagucccuguucccagagcccacuuuuuuuucuuuuuuugaaauaaaauagccugucuuucagaucuaaaaaaaaaaaaaaaaaaaaaaaaaaaaaaaaaaaaaaaaaaaaaaaaaaaaaaaaaaaaaaaaugcaucccccccccccccccccccccccccccccccaaaggcucuuuucagagccaccagaauu

SEQ ID NO: 873 - RNA, 1284 nt, Artificial Sequence
  mRNA Design a-1 (A64-N5-C30-hSL-N5) comprising derived and/or modified sequence from Pb(ANKA)__XP_022712148.1__HsALB_Pb-CSP(24-340) (opt6)
aggagagucccgcagucggcguccagcggcucugcuuguucgugugugugucguugcaggccuuauucaagcuuaccaugaaaugggucacauucauaucacuccuauuccuauucucaucagcauacucacaaaacaaaucaauccaagcccaacgaaaccuaaacgaacuaugcuacaacgaaggaaacgauaacaaacuauaccacguacuaaacucaaaaaacggaaaaauauacaaucgaaacacaguaaacagacucuuagcagacgcaccagaaggaaaaaaaaacgaaaaaaaaaacgaaaaaaucgaaagaaacaacaaacucaaacaaccaccaccaccaccaaacccaaacgauccaccaccccccaacccaaacgacccacccccacccaacccaaacgaccccccaccaccaaacccaaacgaccccccaccaccaaacgcaaacgauccaccaccccccaacgcaaacgauccagcaccacccaacgccaacgacccagcaccacccaaugcaaacgacccagcacccccaaacgcaaacgacccagcacccccaaacgccaacgacccaccaccaccaaacccaaaugacccagcaccaccaaacgccaacgauccaccacccccaaacccaaacgacccugcaccuccccaaggaaacaacaacccacaaccacaaccaagaccacaaccucaaccacaaccacaaccacaaccacaaccacaaccacaaccccaaccaagaccacaaccacaaccccaaccaggaggcaacaacaauaacaaaaauaacaacaacgacgacucauacaucccauccgcagaaaaaauauuagaauuuguaaaacaaauaagagacucaauaacagaagaauggucccaaugcaacguaacaugcgguucaggaauccguguacgaaaacgcaaaggcucaaacaaaaaagcagaagaccucacacucgaagacauugacacagaaauaugcaaaauggacaaaugcuccucaaucuucaacauugucucaaacucauuaggauucguaaucuuacucguacucguauucuucaacuaaggacuagucccuguucccagagcccacuuuuuuuucuuuuuuugaaauaaaauagccugucuuucagaucuaaaaaaaaaaaaaaaaaaaaaaaaaaaaaaaaaaaaaaaaaaaaaaaaaaaaaaaaaaaaaaaaugcaucccccccccccccccccccccccccccccccaaaggcucuuuucagagccaccagaauu

SEQ ID NO: 874 - RNA, 1302 nt, Artificial Sequence
  mRNA Design a-1 (A64-N5-C30-hSL-N5) comprising derived and/or modified sequence from Pb(ANKA)__XP_022712148.1__HsIns-iso1_Pb-CSP(24-340) (opt6)
aggagagucccgcagucggcguccagcggcucugcuuguucgugugugugucguugcaggccuuauucaagcuuaccauggcacuauggaugagacuacuaccacuauuagcacuacucgcacuauggggacccgacccagcagcagcacaaaacaaaucaauacaagcccaaagaaaccuaaaugaacuaugcuacaacgaaggaaacgacaacaaauuauaccacguacuaaacuccaaaaacggaaaaauuuacaacagaaacaccguaaaccgacuacuagcagacgcaccagaaggaaaaaaaaacgaaaaaaaaaacgaaaaaauagaaagaaacaauaaacuaaaacaaccaccacccccaccaaaccccaacgacccaccaccaccaaacccaaacgacccuccaccaccaaaccccaacgaccccccucccccaaacccaaacgaccccccaccaccaaacgcaaaugaccccccccccccaaaugcaaacgaccccgcaccaccaaacgcaaacgacccagccccaccaaacgccaacgauccugcaccaccaaaugcaaacgacccagcccccccaaacgcaaaugacccaccaccaccaaacccaaacgacccugcaccaccaaaugcuaacgaccccccaccaccaaauccaaacgaccccgcccccccacaaggaaacaauaacccacaaccccaacccagaccacaaccacaaccucaaccacaaccccaaccacaaccccaaccacaaccacaaccacgcccacaaccacaaccacaaccaggaggaaacaacaauaauaaaaacaacaauaacgacgacucauacauucccuccgcagaaaaaauacucgaauucguaaaacaaauaagagacucuauaacagaagaauggucccaaugcaacgucacaugcggauccggaauaagagucagaaaaagaaaaggaucaaacaaaaaagcagaagaccucacacuagaagacauagauacagaaauaugcaaaauggacaaauguucaucaauauuuaacauaguaucaaacucuuuaggauucgucauauuacucguacuaguauucuucaacuaaggacuagucccuguucccagagcccacuuuuuuuucuuuuuuugaaauaaaauagccugucuuucagaucuaaaaaaaaaaaaaaaaaaaaaaaaaaaaaaaaaaaaaaaaaaaaaaaaaaaaaaaaaaaaaaaaugcaucccccccccccccccccccccccccccccccaaaggcucuuuucagagccaccagaauu

SEQ ID NO: 875 - RNA, 1281 nt, Artificial Sequence
  mRNA Design a-1 (A64-N5-C30-hSL-N5) comprising derived and/or modified sequence from Pb(ANKA)__XP_022712148.1__HsSPARC_Pb-CSP(24-340) (opt6)
aggagagucccgcagucggcguccagcggcucugcuuguucgugugugugucguugcaggccuuauucaagcuuaccaugcgagcauggauauucuucuuacuuugucucgcaggacgcgcccuagcacaaaacaaaucaauacaagcacaaagaaaccucaacgaacuaugcuacaacgaaggaaacgacaacaaacuauaccacgucuuaaacucaaaaaacggaaaaauauacaauagaaacacaguaaaccgacuauuagcagacgcacccgaaggaaaaaaaaacgaaaaaaaaaaugaaaaaaucgaaagaaacaacaaacucaaacaaccacccccacccccaaacccuaacgacccaccaccaccaaaccccaacgauccaccaccaccaaacccaaacgacccaccaccccccaacccaaacgacccacccccacccaacgccaacgauccaccacccccaaaugcaaacgacccagccccaccaaacgcaaacgauccagcuccaccaaacgcaaacgaccccgccccaccaaacgccaacgacccagcuccaccaaacgcaaaugauccaccaccacccaacccaaacgacccugcacccccaaacgcaaacgacccaccaccaccaaacccaaacgacccagcacccccacaaggcaacaauaacccacaaccacaacccagaccacaaccccaaccgcaaccccaaccacaaccacaaccacaaccacaaccacaaccaagaccacaaccacaaccucaaccuggcggaaacaauaacaauaaaaacaacaacaacgacgacucauauauaccaucagccgaaaaaauucuagaauucguaaaacaaaucagagacucaauaacagaagaauggucacaaugcaacguaacauguggauccggaauaagaguaagaaaaagaaaaggaucaaacaaaaaagcagaagaucuaacacuagaagauauagacacagaaauaugcaaaauggacaaaugcucaucaauauucaacauagucuccaacucacucggauucguaauccuacucguacucguauucuucaacuaaggacuagucccuguucccagagcccacuuuuuuuucuuuuuuugaaauaaaauagccugucuuucagaucuaaaaaaaaaaaaaaaaaaaaaaaaaaaaaaaaaaaaaaaaaaaaaaaaaaaaaaaaaaaaaaaaugcaucccccccccccccccccccccccccccccccaaaggcucuuuucagagccaccagaauu

SEQ ID NO: 876 - RNA, 1284 nt, Artificial Sequence
  mRNA Design a-1 (A64-N5-C30-hSL-N5) comprising derived and/or modified sequence from Pb(ANKA)__XP_022712148.1__IgE_Pb-CSP(24-340) (opt6)
aggagagucccgcagucggcguccagcggcucugcuuguucgugugugugucguugcaggccuuauucaagcuuaccauggacuggacguggauauuauuuuuagucgccgcagccaccagaguacacucucaaaacaaaucaauacaagcccaaagaaaucuaaacgaauuaugcuacaacgaaggaaacgacaacaaacuauaccacguccucaacucuaaaaauggaaaaauauacaacagaaacaccguaaacagacuacuagcagacgcaccagaaggaaaaaaaaaugaaaaaaaaaacgaaaaaauagaaagaaauaacaaacucaaacaaccaccaccaccucccaacccaaacgacccaccacccccaaacccaaaugacccaccaccaccaaacccaaacgacccaccacccccaaacccaaaugacccaccaccaccaaacgcaaacgacccaccaccaccaaacgcaaacgacccagccccaccaaacgcaaacgacccagcaccaccaaacgcaaacgacccagcaccacccaaugccaaugacccagcaccaccaaacgcaaacgaccccccaccaccaaacccuaaugaccccgcaccaccaaacgcaaacgaccccccaccaccuaaccccaacgaccccgccccaccacaaggaaacaacaacccacaaccacaaccacguccacaaccacaaccacaaccccaaccacaaccccaaccacaaccacaaccacaaccccgaccacaaccacaaccacaacccggagguaacaacaacaauaaaaacaacaauaacgacgacuccuacauacccuccgcagaaaaaauacuagaauucguaaaacaaauaagagacucaauaacugaagaauggucacaauguaacguaacaugcgguucaggaauaagagucagaaaaagaaaaggaucaaacaaaaaagcagaagauuuaacacuagaagacauagacaccgaaauaugcaaaauggacaaaugcagcuccaucuucaacauaguaucaaacucacuaggauuuguaauacuacucguacuaguauucuucaauuaaggacuagucccuguucccagagcccacuuuuuuuucuuuuuuugaaauaaaauagccugucuuucagaucuaaaaaaaaaaaaaaaaaaaaaaaaaaaaaaaaaaaaaaaaaaaaaaaaaaaaaaaaaaaaaaaaugcaucccccccccccccccccccccccccccccccaaaggcucuuuucagagccaccagaauu

SEQ ID NO: 877 - RNA, 1470 nt, Artificial Sequence
  mRNA Design a-1 (A64-N5-C30-hSL-N5) comprising derived and/or modified sequence from Pf(3D7)__XP_001351122.1__Pf-CSP (opt11)
aggagagucccgcagucggcguccagcggcucugcuuguucgugugugugucguugcaggccuuauucaagcuuaccaugaugcgaaagcuugcgauccucagcgucuccucauuccuauucguagaagcacuauuccaagaauaccaaugcuacggcucauccucaaacacacgcguacucaacgaacucaacuacgacaacgcaggaacaaaccucuacaacgaacuagagaugaacuacuacggcaaacaagaaaacugguacucucucaaaaaaaacucacgaagccucggcgagaacgacgacggaaacaacgaagacaacgaaaaacuccgcaaaccaaaacacaaaaaacucaaacaacccgccgacggaaacccagacccaaacgcaaacccaaacguagacccaaacgccaaccccaacguagaccccaacgccaacccuaacgucgaccccaaugcaaaccccaacgcgaacccaaacgcaaaccccaacgcaaaccccaacgcaaacccaaacgccaaccccaacgcaaacccaaacgcaaacccuaacgccaacccaaacgccaacccaaacgccaacccaaacgcaaacccgaacgccaaccccaacgccaacccaaacgcaaacccaaacgcaaaccccaacgccaaccccaacguagaccccaacgcaaaccccaacgcaaacccaaacgccaaccccaacgccaaccccaacgccaaccccaacgccaaccccaaugccaacccaaacgcgaaccccaacgcaaacccgaacgcaaacccaaacgcgaacccaaacgcgaacccaaacgccaaccccaacgccaaccccaacgcaaacccaaacgcgaacccaaacgcaaaccccaacgccaacccaaacaaaaacaaccaaggaaacggacaaggccacaacaugccaaacgaccccaaccgcaacguagacgaaaacgccaacgccaacuccgcugucaagaacaacaacaacgaagaaccauccgacaaacacauaaaagaauaccuaaacaaaauccaaaacucccucucaaccgaauggucccccugcuccgucacaugcggaaacggcauccaaguccgaaucaaaccaggcuccgccaacaaacccaaagacgaacuggacuacgccaacgacaucgaaaaaaaaaucugcaaaauggaaaaaugcucauccgucuucaacguggucaacuccuccaucggacuaauaaugguccucuccuuccuauuccuaaacuaaggacuagucccuguucccagagcccacuuuuuuuucuuuuuuugaaauaaaauagccugucuuucagaucuaaaaaaaaaaaaaaaaaaaaaaaaaaaaaaaaaaaaaaaaaaaaaaaaaaaaaaaaaaaaaaaaugcaucccccccccccccccccccccccccccccccaaaggcucuuuucagagccaccagaauu

SEQ ID NO: 878 - RNA, 1401 nt, Artificial Sequence
  mRNA Design a-1 (A64-N5-C30-hSL-N5) comprising derived and/or modified sequence from Pf(3D7)__XP_001351122.1__Pf-CSP(1-374) (opt11)
aggagagucccgcagucggcguccagcggcucugcuuguucgugugugugucguugcaggccuuauucaagcuuaccaugaugcgcaaacucgcaauccucuccgucucaucguuccuauucguagaagcacucuuccaagaauaccaaugcuacggcucaagcuccaacacaagaguacucaacgaacucaacuacgacaaugccggaacaaaccuauacaacgagcuagaaaugaacuacuacggcaaacaagaaaacugguacucgcuaaaaaaaaacagcagaagccuaggugaaaacgacgacggaaacaacgaagacaacgaaaaacugcgcaaaccaaaacacaaaaaacuaaaacaacccgcagacggcaacccagacccaaacgcaaacccaaacguagaccccaacgccaacccaaacguagacccaaacgccaacccaaacguagacccaaacgcaaacccgaacgcaaacccaaacgcaaacccaaacgcaaacccaaacgcaaacccaaacgccaaccccaacgcaaauccaaacgcaaaccccaacgcaaaccccaacgccaacccaaacgcaaaccccaacgcgaacccaaacgccaaccccaacgccaacccaaacgcaaacccaaacgcaaacccaaacgccaaccccaacgucgacccaaacgccaacccaaacgcaaaccccaacgccaaccccaacgcaaacccaaacgccaacccgaacgcaaacccgaacgcaaacccaaacgcaaaccccaacgcaaaccccaacgcaaacccaaacgcaaaccccaacgccaaccccaacgccaaccccaacgcaaacccaaacgcaaacccgaacgcaaaccccaacgcaaaccccaacgccaaucccaacaaaaacaaccaaggcaacggacaaggacacaacaugccaaacgaccccaaccgcaacgucgacgaaaacgccaacgccaacuccgcggucaaaaacaacaacaacgaagagcccucagacaaacacauaaaagaauaccuaaacaaaauccaaaacucccucucgacagaauggucccccugcagcgucaccugcggaaacggcauacaaguacgaauaaaacccggcucagccaacaaaccaaaagacgaacuagacuacgccaacgacauagaaaaaaaaauaugcaaaauggaaaaaugcugaggacuagucccuguucccagagcccacuuuuuuuucuuuuuuugaaauaaaauagccugucuuucagaucuaaaaaaaaaaaaaaaaaaaaaaaaaaaaaaaaaaaaaaaaaaaaaaaaaaaaaaaaaaaaaaaaugcaucccccccccccccccccccccccccccccccaaaggcucuuuucagagccaccagaauu

SEQ ID NO: 879 - RNA, 1254 nt, Artificial Sequence
  mRNA Design a-1 (A64-N5-C30-hSL-N5) comprising derived and/or modified sequence from Pf(3D7)__XP_001351122.1__Pf-CSP(1-325) (opt11)
aggagagucccgcagucggcguccagcggcucugcuuguucgugugugugucguugcaggccuuauucaagcuuaccaugaugcgcaaacucgcaauccuaucaguaagcucauuccuguucguagaagcacuauuccaagaauaccaaugcuacggcucauccucaaacacaagaguacuaaacgaacuaaacuacgacaacgccggaaccaaccuauacaacgaacucgaaaugaacuacuacggcaaacaagaaaacugguacucacuaaagaaaaacagcagaagccucggcgaaaacgacgacggcaacaacgaagacaacgagaaacugagaaaaccaaaacacaagaaacuaaaacaacccgcggacgggaacccagacccaaaugcaaacccaaacgucgacccaaacgcaaacccaaacguagacccaaacgcaaaccccaacguagaccccaacgcaaacccaaacgcaaacccaaacgcaaacccaaacgcaaacccaaacgcaaaccccaacgcaaacccaaacgcaaacccaaacgcaaaccccaacgccaacccaaacgccaaccccaacgcaaacccaaacgcaaacccaaacgcaaaccccaacgccaacccgaacgcaaacccaaacgcaaacccaaacgcaaaccccaacguagacccaaacgcaaacccaaacgccaaccccaacgcaaacccaaacgcaaacccgaacgcaaaccccaacgcaaaccccaacgcaaacccaaacgcaaaccccaacgcaaauccaaacgcaaacccaaacgcaaacccaaacgccaacccaaacgcaaaucccaacgcaaacccaaacgcaaaccccaacgcaaacccaaacgcaaacccaaacgcaaacccaaacaaaaacaaccaaggaaacggccaaggacacaacaugccaaacgacccaaaccgaaacguagacgaaaacgccaacgccaacagcgcagucaaaaacaacaauaaugaagaacccuccgacaaacacauaaaagaauaccuaaacaaaauccaaaacugaggacuagucccuguucccagagcccacuuuuuuuucuuuuuuugaaauaaaauagccugucuuucagaucuaaaaaaaaaaaaaaaaaaaaaaaaaaaaaaaaaaaaaaaaaaaaaaaaaaaaaaaaaaaaaaaaugcaucccccccccccccccccccccccccccccccaaaggcucuuuucagagccaccagaauu

SEQ ID NO: 880 - RNA, 1470 nt, Artificial Sequence
  mRNA Design a-1 (A64-N5-C30-hSL-N5) comprising derived and/or modified sequence from Pf(3D7)__XP_001351122.1__HsALB_Pf-CSP(19-397) (opt11)
aggagagucccgcagucggcguccagcggcucugcuuguucgugugugugucguugcaggccuuauucaagcuuaccaugaaaugggucaccuucauaucccuccuauuccucuucucaucagccuacucccucuuccaggaauaccaaugcuacggaucguccucaaacacuagaguacucaaugaauuaaacuacgacaacgccggcaccaaccucuacaacgaacucgaaaugaacuacuacggaaaacaagaaaacugguacucacucaaaaaaaacucucgaucccucggcgaaaacgacgacggcaacaacgaagacaacgagaaacuacgcaaaccaaaacacaaaaaauuaaaacaacccgccgacggcaaccccgaccccaacgccaaccccaacguagaccccaacgcgaaccccaacgucgacccaaacgccaaccccaacguggaccccaacgccaacccaaacgccaaccccaacgccaacccaaacgcaaaccccaacgccaacccaaacgccaaccccaacgcaaacccaaacgcgaacccaaacgcaaacccaaacgccaacccaaacgcaaacccaaacgcgaacccaaacgccaacccaaacgccaaccccaacgcaaacccaaacgccaacccaaacgccaacccaaacguagacccaaacgcgaaccccaacgcuaacccaaacgcaaacccaaacgccaacccaaacgccaacccuaacgcaaacccaaacgccaaccccaacgccaaccccaacgccaaccccaacgcaaacccaaacgccaacccaaacgccaaccccaacgccaacccaaacgcaaacccaaacgcaaacccaaacgcaaaccccaacgccaacccaaacgccaacccaaacaaaaauaaccaaggcaaugggcaaggccacaacaugccaaacgaccccaaccgcaaugucgacgaaaacgccaacgccaacucugcaguaaaaaacaauaacaacgaagaacccucagacaaacacaucaaagaauaccucaacaagauccaaaauucccucuccacagaauggucccccugcagcguaaccugcggcaacggcauccaaguccgcaucaaacccggcuccgccaacaaaccgaaagacgaacuagacuacgccaacgacauagaaaaaaaaaucugcaaaauggaaaaaugcagcuccgucuucaacgucgucaacagcuccaucggccucaucaugguccucuccuuccuguuccucaacuaaggacuagucccuguucccagagcccacuuuuuuuucuuuuuuugaaauaaaauagccugucuuucagaucuaaaaaaaaaaaaaaaaaaaaaaaaaaaaaaaaaaaaaaaaaaaaaaaaaaaaaaaaaaaaaaaaugcaucccccccccccccccccccccccccccccccaaaggcucuuuucagagccaccagaauu

SEQ ID NO: 881 - RNA, 1488 nt, Artificial Sequence
  mRNA Design a-1 (A64-N5-C30-hSL-N5) comprising derived and/or modified sequence from Pf(3D7)__XP_001351122.1__HsIns-iso1_Pf-CSP(19-397) (opt11)
aggagagucccgcagucggcguccagcggcucugcuuguucgugugugugucguugcaggccuuauucaagcuuaccauggcacucuggaugagacuccucccccuccucgcacuccucgcccuauggggcccagacccagcggcagcccucuuccaagaauaccaaugcuacggcucauccuccaacacccgaguccucaaugaacuaaacuacgacaacgccggcaccaaccuauacaacgaacuagaaaugaacuacuacggcaaacaagaaaacugguacucccucaaaaaaaauucacgcucccuaggugagaacgacgacggaaacaacgaagacaacgaaaaacuccgaaaacccaaacacaaaaaacuaaaacaaccagcagacggcaaccccgaccccaacgcaaaccccaacguagacccaaacgcgaaccccaacgucgauccaaacgccaacccaaacguugaccccaacgcgaaccccaacgcaaacccaaacgcaaacccuaacgcgaaccccaacgcaaaccccaacgccaaccccaacgccaaccccaacgccaacccaaacgcaaaccccaacgccaaccccaacgcaaacccaaacgcaaacccgaacgcaaaccccaacgccaacccaaacgcaaacccaaacgccaacccaaacgcaaaccccaacguagacccaaacgccaaucccaacgcgaaccccaacgcaaacccaaacgcgaacccaaacgccaacccaaacgcaaacccgaacgccaacccaaacgccaaccccaacgcaaaccccaacgcaaacccaaacgccaacccaaacgcaaacccaaacgcaaaccccaacgccaaccccaacgcaaacccaaaugccaaccccaacgccaaccccaacgcaaacccaaacaaaaacaaccaaggaaacggccaaggccacaacaugccgaacgaccccaaccgaaacgucgacgaaaacgcaaacgccaacucagcggucaaaaacaacaacaacgaagaacccucagacaaacacaucaaagaauaccuaaacaagauccagaacucucucucaacagaauggucccccugcuccguaacaugcggcaacggcauccaaguacgaaucaaaccgggaucagccaauaaacccaaagacgaacucgacuacgccaacgacaucgaaaaaaaaauaugcaaaauggaaaaaugcagcucagucuucaacguagucaacagcuccauaggccucaucaugguacucuccuuccuguuccuaaacuaaggacuagucccuguucccagagcccacuuuuuuuucuuuuuuugaaauaaaauagccugucuuucagaucuaaaaaaaaaaaaaaaaaaaaaaaaaaaaaaaaaaaaaaaaaaaaaaaaaaaaaaaaaaaaaaaaugcaucccccccccccccccccccccccccccccccaaaggcucuuuucagagccaccagaauu

SEQ ID NO: 882 - RNA, 1467 nt, Artificial Sequence
  mRNA Design a-1 (A64-N5-C30-hSL-N5) comprising derived and/or modified sequence from Pf(3D7)__XP_001351122.1__HsSPARC_Pf-CSP(19-397) (opt11)
aggagagucccgcagucggcguccagcggcucugcuuguucgugugugugucguugcaggccuuauucaagcuuaccaugcgcgccuggauauucuuccuccuaugccuagcaggacgcgcccucgcacucuuccaagaauaccaaugcuacggcucauccucaaacacccgcguacuuaacgaacuaaacuacgacaacgccggaaccaaccuauacaacgaacucgaaaugaacuacuacgguaaacaagaaaacugguacucccucaaaaaaaacagccgaagccuaggagaaaacgacgacggaaacaacgaagacaacgaaaaacugcgcaaacccaaacacaaaaaacucaaacaacccgcagacgggaacccagacccaaacgcaaacccaaacguggacccaaacgccaacccuaacguagaccccaacgcaaaccccaacgucgacccuaaugcaaacccaaacgccaaccccaacgcgaacccaaacgcaaaccccaacgcuaacccgaacgccaaccccaacgccaacccgaacgcaaacccaaacgcaaacccaaacgcgaacccaaacgcaaacccaaacgccaaccccaacgcgaacccaaacgccaauccaaacgccaacccaaacgcaaacccaaacgccaaccccaacguagacccaaacgccaacccaaacgcgaacccaaacgcaaaccccaacgcaaacccaaacgcaaacccaaacgccaacccuaacgcaaacccaaacgccaaccccaacgccaacccaaacgcaaacccaaacgccaacccaaacgccaaccccaacgcaaacccgaacgcaaaccccaacgcaaacccaaacgcaaacccaaacgcgaacccgaacgccaacccaaauaagaacaaccaaggaaacggacaaggccacaacaugccaaacgaccccaaccgcaacgucgacgaaaacgcaaaugccaacuccgcagucaaaaacaacaauaacgaagaacccucggacaaacacaucaaagaauaccucaacaagauccaaaacucacucuccaccgaauggucacccugcagcguaacuugcggcaacggcauccaaguccgcauaaaaccaggcuccgcaaacaaacccaaagacgaacucgacuaugccaacgacaucgaaaaaaaaauaugcaaaauggaaaaaugcagcucagucuucaacguagucaacagcucuaucggacuaauaaugguacucuccuuccuauucuuaaacuaaggacuagucccuguucccagagcccacuuuuuuuucuuuuuuugaaauaaaauagccugucuuucagaucuaaaaaaaaaaaaaaaaaaaaaaaaaaaaaaaaaaaaaaaaaaaaaaaaaaaaaaaaaaaaaaaaugcaucccccccccccccccccccccccccccccccaaaggcucuuuucagagccaccagaauu

SEQ ID NO: 883 - RNA, 1470 nt, Artificial Sequence
  mRNA Design a-1 (A64-N5-C30-hSL-N5) comprising derived and/or modified sequence from Pf(3D7)__XP_001351122.1__IgE_Pf-CSP(19-397) (opt11)
aggagagucccgcagucggcguccagcggcucugcuuguucgugugugugucguugcaggccuuauucaagcuuaccauggacuggacauggauccucuuccucgucgccgcggccacacgcguacacucacucuuccaagaauaucaaugcuacggcucaagcucgaacacgcgcguacucaacgaacuaaacuacgacaacgccggcaccaaccuauacaacgaacucgaaaugaacuacuacggcaaacaagaaaacugguacucacuuaagaaaaauucacgaucccucggagaaaacgacgaugggaacaacgaagacaacgaaaaacuacgcaaacccaaacacaagaaacuuaaacaacccgcagacggcaacccagacccaaacgcaaaccccaacguagaccccaacgcaaacccaaacguagacccaaacgccaacccaaacguagacccaaacgcgaacccaaacgccaacccaaacgccaaccccaacgcaaacccaaacgcaaauccaaacgcaaacccaaaugcaaacccgaacgccaauccaaacgcaaaccccaacgcaaacccaaacgcaaaccccaaugccaacccaaacgcaaaccccaacgcaaaccccaacgcaaaccccaacgcaaacccaaacgcgaacccaaacguagaccccaacgccaaccccaacgccaacccaaacgcaaacccaaacgccaacccaaacgccaaccccaacgcaaaccccaacgcaaacccgaacgcaaacccaaacgcaaacccaaacgcaaacccgaacgcaaacccuaacgcgaaccccaacgccaaccccaacgcaaacccaaacgcaaacccaaacgccaacccaaacgcaaacccaaacgcaaacccaaacaaaaacaaccaaggaaacgggcaaggacauaacaugccgaacgaccccaaccgcaacguagacgaaaacgccaacgccaacagcgcagucaaaaacaacaacaacgaagaacccuccgacaaacacaucaaagaauaccuaaacaaaauccagaacucacuauccaccgaauggucccccugcagcgugaccugcggcaacggcauacaaguccgcauaaaaccaggcuccgccaacaaacccaaagacgaacuagacuacgccaacgacauagaaaagaaaauaugcaaaauggaaaaaugcagcucagucuucaauguagucaacuccuccaucggacucauaaugguccuaucauuccucuuccuaaacuaaggacuagucccuguucccagagcccacuuuuuuuucuuuuuuugaaauaaaauagccugucuuucagaucuaaaaaaaaaaaaaaaaaaaaaaaaaaaaaaaaaaaaaaaaaaaaaaaaaaaaaaaaaaaaaaaaugcaucccccccccccccccccccccccccccccccaaaggcucuuuucagagccaccagaauu

SEQ ID NO: 884 - RNA, 1635 nt, Artificial Sequence
  mRNA Design a-1 (A64-N5-C30-hSL-N5) comprising derived and/or modified sequence from Pf(3D7)__XP_001351122.1__Pf-CSP_L(G4SG4)_TM domain HA (opt11)
aggagagucccgcagucggcguccagcggcucugcuuguucgugugugugucguugcaggccuuauucaagcuuaccaugaugcgcaaacucgccauccucagcgucagcucguuccucuucgucgaagcacuauuccaagaauaccaguguuacggcucauccucaaacacacgcgugcucaacgaacuaaacuacgacaacgccggcaccaaccucuacaacgaacuagaaaugaacuauuacggcaagcaagaaaacugguacucacucaaaaaaaacagccgaagccuaggcgagaacgacgacgggaacaacgaagacaacgaaaaacuacgcaaacccaagcacaaaaaacugaaacaaccagccgacggaaauccagaccccaacgcaaacccgaacguagaccccaacgcgaaccccaacguggacccgaacgcaaacccgaacguagacccaaacgcaaacccaaacgcgaacccaaacgcaaacccaaacgcuaacccaaacgcaaaccccaacgccaaccccaacgcgaacccaaacgcaaacccaaacgcaaacccaaacgcaaacccgaacgcaaacccaaacgccaacccaaacgcgaacccaaacgccaacccaaacgcaaacccaaacgcaaacccaaacgcaaacccaaacguagacccgaacgccaacccgaaugcaaacccaaacgcaaacccgaacgcaaacccaaacgcgaacccgaacgccaacccaaacgcaaacccgaacgcaaaccccaacgccaacccaaacgcaaaccccaacgcaaaccccaacgcaaacccgaacgcaaacccaaacgcaaacccaaacgccaaccccaacgccaaccccaacgcaaacccgaacgccaacccaaacaaaaacaaccaaggcaacgggcaaggacacaacaugccaaacgaccccaaccgaaacgucgacgaaaacgccaacgccaacuccgcagucaaaaacaacaacaacgaagaacccucagacaaacacauaaaagaauaccucaacaaaauccaaaacucacucucaaccgaguggucacccugcagugugaccuguggcaacggaauacaaguacgcauaaaacccggaucagccaacaaaccgaaagacgaacuagacuacgccaacgacauagaaaaaaaaauaugcaaaauggagaaaugcagcucugucuucaacgucgucaacagcucaaucggacucauaaugguccucuccuuccuauuccucaacggcggagggggcucaggcggcggaggaaaauuagaauccaccagaaucuaucagauucucgccauauacagcacagucgcaagcucgcuuguccuugucguaucacuaggcgcaaucucauucuggaugugcuccaacggaagccugcaaugccgcauuugcauauaaggacuagucccuguucccagagcccacuuuuuuuucuuuuuuugaaauaaaauagccugucuuucagaucuaaaaaaaaaaaaaaaaaaaaaaaaaaaaaaaaaaaaaaaaaaaaaaaaaaaaaaaaaaaaaaaaugcaucccccccccccccccccccccccccccccccaaaggcucuuuucagagccaccagaauu

SEQ ID NO: 885 - RNA, 1509 nt, Artificial Sequence
  mRNA Design a-1 (A64-N5-C30-hSL-N5) comprising derived and/or modified sequence from Pf(3D7)__XP_001351122.1__Pf-CSP(199-377)_L(PVTN)_HBsAg (opt11)
aggagagucccgcagucggcguccagcggcucugcuuguucgugugugugucguugcaggccuuauucaagcuuaccauggaccccaacgccaaccccaacgccaaccccaacgccaaucccaacgcuaaccccaacgccaaccccaacgcaaaccccaacgccaacccaaacgccaaccccaacgcaaaccccaacgccaaucccaaugccaaccccaacgccaaccccaacgcgaaccccaacgccaaccccaacgcaaacccaaacgccaaccccaacgccaaccccaacgccaaccccaacaaaaacaaccaaggcaacggccaaggccacaacaugcccaacgaccccaaccgcaacguagacgagaacgccaacgccaacagcgcugucaaaaacaacaacaacgaggaacccuccgacaaacacaucaaagaauaccuuaacaaaauccaaaacucucucuccaccgaguggucccccugcucagucacaugcggcaacggcauacaaguucguaucaaacccggcucagcaaacaaacccaaagacgaacucgacuacgcaaacgacauagaaaagaaaaucugcaaaauggaaaaauguucauccguccccgucaccaacauggaaaacaucacuuccggauuccucgguccccuacucguacuccaagccggcuucuuccuccucacccgcauccucaccaucccccaaucacuugacuccugguggaccucccucaacuuccucggcggcucccccgucugccuaggccaaaacagccaaucccccacuagcaaccacucccccacauccugcccacccaucugccccggauaucgauggaugugccuucgccgauucauaaucuuccucuucauccuccuacucugccucaucuuccuccucguccuucuagauuaccaaggcaugcuccccgucugcccccuuauccccggcuccaccaccacaaacaccggccccugcaaaaccugcacaacccccgcccaaggcaauagcauguuccccuccugcugcugcacuaaaccaacagacggcaacuguaccugcaucccaaucccaucaucaugggccuucgccaaauaccucugggaaugggcaucuguacgauucuccuggcucucccuucucguacccuucguccagugguucgucggccucucccccaccguauggcuauccgccaucuggaugaugugguacuggggccccucccuauacuccaucgucuccccauucauaccacuccuacccaucuucuucugccucugggucuacaucugaggacuagucccuguucccagagcccacuuuuuuuucuuuuuuugaaauaaaauagccugucuuucagaucuaaaaaaaaaaaaaaaaaaaaaaaaaaaaaaaaaaaaaaaaaaaaaaaaaaaaaaaaaaaaaaaaugcaucccccccccccccccccccccccccccccccaaaggcucuuuucagagccaccagaauu

SEQ ID NO: 886 - RNA, 1551 nt, Artificial Sequence
  mRNA Design a-1 (A64-N5-C30-hSL-N5) comprising derived and/or modified sequence from Pf(3D7)__XP_001351122.1__Pf-CSP(199-387)_L(PVTN)_HBsAg (opt11)
aggagagucccgcagucggcguccagcggcucugcuuguucgugugugugucguugcaggccuuauucaagcuuaccaugauggcccccgaccccaacgcaaauccaaacgcaaaccccaacgccaacccuaacgcaaaccccaacgccaacccaaacgccaaucccaacgccaacccuaacgccaaccccaacgcaaaccccaacgccaaccccaacgccaacccuaacgcaaaccccaacgccaacccaaacgcaaaccccaacgccaaccccaacgccaaccccaacgcaaacccaaacgcaaaccccaacaaaaacaaccaaggaaacggacaaggccacaacaugccuaacgaccccaaucgcaacgucgacgaaaacgcaaacgccaacuccgccgucaaaaacaacaacaacgaagaacccucugacaaacacaucaaagaauaccucaacaagauccaaaacucccuauccaccgaauggucccccugcuccgucacuugcgguaauggcauccaaguccgcauaaaaccaggauccgcaaacaaacccaaagacgaacuagacuacgccaacgacauagaaaagaaaaucugcaaaauggaaaaaugcuccucagucuucaaugucguaaacuccuccauuggccuaggccccgucaccaacauggaaaacauuaccuccggauuccucgguccucuccucguccuccaagccggauucuuucuccucacacgaauccucacuaucccucaaucccuggacucaugguggaccucccucaacuuccugggcggcucccccgucugccucggccaaaacagccaauccccaaccuccaaucacucccccacaagcugcccucccauaugccccggcuaccgcuggaugugccuccgucgcuucaucauauuccucuucauacuucuccucugccucaucuuccuccuuguccugcuagacuaccaaggcaugcuccccgucugcccacucauccccgguuccaccacaacaaacaccggccccugcaaaacaugcaccacacccgcccaagguaacuccauguuccccuccugcugcugcaccaaaccaaccgacggcaacugcacuugcauucccauccccucauccugggccuucgccaaauaccucugggaaugggcauccguccguuucucauggcuaucucuccuaguaccauucguacaaugguucguuggccucucccccaccguauggcucuccgccauauggaugaugugguacuggggcccuucacuuuacuccaucgucucacccuucaucccacuccuacccaucuucuucugccuuuggguauacaucuaaggacuagucccuguucccagagcccacuuuuuuuucuuuuuuugaaauaaaauagccugucuuucagaucuaaaaaaaaaaaaaaaaaaaaaaaaaaaaaaaaaaaaaaaaaaaaaaaaaaaaaaaaaaaaaaaaugcaucccccccccccccccccccccccccccccccaaaggcucuuuucagagccaccagaauu

SEQ ID NO: 887 - RNA, 735 nt, Artificial Sequence
  mRNA Design a-1 (A64-N5-C30-hSL-N5) comprising derived and/or modified sequence from Pf(3D7)__XP_001351122.1__HsALB_Pf-CSP(19-152) (opt11)
aggagagucccgcagucggcguccagcggcucugcuuguucgugugugugucguugcaggccuuauucaagcuuaccaugaaaugggucaccuucaucucccuccucuuccucuucuccagcgcauacucccucuuccaagaauaccaaugcuacggcuccuccuccaacacccgcguccucaacgaacucaacuacgacaacgccggcaccaaccucuacaacgaacucgaaaugaacuacuacggcaaacaagaaaacugguacucccucaaaaaaaacucccgcucccuaggcgaaaacgacgacggaaacaacgaagacaacgaaaaacuccgcaaacccaaacacaaaaaacucaaacaacccgccgacggaaaccccgaccccaacgccaacccaaacgucgaccccaacgccaaccccaacgucgaccccaacgccaaccccaacgucgaccccaacgccaaccccaacgcaaacccaaacgcaaacccaaacgccaaccccaacgccaaccccaacgccaaccccuaaggacuagucccuguucccagagcccacuuuuuuuucuuuuuuugaaauaaaauagccugucuuucagaucuaaaaaaaaaaaaaaaaaaaaaaaaaaaaaaaaaaaaaaaaaaaaaaaaaaaaaaaaaaaaaaaaugcaucccccccccccccccccccccccccccccccaaaggcucuuuucagagccaccagaauu

SEQ ID NO: 888 - RNA, 855 nt, Artificial Sequence
  mRNA Design a-1 (A64-N5-C30-hSL-N5) comprising derived and/or modified sequence from Pf(3D7)__XP_001351122.1__HsALB_Pf-CSP(19-192) (opt11)
aggagagucccgcagucggcguccagcggcucugcuuguucgugugugugucguugcaggccuuauucaagcuuaccaugaaauggguaaccuucauaucccuccucuuccuauucucgagcgccuacucccucuuccaagaauaccaaugcuacggcucauccuccaacacccgcguccucaacgaacucaacuacgacaacgccggcaccaaccucuacaacgaacuagagaugaacuacuacggcaaacaagaaaacugguacucacucaaaaaaaacucccgaucccuaggagaaaacgacgacggcaacaacgaagacaacgaaaaacuacgaaaacccaaacacaaaaaacucaaacaacccgccgacggcaaccccgaccccaacgccaaccccaacgucgaccccaacgccaacccaaacguagaccccaacgccaaccccaacgucgacccaaacgccaaccccaacgccaaccccaacgccaacccaaacgcaaacccaaacgcaaacccaaacgccaacccaaacgccaaccccaacgccaaccccaacgcaaaccccaacgcaaaccccaacgccaacccaaacgcaaaccccaacgccaacccaaacgccaacccaaacgccaaccccaacgcaaaccccuaaggacuagucccuguucccagagcccacuuuuuuuucuuuuuuugaaauaaaauagccugucuuucagaucuaaaaaaaaaaaaaaaaaaaaaaaaaaaaaaaaaaaaaaaaaaaaaaaaaaaaaaaaaaaaaaaaugcaucccccccccccccccccccccccccccccccaaaggcucuuuucagagccaccagaauu

SEQ ID NO: 889 - RNA, 1095 nt, Artificial Sequence
  mRNA Design a-1 (A64-N5-C30-hSL-N5) comprising derived and/or modified sequence from Pf(3D7)__XP_001351122.1__HsALB_Pf-CSP(19-272) (opt11)
aggagagucccgcagucggcguccagcggcucugcuuguucgugugugugucguugcaggccuuauucaagcuuaccaugaaauggguaaccuucaucucccuccucuuccuauucucaucagcauacucacucuuccaagaauaccaaugcuacggcucgagcucaaacacacgcguacucaacgaacugaacuacgacaacgccggaaccaaccucuacaaugaacucgaaaugaacuacuacggcaaacaagagaacugguacucacucaaaaaaaacagcagaagccucggagaaaacgacgacggaaacaacgaagacaacgaaaaacuccgcaaacccaagcacaaaaaacuaaaacaacccgcagacggaaaccccgaccccaacgcaaacccgaacgucgacccaaacgccaacccaaacguagaccccaacgcgaacccaaacguagacccaaacgccaacccaaacgcaaaccccaacgccaaccccaacgcaaacccaaacgccaacccaaacgcaaaccccaaugcaaaccccaacgcaaacccaaacgccaaccccaacgcaaacccaaacgcaaacccaaacgcaaacccaaacgcaaacccaaacgcgaacccaaacgcaaacccaaacgcaaacccgaacgcaaacccaaacguagacccaaacgcaaaccccaacgccaacccaaacgcaaacccaaacgcaaacccaaacgcaaacccaaacgcgaacccaaacgccaacccaaacgcaaacccaaacgcaaacccaaacgcaaacccaaacgcaaacccaaacgcaaacccaaacgcaaacccgaacgcgaacccaaacgcaaacccaaacgcgaacccgaacgcaaaccccaacgcaaacccauaaggacuagucccuguucccagagcccacuuuuuuuucuuuuuuugaaauaaaauagccugucuuucagaucuaaaaaaaaaaaaaaaaaaaaaaaaaaaaaaaaaaaaaaaaaaaaaaaaaaaaaaaaaaaaaaaaugcaucccccccccccccccccccccccccccccccaaaggcucuuuucagagccaccagaauu

SEQ ID NO: 890 - RNA, 1257 nt, Artificial Sequence
  mRNA Design a-1 (A64-N5-C30-hSL-N5) comprising derived and/or modified sequence from Pf(3D7)__XP_001351122.1__HsALB_Pf-CSP(19-272)_L(AAY)_Pf-CSP(310-3 27)_L(AAY)_Pf-CSP(346-375) (opt11)
aggagagucccgcagucggcguccagcggcucugcuuguucgugugugugucguugcaggccuuauucaagcuuaccaugaaaugggucaccuucaucucacuccuauuccuauucuccuccgcauacucacucuuccaagaauaccagugcuacggaucaagcuccaacacacgcguacuaaacgaacugaacuacgacaacgccggaaccaaccucuacaacgaacucgaaaugaauuacuacggcaaacaagagaacugguacucacucaaaaaaaacagcagaucccuaggcgaaaacgacgacggaaacaacgaagacaacgaaaaacuacgcaaacccaaacacaaaaaacuaaaacaacccgcagacggaaacccagauccaaacgcaaacccaaacguagacccaaacgccaacccaaacguagacccaaacgcaaacccaaacguagaccccaacgcaaacccaaacgcaaacccgaacgccaacccaaacgcaaaccccaacgccaacccaaacgcaaacccaaacgcaaacccaaacgcaaacccaaacgccaaccccaacgcgaacccaaacgcaaacccuaacgccaacccaaacgcaaacccaaacgcaaacccgaacgcaaacccaaacgcaaacccaaacgcaaacccgaacguagacccaaacgcaaacccaaacgcaaacccaaacgcaaacccaaacgccaacccaaacgccaacccaaacgcaaaccccaacgcaaaccccaacgcgaacccaaacgccaaccccaacgcaaacccaaacgccaacccaaacgccaacccgaacgcaaacccaaacgccaacccaaacgccaacccgaacgcaaacccaaacgccaacccaaacgccaacccagccgcguacgaacccucagauaaacacauaaaagaauaccucaacaaaauccaaaacucacuagcagccuacaucaaaccaggauccgccaacaaacccaaggacgaacucgacuacgcaaacgacaucgaaaaaaaaaucugcaaaauggaaaaaugcucaugaggacuagucccuguucccagagcccacuuuuuuuucuuuuuuugaaauaaaauagccugucuuucagaucuaaaaaaaaaaaaaaaaaaaaaaaaaaaaaaaaaaaaaaaaaaaaaaaaaaaaaaaaaaaaaaaaugcaucccccccccccccccccccccccccccccccaaaggcucuuuucagagccaccagaauu

SEQ ID NO: 891 - RNA, 1218 nt, Artificial Sequence
  mRNA Design a-1 (A64-N5-C30-hSL-N5) comprising derived and/or modified sequence from Pf(3D7)__XP_001351122.1__HsALB_Pf-CSP(19-272)_L(AAY)_Pf-CSP(346-3 65)_L(AAY)_P2 (opt11)
aggagagucccgcagucggcguccagcggcucugcuuguucgugugugugucguugcaggccuuauucaagcuuaccaugaaaugggucaccuucaucucacuccuauuccuauucucgagcgcauacucacucuuccaagaauaccaaugcuauggcuccagcucaaacacacgcguccuaaacgaacucaacuacgacaacgccggaacaaaccucuacaacgaacucgaaaugaacuacuacggcaaacaagaaaacugguacucgcucaaaaaaaacucccgaagucuaggcgaaaacgacgacggaaacaacgaagacaacgaaaaacuacgcaaacccaaacacaaaaaacuaaaacaacccgcagacggaaaccccgacccaaacgcaaaccccaacguagacccaaacgcaaaccccaacguagacccaaacgcaaacccgaacguagacccaaacgccaacccaaacgccaaccccaacgcaaacccaaacgccaaccccaacgcaaacccaaacgcaaacccaaacgcaaacccaaacgcaaacccaaacgccaaccccaacgccaacccaaacgccaaccccaacgcgaaccccaacgcgaacccaaacgccaacccaaacgcaaaccccaacgcaaacccaaacgcaaacccaaacgucgacccaaacgcaaacccaaacgcaaacccgaacgcaaacccaaacgcaaaccccaacgccaacccaaacgcgaacccaaacgccaacccaaacgccaacccaaacgcaaacccaaacgccaacccaaacgcaaacccaaacgcaaaccccaacgcaaaccccaacgcaaacccaaacgccaaccccaacgcaaaccccaacgcaaacccaaacgccaacccagccgcauacauaaaacccggcuccgccaacaaaccaaaagacgaacuagacuacgccaacgacauagaagcagccuaccaauacaucaaagccaacagcaaauucauaggaauaaccgagcuauaaggacuagucccuguucccagagcccacuuuuuuuucuuuuuuugaaauaaaauagccugucuuucagaucuaaaaaaaaaaaaaaaaaaaaaaaaaaaaaaaaaaaaaaaaaaaaaaaaaaaaaaaaaaaaaaaaugcaucccccccccccccccccccccccccccccccaaaggcucuuuucagagccaccagaauu

SEQ ID NO: 892 - RNA, 1212 nt, Artificial Sequence
  mRNA Design a-1 (A64-N5-C30-hSL-N5) comprising derived and/or modified sequence from Pf(3D7)__XP_001351122.1__HsALB_Pf-CSP(19-272)_L(AAY)_Pf-CSP(346-3 65)_L(AAY)_PADRE (opt11)
aggagagucccgcagucggcguccagcggcucugcuuguucgugugugugucguugcaggccuuauucaagcuuaccaugaaauggguaaccuucaucucgcuacuguuccucuucucauccgcauacucccucuuccaagaauaccaaugcuacggcucauccucaaacacacgaguacuaaacgaacucaacuacgacaacgccggaaccaaccuauacaacgaacucgaaaugaacuacuacggcaaacaagaaaacugguacucacucaaaaaaaacucccgaucccucggcgaaaacgacgacggaaacaacgaagacaacgaaaaacugagaaaacccaaacacaaaaaacuaaaacaaccagccgacggcaacccagaccccaacgcaaaccccaacguagacccaaacgccaaccccaacguagacccaaacgcaaacccaaacguagaccccaacgccaacccaaacgccaacccaaacgccaaccccaacgcaaacccaaacgcaaacccaaacgcaaacccaaacgccaacccaaacgcaaacccaaacgccaacccgaacgcaaaccccaacgcaaacccaaacgcaaaccccaacgccaacccaaacgcaaacccaaacgcaaaccccaacgcaaacccaaaugcgaacccaaacguggacccgaacgcaaaccccaacgccaacccaaacgcaaaccccaacgccaaccccaacgccaaccccaacgcaaaccccaacgccaaccccaacgccaacccaaacgccaacccaaacgcgaacccaaacgcaaaccccaacgcaaacccaaacgcaaacccaaacgcaaacccaaacgcaaaccccaacgcaaacccaaacgcaaacccaaacgcaaaccccgcagccuacauuaaaccaggcuccgccaacaaacccaaagacgaacucgacuacgccaacgacauagaagcagccuacgccaaauucguagccgcauggacacucaaagccgcagccuaaggacuagucccuguucccagagcccacuuuuuuuucuuuuuuugaaauaaaauagccugucuuucagaucuaaaaaaaaaaaaaaaaaaaaaaaaaaaaaaaaaaaaaaaaaaaaaaaaaaaaaaaaaaaaaaaaugcaucccccccccccccccccccccccccccccccaaaggcucuuuucagagccaccagaauu

SEQ ID NO: 893 - RNA, 1269 nt, Artificial Sequence
  mRNA Design a-1 (A64-N5-C30-hSL-N5) comprising derived and/or modified sequence from Pf(3D7)__XP_001351122.1__HsALB_Pf-CSP(19-272)_L(G4S)_Pf-CSP(310-3 27)_L(G4S)_Pf-CSP(346-375) (opt11)
aggagagucccgcagucggcguccagcggcucugcuuguucgugugugugucguugcaggccuuauucaagcuuaccaugaaaugggucaccuucaucucccuacuauuccucuucucaucagccuacucacucuuccaagaguaccaaugcuacggcucaagcucaaacacacgcguacucaacgaacuaaacuacgacaacgcaggcaccaaccucuacaacgaacucgagaugaacuacuacggcaaacaagaaaacugguacucacucaaaaaaaacucccgcagccucggcgaaaacgacgacggcaacaacgaagauaacgagaaacuacgcaaacccaaacacaaaaaacuaaaacaacccgccgacggaaacccagacccaaacgccaacccaaacguagacccaaacgcaaacccaaacguagacccaaacgccaaccccaacguagacccaaacgccaacccaaacgccaacccaaacgcaaacccaaacgcaaacccaaacgcgaacccaaacgcaaaccccaacgccaacccaaacgcaaacccaaacgccaaccccaacgcaaacccaaacgcaaaccccaacgcaaacccaaacgccaaccccaacgcaaaccccaacgcaaacccaaacgcaaacccaaacgcaaacccaaacgucgacccaaacgcaaaccccaacgcaaacccaaacgcaaacccaaacgccaacccaaacgcaaacccaaacgccaacccaaacgcaaaccccaacgcaaaccccaacgccaacccaaacgcaaaccccaacgcgaacccaaacgcaaacccaaacgcaaacccaaacgcaaaccccaacgcaaaccccaacgcaaacccaaacgcaaacccaaacgcaaacccaggcggcggcggaagcgaacccucggacaaacacauaaaagaauaccucaacaaaauccaaaacucccucggaggcggaggcuccaucaaacccggaagcgcaaacaaacccaaagacgaacucgacuacgcaaacgacaucgagaaaaaaauaugcaaaauggaaaaaugcucauaaggacuagucccuguucccagagcccacuuuuuuuucuuuuuuugaaauaaaauagccugucuuucagaucuaaaaaaaaaaaaaaaaaaaaaaaaaaaaaaaaaaaaaaaaaaaaaaaaaaaaaaaaaaaaaaaaugcaucccccccccccccccccccccccccccccccaaaggcucuuuucagagccaccagaauu

SEQ ID NO: 894 - RNA, 1254 nt, Artificial Sequence
  mRNA Design a-1 (A64-N5-C30-hSL-N5) comprising derived and/or modified sequence from Pf(3D7)__XP_001351122.1__HsALB_Pf-CSP(19-272)_L(G4S)_Pf-CSP(310-3 27)_Pf-CSP(346-375) (opt11)
aggagagucccgcagucggcguccagcggcucugcuuguucgugugugugucguugcaggccuuauucaagcuuaccaugaaauggguaaccuucaucucacuccuauuccucuucuccuccgcauacucgcucuuccaagaauaccaaugcuacggcucaagcucaaacacccgcguccucaacgaacucaacuacgacaacgccgguaccaaccuauacaacgaacucgaaaugaacuacuacggcaaacaagaaaacugguacucacucaaaaaaaacuccaggucccuaggagaaaacgacgauggcaacaacgaagacaacgaaaaacuccgaaagccaaaacacaaaaaacuaaaacagcccgcagacggcaacccagacccaaacgcaaacccaaacguagacccaaacgcgaaccccaacguagacccaaacgcaaacccaaacguagacccaaacgcaaaccccaacgcaaacccaaacgcaaaccccaacgcaaaccccaacgcaaacccaaacgcaaacccaaacgcaaacccaaacgcaaacccaaacgcaaaccccaacgccaaccccaacgcaaacccaaacgcaaacccaaacgcaaacccaaacgcaaacccaaacgcaaaccccaacgccaacccaaacgcaaacccaaacguagacccaaacgcaaacccaaacgcaaacccaaacgcaaaccccaacgccaacccaaacgcaaacccaaacgcaaacccaaacgcaaacccaaacgcaaauccaaacgcuaacccaaacgcaaacccgaacgcaaaccccaaugcaaaccccaacgcaaacccaaacgccaacccaaacgcaaacccaaacgcgaacccaaacgcaaacccaaacgcaaacccaggcggaggcggauccgaacccuccgacaaacacauaaaagaauaccuaaacaaaauccaaaacucucucauaaaacccggaucagccaacaaaccaaaagacgaacuagacuacgccaaugacauagaaaaaaaaauaugcaagauggaaaaaugcagcuaaggacuagucccuguucccagagcccacuuuuuuuucuuuuuuugaaauaaaauagccugucuuucagaucuaaaaaaaaaaaaaaaaaaaaaaaaaaaaaaaaaaaaaaaaaaaaaaaaaaaaaaaaaaaaaaaaugcaucccccccccccccccccccccccccccccccaaaggcucuuuucagagccaccagaauu

SEQ ID NO: 895 - RNA, 1254 nt, Artificial Sequence
  mRNA Design a-1 (A64-N5-C30-hSL-N5) comprising derived and/or modified sequence from Pf(3D7)__XP_001351122.1__HsALB_Pf-CSP(19-325) (opt11)
aggagagucccgcagucggcguccagcggcucugcuuguucgugugugugucguugcaggccuuauucaagcuuaccaugaaauggguaaccuucaucucacuccuguuccuauucucauccgcauacucacucuuccaagaauaccaaugcuacggcucgucuucaaacacccgcguacucaacgaacucaacuacgacaacgccggaaccaaccucuacaacgaacucgaaaugaacuacuacggcaaacaagaaaacugguacucacucaaaaaaaacagccgaagccuaggcgaaaacgacgacggaaacaaugaagacaacgaaaaacuccgcaaacccaaacacaaaaaacucaaacaaccagcagacggaaaccccgacccgaacgcaaacccaaacguagacccaaacgcaaacccaaacguagacccaaacgcgaacccaaacguagaccccaacgcaaacccaaacgcaaacccaaacgcaaacccaaacgccaaccccaacgccaacccaaacgccaacccaaacgcaaacccgaacgcgaacccaaacgcaaaccccaacgcaaacccaaacgcaaacccaaacgcgaacccaaacgccaacccaaacgccaacccaaacgcaaacccaaacgccaacccaaacgcaaaccccaacguggaccccaacgcaaacccaaacgcaaacccaaacgccaaccccaacgcaaacccaaacgcaaacccuaacgcaaacccaaacgcaaaccccaacgcgaacccaaacgcaaacccaaacgcaaacccaaacgcaaaccccaacgcaaacccaaacgccaacccaaacgccaacccaaacgcgaauccaaacgcaaaccccaacgcaaacccaaacgcaaacccgaacaaaaacaaccaagggaacggacaaggacacaacaugccaaacgaccccaaccgcaacgucgacgaaaacgccaacgccaacuccgcaguaaaaaacaacaacaacgaagaacccuccgacaaacacauaaaagaauaccucaacaagauacaaaacuagggacuagucccuguucccagagcccacuuuuuuuucuuuuuuugaaauaaaauagccugucuuucagaucuaaaaaaaaaaaaaaaaaaaaaaaaaaaaaaaaaaaaaaaaaaaaaaaaaaaaaaaaaaaaaaaaugcaucccccccccccccccccccccccccccccccaaaggcucuuuucagagccaccagaauu

SEQ ID NO: 896 - RNA, 1431 nt, Artificial Sequence
  mRNA Design a-1 (A64-N5-C30-hSL-N5) comprising derived and/or modified sequence from Pf(3D7)__XP_001351122.1__HsALB_Pf-CSP(19-384) (opt11)
aggagagucccgcagucggcguccagcggcucugcuuguucgugugugugucguugcaggccuuauucaagcuuaccaugaaauggguaaccuucaucucacuacucuuccuauucucaagcgcguacucacucuuccaagaauaccaaugcuacggcucgagcucaaacacccgcguucucaacgaacuaaacuacgacaacgccggaaccaaccuauacaacgaacuugaaaugaacuacuacggcaaacaagaaaacugguacucgcucaaaaaaaacuccaggagccuaggcgaaaacgacgacggaaacaacgaagacaacgagaaacuaagaaaacccaaacacaaaaaacucaaacagcccgcggacggaaaccccgacccaaacgcaaaccccaacguagacccgaacgccaacccaaacguagacccaaacgcaaacccaaacguagaccccaacgcaaacccgaacgccaacccaaacgcaaacccaaaugcgaaccccaacgcgaacccaaacgcaaacccgaacgcaaaccccaacgccaacccaaacgcaaacccaaacgcaaaccccaacgcaaacccaaacgcgaacccaaacgcaaacccaaacgcgaacccgaacgcaaacccaaacgcaaacccgaacgcaaacccaaacguagacccaaacgccaacccaaacgcaaacccaaacgcaaaccccaacgcaaacccaaacgcaaacccgaacgcaaacccaaacgcaaacccaaacgcgaacccaaacgcaaaccccaacgcaaacccaaacgcaaacccuaacgcaaacccgaacgcaaacccaaacgccaacccaaacgcgaaccccaacgcaaacccaaacgccaacccaaacgccaacccgaacaaaaacaaccaaggaaacggacaaggacacaacaugccaaacgaccccaaccgaaacgucgacgaaaacgcaaacgccaacagugccgucaaaaacaacaacaaugaagaacccucagacaaacacauaaaagaauaccuaaacaaaauccagaacucgcucucaaccgaauggucacccugcagcgucaccugcggcaacggaauacaaguacgcaucaaaccaggcucggccaacaaaccaaaagacgaauuagacuacgcaaacgacaucgaaaaaaaaauaugcaaaauggaaaaaugcagcucagucuucaacguagucaauagcucauaaggacuagucccuguucccagagcccacuuuuuuuucuuuuuuugaaauaaaauagccugucuuucagaucuaaaaaaaaaaaaaaaaaaaaaaaaaaaaaaaaaaaaaaaaaaaaaaaaaaaaaaaaaaaaaaaaugcaucccccccccccccccccccccccccccccccaaaggcucuuuucagagccaccagaauu

SEQ ID NO: 897 - RNA, 1569 nt, Artificial Sequence
  mRNA Design a-1 (A64-N5-C30-hSL-N5) comprising derived and/or modified sequence from Pf(3D7)__XP_001351122.1__HsALB_Pf-CSP(19-384)_TM domain HA (opt11)
aggagagucccgcagucggcguccagcggcucugcuuguucgugugugugucguugcaggccuuauucaagcuuaccaugaagugggucaccuucaucucccuccuauuccucuucucuagcgcguacucacucuuccaagaauaccaaugcuacggauccagcucaaacacacgcguccucaaugaacugaacuacgauaacgccggaaccaaccucuacaacgaacucgaaaugaacuacuacggcaaacaagaaaacugguacucacuaaagaaaaauagcaggucccucggcgaaaacgacgacgggaacaacgaagauaacgaaaaacuacgcaaacccaagcacaagaaacuaaaacagccagcagacggaaacccagaccccaacgccaacccaaacgucgaccccaacgcaaacccaaacguagauccgaacgcaaacccaaacgucgauccaaacgcaaacccaaacgcaaacccaaacgcuaaccccaacgccaacccaaacgcaaacccgaacgcaaaccccaacgcgaacccgaacgcaaacccaaacgcaaacccaaacgccaacccaaacgcaaacccaaacgcaaacccaaacgccaacccaaacgcaaaccccaacgcgaaccccaacgcaaaccccaacgcaaacccaaacgucgacccaaacgcaaaccccaacgcaaaccccaacgcaaaccccaaugcaaacccaaacgcgaaccccaacgcaaacccaaacgcgaacccaaaugcaaaccccaacgccaaccccaacgccaacccgaacgcaaacccaaacgccaacccaaacgccaacccaaacgcaaaucccaacgccaacccaaacgcgaacccgaacgcaaacccaaacgcaaacccgaacaaaaacaaccaaggaaacggucaaggacacaacaugccaaacgaccccaaccgcaacgucgacgaaaacgccaaugccaacagcgccgucaaaaacaacaacaacgaagaacccucagacaaacacaucaaagaguaccuaaacaagauccaaaacucccucuccaccgaauggucccccugcagcguaaccugcggaaacggcauccaaguccgcauaaaaccaggcucagccaacaaaccaaaagaugaacucgacuacgcaaacgacauagaaaagaaaaucugcaaaauggaaaaaugcagcuccguauucaacgugguuaacuccucaaaacuagaauccacccgcaucuaccaaauacucgcaauauacagcacaguagccagcucacucguccuagucgucucccucggagccaucagcuucuggaugugcuccaacggaaguuuacaaugucgcauaugcauauaaggacuagucccuguucccagagcccacuuuuuuuucuuuuuuugaaauaaaauagccugucuuucagaucuaaaaaaaaaaaaaaaaaaaaaaaaaaaaaaaaaaaaaaaaaaaaaaaaaaaaaaaaaaaaaaaaugcaucccccccccccccccccccccccccccccccaaaggcucuuuucagagccaccagaauu

SEQ ID NO: 898 - RNA, 1281 nt, Artificial Sequence
  mRNA Design a-1 (A64-N5-C30-hSL-N5) comprising derived and/or modified sequence from Pf(3D7)__XP_001351122.1__HsALB_Pf-CSP(82-397) (opt11)
aggagagucccgcagucggcguccagcggcucugcuuguucgugugugugucguugcaggccuuauucaagcuuaccaugaaaugggucaccuucaucucacuccuguuccucuucucauccgccuacagcgacaacgaaaaacugcgcaaacccaaacacaagaaacucaaacaaccagccgacggcaaccccgaccccaacgccaacccaaacguagaccccaacgccaaccccaacguagacccaaacgccaacccaaacguggaccccaacgcaaacccaaacgccaacccaaacgccaauccaaacgccaacccaaacgcaaacccaaacgcaaaccccaacgccaacccuaacgccaaccccaacgcaaacccaaacgccaaccccaacgccaaccccaacgcaaaccccaacgcaaacccuaacgccaaccccaacgccaaccccaacgcaaacccaaacgccaaccccaacguagacccaaacgccaaccccaacgcaaaccccaacgccaacccaaacgcaaacccaaacgccaaccccaacgccaaccccaacgcaaacccaaacgcaaacccaaaugcaaaccccaacgccaaccccaacgccaaccccaacgcaaaccccaacgcaaaccccaacgcaaacccgaacgccaacccaaacgccaacccaaacgccaaccccaacgcaaaccccaacaaaaacaaccaaggcaacggacaaggacacaacaugcccaacgaccccaaccgcaacgucgacgaaaacgccaacgccaacuccgccgucaaaaacaacaacaacgaagaacccuccgacaaacacaucaaagaauaccucaacaaaauccaaaacucccucucaaccgaauggucacccugcuccguaaccugcggcaacggcauccaaguccgcaucaaacccggcucagccaacaaacccaaagacgaacucgacuacgccaaugacaucgaaaagaaaauaugcaaaauggaaaaaugcuccuccgucuucaacgucgucaacuccuccaucggccucaucaugguccucucguuccuauuccuaaacuaaggacuagucccuguucccagagcccacuuuuuuuucuuuuuuugaaauaaaauagccugucuuucagaucuaaaaaaaaaaaaaaaaaaaaaaaaaaaaaaaaaaaaaaaaaaaaaaaaaaaaaaaaaaaaaaaaugcaucccccccccccccccccccccccccccccccaaaggcucuuuucagagccaccagaauu

SEQ ID NO: 899 - RNA, 633 nt, Artificial Sequence
  mRNA Design a-1 (A64-N5-C30-hSL-N5) comprising derived and/or modified sequence from Pf(3D7)__XP_001351122.1__HsALB_Pf-CSP(93-192) (opt11)
aggagagucccgcagucggcguccagcggcucugcuuguucgugugugugucguugcaggccuuauucaagcuuaccaugaaauggguaaccuucaucucacuccuauuccuauucucaagcgcauacucaaaacuaaaacaacccgcagacggaaacccagacccaaacgcaaacccaaacguagacccaaacgcaaacccaaacguagacccaaacgcaaacccaaacguagacccaaacgcaaacccaaacgcaaacccaaacgcaaacccaaacgcaaacccaaacgcaaaccccaacgcaaacccaaacgcaaacccaaacgcaaacccaaacgcaaacccaaacgcaaacccaaacgcaaacccaaacgcaaacccaaacgcaaacccaaacgcaaacccaaacgccaacccaaacgcaaacccauaaggacuagucccuguucccagagcccacuuuuuuuucuuuuuuugaaauaaaauagccugucuuucagaucuaaaaaaaaaaaaaaaaaaaaaaaaaaaaaaaaaaaaaaaaaaaaaaaaaaaaaaaaaaaaaaaaugcaucccccccccccccccccccccccccccccccaaaggcucuuuucagagccaccagaauu

SEQ ID NO: 900 - RNA, 873 nt, Artificial Sequence
  mRNA Design a-1 (A64-N5-C30-hSL-N5) comprising derived and/or modified sequence from Pf(3D7)__XP_001351122.1__HsALB_Pf-CSP(93-272) (opt11)
aggagagucccgcagucggcguccagcggcucugcuuguucgugugugugucguugcaggccuuauucaagcuuaccaugaaaugggucaccuucaucucacuccuauuccuauucucauccgcauacucaaaacuaaaacaacccgccgacggaaacccagacccaaacgcaaacccaaacguagacccaaacgcaaacccaaacguagacccaaacgcaaacccaaacguagacccaaacgcaaacccaaacgccaacccaaacgcaaauccaaacgcaaacccaaacgcaaacccaaacgcaaacccaaacgcaaacccaaacgccaacccaaacgccaacccaaacgcaaacccaaacgcaaacccaaacgcaaacccaaacgcaaacccaaacgcaaacccaaacgccaaccccaacgcaaacccaaacgcaaaccccaacguagacccaaacgcaaacccaaacgccaaccccaacgcaaaccccaacgccaaccccaacgccaacccaaacgccaacccaaacgcaaacccaaacgcaaacccaaacgcaaacccaaacgcaaacccaaacgcaaacccaaacgcaaacccaaacgcaaacccaaacgcaaacccaaacgccaacccaaacgcaaacccaaacgcaaacccgaacgcaaacccauaaggacuagucccuguucccagagcccacuuuuuuuucuuuuuuugaaauaaaauagccugucuuucagaucuaaaaaaaaaaaaaaaaaaaaaaaaaaaaaaaaaaaaaaaaaaaaaaaaaaaaaaaaaaaaaaaaugcaucccccccccccccccccccccccccccccccaaaggcucuuuucagagccaccagaauu

SEQ ID NO: 901 - RNA, 1248 nt, Artificial Sequence
  mRNA Design a-1 (A64-N5-C30-hSL-N5) comprising derived and/or modified sequence from Pf(3D7)__XP_001351122.1__HsALB_Pf-CSP(93-397) (opt11)
aggagagucccgcagucggcguccagcggcucugcuuguucgugugugugucguugcaggccuuauucaagcuuaccaugaaaugggucacauucaucucacuccuauuccuauucucaagcgccuacuccaaacucaaacaacccgccgacggcaacccagacccaaacgccaaccccaacgucgacccaaacgccaacccaaacgucgacccaaacgcaaacccaaacgucgaccccaacgccaaccccaacgccaaccccaacgccaacccaaacgccaaucccaacgccaaccccaacgccaacccaaacgcaaaccccaacgccaauccaaacgccaaccccaacgcaaaccccaacgccaaccccaacgcaaacccaaacgcaaacccaaacgcaaaccccaacgccaaccccaacgcaaaccccaacgccaaccccaacgucgaccccaacgccaacccaaacgccaacccaaacgccaaccccaacgccaaccccaacgcaaacccaaacgcgaaccccaacgcaaaccccaacgccaacccgaacgccaacccgaacgcaaacccaaacgccaaccccaacgcaaaccccaacgcaaacccaaacgcgaaccccaacgccaacccaaacgccaacccaaacgcgaacccaaacgccaaccccaacaaaaacaaccaagggaacggacaaggccacaacaugcccaacgaccccaaccgcaacgucgacgaaaacgccaacgccaacuccgccgucaaaaacaacaacaacgaagaacccuccgacaaacacauaaaagaauaccuaaacaaaauccaaaacucacucucuacugaauggucccccugcucagucaccugcggcaacggcauacaaguccgcauaaaacccggcucggccaacaaaccaaaagacgaacuagacuacgcaaacgacaucgaaaaaaaaauaugcaaaauggaaaaaugcuccucagucuucaacguaguaaacuccuccaucggccucauaaugguccucuccuuccuauuccucaacuaaggacuagucccuguucccagagcccacuuuuuuuucuuuuuuugaaauaaaauagccugucuuucagaucuaaaaaaaaaaaaaaaaaaaaaaaaaaaaaaaaaaaaaaaaaaaaaaaaaaaaaaaaaaaaaaaaugcaucccccccccccccccccccccccccccccccaaaggcucuuuucagagccaccagaauu

SEQ ID NO: 902 - RNA, 618 nt, Artificial Sequence
  mRNA Design a-1 (A64-N5-C30-hSL-N5) comprising derived and/or modified sequence from Pf(3D7)__XP_001351122.1__HsALB_Pf-CSP(98-192) (opt11)
aggagagucccgcagucggcguccagcggcucugcuuguucgugugugugucguugcaggccuuauucaagcuuaccaugaaaugggucacauucauaagccuacucuuccucuucagcucagccuacuccgcagacggaaacccagacccaaacgcaaacccaaacguagacccaaacgcaaacccaaacguagacccaaacgcaaacccaaacguagacccaaacgcaaacccaaacgcaaacccaaacgcaaacccaaacgcaaacccaaacgcaaacccaaacgcaaacccaaacgcaaacccaaacgcaaacccaaacgcaaacccaaacgcaaaccccaacgcaaacccaaacgcaaacccaaacgcaaacccaaacgcaaacccaaacgcaaacccaaacgcaaacccauaaggacuagucccuguucccagagcccacuuuuuuuucuuuuuuugaaauaaaauagccugucuuucagaucuaaaaaaaaaaaaaaaaaaaaaaaaaaaaaaaaaaaaaaaaaaaaaaaaaaaaaaaaaaaaaaaaugcaucccccccccccccccccccccccccccccccaaaggcucuuuucagagccaccagaauu

SEQ ID NO: 903 - RNA, 858 nt, Artificial Sequence
  mRNA Design a-1 (A64-N5-C30-hSL-N5) comprising derived and/or modified sequence from Pf(3D7)__XP_001351122.1__HsALB_Pf-CSP(98-272) (opt11)
aggagagucccgcagucggcguccagcggcucugcuuguucgugugugugucguugcaggccuuauucaagcuuaccaugaaauggguaaccuucauaagccuacucuuccuauucucaucagccuacagcgcagacggaaacccagaccccaacgcaaacccaaacguagacccaaacgcaaacccaaacguagaccccaacgcaaacccaaacguagacccaaacgccaacccaaacgcaaacccaaacgcaaacccaaacgccaacccaaacgcaaacccaaacgccaacccaaacgcaaacccaaacgcaaacccaaacgcaaacccaaacgcaaacccaaacgcaaacccaaacgcaaacccaaacgccaacccaaacgcaaacccaaacgcaaacccaaacgcaaacccaaacgccaaccccaacguagacccaaacgccaaccccaacgcaaacccaaacgcaaacccaaacgcaaacccaaacgcaaacccaaacgcaaacccaaacgcaaacccaaacgcaaacccaaacgcaaacccgaacgccaacccaaacgcaaacccaaacgcaaacccaaacgcaaacccaaacgcaaacccaaacgcaaaccccaacgcaaacccaaacgcaaacccaaacgcaaacccauaaggacuagucccuguucccagagcccacuuuuuuuucuuuuuuugaaauaaaauagccugucuuucagaucuaaaaaaaaaaaaaaaaaaaaaaaaaaaaaaaaaaaaaaaaaaaaaaaaaaaaaaaaaaaaaaaaugcaucccccccccccccccccccccccccccccccaaaggcucuuuucagagccaccagaauu

SEQ ID NO: 904 - RNA, 1164 nt, Artificial Sequence
  mRNA Design a-1 (A64-N5-C30-hSL-N5) comprising derived and/or modified sequence from Pf(3D7)__XP_001351122.1__HsALB_Pf-CSP(98-374) (opt11)
aggagagucccgcagucggcguccagcggcucugcuuguucgugugugugucguugcaggccuuauucaagcuuaccaugaaauggguaaccuucauaucccuacucuuccuuuucuccucggccuacuccgcagacggaaacccagacccaaacgcaaaccccaacguagacccaaacgcaaacccaaauguagacccaaacgcaaacccaaacguggacccaaacgcgaaccccaacgcaaaccccaacgcaaacccaaacgccaacccaaacgcaaacccaaacgccaacccaaacgcaaaccccaacgccaaccccaacgccaacccaaacgcaaacccaaacgcaaaccccaacgcaaacccaaacgccaacccaaacgccaacccaaacgccaaccccaacgcaaacccaaacgccaacccaaacguagacccaaacgcaaacccaaacgcaaacccaaacgcaaaccccaacgcaaaccccaacgcaaacccaaacgcaaacccaaacgcaaacccaaacgcaaacccaaacgccaacccaaacgcgaaccccaacgccaacccaaacgcaaacccaaacgccaacccaaacgccaacccaaacgcaaaccccaacgcaaacccaaacgcaaacccaaacgccaacccgaacaaaaacaaccaaggcaacggccaaggacacaacaugccaaacgaccccaaccgcaacguagacgaaaacgccaacgcaaacuccgcagucaaaaacaacaacaacgaagaacccuccgacaaacacauaaaagaauaccuaaacaaaauccaaaacucgcucucaaccgaauggucccccugcuccgucaccugcggcaacggcauccaaguacgcaucaaaccaggcucagcaaacaaaccaaaagacgaacucgacuacgccaacgacauagaaaaaaaaauaugcaaaauggagaaaugcuaaggacuagucccuguucccagagcccacuuuuuuuucuuuuuuugaaauaaaauagccugucuuucagaucuaaaaaaaaaaaaaaaaaaaaaaaaaaaaaaaaaaaaaaaaaaaaaaaaaaaaaaaaaaaaaaaaugcaucccccccccccccccccccccccccccccccaaaggcucuuuucagagccaccagaauu

SEQ ID NO: 905 - RNA, 1233 nt, Artificial Sequence
  mRNA Design a-1 (A64-N5-C30-hSL-N5) comprising derived and/or modified sequence from Pf(3D7)__XP_001351122.1__HsALB_Pf-CSP(98-397) (opt11)
aggagagucccgcagucggcguccagcggcucugcuuguucgugugugugucguugcaggccuuauucaagcuuaccaugaaauggguaaccuucaucagccuacuauuccuauucagcuccgccuacagcgccgacggaaacccagacccaaacgccaaccccaacgucgacccaaacgccaaccccaacguagacccaaacgccaaccccaacgucgaccccaacgccaaccccaacgccaacccaaacgccaacccuaacgccaacccaaacgccaacccgaacgccaaccccaacgcgaacccaaacgccaacccaaacgcaaaccccaacgccaaccccaacgccaaccccaacgcaaaccccaacgcaaacccaaacgccaacccaaacgccaaccccaacgccaaccccaaugcaaacccaaacgucgaccccaacgccaacccaaacgccaaccccaacgccaaccccaacgccaaccccaacgcaaaccccaacgccaaccccaacgcgaaccccaacgccaaccccaacgccaacccaaacgccaaccccaacgccaaccccaacgccaaccccaacgcuaaccccaacgcaaacccaaacgccaacccaaacgccaacccaaacgccaaccccaacgccaacccaaacaaaaacaaccaaggcaacggacaaggacacaacaugccaaacgaccccaaccgcaacgucgacgaaaaugccaacgccaacuccgccgucaaaaacaacaacaacgaagaacccuccgacaaacacaucaaagaauaccuaaacaaaauacaaaacucucucucaaccgaauggucccccugcuccgucacaugcggcaacggcauccaaguccgcaucaaaccaggaucagccaauaaacccaaagacgaacucgacuacgccaacgacauagaaaaaaaaaucugcaaaauggaaaaaugcagcucagucuucaacgucgucaacuccucaaucggacuuauaaugguccuauccuuccucuuccuuaacuaaggacuagucccuguucccagagcccacuuuuuuuucuuuuuuugaaauaaaauagccugucuuucagaucuaaaaaaaaaaaaaaaaaaaaaaaaaaaaaaaaaaaaaaaaaaaaaaaaaaaaaaaaaaaaaaaaugcaucccccccccccccccccccccccccccccccaaaggcucuuuucagagccaccagaauu

SEQ ID NO: 906 - RNA, 1560 nt, Artificial Sequence
  mRNA Design a-1 (A64-N5-C30-hSL-N5) comprising derived and/or modified sequence from Pf(3D7)__XP_001351122.1__HsALB_Pf-CSP(199-377)_L(PVTN)_HBsAg (opt11)
aggagagucccgcagucggcguccagcggcucugcuuguucgugugugugucguugcaggccuuauucaagcuuaccaugaaaugggucacauucaucucgcuccucuuccuauucuccuccgccuacuccgacccuaacgccaaucccaacgccaaccccaacgccaaccccaacgccaaccccaacgccaaccccaaugcaaacccaaacgcaaaccccaacgccaaccccaacgcaaacccaaaugcaaaccccaacgcaaaccccaacgccaaccccaaugccaaccccaacgcuaaccccaacgccaauccaaacgccaaccccaacgcaaaccccaacgccaacccuaacaaaaauaaccaaggcaacggccaaggacacaacaugcccaacgaccccaaccgaaaugucgacgaaaacgcuaacgcuaacagcgccgucaaaaacaacaacaacgaagaacccuccgacaaacacauuaaagaauaccucaacaaaauccaaaacucccucuccaccgaauggucccccugcucuguaacuugcggcaacggcauccaaguccgcauaaaacccggaucagcaaacaaacccaaagacgaacucgacuacgcaaacgacauugagaagaaaaucugcaaaauggaaaaaugcucaucaguacccgucacuaacauggaaaacaucaccuccggcuuccucggcccccuccuaguccuacaagccgguuucuuccuucuuacacgcauccuaaccaucccacaaucccuagacuccugguggacaucuuuaaacuuccuuggaggauccccugucugccucggccaaaacucccaauccccaaccucuaaccacucucccacauccugcccucccauaugccccgguuaccgcuggaugugccuccgccgcuucaucaucuuccucuucauacuccucuuaugccucaucuuccuccucguacuacucgacuaccaagguaugcuacccguaugcccucucauccccggcuccaccacaaccaacaccggccccugcaaaacaugcaccacccccgcacagggcaauuccauguuccccuccugcuguugcaccaaacccacagacggcaacuguaccugcauccccauccccuccucuugggcauuugccaaauaccucugggaaugggccuccguccgauucucuuggcuuucacuccucguucccuucguacaaugguucgucggccuaucacccaccgucuggcucuccgccaucuggaugaugugguacuggggcccuucacuuuacuccauagucagccccuucauaccacuccuccccaucuucuucugccuauggguauacaucuaaggacuagucccuguucccagagcccacuuuuuuuucuuuuuuugaaauaaaauagccugucuuucagaucuaaaaaaaaaaaaaaaaaaaaaaaaaaaaaaaaaaaaaaaaaaaaaaaaaaaaaaaaaaaaaaaaugcaucccccccccccccccccccccccccccccccaaaggcucuuuucagagccaccagaauu

SEQ ID NO: 907 - RNA, 1299 nt, Artificial Sequence
  mRNA Design a-1 (A64-N5-C30-hSL-N5) comprising derived and/or modified sequence from Pb(ANKA)__XP_022712148.1__Pb-CSP (opt11)
aggagagucccgcagucggcguccagcggcucugcuuguucgugugugugucguugcaggccuuauucaagcuuaccaugaaaaaaugcaccauccucgucguagccucccuccuccuagucaacucccuccuccccggauacgggcaaaacaaaucaauucaagcccaacgcaaccucaacgaacucugcuacaacgaaggcaacgacaacaaacuauaccacguacucaacuccaaaaacgguaaaaucuacaaccgcaacacugucaaccgccuacucgccgacgcccccgaaggcaaaaaaaacgaaaaaaaaaacgaaaaaaucgaacgcaacaacaaacucaaacaacccccacccccaccaaaccccaacgacccccccccccccaaucccaaugaccccccaccccccaaccccaacgaccccccccccccaaaccccaacgacccccccccccccaacgccaacgauccaccuccucccaacgcaaacgacccagcaccuccaaacgccaacgaccccgcccccccaaacgcaaacgacccagcccccccaaacgcaaacgaccccgccccccccaacgccaacgacccacccccccccaaccccaacgacccagccccccccaaugccaacgacccccccccucccaaccccaacgaccccgcccccccacaaggaaacaacaacccacaaccccaaccacgaccccaaccccaaccccaaccccaaccacaaccacaaccccaaccccaaccacaaccccgaccacaaccccaaccccaacccggcggcaacaacaacaacaaaaacaacaacaacgacgacuccuacaucccauccgccgaaaaaauccucgaauucgucaaacaaauacgcgacuccauaaccgaagaauggucccaaugcaacgugaccugcggcucaggcauccgaguccgcaaacgcaaaggaucuaacaaaaaagccgaagaccucacccuagaagacaucgacaccgaaaucugcaaaauggacaaaugcuccuccauauucaacaucgucucaaacucacucggcuuugucauccuccucguacucgucuucuucaacuaaggacuagucccuguucccagagcccacuuuuuuuucuuuuuuugaaauaaaauagccugucuuucagaucuaaaaaaaaaaaaaaaaaaaaaaaaaaaaaaaaaaaaaaaaaaaaaaaaaaaaaaaaaaaaaaaaugcaucccccccccccccccccccccccccccccccaaaggcucuuuucagagccaccagaauu

SEQ ID NO: 908 - RNA, 1464 nt, Artificial Sequence
  mRNA Design a-1 (A64-N5-C30-hSL-N5) comprising derived and/or modified sequence from Pb(ANKA)__XP_022712148.1__Pb-CSP_L(G4SG4)_TM domain HA (opt11)
aggagagucccgcagucggcguccagcggcucugcuuguucgugugugugucguugcaggccuuauucaagcuuaccaugaaaaaaugcacaauccuugucguagccucccuacuacucguaaacucacuccuacccggauacggccaaaacaaaucuauccaagcccaacguaaccuuaaugaacuaugcuacaacgaaggcaacgacaacaaacuuuaccacguccugaacuccaaaaacggcaaaaucuacaaccggaacaccguaaaucgccugcucgcugacgcaccagaaggaaaaaaaaacgaaaaaaaaaacgaaaaaauagagcguaacaacaagcucaaacaaccgcccccccccccaaaccccaacgaccccccccccccuaaccccaacgacccaccgccacccaacccaaacgacccccccccaccaaaccccaacgacccaccaccaccgaacgccaacgacccaccuccccccaacgccaacgacccugcaccccccaacgccaacgaucccgccccccccaacgccaacgacccagcacccccaaacgccaacgauccagcuccccccaacgccaacgaccccccaccccccaaccccaacgacccagcccccccaaacgcuaacgacccccccccccccaacccaaacgacccagcccccccccaaggcaacaacaacccucaaccccaaccccgcccgcaaccccaaccccaaccacaaccacaaccucaaccacaaccacaaccccaaccccgcccacaaccacaaccccaaccaggcggcaacaacaacaacaaaaacaacaacaacgacgacuccuacauccccucagcagaaaaaauccucgaguucgucaaacaaauccgcgacucuaucacagaagaauggucccaaugcaacguaaccugcggcucaggcauccgcguccgaaaacgaaaaggcucaaacaaaaaagccgaagaccucacacucgaagacaucgacaccgaaauaugcaaaauggacaaaugcuccuccauauucaacaucgucucaaacucucucgguuucgucaucuuacucguccucguauucuucaacggcggcggaggcuccggcggaggaggcaaacuagaauccaccagaaucuaccaaauccucgccauauacucuaccgucgccagcucccuuguccucguggucucccucggagcaaucuccuucuggaugugcucuaacggcucacuccaaugccguaucugcauuuaaggacuagucccuguucccagagcccacuuuuuuuucuuuuuuugaaauaaaauagccugucuuucagaucuaaaaaaaaaaaaaaaaaaaaaaaaaaaaaaaaaaaaaaaaaaaaaaaaaaaaaaaaaaaaaaaaugcaucccccccccccccccccccccccccccccccaaaggcucuuuucagagccaccagaauu

SEQ ID NO: 909 - RNA, 1284 nt, Artificial Sequence
  mRNA Design a-1 (A64-N5-C30-hSL-N5) comprising derived and/or modified sequence from Pb(ANKA)__XP_022712148.1__HsALB_Pb-CSP(24-340) (opt11)
aggagagucccgcagucggcguccagcggcucugcuuguucgugugugugucguugcaggccuuauucaagcuuaccaugaaaugggucaccuucaucucccuacuauuccucuuuucauccgcuuacucacaaaacaaauccauccaagcccaacgcaaccucaaugaacuaugcuacaacgaaggcaacgacaacaaacucuaccacguccucaacucaaaaaacggaaaaauauacaaccgcaacaccguaaaccgccuacuagccgacgcccccgaaggcaaaaaaaacgaaaaaaaaaacgaaaaaaucgaacgcaacaacaaacuaaaacaacccccccccccccccaaccccaacgacccccccccccccaaccccaacgaccccccacccccaaacccaaacgaccccccuccccccaacccaaacgaccccccaccccccaacgcaaacgacccccccccacccaacgccaacgaccccgccccccccaacgccaacgaucccgccccccccaacgccaacgaccccgccccccccaacgccaacgacccagccccccccaacgcaaacgacccccccccccccaaccccaacgaccccgcaccccccaacgccaacgacccacccccacccaaccccaacgaccccgcacccccacaaggaaacaacaacccccaaccccaaccccgaccccaaccccaaccccaaccccaaccccaaccgcaaccccagccacaaccacaaccccgcccucaaccucaaccccaacccggaggaaacaacaacaacaaaaauaacaacaacgaugacuccuacauccccuccgcagaaaaaauacucgaauucguaaaacaaauccgcgacucaaucaccgaagaauggucccaaugcaacguaaccugcggcuccggcauccgcguccgcaaacgcaaaggcuccaacaagaaagccgaagaccucacacuggaagacauagacaccgaaauaugcaaaauggauaaaugcuccuccaucuucaacaucgucuccaacucucucggcuucguaauacuucucguucucguauucuucaacuaaggacuagucccuguucccagagcccacuuuuuuuucuuuuuuugaaauaaaauagccugucuuucagaucuaaaaaaaaaaaaaaaaaaaaaaaaaaaaaaaaaaaaaaaaaaaaaaaaaaaaaaaaaaaaaaaaugcaucccccccccccccccccccccccccccccccaaaggcucuuuucagagccaccagaauu

SEQ ID NO: 910 - RNA, 1302 nt, Artificial Sequence
  mRNA Design a-1 (A64-N5-C30-hSL-N5) comprising derived and/or modified sequence from Pb(ANKA)__XP_022712148.1__HsIns-iso1_Pb-CSP(24-340) (opt11)
aggagagucccgcagucggcguccagcggcucugcuuguucgugugugugucguugcaggccuuauucaagcuuaccauggcccucuggaugcgacuacucccccuccucgcacuccuagcccucuggggccccgaccccgccgccgcacaaaacaaauccauccaagcccaacgcaaccucaaugaacucugcuacaacgaaggcaacgacaacaaacucuaccacguccucaacucaaaaaacggaaaaaucuacaaccgaaacaccgucaaccgccuccuugccgacgccccagaaggcaaaaaaaacgagaaaaaaaaugaaaaaaucgaacgcaacaacaaacucaaacaaccccccccccccccgaacccuaacgacccccccccccccaaccccaaugaccccccacccccaaacccgaacgaccccccaccccccaaccccaacgaccccccucccccuaacgcaaacgacccuccaccccccaacgccaacgaccccgccccaccaaacgccaaugaccccgccccaccaaacgcaaacgauccagcccccccaaacgcaaacgaccccgcaccacccaacgcaaacgacccccccccccccaaccccaacgaccccgcccccccaaacgccaacgaccccccaccacccaaccccaacgaccccgcacccccacaaggcaacaacaacccacaaccacaaccccgcccccaaccccaaccacaaccccaaccccaaccccaaccacaaccacaaccacaaccccgcccccaaccccaaccccaacccggcggcaacaacaacaacaaaaacaacaauaacgacgacucuuacauccccucagccgaaaaaauacucgaauucgucaaacaaauccgcgacuccaucaccgaagaauggucacaaugcaacgucaccugcggaucaggcauccgaguacgcaaacgcaaaggcuccaacaaaaaagccgaagaccucacccucgaagacaucgacaccgaaauuugcaaaauggacaagugcuccuccauauucaacaucguuucaaacucauuaggauucgucauccuccucguccucgucuucuucaacuaaggacuagucccuguucccagagcccacuuuuuuuucuuuuuuugaaauaaaauagccugucuuucagaucuaaaaaaaaaaaaaaaaaaaaaaaaaaaaaaaaaaaaaaaaaaaaaaaaaaaaaaaaaaaaaaaaugcaucccccccccccccccccccccccccccccccaaaggcucuuuucagagccaccagaauu

SEQ ID NO: 911 - RNA, 1281 nt, Artificial Sequence
  mRNA Design a-1 (A64-N5-C30-hSL-N5) comprising derived and/or modified sequence from Pb(ANKA)__XP_022712148.1__HsSPARC_Pb-CSP(24-340) (opt11)
aggagagucccgcagucggcguccagcggcucugcuuguucgugugugugucguugcaggccuuauucaagcuuaccaugcgcgccuggaucuucuuccuccucugccuugccggccgcgcacuagcccaaaacaaaucuauccaagcccaacgcaaccucaacgaacucugcuacaacgaaggaaacgacaacaaacucuaccauguacucaacuccaaaaacggaaaaaucuacaaccgcaacaccguaaaccgccuacucgcugacgccccugaaggcaaaaaaaacgaaaaaaaaaacgaaaaaaucgaacgcaacaacaaacucaaacaaccuccccccccccccaacccaaacgacccccccccucccaacccaaacgaccccccacccccaaaccccaacgacccccccccccccaacccaaacgacccccccccccccaacgccaacgacccccccccccccaacgccaacgaccccgccccaccaaacgcaaacgauccagcaccccccaacgccaacgaccccgcaccccccaacgcaaacgaccccgccccccccaacgccaacgaccccccgccaccuaacccaaacgacccagcaccccccaacgccaacgaucccccaccccccaaccccaacgacccagcccccccccaaggaaacaacaacccacaaccccaaccccgcccucaaccacaaccacaaccccaaccucaaccccaaccucaaccccaaccccaaccacgaccacaaccccaaccacaaccuggcggcaacaacaacaacaaaaacaacaacaacgacgacucauacaucccauccgcagaaaaaauacucgaauucguaaaacaaaucagagacuccauaacagaagaauggucccaaugcaacgucacuugcggcucaggcauacgcguccgcaaacgcaagggcuccaacaaaaaagccgaagaccuaacacucgaagacaucgacacagaaaucugcaaaauggacaaaugcucaucaaucuucaacaucguauccaacucacucggcuucguaauccuccucguccucgucuucuucaacuaaggacuagucccuguucccagagcccacuuuuuuuucuuuuuuugaaauaaaauagccugucuuucagaucuaaaaaaaaaaaaaaaaaaaaaaaaaaaaaaaaaaaaaaaaaaaaaaaaaaaaaaaaaaaaaaaaugcaucccccccccccccccccccccccccccccccaaaggcucuuuucagagccaccagaauu

SEQ ID NO: 912 - RNA, 1284 nt, Artificial Sequence
  mRNA Design a-1 (A64-N5-C30-hSL-N5) comprising derived and/or modified sequence from Pb(ANKA)__XP_022712148.1__IgE_Pb-CSP(24-340) (opt11)
aggagagucccgcagucggcguccagcggcucugcuuguucgugugugugucguugcaggccuuauucaagcuuaccauggacuggaccuggauccuuuuccuaguagccgccgcaacccgcguccacucacaaaacaaauccauccaagcacagcguaaccucaacgaacucuguuacaacgagggcaacgacaacaaacuauaccacguccugaacuccaaaaacggcaaaaucuacaaccgcaacaccguaaaccgucuccucgccgacgccccagaaggcaaaaaaaaugaaaaaaaaaacgaaaaaaucgaacgaaacaacaaacuaaaacaacccccccccccccccaaccccaacgacccccccccccccaaccccaacgauccccccccccccaaccccaacgacccccccccccccaaucccaacgacccccccccccccaacgcaaacgaccccccccccccuaaugccaacgacccagcaccccccaacgccaacgaccccgccccccccaacgcaaacgaccccgccccccccaacgccaacgaccccgccccaccuaacgcaaacgacccacccccccccaaccccaacgaccccgccccccccaacgcuaacgacccccccccccccaacccaaacgacccagcacccccacaaggcaacaacaacccacaaccccaaccccgcccccaaccucaaccacaaccccaaccacaaccccaaccccaaccccaaccccaaccccgcccacaaccccaaccucaacccggcggcaacaacaacaacaaaaacaacaacaacgacgacuccuacauaccauccgccgaaaaaauccucgaauucgucaaacaaauccgcgacucaaucaccgaagaauggucacaaugcaacgucaccugcggcuccgguauccgcguaagaaaacgcaaaggaucaaacaaaaaagccgaagaccucacccucgaagacauagacaccgaaaucugcaaaauggacaaauguucauccaucuuuaacaucgucuccaacucacucggauucguaauacuacuaguccuaguauucuucaacuaaggacuagucccuguucccagagcccacuuuuuuuucuuuuuuugaaauaaaauagccugucuuucagaucuaaaaaaaaaaaaaaaaaaaaaaaaaaaaaaaaaaaaaaaaaaaaaaaaaaaaaaaaaaaaaaaaugcaucccccccccccccccccccccccccccccccaaaggcucuuuucagagccaccagaauu

SEQ ID NO: 913 - RNA, 1576 nt, Artificial Sequence
  mRNA Design i-2 (A64-N5-C30-hSL-N5) comprising derived and/or modified sequence from Pf(3D7)__XP_001351122.1__Pf-CSP (wt)
ggggcgcugccuacggagguggcagccaucuccuucucggcaucaagcuuaccaugaugagaaaauuagcuauuuuaucuguuucuuccuuuuuauuuguugaggccuuauuccaggaauaccagugcuauggaaguucgucaaacacaaggguucuaaaugaauuaaauuaugauaaugcaggcacuaauuuauauaaugaauuagaaaugaauuauuaugggaaacaggaaaauugguauagucuuaaaaaaaauaguagaucacuuggagaaaaugaugauggaaauaacgaagacaacgagaaauuaaggaaaccaaaacauaaaaaauuaaagcaaccagcggaugguaauccugauccaaaugcaaacccaaauguagaucccaaugccaacccaaauguagauccaaaugcaaacccaaauguagauccaaaugcaaacccaaaugcaaacccaaaugcaaacccaaaugcaaacccaaaugcaaacccaaaugcaaacccaaaugcaaacccaaaugcaaacccaaaugcaaacccaaaugcaaacccaaaugcaaacccaaaugcaaacccaaaugcaaacccaaaugcaaaccccaaugcaaauccuaaugcaaacccaaaugcaaacccaaacguagauccuaaugcaaauccaaaugcaaacccaaacgcaaaccccaaugcaaauccuaaugcaaaccccaaugcaaauccuaaugcaaauccuaaugccaauccaaaugcaaauccaaaugcaaacccaaacgcaaaccccaaugcaaauccuaaugccaauccaaaugcaaauccaaaugcaaacccaaaugcaaacccaaaugcaaaccccaaugcaaauccuaauaaaaacaaucaagguaauggacaaggucacaauaugccaaaugacccaaaccgaaauguagaugaaaaugcuaaugccaacagugcuguaaaaaauaauaauaacgaagaaccaagugauaagcacauaaaagaauauuuaaacaaaauacaaaauucucuuucaacugaaugguccccauguaguguaacuuguggaaaugguauucaaguuagaauaaagccuggcucugcuaauaaaccuaaagacgaauuagauuaugcaaaugauauugaaaaaaaaauuuguaaaauggaaaaauguuccaguguguuuaaugucguaaauaguucaauaggauuaauaaugguauuauccuucuuguuccuuaauuagggacuagugcaucacauuuaaaagcaucucagccuaccaugagaauaagagaaagaaaaugaagaucaauagcuuauucaucucuuuuucuuuuucguugguguaaagccaacacccugucuaaaaaacauaaauuucuuuaaucauuuugccucuuuucucugugcuucaauuaauaaaaaauggaaagaaccuagaucuaaaaaaaaaaaaaaaaaaaaaaaaaaaaaaaaaaaaaaaaaaaaaaaaaaaaaaaaaaaaaaaaugcaucccccccccccccccccccccccccccccccaaaggcucuuuucagagccaccagaauu

SEQ ID NO: 914 - RNA, 1507 nt, Artificial Sequence
  mRNA Design i-2 (A64-N5-C30-hSL-N5) comprising derived and/or modified sequence from Pf(3D7)__XP_001351122.1__Pf-CSP(1-374) (wt)
ggggcgcugccuacggagguggcagccaucuccuucucggcaucaagcuuaccaugaugagaaaauuagcuauuuuaucuguuucuuccuuuuuauuuguugaggccuuauuccaggaauaccagugcuauggaaguucgucaaacacaaggguucuaaaugaauuaaauuaugauaaugcaggcacuaauuuauauaaugaauuagaaaugaauuauuaugggaaacaggaaaauugguauagucuuaaaaaaaauaguagaucacuuggagaaaaugaugauggaaauaacgaagacaacgagaaauuaaggaaaccaaaacauaaaaaauuaaagcaaccagcggaugguaauccugauccaaaugcaaacccaaauguagaucccaaugccaacccaaauguagauccaaaugcaaacccaaauguagauccaaaugcaaacccaaaugcaaacccaaaugcaaacccaaaugcaaacccaaaugcaaacccaaaugcaaacccaaaugcaaacccaaaugcaaacccaaaugcaaacccaaaugcaaacccaaaugcaaacccaaaugcaaacccaaaugcaaacccaaaugcaaaccccaaugcaaauccuaaugcaaacccaaaugcaaacccaaacguagauccuaaugcaaauccaaaugcaaacccaaacgcaaaccccaaugcaaauccuaaugcaaaccccaaugcaaauccuaaugcaaauccuaaugccaauccaaaugcaaauccaaaugcaaacccaaacgcaaaccccaaugcaaauccuaaugccaauccaaaugcaaauccaaaugcaaacccaaaugcaaacccaaaugcaaaccccaaugcaaauccuaauaaaaacaaucaagguaauggacaaggucacaauaugccaaaugacccaaaccgaaauguagaugaaaaugcuaaugccaacagugcuguaaaaaauaauaauaacgaagaaccaagugauaagcacauaaaagaauauuuaaacaaaauacaaaauucucuuucaacugaaugguccccauguaguguaacuuguggaaaugguauucaaguuagaauaaagccuggcucugcuaauaaaccuaaagacgaauuagauuaugcaaaugauauugaaaaaaaaauuuguaaaauggaaaaauguugaggacuagugcaucacauuuaaaagcaucucagccuaccaugagaauaagagaaagaaaaugaagaucaauagcuuauucaucucuuuuucuuuuucguugguguaaagccaacacccugucuaaaaaacauaaauuucuuuaaucauuuugccucuuuucucugugcuucaauuaauaaaaaauggaaagaaccuagaucuaaaaaaaaaaaaaaaaaaaaaaaaaaaaaaaaaaaaaaaaaaaaaaaaaaaaaaaaaaaaaaaaugcaucccccccccccccccccccccccccccccccaaaggcucuuuucagagccaccagaauu

SEQ ID NO: 915 - RNA, 1360 nt, Artificial Sequence
  mRNA Design i-2 (A64-N5-C30-hSL-N5) comprising derived and/or modified sequence from Pf(3D7)__XP_001351122.1__Pf-CSP(1-325) (wt)
ggggcgcugccuacggagguggcagccaucuccuucucggcaucaagcuuaccaugaugagaaaauuagcuauuuuaucuguuucuuccuuuuuauuuguugaggccuuauuccaggaauaccagugcuauggaaguucgucaaacacaaggguucuaaaugaauuaaauuaugauaaugcaggcacuaauuuauauaaugaauuagaaaugaauuauuaugggaaacaggaaaauugguauagucuuaaaaaaaauaguagaucacuuggagaaaaugaugauggaaauaacgaagacaacgagaaauuaaggaaaccaaaacauaaaaaauuaaagcaaccagcggaugguaauccugauccaaaugcaaacccaaauguagaucccaaugccaacccaaauguagauccaaaugcaaacccaaauguagauccaaaugcaaacccaaaugcaaacccaaaugcaaacccaaaugcaaacccaaaugcaaacccaaaugcaaacccaaaugcaaacccaaaugcaaacccaaaugcaaacccaaaugcaaacccaaaugcaaacccaaaugcaaacccaaaugcaaacccaaaugcaaaccccaaugcaaauccuaaugcaaacccaaaugcaaacccaaacguagauccuaaugcaaauccaaaugcaaacccaaacgcaaaccccaaugcaaauccuaaugcaaaccccaaugcaaauccuaaugcaaauccuaaugccaauccaaaugcaaauccaaaugcaaacccaaacgcaaaccccaaugcaaauccuaaugccaauccaaaugcaaauccaaaugcaaacccaaaugcaaacccaaaugcaaaccccaaugcaaauccuaauaaaaacaaucaagguaauggacaaggucacaauaugccaaaugacccaaaccgaaauguagaugaaaaugcuaaugccaacagugcuguaaaaaauaauaauaacgaagaaccaagugauaagcacauaaaagaauauuuaaacaaaauacaaaauugaggacuagugcaucacauuuaaaagcaucucagccuaccaugagaauaagagaaagaaaaugaagaucaauagcuuauucaucucuuuuucuuuuucguugguguaaagccaacacccugucuaaaaaacauaaauuucuuuaaucauuuugccucuuuucucugugcuucaauuaauaaaaaauggaaagaaccuagaucuaaaaaaaaaaaaaaaaaaaaaaaaaaaaaaaaaaaaaaaaaaaaaaaaaaaaaaaaaaaaaaaaugcaucccccccccccccccccccccccccccccccaaaggcucuuuucagagccaccagaauu

SEQ ID NO: 916 - RNA, 1405 nt, Artificial Sequence
  mRNA Design i-2 (A64-N5-C30-hSL-N5) comprising derived and/or modified sequence from Pb(ANKA)__XP_022712148.1__Pb-CSP (wt)
ggggcgcugccuacggagguggcagccaucuccuucucggcaucaagcuuaccaugaagaaguguaccauuuuaguuguagcgucacuuuuauuaguuaauucucuacuuccaggauauggacaaaauaaaagcauccaagcccaaaggaacuuaaacgagcuauguuacaaugaaggaaaugauaauaaauuguaucacgugcuuaacucuaagaauggaaaaauauacaaucgaaauacagucaacagauuacuugccgaugcucccgaaggaaaaaaaaaugagaaaaaaaacgaaaaaauagagcguaauaauaaauugaaacaaccaccaccaccaccaaacccaaaugacccaccaccaccaaacccaaaugacccaccaccaccaaacccaaaugacccaccaccaccaaacccaaaugacccaccaccaccaaacgcaaaugacccaccaccaccaaacgcaaaugacccagcaccaccaaacgcaaaugacccagcaccaccaaacgcaaaugacccagcaccaccaaacgcaaaugacccagcaccaccaaacgcaaaugacccaccaccaccaaacccaaaugacccagcaccaccaaacgcaaaugacccaccaccaccaaacccaaaugacccagcaccaccacaaggaaauaacaauccacaaccacagccacggccgcagccacaaccacagccacagccacaaccacagccacagccacaaccacagccacgaccacagccacaaccacagccaggugguaauaacaauaacaaaaauaauaauaaugacgauucuuauaucccaagcgcggaaaaaauacuagaauuuguuaaacagaucagggauaguaucacagaggaauggucucaauguaacguaacaugugguucugguauaagaguuagaaaacgaaaagguucaaauaagaaagcagaagauuugaccuuagaagauauugauacugaaauuuguaaaauggauaaauguucaaguauauuuaauauuguaagcaauucauuaggauuuguaauauuauuaguauuaguauucuuuaauuaaggacuagugcaucacauuuaaaagcaucucagccuaccaugagaauaagagaaagaaaaugaagaucaauagcuuauucaucucuuuuucuuuuucguugguguaaagccaacacccugucuaaaaaacauaaauuucuuuaaucauuuugccucuuuucucugugcuucaauuaauaaaaaauggaaagaaccuagaucuaaaaaaaaaaaaaaaaaaaaaaaaaaaaaaaaaaaaaaaaaaaaaaaaaaaaaaaaaaaaaaaaugcaucccccccccccccccccccccccccccccccaaaggcucuuuucagagccaccagaauu

SEQ ID NO: 917 - RNA, 1576 nt, Artificial Sequence
  mRNA Design i-2 (A64-N5-C30-hSL-N5) comprising derived and/or modified sequence from Pf(3D7)__XP_001351122.1__Pf-CSP (opt1) R6876/R5752
ggggcgcugccuacggagguggcagccaucuccuucucggcaucaagcuuaccaugaugcgcaagcuggccauccucagcguguccagcuuccuguucgucgaggcccuguuccaggaguaccagugcuacggcuccagcuccaacacccgggugcucaacgagcugaacuacgacaacgcggggaccaaccuguacaacgagcucgagaugaacuacuacggcaagcaggagaacugguacagccugaagaagaacucccgcagccugggggagaacgacgacggcaacaacgaggacaacgagaagcuccggaagcccaagcacaagaagcugaagcagccggccgacgggaaccccgaccccaacgccaaccccaacguggacccgaacgccaaccccaacgucgaccccaacgccaaccccaacguggacccgaacgcgaaccccaacgccaaccccaacgccaaccccaacgccaacccgaacgcgaaccccaacgccaaccccaacgccaaccccaacgccaacccgaacgccaaccccaacgcgaaccccaacgccaaccccaacgccaacccgaacgccaaccccaacgccaaccccaacgcgaaccccaacgccaacccgaacgccaaccccaacguggaccccaacgccaaccccaacgccaacccgaacgcgaaccccaacgccaaccccaacgccaacccgaacgccaaccccaacgccaaccccaacgcgaaccccaacgccaacccgaacgccaaccccaacgccaaccccaacgcgaaccccaacgccaacccgaacgccaaccccaacgccaaccccaacgccaaccccaacgcgaacccgaacgccaaccccaacaagaacaaccagggcaacggccaggggcacaacaugcccaacgaccccaaccgcaacgucgacgagaacgccaacgccaacuccgccgugaagaacaacaacaacgaggagccgagcgacaagcacaucaaggaguaccugaacaagauccagaacucccucagcacggaguggucccccugcagcgugaccugcggcaacgggauccagguccggaucaagcccggcuccgcgaacaagcccaaggacgagcuggacuacgccaacgacaucgagaagaagaucugcaagauggagaagugcagcuccguguucaacguggucaacagcuccaucgggcugaucauggugcucagcuuccuguuccugaacugaggacuagugcaucacauuuaaaagcaucucagccuaccaugagaauaagagaaagaaaaugaagaucaauagcuuauucaucucuuuuucuuuuucguugguguaaagccaacacccugucuaaaaaacauaaauuucuuuaaucauuuugccucuuuucucugugcuucaauuaauaaaaaauggaaagaaccuagaucuaaaaaaaaaaaaaaaaaaaaaaaaaaaaaaaaaaaaaaaaaaaaaaaaaaaaaaaaaaaaaaaaugcaucccccccccccccccccccccccccccccccaaaggcucuuuucagagccaccagaauu

SEQ ID NO: 918 - RNA, 1507 nt, Artificial Sequence
  mRNA Design i-2 (A64-N5-C30-hSL-N5) comprising derived and/or modified sequence from Pf(3D7)__XP_001351122.1__Pf-CSP(1-374) (opt1)
ggggcgcugccuacggagguggcagccaucuccuucucggcaucaagcuuaccaugaugcgcaagcuggccauccucagcguguccagcuuccuguucgucgaggcccuguuccaggaguaccagugcuacggcuccagcuccaacacccgggugcucaacgagcugaacuacgacaacgcggggaccaaccuguacaacgagcucgagaugaacuacuacggcaagcaggagaacugguacagccugaagaagaacucccgcagccugggggagaacgacgacggcaacaacgaggacaacgagaagcuccggaagcccaagcacaagaagcugaagcagccggccgacgggaaccccgaccccaacgccaaccccaacguggacccgaacgccaaccccaacgucgaccccaacgccaaccccaacguggacccgaacgcgaaccccaacgccaaccccaacgccaaccccaacgccaacccgaacgcgaaccccaacgccaaccccaacgccaaccccaacgccaacccgaacgccaaccccaacgcgaaccccaacgccaaccccaacgccaacccgaacgccaaccccaacgccaaccccaacgcgaaccccaacgccaacccgaacgccaaccccaacguggaccccaacgccaaccccaacgccaacccgaacgcgaaccccaacgccaaccccaacgccaacccgaacgccaaccccaacgccaaccccaacgcgaaccccaacgccaacccgaacgccaaccccaacgccaaccccaacgcgaaccccaacgccaacccgaacgccaaccccaacgccaaccccaacgccaaccccaacgcgaacccgaacgccaaccccaacaagaacaaccagggcaacggccaggggcacaacaugcccaacgaccccaaccgcaacgucgacgagaacgccaacgccaacuccgccgugaagaacaacaacaacgaggagccgagcgacaagcacaucaaggaguaccugaacaagauccagaacucccucagcacggaguggucccccugcagcgugaccugcggcaacgggauccagguccggaucaagcccggcuccgcgaacaagcccaaggacgagcuggacuacgccaacgacaucgagaagaagaucugcaagauggagaagugcugaggacuagugcaucacauuuaaaagcaucucagccuaccaugagaauaagagaaagaaaaugaagaucaauagcuuauucaucucuuuuucuuuuucguugguguaaagccaacacccugucuaaaaaacauaaauuucuuuaaucauuuugccucuuuucucugugcuucaauuaauaaaaaauggaaagaaccuagaucuaaaaaaaaaaaaaaaaaaaaaaaaaaaaaaaaaaaaaaaaaaaaaaaaaaaaaaaaaaaaaaaaugcaucccccccccccccccccccccccccccccccaaaggcucuuuucagagccaccagaauu

SEQ ID NO: 919 - RNA, 1360 nt, Artificial Sequence
  mRNA Design i-2 (A64-N5-C30-hSL-N5) comprising derived and/or modified sequence from Pf(3D7)__XP_001351122.1__Pf-CSP(1-325) (opt1)
ggggcgcugccuacggagguggcagccaucuccuucucggcaucaagcuuaccaugaugcgcaagcuggccauccucagcguguccagcuuccuguucgucgaggcccuguuccaggaguaccagugcuacggcuccagcuccaacacccgggugcucaacgagcugaacuacgacaacgcggggaccaaccuguacaacgagcucgagaugaacuacuacggcaagcaggagaacugguacagccugaagaagaacucccgcagccugggggagaacgacgacggcaacaacgaggacaacgagaagcuccggaagcccaagcacaagaagcugaagcagccggccgacgggaaccccgaccccaacgccaaccccaacguggacccgaacgccaaccccaacgucgaccccaacgccaaccccaacguggacccgaacgcgaaccccaacgccaaccccaacgccaaccccaacgccaacccgaacgcgaaccccaacgccaaccccaacgccaaccccaacgccaacccgaacgccaaccccaacgcgaaccccaacgccaaccccaacgccaacccgaacgccaaccccaacgccaaccccaacgcgaaccccaacgccaacccgaacgccaaccccaacguggaccccaacgccaaccccaacgccaacccgaacgcgaaccccaacgccaaccccaacgccaacccgaacgccaaccccaacgccaaccccaacgcgaaccccaacgccaacccgaacgccaaccccaacgccaaccccaacgcgaaccccaacgccaacccgaacgccaaccccaacgccaaccccaacgccaaccccaacgcgaacccgaacgccaaccccaacaagaacaaccagggcaacggccaggggcacaacaugcccaacgaccccaaccgcaacgucgacgagaacgccaacgccaacuccgccgugaagaacaacaacaacgaggagccgagcgacaagcacaucaaggaguaccugaacaagauccagaacugaggacuagugcaucacauuuaaaagcaucucagccuaccaugagaauaagagaaagaaaaugaagaucaauagcuuauucaucucuuuuucuuuuucguugguguaaagccaacacccugucuaaaaaacauaaauuucuuuaaucauuuugccucuuuucucugugcuucaauuaauaaaaaauggaaagaaccuagaucuaaaaaaaaaaaaaaaaaaaaaaaaaaaaaaaaaaaaaaaaaaaaaaaaaaaaaaaaaaaaaaaaugcaucccccccccccccccccccccccccccccccaaaggcucuuuucagagccaccagaauu

SEQ ID NO: 920 - RNA, 1576 nt, Artificial Sequence
  mRNA Design i-2 (A64-N5-C30-hSL-N5) comprising derived and/or modified sequence from Pf(3D7)__XP_001351122.1__HsALB_Pf-CSP(19-397) (opt1) R5973
ggggcgcugccuacggagguggcagccaucuccuucucggcaucaagcuuaccaugaagugggugaccuucaucagccugcucuuccuguucuccagcgccuacucccuguuccaggaguaccagugcuacggcuccagcuccaacacccgggugcucaacgagcugaacuacgacaacgcggggaccaaccuguacaacgagcucgagaugaacuacuacggcaagcaggagaacugguacagccugaagaagaacucccgcagccugggggagaacgacgacggcaacaacgaggacaacgagaagcuccggaagcccaagcacaagaagcugaagcagccggccgacgggaaccccgaccccaacgccaaccccaacguggacccgaacgccaaccccaacgucgaccccaacgccaaccccaacguggacccgaacgcgaaccccaacgccaaccccaacgccaaccccaacgccaacccgaacgcgaaccccaacgccaaccccaacgccaaccccaacgccaacccgaacgccaaccccaacgcgaaccccaacgccaaccccaacgccaacccgaacgccaaccccaacgccaaccccaacgcgaaccccaacgccaacccgaacgccaaccccaacguggaccccaacgccaaccccaacgccaacccgaacgcgaaccccaacgccaaccccaacgccaacccgaacgccaaccccaacgccaaccccaacgcgaaccccaacgccaacccgaacgccaaccccaacgccaaccccaacgcgaaccccaacgccaacccgaacgccaaccccaacgccaaccccaacgccaaccccaacgcgaacccgaacgccaaccccaacaagaacaaccagggcaacggccaggggcacaacaugcccaacgaccccaaccgcaacgucgacgagaacgccaacgccaacuccgccgugaagaacaacaacaacgaggagccgagcgacaagcacaucaaggaguaccugaacaagauccagaacucccucagcacggaguggucccccugcagcgugaccugcggcaacgggauccagguccggaucaagcccggcuccgcgaacaagcccaaggacgagcuggacuacgccaacgacaucgagaagaagaucugcaagauggagaagugcagcuccguguucaacguggucaacagcuccaucgggcugaucauggugcucagcuuccuguuccugaacugaggacuagugcaucacauuuaaaagcaucucagccuaccaugagaauaagagaaagaaaaugaagaucaauagcuuauucaucucuuuuucuuuuucguugguguaaagccaacacccugucuaaaaaacauaaauuucuuuaaucauuuugccucuuuucucugugcuucaauuaauaaaaaauggaaagaaccuagaucuaaaaaaaaaaaaaaaaaaaaaaaaaaaaaaaaaaaaaaaaaaaaaaaaaaaaaaaaaaaaaaaaugcaucccccccccccccccccccccccccccccccaaaggcucuuuucagagccaccagaauu

SEQ ID NO: 921 - RNA, 1594 nt, Artificial Sequence
  mRNA Design i-2 (A64-N5-C30-hSL-N5) comprising derived and/or modified sequence from Pf(3D7)__XP_001351122.1__HsIns-iso1_Pf-CSP(19-397) (opt1) R5974
ggggcgcugccuacggagguggcagccaucuccuucucggcaucaagcuuaccauggcccuguggaugcgccuccugccccugcucgcccugcuggcgcucuggggcccggaccccgccgccgcccuguuccaggaguaccagugcuacggcuccagcuccaacacccgggugcucaacgagcugaacuacgacaacgcggggaccaaccuguacaacgagcucgagaugaacuacuacggcaagcaggagaacugguacagccugaagaagaacucccgcagccugggggagaacgacgacggcaacaacgaggacaacgagaagcuccggaagcccaagcacaagaagcugaagcagccggccgacgggaaccccgaccccaacgccaaccccaacguggacccgaacgccaaccccaacgucgaccccaacgccaaccccaacguggacccgaacgcgaaccccaacgccaaccccaacgccaaccccaacgccaacccgaacgcgaaccccaacgccaaccccaacgccaaccccaacgccaacccgaacgccaaccccaacgcgaaccccaacgccaaccccaacgccaacccgaacgccaaccccaacgccaaccccaacgcgaaccccaacgccaacccgaacgccaaccccaacguggaccccaacgccaaccccaacgccaacccgaacgcgaaccccaacgccaaccccaacgccaacccgaacgccaaccccaacgccaaccccaacgcgaaccccaacgccaacccgaacgccaaccccaacgccaaccccaacgcgaaccccaacgccaacccgaacgccaaccccaacgccaaccccaacgccaaccccaacgcgaacccgaacgccaaccccaacaagaacaaccagggcaacggccaggggcacaacaugcccaacgaccccaaccgcaacgucgacgagaacgccaacgccaacuccgccgugaagaacaacaacaacgaggagccgagcgacaagcacaucaaggaguaccugaacaagauccagaacucccucagcacggaguggucccccugcagcgugaccugcggcaacgggauccagguccggaucaagcccggcuccgcgaacaagcccaaggacgagcuggacuacgccaacgacaucgagaagaagaucugcaagauggagaagugcagcuccguguucaacguggucaacagcuccaucgggcugaucauggugcucagcuuccuguuccugaacugaggacuagugcaucacauuuaaaagcaucucagccuaccaugagaauaagagaaagaaaaugaagaucaauagcuuauucaucucuuuuucuuuuucguugguguaaagccaacacccugucuaaaaaacauaaauuucuuuaaucauuuugccucuuuucucugugcuucaauuaauaaaaaauggaaagaaccuagaucuaaaaaaaaaaaaaaaaaaaaaaaaaaaaaaaaaaaaaaaaaaaaaaaaaaaaaaaaaaaaaaaaugcaucccccccccccccccccccccccccccccccaaaggcucuuuucagagccaccagaauu

SEQ ID NO: 922 - RNA, 1573 nt, Artificial Sequence
  mRNA Design i-2 (A64-N5-C30-hSL-N5) comprising derived and/or modified sequence from Pf(3D7)__XP_001351122.1__HsSPARC_Pf-CSP(19-397) (opt1) R5972
ggggcgcugccuacggagguggcagccaucuccuucucggcaucaagcuuaccaugcgcgccuggaucuucuuccugcucugccuggccggccgggcccuggcccuguuccaggaguaccagugcuacggcuccagcuccaacacccgggugcucaacgagcugaacuacgacaacgcggggaccaaccuguacaacgagcucgagaugaacuacuacggcaagcaggagaacugguacagccugaagaagaacucccgcagccugggggagaacgacgacggcaacaacgaggacaacgagaagcuccggaagcccaagcacaagaagcugaagcagccggccgacgggaaccccgaccccaacgccaaccccaacguggacccgaacgccaaccccaacgucgaccccaacgccaaccccaacguggacccgaacgcgaaccccaacgccaaccccaacgccaaccccaacgccaacccgaacgcgaaccccaacgccaaccccaacgccaaccccaacgccaacccgaacgccaaccccaacgcgaaccccaacgccaaccccaacgccaacccgaacgccaaccccaacgccaaccccaacgcgaaccccaacgccaacccgaacgccaaccccaacguggaccccaacgccaaccccaacgccaacccgaacgcgaaccccaacgccaaccccaacgccaacccgaacgccaaccccaacgccaaccccaacgcgaaccccaacgccaacccgaacgccaaccccaacgccaaccccaacgcgaaccccaacgccaacccgaacgccaaccccaacgccaaccccaacgccaaccccaacgcgaacccgaacgccaaccccaacaagaacaaccagggcaacggccaggggcacaacaugcccaacgaccccaaccgcaacgucgacgagaacgccaacgccaacuccgccgugaagaacaacaacaacgaggagccgagcgacaagcacaucaaggaguaccugaacaagauccagaacucccucagcacggaguggucccccugcagcgugaccugcggcaacgggauccagguccggaucaagcccggcuccgcgaacaagcccaaggacgagcuggacuacgccaacgacaucgagaagaagaucugcaagauggagaagugcagcuccguguucaacguggucaacagcuccaucgggcugaucauggugcucagcuuccuguuccugaacugaggacuagugcaucacauuuaaaagcaucucagccuaccaugagaauaagagaaagaaaaugaagaucaauagcuuauucaucucuuuuucuuuuucguugguguaaagccaacacccugucuaaaaaacauaaauuucuuuaaucauuuugccucuuuucucugugcuucaauuaauaaaaaauggaaagaaccuagaucuaaaaaaaaaaaaaaaaaaaaaaaaaaaaaaaaaaaaaaaaaaaaaaaaaaaaaaaaaaaaaaaaugcaucccccccccccccccccccccccccccccccaaaggcucuuuucagagccaccagaauu

SEQ ID NO: 923 - RNA, 1576 nt, Artificial Sequence
  mRNA Design i-2 (A64-N5-C30-hSL-N5) comprising derived and/or modified sequence from Pf(3D7)__XP_001351122.1__IgE_Pf-CSP(19-397) (opt1) R5971
ggggcgcugccuacggagguggcagccaucuccuucucggcaucaagcuuaccauggacuggaccuggauccuguuccucguggccgccgcgacccgcguccacagccuguuccaggaguaccagugcuacggcuccagcuccaacacccgggugcucaacgagcugaacuacgacaacgcggggaccaaccuguacaacgagcucgagaugaacuacuacggcaagcaggagaacugguacagccugaagaagaacucccgcagccugggggagaacgacgacggcaacaacgaggacaacgagaagcuccggaagcccaagcacaagaagcugaagcagccggccgacgggaaccccgaccccaacgccaaccccaacguggacccgaacgccaaccccaacgucgaccccaacgccaaccccaacguggacccgaacgcgaaccccaacgccaaccccaacgccaaccccaacgccaacccgaacgcgaaccccaacgccaaccccaacgccaaccccaacgccaacccgaacgccaaccccaacgcgaaccccaacgccaaccccaacgccaacccgaacgccaaccccaacgccaaccccaacgcgaaccccaacgccaacccgaacgccaaccccaacguggaccccaacgccaaccccaacgccaacccgaacgcgaaccccaacgccaaccccaacgccaacccgaacgccaaccccaacgccaaccccaacgcgaaccccaacgccaacccgaacgccaaccccaacgccaaccccaacgcgaaccccaacgccaacccgaacgccaaccccaacgccaaccccaacgccaaccccaacgcgaacccgaacgccaaccccaacaagaacaaccagggcaacggccaggggcacaacaugcccaacgaccccaaccgcaacgucgacgagaacgccaacgccaacuccgccgugaagaacaacaacaacgaggagccgagcgacaagcacaucaaggaguaccugaacaagauccagaacucccucagcacggaguggucccccugcagcgugaccugcggcaacgggauccagguccggaucaagcccggcuccgcgaacaagcccaaggacgagcuggacuacgccaacgacaucgagaagaagaucugcaagauggagaagugcagcuccguguucaacguggucaacagcuccaucgggcugaucauggugcucagcuuccuguuccugaacugaggacuagugcaucacauuuaaaagcaucucagccuaccaugagaauaagagaaagaaaaugaagaucaauagcuuauucaucucuuuuucuuuuucguugguguaaagccaacacccugucuaaaaaacauaaauuucuuuaaucauuuugccucuuuucucugugcuucaauuaauaaaaaauggaaagaaccuagaucuaaaaaaaaaaaaaaaaaaaaaaaaaaaaaaaaaaaaaaaaaaaaaaaaaaaaaaaaaaaaaaaaugcaucccccccccccccccccccccccccccccccaaaggcucuuuucagagccaccagaauu

SEQ ID NO: 924 - RNA, 1741 nt, Artificial Sequence
  mRNA Design i-2 (A64-N5-C30-hSL-N5) comprising derived and/or modified sequence from Pf(3D7)__XP_001351122.1__Pf-CSP_L(G4SG4)_TM domain HA (opt1) R5980
ggggcgcugccuacggagguggcagccaucuccuucucggcaucaagcuuaccaugaugcgcaagcuggccauccucagcguguccagcuuccuguucgucgaggcccuguuccaggaguaccagugcuacggcuccagcuccaacacccgggugcucaacgagcugaacuacgacaacgcggggaccaaccuguacaacgagcucgagaugaacuacuacggcaagcaggagaacugguacagccugaagaagaacucccgcagccugggggagaacgacgacggcaacaacgaggacaacgagaagcuccggaagcccaagcacaagaagcugaagcagccggccgacgggaaccccgaccccaacgccaaccccaacguggacccgaacgccaaccccaacgucgaccccaacgccaaccccaacguggacccgaacgcgaaccccaacgccaaccccaacgccaaccccaacgccaacccgaacgcgaaccccaacgccaaccccaacgccaaccccaacgccaacccgaacgccaaccccaacgcgaaccccaacgccaaccccaacgccaacccgaacgccaaccccaacgccaaccccaacgcgaaccccaacgccaacccgaacgccaaccccaacguggaccccaacgccaaccccaacgccaacccgaacgcgaaccccaacgccaaccccaacgccaacccgaacgccaaccccaacgccaaccccaacgcgaaccccaacgccaacccgaacgccaaccccaacgccaaccccaacgcgaaccccaacgccaacccgaacgccaaccccaacgccaaccccaacgccaaccccaacgcgaacccgaacgccaaccccaacaagaacaaccagggcaacggccaggggcacaacaugcccaacgaccccaaccgcaacgucgacgagaacgccaacgccaacuccgccgugaagaacaacaacaacgaggagccgagcgacaagcacaucaaggaguaccugaacaagauccagaacucccucagcacggaguggucccccugcagcgugaccugcggcaacgggauccagguccggaucaagcccggcuccgcgaacaagcccaaggacgagcuggacuacgccaacgacaucgagaagaagaucugcaagauggagaagugcagcuccguguucaacguggucaacagcuccaucgggcugaucauggugcucagcuuccuguuccugaacggcgggggcgggagcggcgggggcggcaagcucgaguccacgcggaucuaccagauccuggcgaucuacagcaccgucgccagcucccuggugcucguggucagccugggggccaucuccuucuggaugugcagcaacggcucccugcagugccgcaucugcaucugaggacuagugcaucacauuuaaaagcaucucagccuaccaugagaauaagagaaagaaaaugaagaucaauagcuuauucaucucuuuuucuuuuucguugguguaaagccaacacccugucuaaaaaacauaaauuucuuuaaucauuuugccucuuuucucugugcuucaauuaauaaaaaauggaaagaaccuagaucuaaaaaaaaaaaaaaaaaaaaaaaaaaaaaaaaaaaaaaaaaaaaaaaaaaaaaaaaaaaaaaaaugcaucccccccccccccccccccccccccccccccaaaggcucuuuucagagccaccagaauu

SEQ ID NO: 925 - RNA, 1615 nt, Artificial Sequence
  mRNA Design i-2 (A64-N5-C30-hSL-N5) comprising derived and/or modified sequence from Pf(3D7)__XP_001351122.1__Pf-CSP(199-377)_L(PVTN)_HBsAg (opt1)
ggggcgcugccuacggagguggcagccaucuccuucucggcaucaagcuuaccauggaccccaacgccaaccccaacgccaacccgaacgcgaaccccaacgccaaccccaacgccaacccgaacgccaaccccaacgccaaccccaacgcgaaccccaacgccaacccgaacgccaaccccaacgccaaccccaacgcgaaccccaacgccaacccgaacgccaaccccaacgccaaccccaacgccaaccccaacgcgaacccgaacgccaaccccaacaagaacaaccagggcaacggccaggggcacaacaugcccaacgaccccaaccgcaacgucgacgagaacgccaacgccaacuccgccgugaagaacaacaacaacgaggagccgagcgacaagcacaucaaggaguaccugaacaagauccagaacucccucagcacggaguggucccccugcagcgugaccugcggcaacgggauccagguccggaucaagcccggcuccgcgaacaagcccaaggacgagcuggacuacgccaacgacaucgagaagaagaucugcaagauggagaagugcagcuccgugccggugacgaacauggagaacaucaccagcggcuuccuggggccccuccuggugcugcaggccggcuucuuccuccugacccgcauccugaccaucccgcagucccucgacagcugguggaccucccugaacuuccucgggggcagccccgucugccuggggcagaacucccagagccccaccuccaaccacagccccaccuccugcccgcccaucugccccggcuaccgguggaugugccugcgccgguucaucaucuuccuguucauccuccugcugugccucaucuuccugcuggugcuccuggacuaccagggcaugcugcccgugugcccgcucauccccgggagcacgaccaccaacaccggccccugcaagacgugcaccacccccgcccaggggaacuccauguucccgagcugcugcugcaccaagcccacggacggcaacugcacgugcauccccauccccuccagcugggcguucgccaaguaccugugggagugggccuccguccgcuucagcuggcugucccuccuggugccguucgugcagugguucgucgggcugagccccaccguguggcucuccgccaucuggaugaugugguacuggggccccagccuguacagcaucgugucccccuucaucccgcugcuccccaucuucuucugccugugggucuacaucugaggacuagugcaucacauuuaaaagcaucucagccuaccaugagaauaagagaaagaaaaugaagaucaauagcuuauucaucucuuuuucuuuuucguugguguaaagccaacacccugucuaaaaaacauaaauuucuuuaaucauuuugccucuuuucucugugcuucaauuaauaaaaaauggaaagaaccuagaucuaaaaaaaaaaaaaaaaaaaaaaaaaaaaaaaaaaaaaaaaaaaaaaaaaaaaaaaaaaaaaaaaugcaucccccccccccccccccccccccccccccccaaaggcucuuuucagagccaccagaauu

SEQ ID NO: 926 - RNA, 1657 nt, Artificial Sequence
  mRNA Design i-2 (A64-N5-C30-hSL-N5) comprising derived and/or modified sequence from Pf(3D7)__XP_001351122.1__Pf-CSP(199-387)_L(PVTN)_HBsAg (opt1)
ggggcgcugccuacggagguggcagccaucuccuucucggcaucaagcuuaccaugauggccccggaccccaacgccaaccccaacgccaacccgaacgcgaaccccaacgccaaccccaacgccaacccgaacgccaaccccaacgccaaccccaacgcgaaccccaacgccaacccgaacgccaaccccaacgccaaccccaacgcgaaccccaacgccaacccgaacgccaaccccaacgccaaccccaacgccaaccccaacgcgaacccgaacgccaaccccaacaagaacaaccagggcaacggccaggggcacaacaugcccaacgaccccaaccgcaacgucgacgagaacgccaacgccaacuccgccgugaagaacaacaacaacgaggagccgagcgacaagcacaucaaggaguaccugaacaagauccagaacucccucagcacggaguggucccccugcagcgugaccugcggcaacgggauccagguccggaucaagcccggcuccgcgaacaagcccaaggacgagcuggacuacgccaacgacaucgagaagaagaucugcaagauggagaagugcagcuccguguucaacguggucaacagcuccaucgggcuggggccggugacgaacauggagaacaucaccagcggcuuccuggggccccuccuggugcugcaggccggcuucuuccuccugacccgcauccugaccaucccgcagucccucgacagcugguggaccucccugaacuuccucgggggcagccccgucugccuggggcagaacucccagagccccaccuccaaccacagccccaccuccugcccgcccaucugccccggcuaccgguggaugugccugcgccgguucaucaucuuccuguucauccuccugcugugccucaucuuccugcuggugcuccuggacuaccagggcaugcugcccgugugcccgcucauccccgggagcacgaccaccaacaccggccccugcaagacgugcaccacccccgcccaggggaacuccauguucccgagcugcugcugcaccaagcccacggacggcaacugcacgugcauccccauccccuccagcugggcguucgccaaguaccugugggagugggccuccguccgcuucagcuggcugucccuccuggugccguucgugcagugguucgucgggcugagccccaccguguggcucuccgccaucuggaugaugugguacuggggccccagccuguacagcaucgugucccccuucaucccgcugcuccccaucuucuucugccugugggucuacaucugaggacuagugcaucacauuuaaaagcaucucagccuaccaugagaauaagagaaagaaaaugaagaucaauagcuuauucaucucuuuuucuuuuucguugguguaaagccaacacccugucuaaaaaacauaaauuucuuuaaucauuuugccucuuuucucugugcuucaauuaauaaaaaauggaaagaaccuagaucuaaaaaaaaaaaaaaaaaaaaaaaaaaaaaaaaaaaaaaaaaaaaaaaaaaaaaaaaaaaaaaaaugcaucccccccccccccccccccccccccccccccaaaggcucuuuucagagccaccagaauu

SEQ ID NO: 927 - RNA, 841 nt, Artificial Sequence
  mRNA Design i-2 (A64-N5-C30-hSL-N5) comprising derived and/or modified sequence from Pf(3D7)__XP_001351122.1__HsALB_Pf-CSP(19-152) (opt1)
ggggcgcugccuacggagguggcagccaucuccuucucggcaucaagcuuaccaugaagugggugaccuucaucagccugcucuuccuguucuccagcgccuacucccuguuccaggaguaccagugcuacggcuccagcuccaacacccgggugcucaacgagcugaacuacgacaacgcggggaccaaccuguacaacgagcucgagaugaacuacuacggcaagcaggagaacugguacagccugaagaagaacucccgcagccugggggagaacgacgacggcaacaacgaggacaacgagaagcuccggaagcccaagcacaagaagcugaagcagccggccgacgggaaccccgaccccaacgccaaccccaacguggacccgaacgccaaccccaacgucgaccccaacgccaaccccaacguggacccgaacgcgaaccccaacgccaaccccaacgccaaccccaacgccaacccgaacgcgaaccccaacgccaaccccugaggacuagugcaucacauuuaaaagcaucucagccuaccaugagaauaagagaaagaaaaugaagaucaauagcuuauucaucucuuuuucuuuuucguugguguaaagccaacacccugucuaaaaaacauaaauuucuuuaaucauuuugccucuuuucucugugcuucaauuaauaaaaaauggaaagaaccuagaucuaaaaaaaaaaaaaaaaaaaaaaaaaaaaaaaaaaaaaaaaaaaaaaaaaaaaaaaaaaaaaaaaugcaucccccccccccccccccccccccccccccccaaaggcucuuuucagagccaccagaauu

SEQ ID NO: 928 - RNA, 961 nt, Artificial Sequence
  mRNA Design i-2 (A64-N5-C30-hSL-N5) comprising derived and/or modified sequence from Pf(3D7)__XP_001351122.1__HsALB_Pf-CSP(19-192) (opt1)
ggggcgcugccuacggagguggcagccaucuccuucucggcaucaagcuuaccaugaagugggugaccuucaucagccugcucuuccuguucuccagcgccuacucccuguuccaggaguaccagugcuacggcuccagcuccaacacccgggugcucaacgagcugaacuacgacaacgcggggaccaaccuguacaacgagcucgagaugaacuacuacggcaagcaggagaacugguacagccugaagaagaacucccgcagccugggggagaacgacgacggcaacaacgaggacaacgagaagcuccggaagcccaagcacaagaagcugaagcagccggccgacgggaaccccgaccccaacgccaaccccaacguggacccgaacgccaaccccaacgucgaccccaacgccaaccccaacguggacccgaacgcgaaccccaacgccaaccccaacgccaaccccaacgccaacccgaacgcgaaccccaacgccaaccccaacgccaaccccaacgccaacccgaacgccaaccccaacgcgaaccccaacgccaaccccaacgccaacccgaacgccaaccccaacgccaaccccaacgcgaaccccaacgccaacccgugaggacuagugcaucacauuuaaaagcaucucagccuaccaugagaauaagagaaagaaaaugaagaucaauagcuuauucaucucuuuuucuuuuucguugguguaaagccaacacccugucuaaaaaacauaaauuucuuuaaucauuuugccucuuuucucugugcuucaauuaauaaaaaauggaaagaaccuagaucuaaaaaaaaaaaaaaaaaaaaaaaaaaaaaaaaaaaaaaaaaaaaaaaaaaaaaaaaaaaaaaaaugcaucccccccccccccccccccccccccccccccaaaggcucuuuucagagccaccagaauu

SEQ ID NO: 929 - RNA, 1201 nt, Artificial Sequence
  mRNA Design i-2 (A64-N5-C30-hSL-N5) comprising derived and/or modified sequence from Pf(3D7)__XP_001351122.1__HsALB_Pf-CSP(19-272) (opt1)
ggggcgcugccuacggagguggcagccaucuccuucucggcaucaagcuuaccaugaagugggugaccuucaucagccugcucuuccuguucuccagcgccuacucccuguuccaggaguaccagugcuacggcuccagcuccaacacccgggugcucaacgagcugaacuacgacaacgcggggaccaaccuguacaacgagcucgagaugaacuacuacggcaagcaggagaacugguacagccugaagaagaacucccgcagccugggggagaacgacgacggcaacaacgaggacaacgagaagcuccggaagcccaagcacaagaagcugaagcagccggccgacgggaaccccgaccccaacgccaaccccaacguggacccgaacgccaaccccaacgucgaccccaacgccaaccccaacguggacccgaacgcgaaccccaacgccaaccccaacgccaaccccaacgccaacccgaacgcgaaccccaacgccaaccccaacgccaaccccaacgccaacccgaacgccaaccccaacgcgaaccccaacgccaaccccaacgccaacccgaacgccaaccccaacgccaaccccaacgcgaaccccaacgccaacccgaacgccaaccccaacguggaccccaacgccaaccccaacgccaacccgaacgcgaaccccaacgccaaccccaacgccaacccgaacgccaaccccaacgccaaccccaacgcgaaccccaacgccaacccgaacgccaaccccaacgccaaccccaacgcgaaccccaacgccaacccgaacgccaaccccaacgccaaccccaacgccaaccccaacgcgaacccgaacgccaaccccugaggacuagugcaucacauuuaaaagcaucucagccuaccaugagaauaagagaaagaaaaugaagaucaauagcuuauucaucucuuuuucuuuuucguugguguaaagccaacacccugucuaaaaaacauaaauuucuuuaaucauuuugccucuuuucucugugcuucaauuaauaaaaaauggaaagaaccuagaucuaaaaaaaaaaaaaaaaaaaaaaaaaaaaaaaaaaaaaaaaaaaaaaaaaaaaaaaaaaaaaaaaugcaucccccccccccccccccccccccccccccccaaaggcucuuuucagagccaccagaauu

SEQ ID NO: 930 - RNA, 1363 nt, Artificial Sequence
  mRNA Design i-2 (A64-N5-C30-hSL-N5) comprising derived and/or modified sequence from Pf(3D7)__XP_001351122.1__HsALB_Pf-CSP(19-272)_L(AAY)_Pf-CSP(310-3 27)_L(AAY)_Pf-CSP(346-375) (opt1)
ggggcgcugccuacggagguggcagccaucuccuucucggcaucaagcuuaccaugaagugggugaccuucaucagccugcucuuccuguucuccagcgccuacucccuguuccaggaguaccagugcuacggcuccagcuccaacacccgggugcucaacgagcugaacuacgacaacgcggggaccaaccuguacaacgagcucgagaugaacuacuacggcaagcaggagaacugguacagccugaagaagaacucccgcagccugggggagaacgacgacggcaacaacgaggacaacgagaagcuccggaagcccaagcacaagaagcugaagcagccggccgacgggaaccccgaccccaacgccaaccccaacguggacccgaacgccaaccccaacgucgaccccaacgccaaccccaacguggacccgaacgcgaaccccaacgccaaccccaacgccaaccccaacgccaacccgaacgcgaaccccaacgccaaccccaacgccaaccccaacgccaacccgaacgccaaccccaacgcgaaccccaacgccaaccccaacgccaacccgaacgccaaccccaacgccaaccccaacgcgaaccccaacgccaacccgaacgccaaccccaacguggaccccaacgccaaccccaacgccaacccgaacgcgaaccccaacgccaaccccaacgccaacccgaacgccaaccccaacgccaaccccaacgcgaaccccaacgccaacccgaacgccaaccccaacgccaaccccaacgcgaaccccaacgccaacccgaacgccaaccccaacgccaaccccaacgccaaccccaacgcgaacccgaacgccaaccccgccgcguaugagccgagcgacaagcacaucaaggaguaccugaacaagauccagaacucccucgcggccuacaucaagcccggcuccgcgaacaagcccaaggacgagcuggacuacgccaacgacaucgagaagaagaucugcaagauggagaagugcagcugaggacuagugcaucacauuuaaaagcaucucagccuaccaugagaauaagagaaagaaaaugaagaucaauagcuuauucaucucuuuuucuuuuucguugguguaaagccaacacccugucuaaaaaacauaaauuucuuuaaucauuuugccucuuuucucugugcuucaauuaauaaaaaauggaaagaaccuagaucuaaaaaaaaaaaaaaaaaaaaaaaaaaaaaaaaaaaaaaaaaaaaaaaaaaaaaaaaaaaaaaaaugcaucccccccccccccccccccccccccccccccaaaggcucuuuucagagccaccagaauu

SEQ ID NO: 931 - RNA, 1324 nt, Artificial Sequence
  mRNA Design i-2 (A64-N5-C30-hSL-N5) comprising derived and/or modified sequence from Pf(3D7)__XP_001351122.1__HsALB_Pf-CSP(19-272)_L(AAY)_Pf-CSP(346-3 65)_L(AAY)_P2 (opt1)
ggggcgcugccuacggagguggcagccaucuccuucucggcaucaagcuuaccaugaagugggugaccuucaucagccugcucuuccuguucuccagcgccuacucccuguuccaggaguaccagugcuacggcuccagcuccaacacccgggugcucaacgagcugaacuacgacaacgcggggaccaaccuguacaacgagcucgagaugaacuacuacggcaagcaggagaacugguacagccugaagaagaacucccgcagccugggggagaacgacgacggcaacaacgaggacaacgagaagcuccggaagcccaagcacaagaagcugaagcagccggccgacgggaaccccgaccccaacgccaaccccaacguggacccgaacgccaaccccaacgucgaccccaacgccaaccccaacguggacccgaacgcgaaccccaacgccaaccccaacgccaaccccaacgccaacccgaacgcgaaccccaacgccaaccccaacgccaaccccaacgccaacccgaacgccaaccccaacgcgaaccccaacgccaaccccaacgccaacccgaacgccaaccccaacgccaaccccaacgcgaaccccaacgccaacccgaacgccaaccccaacguggaccccaacgccaaccccaacgccaacccgaacgcgaaccccaacgccaaccccaacgccaacccgaacgccaaccccaacgccaaccccaacgcgaaccccaacgccaacccgaacgccaaccccaacgccaaccccaacgcgaaccccaacgccaacccgaacgccaaccccaacgccaaccccaacgccaaccccaacgcgaacccgaacgccaaccccgccgcguauaucaagcccggcuccgcgaacaagcccaaggacgagcuggacuacgccaacgacaucgaggcggccuaccaguacaucaaggccaacagcaaguucaucggcaucaccgagcugugaggacuagugcaucacauuuaaaagcaucucagccuaccaugagaauaagagaaagaaaaugaagaucaauagcuuauucaucucuuuuucuuuuucguugguguaaagccaacacccugucuaaaaaacauaaauuucuuuaaucauuuugccucuuuucucugugcuucaauuaauaaaaaauggaaagaaccuagaucuaaaaaaaaaaaaaaaaaaaaaaaaaaaaaaaaaaaaaaaaaaaaaaaaaaaaaaaaaaaaaaaaugcaucccccccccccccccccccccccccccccccaaaggcucuuuucagagccaccagaauu

SEQ ID NO: 932 - RNA, 1318 nt, Artificial Sequence
  mRNA Design i-2 (A64-N5-C30-hSL-N5) comprising derived and/or modified sequence from Pf(3D7)__XP_001351122.1__HsALB_Pf-CSP(19-272)_L(AAY)_Pf-CSP(346-3 65)_L(AAY)_PADRE (opt1)
ggggcgcugccuacggagguggcagccaucuccuucucggcaucaagcuuaccaugaagugggugaccuucaucagccugcucuuccuguucuccagcgccuacucccuguuccaggaguaccagugcuacggcuccagcuccaacacccgggugcucaacgagcugaacuacgacaacgcggggaccaaccuguacaacgagcucgagaugaacuacuacggcaagcaggagaacugguacagccugaagaagaacucccgcagccugggggagaacgacgacggcaacaacgaggacaacgagaagcuccggaagcccaagcacaagaagcugaagcagccggccgacgggaaccccgaccccaacgccaaccccaacguggacccgaacgccaaccccaacgucgaccccaacgccaaccccaacguggacccgaacgcgaaccccaacgccaaccccaacgccaaccccaacgccaacccgaacgcgaaccccaacgccaaccccaacgccaaccccaacgccaacccgaacgccaaccccaacgcgaaccccaacgccaaccccaacgccaacccgaacgccaaccccaacgccaaccccaacgcgaaccccaacgccaacccgaacgccaaccccaacguggaccccaacgccaaccccaacgccaacccgaacgcgaaccccaacgccaaccccaacgccaacccgaacgccaaccccaacgccaaccccaacgcgaaccccaacgccaacccgaacgccaaccccaacgccaaccccaacgcgaaccccaacgccaacccgaacgccaaccccaacgccaaccccaacgccaaccccaacgcgaacccgaacgccaaccccgccgcguauaucaagcccggcuccgcgaacaagcccaaggacgagcuggacuacgccaacgacaucgaggcggccuacgccaaguucguggccgccuggacccugaaggcggccgccugaggacuagugcaucacauuuaaaagcaucucagccuaccaugagaauaagagaaagaaaaugaagaucaauagcuuauucaucucuuuuucuuuuucguugguguaaagccaacacccugucuaaaaaacauaaauuucuuuaaucauuuugccucuuuucucugugcuucaauuaauaaaaaauggaaagaaccuagaucuaaaaaaaaaaaaaaaaaaaaaaaaaaaaaaaaaaaaaaaaaaaaaaaaaaaaaaaaaaaaaaaaugcaucccccccccccccccccccccccccccccccaaaggcucuuuucagagccaccagaauu

SEQ ID NO: 933 - RNA, 1375 nt, Artificial Sequence
  mRNA Design i-2 (A64-N5-C30-hSL-N5) comprising derived and/or modified sequence from Pf(3D7)__XP_001351122.1__HsALB_Pf-CSP(19-272)_L(G4S)_Pf-CSP(310-3 27)_L(G4S)_Pf-CSP(346-375) (opt1)
ggggcgcugccuacggagguggcagccaucuccuucucggcaucaagcuuaccaugaagugggugaccuucaucagccugcucuuccuguucuccagcgccuacucccuguuccaggaguaccagugcuacggcuccagcuccaacacccgggugcucaacgagcugaacuacgacaacgcggggaccaaccuguacaacgagcucgagaugaacuacuacggcaagcaggagaacugguacagccugaagaagaacucccgcagccugggggagaacgacgacggcaacaacgaggacaacgagaagcuccggaagcccaagcacaagaagcugaagcagccggccgacgggaaccccgaccccaacgccaaccccaacguggacccgaacgccaaccccaacgucgaccccaacgccaaccccaacguggacccgaacgcgaaccccaacgccaaccccaacgccaaccccaacgccaacccgaacgcgaaccccaacgccaaccccaacgccaaccccaacgccaacccgaacgccaaccccaacgcgaaccccaacgccaaccccaacgccaacccgaacgccaaccccaacgccaaccccaacgcgaaccccaacgccaacccgaacgccaaccccaacguggaccccaacgccaaccccaacgccaacccgaacgcgaaccccaacgccaaccccaacgccaacccgaacgccaaccccaacgccaaccccaacgcgaaccccaacgccaacccgaacgccaaccccaacgccaaccccaacgcgaaccccaacgccaacccgaacgccaaccccaacgccaaccccaacgccaaccccaacgcgaacccgaacgccaaccccggaggcggaggaucugagccgagcgacaagcacaucaaggaguaccugaacaagauccagaacucccucggcggagguggaaguaucaagcccggcuccgcgaacaagcccaaggacgagcuggacuacgccaacgacaucgagaagaagaucugcaagauggagaagugcagcugaggacuagugcaucacauuuaaaagcaucucagccuaccaugagaauaagagaaagaaaaugaagaucaauagcuuauucaucucuuuuucuuuuucguugguguaaagccaacacccugucuaaaaaacauaaauuucuuuaaucauuuugccucuuuucucugugcuucaauuaauaaaaaauggaaagaaccuagaucuaaaaaaaaaaaaaaaaaaaaaaaaaaaaaaaaaaaaaaaaaaaaaaaaaaaaaaaaaaaaaaaaugcaucccccccccccccccccccccccccccccccaaaggcucuuuucagagccaccagaauu

SEQ ID NO: 934 - RNA, 1360 nt, Artificial Sequence
  mRNA Design i-2 (A64-N5-C30-hSL-N5) comprising derived and/or modified sequence from Pf(3D7)__XP_001351122.1__HsALB_Pf-CSP(19-272)_L(G4S)_Pf-CSP(310-3 27)_Pf-CSP(346-375) (opt1)
ggggcgcugccuacggagguggcagccaucuccuucucggcaucaagcuuaccaugaagugggugaccuucaucagccugcucuuccuguucuccagcgccuacucccuguuccaggaguaccagugcuacggcuccagcuccaacacccgggugcucaacgagcugaacuacgacaacgcggggaccaaccuguacaacgagcucgagaugaacuacuacggcaagcaggagaacugguacagccugaagaagaacucccgcagccugggggagaacgacgacggcaacaacgaggacaacgagaagcuccggaagcccaagcacaagaagcugaagcagccggccgacgggaaccccgaccccaacgccaaccccaacguggacccgaacgccaaccccaacgucgaccccaacgccaaccccaacguggacccgaacgcgaaccccaacgccaaccccaacgccaaccccaacgccaacccgaacgcgaaccccaacgccaaccccaacgccaaccccaacgccaacccgaacgccaaccccaacgcgaaccccaacgccaaccccaacgccaacccgaacgccaaccccaacgccaaccccaacgcgaaccccaacgccaacccgaacgccaaccccaacguggaccccaacgccaaccccaacgccaacccgaacgcgaaccccaacgccaaccccaacgccaacccgaacgccaaccccaacgccaaccccaacgcgaaccccaacgccaacccgaacgccaaccccaacgccaaccccaacgcgaaccccaacgccaacccgaacgccaaccccaacgccaaccccaacgccaaccccaacgcgaacccgaacgccaaccccggaggcggaggaucugagccgagcgacaagcacaucaaggaguaccugaacaagauccagaacucccucaucaagcccggcuccgcgaacaagcccaaggacgagcuggacuacgccaacgacaucgagaagaagaucugcaagauggagaagugcagcugaggacuagugcaucacauuuaaaagcaucucagccuaccaugagaauaagagaaagaaaaugaagaucaauagcuuauucaucucuuuuucuuuuucguugguguaaagccaacacccugucuaaaaaacauaaauuucuuuaaucauuuugccucuuuucucugugcuucaauuaauaaaaaauggaaagaaccuagaucuaaaaaaaaaaaaaaaaaaaaaaaaaaaaaaaaaaaaaaaaaaaaaaaaaaaaaaaaaaaaaaaaugcaucccccccccccccccccccccccccccccccaaaggcucuuuucagagccaccagaauu

SEQ ID NO: 935 - RNA, 1360 nt, Artificial Sequence
  mRNA Design i-2 (A64-N5-C30-hSL-N5) comprising derived and/or modified sequence from Pf(3D7)__XP_001351122.1__HsALB_Pf-CSP(19-325) (opt1)
ggggcgcugccuacggagguggcagccaucuccuucucggcaucaagcuuaccaugaagugggugaccuucaucagccugcucuuccuguucuccagcgccuacucccuguuccaggaguaccagugcuacggcuccagcuccaacacccgggugcucaacgagcugaacuacgacaacgcggggaccaaccuguacaacgagcucgagaugaacuacuacggcaagcaggagaacugguacagccugaagaagaacucccgcagccugggggagaacgacgacggcaacaacgaggacaacgagaagcuccggaagcccaagcacaagaagcugaagcagccggccgacgggaaccccgaccccaacgccaaccccaacguggacccgaacgccaaccccaacgucgaccccaacgccaaccccaacguggacccgaacgcgaaccccaacgccaaccccaacgccaaccccaacgccaacccgaacgcgaaccccaacgccaaccccaacgccaaccccaacgccaacccgaacgccaaccccaacgcgaaccccaacgccaaccccaacgccaacccgaacgccaaccccaacgccaaccccaacgcgaaccccaacgccaacccgaacgccaaccccaacguggaccccaacgccaaccccaacgccaacccgaacgcgaaccccaacgccaaccccaacgccaacccgaacgccaaccccaacgccaaccccaacgcgaaccccaacgccaacccgaacgccaaccccaacgccaaccccaacgcgaaccccaacgccaacccgaacgccaaccccaacgccaaccccaacgccaaccccaacgcgaacccgaacgccaaccccaacaagaacaaccagggcaacggccaggggcacaacaugcccaacgaccccaaccgcaacgucgacgagaacgccaacgccaacuccgccgugaagaacaacaacaacgaggagccgagcgacaagcacaucaaggaguaccugaacaagauccagaacugaggacuagugcaucacauuuaaaagcaucucagccuaccaugagaauaagagaaagaaaaugaagaucaauagcuuauucaucucuuuuucuuuuucguugguguaaagccaacacccugucuaaaaaacauaaauuucuuuaaucauuuugccucuuuucucugugcuucaauuaauaaaaaauggaaagaaccuagaucuaaaaaaaaaaaaaaaaaaaaaaaaaaaaaaaaaaaaaaaaaaaaaaaaaaaaaaaaaaaaaaaaugcaucccccccccccccccccccccccccccccccaaaggcucuuuucagagccaccagaauu

SEQ ID NO: 936 - RNA, 1537 nt, Artificial Sequence
  mRNA Design i-2 (A64-N5-C30-hSL-N5) comprising derived and/or modified sequence from Pf(3D7)__XP_001351122.1__HsALB_Pf-CSP(19-384) (opt1)
ggggcgcugccuacggagguggcagccaucuccuucucggcaucaagcuuaccaugaagugggugaccuucaucagccugcucuuccuguucuccagcgccuacucccuguuccaggaguaccagugcuacggcuccagcuccaacacccgggugcucaacgagcugaacuacgacaacgcggggaccaaccuguacaacgagcucgagaugaacuacuacggcaagcaggagaacugguacagccugaagaagaacucccgcagccugggggagaacgacgacggcaacaacgaggacaacgagaagcuccggaagcccaagcacaagaagcugaagcagccggccgacgggaaccccgaccccaacgccaaccccaacguggacccgaacgccaaccccaacgucgaccccaacgccaaccccaacguggacccgaacgcgaaccccaacgccaaccccaacgccaaccccaacgccaacccgaacgcgaaccccaacgccaaccccaacgccaaccccaacgccaacccgaacgccaaccccaacgcgaaccccaacgccaaccccaacgccaacccgaacgccaaccccaacgccaaccccaacgcgaaccccaacgccaacccgaacgccaaccccaacguggaccccaacgccaaccccaacgccaacccgaacgcgaaccccaacgccaaccccaacgccaacccgaacgccaaccccaacgccaaccccaacgcgaaccccaacgccaacccgaacgccaaccccaacgccaaccccaacgcgaaccccaacgccaacccgaacgccaaccccaacgccaaccccaacgccaaccccaacgcgaacccgaacgccaaccccaacaagaacaaccagggcaacggccaggggcacaacaugcccaacgaccccaaccgcaacgucgacgagaacgccaacgccaacuccgccgugaagaacaacaacaacgaggagccgagcgacaagcacaucaaggaguaccugaacaagauccagaacucccucagcacggaguggucccccugcagcgugaccugcggcaacgggauccagguccggaucaagcccggcuccgcgaacaagcccaaggacgagcuggacuacgccaacgacaucgagaagaagaucugcaagauggagaagugcagcuccguguucaacguggucaacagcuccugaggacuagugcaucacauuuaaaagcaucucagccuaccaugagaauaagagaaagaaaaugaagaucaauagcuuauucaucucuuuuucuuuuucguugguguaaagccaacacccugucuaaaaaacauaaauuucuuuaaucauuuugccucuuuucucugugcuucaauuaauaaaaaauggaaagaaccuagaucuaaaaaaaaaaaaaaaaaaaaaaaaaaaaaaaaaaaaaaaaaaaaaaaaaaaaaaaaaaaaaaaaugcaucccccccccccccccccccccccccccccccaaaggcucuuuucagagccaccagaauu

SEQ ID NO: 937 - RNA, 1675 nt, Artificial Sequence
  mRNA Design i-2 (A64-N5-C30-hSL-N5) comprising derived and/or modified sequence from Pf(3D7)__XP_001351122.1__HsALB_Pf-CSP(19-384)_TM domain HA (opt1)
ggggcgcugccuacggagguggcagccaucuccuucucggcaucaagcuuaccaugaagugggugaccuucaucagccugcucuuccuguucuccagcgccuacucccuguuccaggaguaccagugcuacggcuccagcuccaacacccgggugcucaacgagcugaacuacgacaacgcggggaccaaccuguacaacgagcucgagaugaacuacuacggcaagcaggagaacugguacagccugaagaagaacucccgcagccugggggagaacgacgacggcaacaacgaggacaacgagaagcuccggaagcccaagcacaagaagcugaagcagccggccgacgggaaccccgaccccaacgccaaccccaacguggacccgaacgccaaccccaacgucgaccccaacgccaaccccaacguggacccgaacgcgaaccccaacgccaaccccaacgccaaccccaacgccaacccgaacgcgaaccccaacgccaaccccaacgccaaccccaacgccaacccgaacgccaaccccaacgcgaaccccaacgccaaccccaacgccaacccgaacgccaaccccaacgccaaccccaacgcgaaccccaacgccaacccgaacgccaaccccaacguggaccccaacgccaaccccaacgccaacccgaacgcgaaccccaacgccaaccccaacgccaacccgaacgccaaccccaacgccaaccccaacgcgaaccccaacgccaacccgaacgccaaccccaacgccaaccccaacgcgaaccccaacgccaacccgaacgccaaccccaacgccaaccccaacgccaaccccaacgcgaacccgaacgccaaccccaacaagaacaaccagggcaacggccaggggcacaacaugcccaacgaccccaaccgcaacgucgacgagaacgccaacgccaacuccgccgugaagaacaacaacaacgaggagccgagcgacaagcacaucaaggaguaccugaacaagauccagaacucccucagcacggaguggucccccugcagcgugaccugcggcaacgggauccagguccggaucaagcccggcuccgcgaacaagcccaaggacgagcuggacuacgccaacgacaucgagaagaagaucugcaagauggagaagugcagcuccguguucaacguggucaacagcuccaagcucgaguccacgcggaucuaccagauccuggcgaucuacagcaccgucgccagcucccuggugcucguggucagccugggggccaucuccuucuggaugugcagcaacggcucccugcagugccgcaucugcaucugaggacuagugcaucacauuuaaaagcaucucagccuaccaugagaauaagagaaagaaaaugaagaucaauagcuuauucaucucuuuuucuuuuucguugguguaaagccaacacccugucuaaaaaacauaaauuucuuuaaucauuuugccucuuuucucugugcuucaauuaauaaaaaauggaaagaaccuagaucuaaaaaaaaaaaaaaaaaaaaaaaaaaaaaaaaaaaaaaaaaaaaaaaaaaaaaaaaaaaaaaaaugcaucccccccccccccccccccccccccccccccaaaggcucuuuucagagccaccagaauu

SEQ ID NO: 938 - RNA, 1387 nt, Artificial Sequence
  mRNA Design i-2 (A64-N5-C30-hSL-N5) comprising derived and/or modified sequence from Pf(3D7)__XP_001351122.1__HsALB_Pf-CSP(82-397) (opt1)
ggggcgcugccuacggagguggcagccaucuccuucucggcaucaagcuuaccaugaagugggugaccuucaucagccugcucuuccuguucuccagcgccuacuccgacaacgagaagcuccggaagcccaagcacaagaagcugaagcagccggccgacgggaaccccgaccccaacgccaaccccaacguggacccgaacgccaaccccaacgucgaccccaacgccaaccccaacguggacccgaacgcgaaccccaacgccaaccccaacgccaaccccaacgccaacccgaacgcgaaccccaacgccaaccccaacgccaaccccaacgccaacccgaacgccaaccccaacgcgaaccccaacgccaaccccaacgccaacccgaacgccaaccccaacgccaaccccaacgcgaaccccaacgccaacccgaacgccaaccccaacguggaccccaacgccaaccccaacgccaacccgaacgcgaaccccaacgccaaccccaacgccaacccgaacgccaaccccaacgccaaccccaacgcgaaccccaacgccaacccgaacgccaaccccaacgccaaccccaacgcgaaccccaacgccaacccgaacgccaaccccaacgccaaccccaacgccaaccccaacgcgaacccgaacgccaaccccaacaagaacaaccagggcaacggccaggggcacaacaugcccaacgaccccaaccgcaacgucgacgagaacgccaacgccaacuccgccgugaagaacaacaacaacgaggagccgagcgacaagcacaucaaggaguaccugaacaagauccagaacucccucagcacggaguggucccccugcagcgugaccugcggcaacgggauccagguccggaucaagcccggcuccgcgaacaagcccaaggacgagcuggacuacgccaacgacaucgagaagaagaucugcaagauggagaagugcagcuccguguucaacguggucaacagcuccaucgggcugaucauggugcucagcuuccuguuccugaacugaggacuagugcaucacauuuaaaagcaucucagccuaccaugagaauaagagaaagaaaaugaagaucaauagcuuauucaucucuuuuucuuuuucguugguguaaagccaacacccugucuaaaaaacauaaauuucuuuaaucauuuugccucuuuucucugugcuucaauuaauaaaaaauggaaagaaccuagaucuaaaaaaaaaaaaaaaaaaaaaaaaaaaaaaaaaaaaaaaaaaaaaaaaaaaaaaaaaaaaaaaaugcaucccccccccccccccccccccccccccccccaaaggcucuuuucagagccaccagaauu

SEQ ID NO: 939 - RNA, 739 nt, Artificial Sequence
  mRNA Design i-2 (A64-N5-C30-hSL-N5) comprising derived and/or modified sequence from Pf(3D7)__XP_001351122.1__HsALB_Pf-CSP(93-192) (opt1)
ggggcgcugccuacggagguggcagccaucuccuucucggcaucaagcuuaccaugaagugggugaccuucaucagccugcucuuccuguucuccagcgccuacuccaagcugaagcagccggccgacgggaaccccgaccccaacgccaaccccaacguggacccgaacgccaaccccaacgucgaccccaacgccaaccccaacguggacccgaacgcgaaccccaacgccaaccccaacgccaaccccaacgccaacccgaacgcgaaccccaacgccaaccccaacgccaaccccaacgccaacccgaacgccaaccccaacgcgaaccccaacgccaaccccaacgccaacccgaacgccaaccccaacgccaaccccaacgcgaaccccaacgccaacccgugaggacuagugcaucacauuuaaaagcaucucagccuaccaugagaauaagagaaagaaaaugaagaucaauagcuuauucaucucuuuuucuuuuucguugguguaaagccaacacccugucuaaaaaacauaaauuucuuuaaucauuuugccucuuuucucugugcuucaauuaauaaaaaauggaaagaaccuagaucuaaaaaaaaaaaaaaaaaaaaaaaaaaaaaaaaaaaaaaaaaaaaaaaaaaaaaaaaaaaaaaaaugcaucccccccccccccccccccccccccccccccaaaggcucuuuucagagccaccagaauu

SEQ ID NO: 940 - RNA, 979 nt, Artificial Sequence
  mRNA Design i-2 (A64-N5-C30-hSL-N5) comprising derived and/or modified sequence from Pf(3D7)__XP_001351122.1__HsALB_Pf-CSP(93-272) (opt1)
ggggcgcugccuacggagguggcagccaucuccuucucggcaucaagcuuaccaugaagugggugaccuucaucagccugcucuuccuguucuccagcgccuacuccaagcugaagcagccggccgacgggaaccccgaccccaacgccaaccccaacguggacccgaacgccaaccccaacgucgaccccaacgccaaccccaacguggacccgaacgcgaaccccaacgccaaccccaacgccaaccccaacgccaacccgaacgcgaaccccaacgccaaccccaacgccaaccccaacgccaacccgaacgccaaccccaacgcgaaccccaacgccaaccccaacgccaacccgaacgccaaccccaacgccaaccccaacgcgaaccccaacgccaacccgaacgccaaccccaacguggaccccaacgccaaccccaacgccaacccgaacgcgaaccccaacgccaaccccaacgccaacccgaacgccaaccccaacgccaaccccaacgcgaaccccaacgccaacccgaacgccaaccccaacgccaaccccaacgcgaaccccaacgccaacccgaacgccaaccccaacgccaaccccaacgccaaccccaacgcgaacccgaacgccaaccccugaggacuagugcaucacauuuaaaagcaucucagccuaccaugagaauaagagaaagaaaaugaagaucaauagcuuauucaucucuuuuucuuuuucguugguguaaagccaacacccugucuaaaaaacauaaauuucuuuaaucauuuugccucuuuucucugugcuucaauuaauaaaaaauggaaagaaccuagaucuaaaaaaaaaaaaaaaaaaaaaaaaaaaaaaaaaaaaaaaaaaaaaaaaaaaaaaaaaaaaaaaaugcaucccccccccccccccccccccccccccccccaaaggcucuuuucagagccaccagaauu

SEQ ID NO: 941 - RNA, 1354 nt, Artificial Sequence
  mRNA Design i-2 (A64-N5-C30-hSL-N5) comprising derived and/or modified sequence from Pf(3D7)__XP_001351122.1__HsALB_Pf-CSP(93-397) (opt1)
ggggcgcugccuacggagguggcagccaucuccuucucggcaucaagcuuaccaugaagugggugaccuucaucagccugcucuuccuguucuccagcgccuacuccaagcugaagcagccggccgacgggaaccccgaccccaacgccaaccccaacguggacccgaacgccaaccccaacgucgaccccaacgccaaccccaacguggacccgaacgcgaaccccaacgccaaccccaacgccaaccccaacgccaacccgaacgcgaaccccaacgccaaccccaacgccaaccccaacgccaacccgaacgccaaccccaacgcgaaccccaacgccaaccccaacgccaacccgaacgccaaccccaacgccaaccccaacgcgaaccccaacgccaacccgaacgccaaccccaacguggaccccaacgccaaccccaacgccaacccgaacgcgaaccccaacgccaaccccaacgccaacccgaacgccaaccccaacgccaaccccaacgcgaaccccaacgccaacccgaacgccaaccccaacgccaaccccaacgcgaaccccaacgccaacccgaacgccaaccccaacgccaaccccaacgccaaccccaacgcgaacccgaacgccaaccccaacaagaacaaccagggcaacggccaggggcacaacaugcccaacgaccccaaccgcaacgucgacgagaacgccaacgccaacuccgccgugaagaacaacaacaacgaggagccgagcgacaagcacaucaaggaguaccugaacaagauccagaacucccucagcacggaguggucccccugcagcgugaccugcggcaacgggauccagguccggaucaagcccggcuccgcgaacaagcccaaggacgagcuggacuacgccaacgacaucgagaagaagaucugcaagauggagaagugcagcuccguguucaacguggucaacagcuccaucgggcugaucauggugcucagcuuccuguuccugaacugaggacuagugcaucacauuuaaaagcaucucagccuaccaugagaauaagagaaagaaaaugaagaucaauagcuuauucaucucuuuuucuuuuucguugguguaaagccaacacccugucuaaaaaacauaaauuucuuuaaucauuuugccucuuuucucugugcuucaauuaauaaaaaauggaaagaaccuagaucuaaaaaaaaaaaaaaaaaaaaaaaaaaaaaaaaaaaaaaaaaaaaaaaaaaaaaaaaaaaaaaaaugcaucccccccccccccccccccccccccccccccaaaggcucuuuucagagccaccagaauu

SEQ ID NO: 942 - RNA, 724 nt, Artificial Sequence
  mRNA Design i-2 (A64-N5-C30-hSL-N5) comprising derived and/or modified sequence from Pf(3D7)__XP_001351122.1__HsALB_Pf-CSP(98-192) (opt1)
ggggcgcugccuacggagguggcagccaucuccuucucggcaucaagcuuaccaugaagugggugaccuucaucagccugcucuuccuguucuccagcgccuacuccgccgacgggaaccccgaccccaacgccaaccccaacguggacccgaacgccaaccccaacgucgaccccaacgccaaccccaacguggacccgaacgcgaaccccaacgccaaccccaacgccaaccccaacgccaacccgaacgcgaaccccaacgccaaccccaacgccaaccccaacgccaacccgaacgccaaccccaacgcgaaccccaacgccaaccccaacgccaacccgaacgccaaccccaacgccaaccccaacgcgaaccccaacgccaacccgugaggacuagugcaucacauuuaaaagcaucucagccuaccaugagaauaagagaaagaaaaugaagaucaauagcuuauucaucucuuuuucuuuuucguugguguaaagccaacacccugucuaaaaaacauaaauuucuuuaaucauuuugccucuuuucucugugcuucaauuaauaaaaaauggaaagaaccuagaucuaaaaaaaaaaaaaaaaaaaaaaaaaaaaaaaaaaaaaaaaaaaaaaaaaaaaaaaaaaaaaaaaugcaucccccccccccccccccccccccccccccccaaaggcucuuuucagagccaccagaauu

SEQ ID NO: 943 - RNA, 964 nt, Artificial Sequence
  mRNA Design i-2 (A64-N5-C30-hSL-N5) comprising derived and/or modified sequence from Pf(3D7)__XP_001351122.1__HsALB_Pf-CSP(98-272) (opt1)
ggggcgcugccuacggagguggcagccaucuccuucucggcaucaagcuuaccaugaagugggugaccuucaucagccugcucuuccuguucuccagcgccuacuccgccgacgggaaccccgaccccaacgccaaccccaacguggacccgaacgccaaccccaacgucgaccccaacgccaaccccaacguggacccgaacgcgaaccccaacgccaaccccaacgccaaccccaacgccaacccgaacgcgaaccccaacgccaaccccaacgccaaccccaacgccaacccgaacgccaaccccaacgcgaaccccaacgccaaccccaacgccaacccgaacgccaaccccaacgccaaccccaacgcgaaccccaacgccaacccgaacgccaaccccaacguggaccccaacgccaaccccaacgccaacccgaacgcgaaccccaacgccaaccccaacgccaacccgaacgccaaccccaacgccaaccccaacgcgaaccccaacgccaacccgaacgccaaccccaacgccaaccccaacgcgaaccccaacgccaacccgaacgccaaccccaacgccaaccccaacgccaaccccaacgcgaacccgaacgccaaccccugaggacuagugcaucacauuuaaaagcaucucagccuaccaugagaauaagagaaagaaaaugaagaucaauagcuuauucaucucuuuuucuuuuucguugguguaaagccaacacccugucuaaaaaacauaaauuucuuuaaucauuuugccucuuuucucugugcuucaauuaauaaaaaauggaaagaaccuagaucuaaaaaaaaaaaaaaaaaaaaaaaaaaaaaaaaaaaaaaaaaaaaaaaaaaaaaaaaaaaaaaaaugcaucccccccccccccccccccccccccccccccaaaggcucuuuucagagccaccagaauu

SEQ ID NO: 944 - RNA, 1270 nt, Artificial Sequence
  mRNA Design i-2 (A64-N5-C30-hSL-N5) comprising derived and/or modified sequence from Pf(3D7)__XP_001351122.1__HsALB_Pf-CSP(98-374) (opt1)
ggggcgcugccuacggagguggcagccaucuccuucucggcaucaagcuuaccaugaagugggugaccuucaucagccugcucuuccuguucuccagcgccuacuccgccgacgggaaccccgaccccaacgccaaccccaacguggacccgaacgccaaccccaacgucgaccccaacgccaaccccaacguggacccgaacgcgaaccccaacgccaaccccaacgccaaccccaacgccaacccgaacgcgaaccccaacgccaaccccaacgccaaccccaacgccaacccgaacgccaaccccaacgcgaaccccaacgccaaccccaacgccaacccgaacgccaaccccaacgccaaccccaacgcgaaccccaacgccaacccgaacgccaaccccaacguggaccccaacgccaaccccaacgccaacccgaacgcgaaccccaacgccaaccccaacgccaacccgaacgccaaccccaacgccaaccccaacgcgaaccccaacgccaacccgaacgccaaccccaacgccaaccccaacgcgaaccccaacgccaacccgaacgccaaccccaacgccaaccccaacgccaaccccaacgcgaacccgaacgccaaccccaacaagaacaaccagggcaacggccaggggcacaacaugcccaacgaccccaaccgcaacgucgacgagaacgccaacgccaacuccgccgugaagaacaacaacaacgaggagccgagcgacaagcacaucaaggaguaccugaacaagauccagaacucccucagcacggaguggucccccugcagcgugaccugcggcaacgggauccagguccggaucaagcccggcuccgcgaacaagcccaaggacgagcuggacuacgccaacgacaucgagaagaagaucugcaagauggagaagugcugaggacuagugcaucacauuuaaaagcaucucagccuaccaugagaauaagagaaagaaaaugaagaucaauagcuuauucaucucuuuuucuuuuucguugguguaaagccaacacccugucuaaaaaacauaaauuucuuuaaucauuuugccucuuuucucugugcuucaauuaauaaaaaauggaaagaaccuagaucuaaaaaaaaaaaaaaaaaaaaaaaaaaaaaaaaaaaaaaaaaaaaaaaaaaaaaaaaaaaaaaaaugcaucccccccccccccccccccccccccccccccaaaggcucuuuucagagccaccagaauu

SEQ ID NO: 945 - RNA, 1339 nt, Artificial Sequence
  mRNA Design i-2 (A64-N5-C30-hSL-N5) comprising derived and/or modified sequence from Pf(3D7)__XP_001351122.1__HsALB_Pf-CSP(98-397) (opt1)
ggggcgcugccuacggagguggcagccaucuccuucucggcaucaagcuuaccaugaagugggugaccuucaucagccugcucuuccuguucuccagcgccuacuccgccgacgggaaccccgaccccaacgccaaccccaacguggacccgaacgccaaccccaacgucgaccccaacgccaaccccaacguggacccgaacgcgaaccccaacgccaaccccaacgccaaccccaacgccaacccgaacgcgaaccccaacgccaaccccaacgccaaccccaacgccaacccgaacgccaaccccaacgcgaaccccaacgccaaccccaacgccaacccgaacgccaaccccaacgccaaccccaacgcgaaccccaacgccaacccgaacgccaaccccaacguggaccccaacgccaaccccaacgccaacccgaacgcgaaccccaacgccaaccccaacgccaacccgaacgccaaccccaacgccaaccccaacgcgaaccccaacgccaacccgaacgccaaccccaacgccaaccccaacgcgaaccccaacgccaacccgaacgccaaccccaacgccaaccccaacgccaaccccaacgcgaacccgaacgccaaccccaacaagaacaaccagggcaacggccaggggcacaacaugcccaacgaccccaaccgcaacgucgacgagaacgccaacgccaacuccgccgugaagaacaacaacaacgaggagccgagcgacaagcacaucaaggaguaccugaacaagauccagaacucccucagcacggaguggucccccugcagcgugaccugcggcaacgggauccagguccggaucaagcccggcuccgcgaacaagcccaaggacgagcuggacuacgccaacgacaucgagaagaagaucugcaagauggagaagugcagcuccguguucaacguggucaacagcuccaucgggcugaucauggugcucagcuuccuguuccugaacugaggacuagugcaucacauuuaaaagcaucucagccuaccaugagaauaagagaaagaaaaugaagaucaauagcuuauucaucucuuuuucuuuuucguugguguaaagccaacacccugucuaaaaaacauaaauuucuuuaaucauuuugccucuuuucucugugcuucaauuaauaaaaaauggaaagaaccuagaucuaaaaaaaaaaaaaaaaaaaaaaaaaaaaaaaaaaaaaaaaaaaaaaaaaaaaaaaaaaaaaaaaugcaucccccccccccccccccccccccccccccccaaaggcucuuuucagagccaccagaauu

SEQ ID NO: 946 - RNA, 1666 nt, Artificial Sequence
  mRNA Design i-2 (A64-N5-C30-hSL-N5) comprising derived and/or modified sequence from Pf(3D7)__XP_001351122.1__HsALB_Pf-CSP(199-377)_L(PVTN)_HBsAg (opt1)
ggggcgcugccuacggagguggcagccaucuccuucucggcaucaagcuuaccaugaaguggguaaccuuuauuucccuucuuuuucucuuuagcucggcuuauuccgaccccaacgccaaccccaacgccaacccgaacgcgaaccccaacgccaaccccaacgccaacccgaacgccaaccccaacgccaaccccaacgcgaaccccaacgccaacccgaacgccaaccccaacgccaaccccaacgcgaaccccaacgccaacccgaacgccaaccccaacgccaaccccaacgccaaccccaacgcgaacccgaacgccaaccccaacaagaacaaccagggcaacggccaggggcacaacaugcccaacgaccccaaccgcaacgucgacgagaacgccaacgccaacuccgccgugaagaacaacaacaacgaggagccgagcgacaagcacaucaaggaguaccugaacaagauccagaacucccucagcacggaguggucccccugcagcgugaccugcggcaacgggauccagguccggaucaagcccggcuccgcgaacaagcccaaggacgagcuggacuacgccaacgacaucgagaagaagaucugcaagauggagaagugcagcuccgugccggugacgaacauggagaacaucaccagcggcuuccuggggccccuccuggugcugcaggccggcuucuuccuccugacccgcauccugaccaucccgcagucccucgacagcugguggaccucccugaacuuccucgggggcagccccgucugccuggggcagaacucccagagccccaccuccaaccacagccccaccuccugcccgcccaucugccccggcuaccgguggaugugccugcgccgguucaucaucuuccuguucauccuccugcugugccucaucuuccugcuggugcuccuggacuaccagggcaugcugcccgugugcccgcucauccccgggagcacgaccaccaacaccggccccugcaagacgugcaccacccccgcccaggggaacuccauguucccgagcugcugcugcaccaagcccacggacggcaacugcacgugcauccccauccccuccagcugggcguucgccaaguaccugugggagugggccuccguccgcuucagcuggcugucccuccuggugccguucgugcagugguucgucgggcugagccccaccguguggcucuccgccaucuggaugaugugguacuggggccccagccuguacagcaucgugucccccuucaucccgcugcuccccaucuucuucugccugugggucuacaucugaggacuagugcaucacauuuaaaagcaucucagccuaccaugagaauaagagaaagaaaaugaagaucaauagcuuauucaucucuuuuucuuuuucguugguguaaagccaacacccugucuaaaaaacauaaauuucuuuaaucauuuugccucuuuucucugugcuucaauuaauaaaaaauggaaagaaccuagaucuaaaaaaaaaaaaaaaaaaaaaaaaaaaaaaaaaaaaaaaaaaaaaaaaaaaaaaaaaaaaaaaaugcaucccccccccccccccccccccccccccccccaaaggcucuuuucagagccaccagaauu

SEQ ID NO: 947 - RNA, 1405 nt, Artificial Sequence
  mRNA Design i-2 (A64-N5-C30-hSL-N5) comprising derived and/or modified sequence from Pb(ANKA)__XP_022712148.1__Pb-CSP (opt1) R5969
ggggcgcugccuacggagguggcagccaucuccuucucggcaucaagcuuaccaugaagaagugcaccauccugguggucgccagccuccugcuggugaacucccuccugcccggcuacgggcagaacaagagcauccaggcccagcgcaaccugaacgagcucugcuacaacgagggcaacgacaacaagcuguaccacgugcugaacuccaagaacgggaagaucuacaaccggaacaccgucaaccgccuccuggcggacgccccggagggcaagaagaacgagaagaagaacgagaagaucgagcggaacaacaagcugaagcagccgcccccgccgcccaaccccaacgacccgccgccgcccaaccccaacgacccgcccccgcccaacccgaacgacccgcccccgccgaaccccaacgacccgcccccgcccaacgccaacgacccgcccccgcccaacgccaacgaccccgccccgcccaacgcgaacgaccccgccccgccgaacgccaacgaccccgccccgcccaacgcgaacgacccggccccgcccaacgccaacgacccgccgccgcccaaccccaacgacccggccccgcccaacgccaacgacccgccgcccccgaaccccaacgacccggcgccgccccaggggaacaacaacccgcagccccagccccgcccccagccgcagccccagccccagccccagccgcagccccagccccagccccagccgcggccccagccccagccccagccgggcggcaacaacaacaacaagaacaacaacaacgacgacagcuacauccccuccgccgagaagauccucgaguucgugaagcagauccgcgacagcaucacggaggaguggucccagugcaacgugaccugcgggagcggcauccggguccgcaagcggaagggguccaacaagaaggccgaggaccugacccuggaggacaucgacaccgagaucugcaagauggacaagugcagcuccaucuucaacaucgugagcaacucccucggcuucgugauccugcugguccucguguucuucaacugaggacuagugcaucacauuuaaaagcaucucagccuaccaugagaauaagagaaagaaaaugaagaucaauagcuuauucaucucuuuuucuuuuucguugguguaaagccaacacccugucuaaaaaacauaaauuucuuuaaucauuuugccucuuuucucugugcuucaauuaauaaaaaauggaaagaaccuagaucuaaaaaaaaaaaaaaaaaaaaaaaaaaaaaaaaaaaaaaaaaaaaaaaaaaaaaaaaaaaaaaaaugcaucccccccccccccccccccccccccccccccaaaggcucuuuucagagccaccagaauu

SEQ ID NO: 948 - RNA, 1570 nt, Artificial Sequence
  mRNA Design i-2 (A64-N5-C30-hSL-N5) comprising derived and/or modified sequence from Pb(ANKA)__XP_022712148.1__Pb-CSP_L(G4SG4)_TM domain HA (opt1) R5979
ggggcgcugccuacggagguggcagccaucuccuucucggcaucaagcuuaccaugaagaagugcaccauccugguggucgccagccuccugcuggugaacucccuccugcccggcuacgggcagaacaagagcauccaggcccagcgcaaccugaacgagcucugcuacaacgagggcaacgacaacaagcuguaccacgugcugaacuccaagaacgggaagaucuacaaccggaacaccgucaaccgccuccuggcggacgccccggagggcaagaagaacgagaagaagaacgagaagaucgagcggaacaacaagcugaagcagccgcccccgccgcccaaccccaacgacccgccgccgcccaaccccaacgacccgcccccgcccaacccgaacgacccgcccccgccgaaccccaacgacccgcccccgcccaacgccaacgacccgcccccgcccaacgccaacgaccccgccccgcccaacgcgaacgaccccgccccgccgaacgccaacgaccccgccccgcccaacgcgaacgacccggccccgcccaacgccaacgacccgccgccgcccaaccccaacgacccggccccgcccaacgccaacgacccgccgcccccgaaccccaacgacccggcgccgccccaggggaacaacaacccgcagccccagccccgcccccagccgcagccccagccccagccccagccgcagccccagccccagccccagccgcggccccagccccagccccagccgggcggcaacaacaacaacaagaacaacaacaacgacgacagcuacauccccuccgccgagaagauccucgaguucgugaagcagauccgcgacagcaucacggaggaguggucccagugcaacgugaccugcgggagcggcauccggguccgcaagcggaagggguccaacaagaaggccgaggaccugacccuggaggacaucgacaccgagaucugcaagauggacaagugcagcuccaucuucaacaucgugagcaacucccucggcuucgugauccugcugguccucguguucuucaacggcgggggcgggagcggcgggggcggcaagcucgaguccacgcggaucuaccagauccuggcgaucuacagcaccgucgccagcucccuggugcucguggucagccugggggccaucuccuucuggaugugcagcaacggcucccugcagugccgcaucugcaucugaggacuagugcaucacauuuaaaagcaucucagccuaccaugagaauaagagaaagaaaaugaagaucaauagcuuauucaucucuuuuucuuuuucguugguguaaagccaacacccugucuaaaaaacauaaauuucuuuaaucauuuugccucuuuucucugugcuucaauuaauaaaaaauggaaagaaccuagaucuaaaaaaaaaaaaaaaaaaaaaaaaaaaaaaaaaaaaaaaaaaaaaaaaaaaaaaaaaaaaaaaaugcaucccccccccccccccccccccccccccccccaaaggcucuuuucagagccaccagaauu

SEQ ID NO: 949 - RNA, 1390 nt, Artificial Sequence
  mRNA Design i-2 (A64-N5-C30-hSL-N5) comprising derived and/or modified sequence from Pb(ANKA)__XP_022712148.1__HsALB_Pb-CSP(24-340) (opt1) R5977
ggggcgcugccuacggagguggcagccaucuccuucucggcaucaagcuuaccaugaagugggugaccuucaucagccugcucuuccuguucuccagcgccuacucccagaacaagagcauccaggcccagcgcaaccugaacgagcucugcuacaacgagggcaacgacaacaagcuguaccacgugcugaacuccaagaacgggaagaucuacaaccggaacaccgucaaccgccuccuggcggacgccccggagggcaagaagaacgagaagaagaacgagaagaucgagcggaacaacaagcugaagcagccgcccccgccgcccaaccccaacgacccgccgccgcccaaccccaacgacccgcccccgcccaacccgaacgacccgcccccgccgaaccccaacgacccgcccccgcccaacgccaacgacccgcccccgcccaacgccaacgaccccgccccgcccaacgcgaacgaccccgccccgccgaacgccaacgaccccgccccgcccaacgcgaacgacccggccccgcccaacgccaacgacccgccgccgcccaaccccaacgacccggccccgcccaacgccaacgacccgccgcccccgaaccccaacgacccggcgccgccccaggggaacaacaacccgcagccccagccccgcccccagccgcagccccagccccagccccagccgcagccccagccccagccccagccgcggccccagccccagccccagccgggcggcaacaacaacaacaagaacaacaacaacgacgacagcuacauccccuccgccgagaagauccucgaguucgugaagcagauccgcgacagcaucacggaggaguggucccagugcaacgugaccugcgggagcggcauccggguccgcaagcggaagggguccaacaagaaggccgaggaccugacccuggaggacaucgacaccgagaucugcaagauggacaagugcagcuccaucuucaacaucgugagcaacucccucggcuucgugauccugcugguccucguguucuucaacugaggacuagugcaucacauuuaaaagcaucucagccuaccaugagaauaagagaaagaaaaugaagaucaauagcuuauucaucucuuuuucuuuuucguugguguaaagccaacacccugucuaaaaaacauaaauuucuuuaaucauuuugccucuuuucucugugcuucaauuaauaaaaaauggaaagaaccuagaucuaaaaaaaaaaaaaaaaaaaaaaaaaaaaaaaaaaaaaaaaaaaaaaaaaaaaaaaaaaaaaaaaugcaucccccccccccccccccccccccccccccccaaaggcucuuuucagagccaccagaauu

SEQ ID NO: 950 - RNA, 1408 nt, Artificial Sequence
  mRNA Design i-2 (A64-N5-C30-hSL-N5) comprising derived and/or modified sequence from Pb(ANKA)__XP_022712148.1__HsIns-iso1_Pb-CSP(24-340) (opt1) R5978
ggggcgcugccuacggagguggcagccaucuccuucucggcaucaagcuuaccauggcccuguggaugcgccuccugccccugcucgcccugcuggcgcucuggggcccggaccccgccgccgcccagaacaagagcauccaggcccagcgcaaccugaacgagcucugcuacaacgagggcaacgacaacaagcuguaccacgugcugaacuccaagaacgggaagaucuacaaccggaacaccgucaaccgccuccuggcggacgccccggagggcaagaagaacgagaagaagaacgagaagaucgagcggaacaacaagcugaagcagccgcccccgccgcccaaccccaacgacccgccgccgcccaaccccaacgacccgcccccgcccaacccgaacgacccgcccccgccgaaccccaacgacccgcccccgcccaacgccaacgacccgcccccgcccaacgccaacgaccccgccccgcccaacgcgaacgaccccgccccgccgaacgccaacgaccccgccccgcccaacgcgaacgacccggccccgcccaacgccaacgacccgccgccgcccaaccccaacgacccggccccgcccaacgccaacgacccgccgcccccgaaccccaacgacccggcgccgccccaggggaacaacaacccgcagccccagccccgcccccagccgcagccccagccccagccccagccgcagccccagccccagccccagccgcggccccagccccagccccagccgggcggcaacaacaacaacaagaacaacaacaacgacgacagcuacauccccuccgccgagaagauccucgaguucgugaagcagauccgcgacagcaucacggaggaguggucccagugcaacgugaccugcgggagcggcauccggguccgcaagcggaagggguccaacaagaaggccgaggaccugacccuggaggacaucgacaccgagaucugcaagauggacaagugcagcuccaucuucaacaucgugagcaacucccucggcuucgugauccugcugguccucguguucuucaacugaggacuagugcaucacauuuaaaagcaucucagccuaccaugagaauaagagaaagaaaaugaagaucaauagcuuauucaucucuuuuucuuuuucguugguguaaagccaacacccugucuaaaaaacauaaauuucuuuaaucauuuugccucuuuucucugugcuucaauuaauaaaaaauggaaagaaccuagaucuaaaaaaaaaaaaaaaaaaaaaaaaaaaaaaaaaaaaaaaaaaaaaaaaaaaaaaaaaaaaaaaaugcaucccccccccccccccccccccccccccccccaaaggcucuuuucagagccaccagaauu

SEQ ID NO: 951 - RNA, 1387 nt, Artificial Sequence
  mRNA Design i-2 (A64-N5-C30-hSL-N5) comprising derived and/or modified sequence from Pb(ANKA)__XP_022712148.1__HsSPARC_Pb-CSP(24-340) (opt1) R5976
ggggcgcugccuacggagguggcagccaucuccuucucggcaucaagcuuaccaugcgcgccuggaucuucuuccugcucugccuggccggccgggcccuggcccagaacaagagcauccaggcccagcgcaaccugaacgagcucugcuacaacgagggcaacgacaacaagcuguaccacgugcugaacuccaagaacgggaagaucuacaaccggaacaccgucaaccgccuccuggcggacgccccggagggcaagaagaacgagaagaagaacgagaagaucgagcggaacaacaagcugaagcagccgcccccgccgcccaaccccaacgacccgccgccgcccaaccccaacgacccgcccccgcccaacccgaacgacccgcccccgccgaaccccaacgacccgcccccgcccaacgccaacgacccgcccccgcccaacgccaacgaccccgccccgcccaacgcgaacgaccccgccccgccgaacgccaacgaccccgccccgcccaacgcgaacgacccggccccgcccaacgccaacgacccgccgccgcccaaccccaacgacccggccccgcccaacgccaacgacccgccgcccccgaaccccaacgacccggcgccgccccaggggaacaacaacccgcagccccagccccgcccccagccgcagccccagccccagccccagccgcagccccagccccagccccagccgcggccccagccccagccccagccgggcggcaacaacaacaacaagaacaacaacaacgacgacagcuacauccccuccgccgagaagauccucgaguucgugaagcagauccgcgacagcaucacggaggaguggucccagugcaacgugaccugcgggagcggcauccggguccgcaagcggaagggguccaacaagaaggccgaggaccugacccuggaggacaucgacaccgagaucugcaagauggacaagugcagcuccaucuucaacaucgugagcaacucccucggcuucgugauccugcugguccucguguucuucaacugaggacuagugcaucacauuuaaaagcaucucagccuaccaugagaauaagagaaagaaaaugaagaucaauagcuuauucaucucuuuuucuuuuucguugguguaaagccaacacccugucuaaaaaacauaaauuucuuuaaucauuuugccucuuuucucugugcuucaauuaauaaaaaauggaaagaaccuagaucuaaaaaaaaaaaaaaaaaaaaaaaaaaaaaaaaaaaaaaaaaaaaaaaaaaaaaaaaaaaaaaaaugcaucccccccccccccccccccccccccccccccaaaggcucuuuucagagccaccagaauu

SEQ ID NO: 952 - RNA, 1390 nt, Artificial Sequence
  mRNA Design i-2 (A64-N5-C30-hSL-N5) comprising derived and/or modified sequence from Pb(ANKA)__XP_022712148.1__IgE_Pb-CSP(24-340) (opt1) R5975
ggggcgcugccuacggagguggcagccaucuccuucucggcaucaagcuuaccauggacuggaccuggauccuguuccucguggccgccgcgacccgcguccacagccagaacaagagcauccaggcccagcgcaaccugaacgagcucugcuacaacgagggcaacgacaacaagcuguaccacgugcugaacuccaagaacgggaagaucuacaaccggaacaccgucaaccgccuccuggcggacgccccggagggcaagaagaacgagaagaagaacgagaagaucgagcggaacaacaagcugaagcagccgcccccgccgcccaaccccaacgacccgccgccgcccaaccccaacgacccgcccccgcccaacccgaacgacccgcccccgccgaaccccaacgacccgcccccgcccaacgccaacgacccgcccccgcccaacgccaacgaccccgccccgcccaacgcgaacgaccccgccccgccgaacgccaacgaccccgccccgcccaacgcgaacgacccggccccgcccaacgccaacgacccgccgccgcccaaccccaacgacccggccccgcccaacgccaacgacccgccgcccccgaaccccaacgacccggcgccgccccaggggaacaacaacccgcagccccagccccgcccccagccgcagccccagccccagccccagccgcagccccagccccagccccagccgcggccccagccccagccccagccgggcggcaacaacaacaacaagaacaacaacaacgacgacagcuacauccccuccgccgagaagauccucgaguucgugaagcagauccgcgacagcaucacggaggaguggucccagugcaacgugaccugcgggagcggcauccggguccgcaagcggaagggguccaacaagaaggccgaggaccugacccuggaggacaucgacaccgagaucugcaagauggacaagugcagcuccaucuucaacaucgugagcaacucccucggcuucgugauccugcugguccucguguucuucaacugaggacuagugcaucacauuuaaaagcaucucagccuaccaugagaauaagagaaagaaaaugaagaucaauagcuuauucaucucuuuuucuuuuucguugguguaaagccaacacccugucuaaaaaacauaaauuucuuuaaucauuuugccucuuuucucugugcuucaauuaauaaaaaauggaaagaaccuagaucuaaaaaaaaaaaaaaaaaaaaaaaaaaaaaaaaaaaaaaaaaaaaaaaaaaaaaaaaaaaaaaaaugcaucccccccccccccccccccccccccccccccaaaggcucuuuucagagccaccagaauu

SEQ ID NO: 953 - RNA, 1576 nt, Artificial Sequence; identical to SEQ ID NO: 917
  mRNA Design i-2 (A64-N5-C30-hSL-N5) comprising derived and/or modified sequence from Pf(3D7)__XP_001351122.1__Pf-CSP (opt1)

SEQ ID NO: 954 - RNA, 1507 nt, Artificial Sequence; identical to SEQ ID NO: 918
  mRNA Design i-2 (A64-N5-C30-hSL-N5) comprising derived and/or modified sequence from Pf(3D7)__XP_001351122.1__Pf-CSP(1-374) (opt1)

SEQ ID NO: 955 - RNA, 1360 nt, Artificial Sequence; identical to SEQ ID NO: 919
  mRNA Design i-2 (A64-N5-C30-hSL-N5) comprising derived and/or modified sequence from Pf(3D7)__XP_001351122.1__Pf-CSP(1-325) (opt1)

SEQ ID NO: 956 - RNA, 1576 nt, Artificial Sequence
  mRNA Design i-2 (A64-N5-C30-hSL-N5) comprising derived and/or modified sequence from Pf(3D7)__XP_001351122.1__HsALB_Pf-CSP(19-397) (opt1)
ggggcgcugccuacggagguggcagccaucuccuucucggcaucaagcuuaccaugaagugggugaccuucaucagccuccuguuccuguucuccagcgccuacucccuguuccaggaguaccagugcuacggcagcuccagcaacacccgcguccucaacgagcugaacuacgacaacgccgggacgaaccuguacaacgagcucgagaugaacuacuacggcaagcaggagaacugguacucccugaagaagaacagccggucccugggggagaacgacgacggcaacaacgaggacaacgagaagcuccgcaagcccaagcacaagaagcugaagcagccggcggacgggaaccccgaccccaacgccaaccccaacguggacccgaacgccaaccccaacguggaccccaacgccaaccccaacgucgacccgaacgccaaccccaacgcgaaccccaacgccaaccccaacgccaacccgaacgccaaccccaacgcgaaccccaacgccaaccccaacgccaacccgaacgccaaccccaacgccaaccccaacgcgaaccccaacgccaacccgaacgccaaccccaacgccaaccccaacgccaaccccaacgcgaacccgaacgccaaccccaacguggaccccaacgccaaccccaacgccaacccgaacgccaaccccaacgcgaaccccaacgccaacccgaacgccaaccccaacgccaaccccaacgccaaccccaacgcgaacccgaacgccaaccccaacgccaaccccaacgccaaccccaacgcgaacccgaacgccaaccccaacgccaaccccaacgccaaccccaacgccaacccgaacgcgaaccccaacaagaacaaccagggcaacggccaggggcacaacaugcccaacgaccccaaccggaacguggacgagaacgccaacgccaacagcgccgucaagaacaacaacaacgaggagccguccgacaagcacaucaaggaguaccugaacaagauccagaacagccucuccaccgaguggagccccugcuccgugaccugcggcaacgggauccaggugcgcaucaagcccggcagcgccaacaagcccaaggacgagcuggacuacgcgaacgacaucgagaagaagaucugcaagauggagaagugcuccagcgucuucaacguggugaacuccagcaucgggcugaucaugguccucagcuuccuguuccugaacugaggacuagugcaucacauuuaaaagcaucucagccuaccaugagaauaagagaaagaaaaugaagaucaauagcuuauucaucucuuuuucuuuuucguugguguaaagccaacacccugucuaaaaaacauaaauuucuuuaaucauuuugccucuuuucucugugcuucaauuaauaaaaaauggaaagaaccuagaucuaaaaaaaaaaaaaaaaaaaaaaaaaaaaaaaaaaaaaaaaaaaaaaaaaaaaaaaaaaaaaaaaugcaucccccccccccccccccccccccccccccccaaaggcucuuuucagagccaccagaauu

SEQ ID NO: 957 - RNA, 1594 nt, Artificial Sequence
  mRNA Design i-2 (A64-N5-C30-hSL-N5) comprising derived and/or modified sequence from Pf(3D7)__XP_001351122.1__HsIns-iso1_Pf-CSP(19-397) (opt1)
ggggcgcugccuacggagguggcagccaucuccuucucggcaucaagcuuaccauggcccuguggaugcgccuccugccccugcucgcccugcuggcgcucuggggcccggaccccgccgccgcccuguuccaggaguaccagugcuacgggagcuccagcaacacccgggugcugaacgagcucaacuacgacaacgccggcaccaaccuguacaacgagcuggagaugaacuacuacgggaagcaggagaacugguacucccucaagaagaacagccgcucccugggcgagaacgacgacgggaacaacgaggacaacgagaagcugcggaagcccaagcacaagaagcucaagcagcccgcggacggcaacccggaccccaacgccaaccccaacgucgaccccaacgccaacccgaacguggaccccaacgccaaccccaacguggaccccaacgcgaacccgaacgccaaccccaacgccaaccccaacgccaaccccaacgccaacccgaacgcgaaccccaacgccaaccccaacgccaaccccaacgccaacccgaacgccaaccccaacgcgaaccccaacgccaaccccaacgccaacccgaacgccaaccccaacgccaaccccaacgcgaaccccaacgccaacccgaacgucgaccccaacgccaaccccaacgccaacccgaacgccaaccccaacgcgaaccccaacgccaaccccaacgccaacccgaacgccaaccccaacgcgaaccccaacgccaaccccaacgccaacccgaacgccaaccccaacgccaaccccaacgcgaaccccaacgccaacccgaacgccaaccccaacgccaaccccaacgccaaccccaacgcgaacccgaacaagaacaaccagggcaacgggcagggccacaacaugcccaacgaccccaaccgcaacguggacgagaacgccaacgccaacagcgccgugaagaacaacaacaacgaggagcccuccgacaagcacaucaaggaguaccugaacaagauccagaacagccuguccacggaguggagcccgugcuccgugaccugcgggaacggcauccagguccggaucaagcccgggagcgccaacaagcccaaggacgagcucgacuacgcgaacgacaucgagaagaagaucugcaagauggagaagugcuccagcguguucaacgucgugaacuccagcaucggccugaucauggugcuguccuuccucuuccugaacugaggacuagugcaucacauuuaaaagcaucucagccuaccaugagaauaagagaaagaaaaugaagaucaauagcuuauucaucucuuuuucuuuuucguugguguaaagccaacacccugucuaaaaaacauaaauuucuuuaaucauuuugccucuuuucucugugcuucaauuaauaaaaaauggaaagaaccuagaucuaaaaaaaaaaaaaaaaaaaaaaaaaaaaaaaaaaaaaaaaaaaaaaaaaaaaaaaaaaaaaaaaugcaucccccccccccccccccccccccccccccccaaaggcucuuuucagagccaccagaauu

SEQ ID NO: 958 - RNA, 1573 nt, Artificial Sequence
  mRNA Design i-2 (A64-N5-C30-hSL-N5) comprising derived and/or modified sequence from Pf(3D7)__XP_001351122.1__HsSPARC_Pf-CSP(19-397) (opt1)
ggggcgcugccuacggagguggcagccaucuccuucucggcaucaagcuuaccaugcgcgccuggaucuucuuccugcucugccuggccggccgggcgcuggcccucuuccaggaguaccagugcuacgggagcuccagcaacacccgcgugcugaacgagcugaacuacgacaacgccggcaccaaccucuacaacgagcuggagaugaacuacuacgggaagcaggagaacugguacucccugaagaagaacagccggucccucggcgagaacgacgacgggaacaacgaggacaacgagaagcugcgcaagcccaagcacaagaagcugaagcagccggccgacggcaaccccgaccccaacgccaaccccaacgucgacccgaacgcgaaccccaacguggaccccaacgccaaccccaacguggacccgaacgccaaccccaacgccaaccccaacgcgaaccccaacgccaacccgaacgccaaccccaacgccaaccccaacgccaaccccaacgcgaacccgaacgccaaccccaacgccaaccccaacgccaaccccaacgccaacccgaacgcgaaccccaacgccaaccccaacgccaaccccaacgccaacccgaacgccaaccccaacgucgaccccaacgcgaaccccaacgccaacccgaacgccaaccccaacgccaaccccaacgccaacccgaacgcgaaccccaacgccaaccccaacgccaaccccaacgccaacccgaacgcgaaccccaacgccaaccccaacgccaaccccaacgccaacccgaacgccaaccccaacgcgaaccccaacgccaaccccaacgccaacccgaacgccaaccccaacaagaacaaccagggcaacgggcagggccacaacaugcccaacgaccccaaccggaacguggacgagaacgccaacgcgaacagcgccgugaagaacaacaacaacgaggagccguccgacaagcacaucaaggaguaccucaacaagauccagaacagccuguccacggaguggagccccugcuccgugaccugcgggaacggcauccagguccgcaucaagcccgggagcgccaacaagcccaaggacgagcuggacuacgccaacgacaucgagaagaagaucugcaagauggagaagugcuccagcguguucaacgucgugaacuccagcaucggccucaucauggugcuguccuuccuguuccucaacugaggacuagugcaucacauuuaaaagcaucucagccuaccaugagaauaagagaaagaaaaugaagaucaauagcuuauucaucucuuuuucuuuuucguugguguaaagccaacacccugucuaaaaaacauaaauuucuuuaaucauuuugccucuuuucucugugcuucaauuaauaaaaaauggaaagaaccuagaucuaaaaaaaaaaaaaaaaaaaaaaaaaaaaaaaaaaaaaaaaaaaaaaaaaaaaaaaaaaaaaaaaugcaucccccccccccccccccccccccccccccccaaaggcucuuuucagagccaccagaauu

SEQ ID NO: 959 - RNA, 1576 nt, Artificial Sequence
  mRNA Design i-2 (A64-N5-C30-hSL-N5) comprising derived and/or modified sequence from Pf(3D7)__XP_001351122.1__IgE_Pf-CSP(19-397) (opt1)
ggggcgcugccuacggagguggcagccaucuccuucucggcaucaagcuuaccauggacuggaccuggauccuguuccucguggccgccgcgacccgcguccacagccuguuccaggaguaccagugcuacggcuccagcuccaacacgcgggugcugaacgagcucaacuacgacaacgccgggaccaaccuguacaacgagcuggagaugaacuacuacggcaagcaggagaacugguacagccucaagaagaacucccgcagccugggggagaacgacgacggcaacaacgaggacaacgagaagcugcggaagcccaagcacaagaagcucaagcagccggccgacgggaaccccgaccccaacgccaaccccaacguggacccgaacgccaaccccaacgucgaccccaacgcgaaccccaacguggacccgaacgccaaccccaacgccaaccccaacgccaaccccaacgcgaacccgaacgccaaccccaacgccaaccccaacgccaaccccaacgccaacccgaacgcgaaccccaacgccaaccccaacgccaaccccaacgccaacccgaacgccaaccccaacgcgaaccccaacgccaaccccaacgccaacccgaacgccaaccccaacguggaccccaacgccaaccccaacgcgaacccgaacgccaaccccaacgccaaccccaacgccaacccgaacgccaaccccaacgcgaaccccaacgccaaccccaacgccaacccgaacgccaaccccaacgcgaaccccaacgccaaccccaacgccaacccgaacgccaaccccaacgccaaccccaacgcgaaccccaacgccaacccgaacgccaaccccaacaagaacaaccagggcaacggccaggggcacaacaugcccaacgaccccaaccgcaacgucgacgagaacgccaacgccaacuccgcggugaagaacaacaacaacgaggagccgagcgacaagcacaucaaggaguaccugaacaagauccagaacucccugagcaccgaguggucccccugcagcgugaccugcggcaacgggauccagguccggaucaagcccggcuccgccaacaagcccaaggacgagcucgacuacgccaacgacaucgagaagaagaucugcaagauggagaagugcagcuccguguucaacguggucaacagcuccaucgggcugaucauggugcugagcuuccucuuccugaacugaggacuagugcaucacauuuaaaagcaucucagccuaccaugagaauaagagaaagaaaaugaagaucaauagcuuauucaucucuuuuucuuuuucguugguguaaagccaacacccugucuaaaaaacauaaauuucuuuaaucauuuugccucuuuucucugugcuucaauuaauaaaaaauggaaagaaccuagaucuaaaaaaaaaaaaaaaaaaaaaaaaaaaaaaaaaaaaaaaaaaaaaaaaaaaaaaaaaaaaaaaaugcaucccccccccccccccccccccccccccccccaaaggcucuuuucagagccaccagaauu

SEQ ID NO: 960 - RNA, 1741 nt, Artificial Sequence
  mRNA Design i-2 (A64-N5-C30-hSL-N5) comprising derived and/or modified sequence from Pf(3D7)__XP_001351122.1__Pf-CSP_L(G4SG4)_TM domain HA (opt1)
ggggcgcugccuacggagguggcagccaucuccuucucggcaucaagcuuaccaugaugcgcaagcuggccauccucagcguguccagcuuccuguucgucgaggcccuguuccaggaguaccagugcuacggcuccagcuccaacacccgggugcucaacgagcugaacuacgacaacgcggggaccaaccuguacaacgagcucgagaugaacuacuacggcaagcaggagaacugguacagccugaagaagaacucccgcagccugggggagaacgacgacggcaacaacgaggacaacgagaagcuccggaagcccaagcacaagaagcugaagcagccggccgacgggaaccccgaccccaacgccaaccccaacguggacccgaacgccaaccccaacgucgaccccaacgccaaccccaacguggacccgaacgcgaaccccaacgccaaccccaacgccaaccccaacgccaacccgaacgcgaaccccaacgccaaccccaacgccaaccccaacgccaacccgaacgccaaccccaacgcgaaccccaacgccaaccccaacgccaacccgaacgccaaccccaacgccaaccccaacgcgaaccccaacgccaacccgaacgccaaccccaacguggaccccaacgccaaccccaacgccaacccgaacgcgaaccccaacgccaaccccaacgccaacccgaacgccaaccccaacgccaaccccaacgcgaaccccaacgccaacccgaacgccaaccccaacgccaaccccaacgcgaaccccaacgccaacccgaacgccaaccccaacgccaaccccaacgccaaccccaacgcgaacccgaacgccaaccccaacaagaacaaccagggcaacggccaggggcacaacaugcccaacgaccccaaccgcaacgucgacgagaacgccaacgccaacuccgccgugaagaacaacaacaacgaggagccgagcgacaagcacaucaaggaguaccugaacaagauccagaacucccucagcacggaguggucccccugcagcgugaccugcggcaacgggauccagguccggaucaagcccggcuccgcgaacaagcccaaggacgagcuggacuacgccaacgacaucgagaagaagaucugcaagauggagaagugcagcuccguguucaacguggucaacagcuccaucgggcugaucauggugcucagcuuccuguuccugaacggcggcgggggcagcgggggcggcgggaagcucgaguccacccgcaucuaccagauccuggccaucuacagcaccguggccuccagccugguccucguggugucccugggcgccaucagcuucuggaugugcuccaacgggagccugcagugccggaucugcaucugaggacuagugcaucacauuuaaaagcaucucagccuaccaugagaauaagagaaagaaaaugaagaucaauagcuuauucaucucuuuuucuuuuucguugguguaaagccaacacccugucuaaaaaacauaaauuucuuuaaucauuuugccucuuuucucugugcuucaauuaauaaaaaauggaaagaaccuagaucuaaaaaaaaaaaaaaaaaaaaaaaaaaaaaaaaaaaaaaaaaaaaaaaaaaaaaaaaaaaaaaaaugcaucccccccccccccccccccccccccccccccaaaggcucuuuucagagccaccagaauu

SEQ ID NO: 961 - RNA, 1615 nt, Artificial Sequence
  mRNA Design i-2 (A64-N5-C30-hSL-N5) comprising derived and/or modified sequence from Pf(3D7)__XP_001351122.1__Pf-CSP(199-377)_L(PVTN)_HBsAg (opt1)
ggggcgcugccuacggagguggcagccaucuccuucucggcaucaagcuuaccauggaccccaacgccaacccgaacgccaaccccaacgcgaaccccaacgccaaccccaacgccaacccgaacgccaaccccaacgccaaccccaacgcgaaccccaacgccaacccgaacgccaaccccaacgccaaccccaacgcgaaccccaacgccaacccgaacgccaaccccaacgccaaccccaacgccaaccccaacgcgaacccgaacgccaaccccaacaagaacaaccagggcaacgggcagggccacaacaugcccaacgaccccaaccgcaacguggacgagaacgccaacgccaacagcgccgucaagaacaacaacaacgaggagccguccgacaagcacaucaaggaguaccugaacaagauccagaacagccucuccaccgaguggagccccugcuccgugaccugcgggaacggcauccaggugcggaucaagcccgggagcgcgaacaagcccaaggacgagcuggacuacgccaacgacaucgagaagaagaucugcaagauggagaagugcuccagcgucccggugacgaacauggagaacaucaccuccggcuuccugggcccccuccuggugcugcaggccggguucuuccuccugacccgcauccugaccaucccccagagccucgacuccugguggacgagccugaacuuccugggcgggucccccgucugccucggccagaacagccaguccccgaccagcaaccacucccccaccagcugcccgcccaucugccccggguaccgguggaugugccugcgccgguucaucaucuuccuguucauccuccugcugugccucaucuuccugcuggugcuccuggacuaccagggcaugcugcccgugugcccccucaucccgggcuccaccacgaccaacaccgggcccugcaagaccugcacgacccccgcccagggcaacagcauguuccccagcugcugcugcaccaagccgaccgacgggaacugcacgugcauccccauccccuccagcugggccuucgcgaaguaccugugggagugggccuccguccgcuucagcuggcugucccuccuggugcccuucgugcagugguucgucggccugagcccgaccguguggcucuccgccaucuggaugaugugguacuggggccccagccuguacuccaucgugagccccuucaucccccugcucccgaucuucuucugccugugggucuacaucugaggacuagugcaucacauuuaaaagcaucucagccuaccaugagaauaagagaaagaaaaugaagaucaauagcuuauucaucucuuuuucuuuuucguugguguaaagccaacacccugucuaaaaaacauaaauuucuuuaaucauuuugccucuuuucucugugcuucaauuaauaaaaaauggaaagaaccuagaucuaaaaaaaaaaaaaaaaaaaaaaaaaaaaaaaaaaaaaaaaaaaaaaaaaaaaaaaaaaaaaaaaugcaucccccccccccccccccccccccccccccccaaaggcucuuuucagagccaccagaauu

SEQ ID NO: 962 - RNA, 1657 nt, Artificial Sequence
  mRNA Design i-2 (A64-N5-C30-hSL-N5) comprising derived and/or modified sequence from Pf(3D7)__XP_001351122.1__Pf-CSP(199-387)_L(PVTN)_HBsAg (opt1)
ggggcgcugccuacggagguggcagccaucuccuucucggcaucaagcuuaccaugauggcccccgacccgaacgccaaccccaacgcgaaccccaacgccaaccccaacgccaacccgaacgccaaccccaacgccaaccccaacgcgaaccccaacgccaacccgaacgccaaccccaacgccaaccccaacgcgaaccccaacgccaacccgaacgccaaccccaacgccaaccccaacgccaaccccaacgcgaacccgaacgccaaccccaacgccaaccccaacaagaacaaccagggcaacgggcagggccacaacaugcccaacgacccgaaccgcaacguggacgagaacgccaacgccaacagcgcggucaagaacaacaacaacgaggagcccuccgacaagcacaucaaggaguaccugaacaagauccagaacagccucuccaccgaguggagccccugcuccgugaccugcgggaacggcauccaggugcggaucaagcccgggagcgccaacaagccgaaggacgagcuggacuacgccaacgacaucgagaagaagaucugcaagauggagaagugcuccagcgucuucaacguggugaacuccagcaucggccugggccccgucacgaacauggagaacaucaccuccggguuccucggcccccugcuggugcuccaggccggguucuuccugcugacccgcauccucaccaucccccagagccuggacuccugguggacgagccugaacuuccucggcggguccccggugugccugggccagaacagccagucccccaccagcaaccacucccccaccagcugcccgcccaucugccccggcuaccgguggaugugccugcgccgguucaucaucuuccucuucauccugcugcucugccugaucuuccugcucguccugcuggacuaccaggggaugcuccccgugugcccgcugauccccggcagcaccacgaccaacaccgggcccugcaagaccugcacgacccccgcccagggcaacuccauguucccgagcugcugcugcaccaagcccaccgacggcaacugcacgugcauccccauccccuccagcugggcguucgccaaguaccugugggagugggccuccgugcgcuucagcuggcucucccugcuggucccguucgugcagugguucguggggcucagccccaccgucuggcuguccgccaucuggaugaugugguacuggggccccagccuguacuccaucgugagccccuucaucccgcuccugcccaucuucuucugccuguggguguacaucugaggacuagugcaucacauuuaaaagcaucucagccuaccaugagaauaagagaaagaaaaugaagaucaauagcuuauucaucucuuuuucuuuuucguugguguaaagccaacacccugucuaaaaaacauaaauuucuuuaaucauuuugccucuuuucucugugcuucaauuaauaaaaaauggaaagaaccuagaucuaaaaaaaaaaaaaaaaaaaaaaaaaaaaaaaaaaaaaaaaaaaaaaaaaaaaaaaaaaaaaaaaugcaucccccccccccccccccccccccccccccccaaaggcucuuuucagagccaccagaauu

SEQ ID NO: 963 - RNA, 841 nt, Artificial Sequence
  mRNA Design i-2 (A64-N5-C30-hSL-N5) comprising derived and/or modified sequence from Pf(3D7)__XP_001351122.1__HsALB_Pf-CSP(19-152) (opt1)
ggggcgcugccuacggagguggcagccaucuccuucucggcaucaagcuuaccaugaagugggugaccuucaucagccuccuguuccuguucuccagcgccuacucccuguuccaggaguaccagugcuacggcagcuccagcaacacccgcguccucaacgagcugaacuacgacaacgccgggacgaaccuguacaacgagcucgagaugaacuacuacggcaagcaggagaacugguacucccugaagaagaacagccggucccugggggagaacgacgacggcaacaacgaggacaacgagaagcuccgcaagcccaagcacaagaagcugaagcagccggcggacgggaaccccgaccccaacgccaaccccaacguggacccgaacgccaaccccaacguggaccccaacgccaaccccaacgucgacccgaacgccaaccccaacgcgaaccccaacgccaaccccaacgccaacccgaacgccaaccccaacgcgaaccccugaggacuagugcaucacauuuaaaagcaucucagccuaccaugagaauaagagaaagaaaaugaagaucaauagcuuauucaucucuuuuucuuuuucguugguguaaagccaacacccugucuaaaaaacauaaauuucuuuaaucauuuugccucuuuucucugugcuucaauuaauaaaaaauggaaagaaccuagaucuaaaaaaaaaaaaaaaaaaaaaaaaaaaaaaaaaaaaaaaaaaaaaaaaaaaaaaaaaaaaaaaaugcaucccccccccccccccccccccccccccccccaaaggcucuuuucagagccaccagaauu

SEQ ID NO: 964 - RNA, 961 nt, Artificial Sequence
  mRNA Design i-2 (A64-N5-C30-hSL-N5) comprising derived and/or modified sequence from Pf(3D7)__XP_001351122.1__HsALB_Pf-CSP(19-192) (opt1)
ggggcgcugccuacggagguggcagccaucuccuucucggcaucaagcuuaccaugaagugggugaccuucaucagccuccuguuccuguucuccagcgccuacucccuguuccaggaguaccagugcuacggcagcuccagcaacacccgcguccucaacgagcugaacuacgacaacgccgggacgaaccuguacaacgagcucgagaugaacuacuacggcaagcaggagaacugguacucccugaagaagaacagccggucccugggggagaacgacgacggcaacaacgaggacaacgagaagcuccgcaagcccaagcacaagaagcugaagcagccggcggacgggaaccccgaccccaacgccaaccccaacguggacccgaacgccaaccccaacguggaccccaacgccaaccccaacgucgacccgaacgccaaccccaacgcgaaccccaacgccaaccccaacgccaacccgaacgccaaccccaacgcgaaccccaacgccaaccccaacgccaacccgaacgccaaccccaacgccaaccccaacgcgaaccccaacgccaacccgaacgccaaccccaacgccaaccccaacgccaaccccaacgcgaacccgugaggacuagugcaucacauuuaaaagcaucucagccuaccaugagaauaagagaaagaaaaugaagaucaauagcuuauucaucucuuuuucuuuuucguugguguaaagccaacacccugucuaaaaaacauaaauuucuuuaaucauuuugccucuuuucucugugcuucaauuaauaaaaaauggaaagaaccuagaucuaaaaaaaaaaaaaaaaaaaaaaaaaaaaaaaaaaaaaaaaaaaaaaaaaaaaaaaaaaaaaaaaugcaucccccccccccccccccccccccccccccccaaaggcucuuuucagagccaccagaauu

SEQ ID NO: 965 - RNA, 1201 nt, Artificial Sequence
  mRNA Design i-2 (A64-N5-C30-hSL-N5) comprising derived and/or modified sequence from Pf(3D7)__XP_001351122.1__HsALB_Pf-CSP(19-272) (opt1)
ggggcgcugccuacggagguggcagccaucuccuucucggcaucaagcuuaccaugaagugggugaccuucaucagccuccuguuccuguucuccagcgccuacucccuguuccaggaguaccagugcuacggcagcuccagcaacacccgcguccucaacgagcugaacuacgacaacgccgggacgaaccuguacaacgagcucgagaugaacuacuacggcaagcaggagaacugguacucccugaagaagaacagccggucccugggggagaacgacgacggcaacaacgaggacaacgagaagcuccgcaagcccaagcacaagaagcugaagcagccggcggacgggaaccccgaccccaacgccaaccccaacguggacccgaacgccaaccccaacguggaccccaacgccaaccccaacgucgacccgaacgccaaccccaacgcgaaccccaacgccaaccccaacgccaacccgaacgccaaccccaacgcgaaccccaacgccaaccccaacgccaacccgaacgccaaccccaacgccaaccccaacgcgaaccccaacgccaacccgaacgccaaccccaacgccaaccccaacgccaaccccaacgcgaacccgaacgccaaccccaacguggaccccaacgccaaccccaacgccaacccgaacgccaaccccaacgcgaaccccaacgccaacccgaacgccaaccccaacgccaaccccaacgccaaccccaacgcgaacccgaacgccaaccccaacgccaaccccaacgccaaccccaacgcgaacccgaacgccaaccccaacgccaaccccaacgccaaccccaacgccaacccgaacgcgaaccccugaggacuagugcaucacauuuaaaagcaucucagccuaccaugagaauaagagaaagaaaaugaagaucaauagcuuauucaucucuuuuucuuuuucguugguguaaagccaacacccugucuaaaaaacauaaauuucuuuaaucauuuugccucuuuucucugugcuucaauuaauaaaaaauggaaagaaccuagaucuaaaaaaaaaaaaaaaaaaaaaaaaaaaaaaaaaaaaaaaaaaaaaaaaaaaaaaaaaaaaaaaaugcaucccccccccccccccccccccccccccccccaaaggcucuuuucagagccaccagaauu

SEQ ID NO: 966 - RNA, 1363 nt, Artificial Sequence
  mRNA Design i-2 (A64-N5-C30-hSL-N5) comprising derived and/or modified sequence from Pf(3D7)__XP_001351122.1__HsALB_Pf-CSP(19-272)_L(AAY)_Pf-CSP(310-3 27)_L(AAY)_Pf-CSP(346-375) (opt1)
ggggcgcugccuacggagguggcagccaucuccuucucggcaucaagcuuaccaugaagugggugaccuucaucagccuccuguuccuguucuccagcgccuacucccuguuccaggaguaccagugcuacggcagcuccagcaacacccgcguccucaacgagcugaacuacgacaacgccgggacgaaccuguacaacgagcucgagaugaacuacuacggcaagcaggagaacugguacucccugaagaagaacagccggucccugggggagaacgacgacggcaacaacgaggacaacgagaagcuccgcaagcccaagcacaagaagcugaagcagccggcggacgggaaccccgaccccaacgccaaccccaacguggacccgaacgccaaccccaacguggaccccaacgccaaccccaacgucgacccgaacgccaaccccaacgcgaaccccaacgccaaccccaacgccaacccgaacgccaaccccaacgcgaaccccaacgccaaccccaacgccaacccgaacgccaaccccaacgccaaccccaacgcgaaccccaacgccaacccgaacgccaaccccaacgccaaccccaacgccaaccccaacgcgaacccgaacgccaaccccaacguggaccccaacgccaaccccaacgccaacccgaacgccaaccccaacgcgaaccccaacgccaacccgaacgccaaccccaacgccaaccccaacgccaaccccaacgcgaacccgaacgccaaccccaacgccaaccccaacgccaaccccaacgcgaacccgaacgccaaccccaacgccaaccccaacgccaaccccaacgccaacccgaacgcgaaccccgccgccuacgagcccagcgacaagcacaucaaggaguaccugaacaagauccagaacucccucgccgccuacaucaagcccggcagcgcgaacaagccgaaggacgagcuggacuacgccaacgacaucgagaagaagaucugcaagauggagaagugcuccugaggacuagugcaucacauuuaaaagcaucucagccuaccaugagaauaagagaaagaaaaugaagaucaauagcuuauucaucucuuuuucuuuuucguugguguaaagccaacacccugucuaaaaaacauaaauuucuuuaaucauuuugccucuuuucucugugcuucaauuaauaaaaaauggaaagaaccuagaucuaaaaaaaaaaaaaaaaaaaaaaaaaaaaaaaaaaaaaaaaaaaaaaaaaaaaaaaaaaaaaaaaugcaucccccccccccccccccccccccccccccccaaaggcucuuuucagagccaccagaauu

SEQ ID NO: 967 - RNA, 1324 nt, Artificial Sequence
  mRNA Design i-2 (A64-N5-C30-hSL-N5) comprising derived and/or modified sequence from Pf(3D7)__XP_001351122.1__HsALB_Pf-CSP(19-272)_L(AAY)_Pf-CSP(346-3 65)_L(AAY)_P2 (opt1)
ggggcgcugccuacggagguggcagccaucuccuucucggcaucaagcuuaccaugaagugggugaccuucaucagccuccuguuccuguucuccagcgccuacucccuguuccaggaguaccagugcuacggcagcuccagcaacacccgcguccucaacgagcugaacuacgacaacgccgggacgaaccuguacaacgagcucgagaugaacuacuacggcaagcaggagaacugguacucccugaagaagaacagccggucccugggggagaacgacgacggcaacaacgaggacaacgagaagcuccgcaagcccaagcacaagaagcugaagcagccggcggacgggaaccccgaccccaacgccaaccccaacguggacccgaacgccaaccccaacguggaccccaacgccaaccccaacgucgacccgaacgccaaccccaacgcgaaccccaacgccaaccccaacgccaacccgaacgccaaccccaacgcgaaccccaacgccaaccccaacgccaacccgaacgccaaccccaacgccaaccccaacgcgaaccccaacgccaacccgaacgccaaccccaacgccaaccccaacgccaaccccaacgcgaacccgaacgccaaccccaacguggaccccaacgccaaccccaacgccaacccgaacgccaaccccaacgcgaaccccaacgccaacccgaacgccaaccccaacgccaaccccaacgccaaccccaacgcgaacccgaacgccaaccccaacgccaaccccaacgccaaccccaacgcgaacccgaacgccaaccccaacgccaaccccaacgccaaccccaacgccaacccgaacgcgaaccccgccgccuacaucaagcccggcagcgccaacaagcccaaggacgagcuggacuacgccaacgacaucgaggcggccuaccaguacaucaaggccaacuccaaguucaucggcaucaccgagcucugaggacuagugcaucacauuuaaaagcaucucagccuaccaugagaauaagagaaagaaaaugaagaucaauagcuuauucaucucuuuuucuuuuucguugguguaaagccaacacccugucuaaaaaacauaaauuucuuuaaucauuuugccucuuuucucugugcuucaauuaauaaaaaauggaaagaaccuagaucuaaaaaaaaaaaaaaaaaaaaaaaaaaaaaaaaaaaaaaaaaaaaaaaaaaaaaaaaaaaaaaaaugcaucccccccccccccccccccccccccccccccaaaggcucuuuucagagccaccagaauu

SEQ ID NO: 968 - RNA, 1318 nt, Artificial Sequence
  mRNA Design i-2 (A64-N5-C30-hSL-N5) comprising derived and/or modified sequence from Pf(3D7)__XP_001351122.1__HsALB_Pf-CSP(19-272)_L(AAY)_Pf-CSP(346-3 65)_L(AAY)_PADRE (opt1)
ggggcgcugccuacggagguggcagccaucuccuucucggcaucaagcuuaccaugaagugggugaccuucaucagccuccuguuccuguucuccagcgccuacucccuguuccaggaguaccagugcuacggcagcuccagcaacacccgcguccucaacgagcugaacuacgacaacgccgggacgaaccuguacaacgagcucgagaugaacuacuacggcaagcaggagaacugguacucccugaagaagaacagccggucccugggggagaacgacgacggcaacaacgaggacaacgagaagcuccgcaagcccaagcacaagaagcugaagcagccggcggacgggaaccccgaccccaacgccaaccccaacguggacccgaacgccaaccccaacguggaccccaacgccaaccccaacgucgacccgaacgccaaccccaacgcgaaccccaacgccaaccccaacgccaacccgaacgccaaccccaacgcgaaccccaacgccaaccccaacgccaacccgaacgccaaccccaacgccaaccccaacgcgaaccccaacgccaacccgaacgccaaccccaacgccaaccccaacgccaaccccaacgcgaacccgaacgccaaccccaacguggaccccaacgccaaccccaacgccaacccgaacgccaaccccaacgcgaaccccaacgccaacccgaacgccaaccccaacgccaaccccaacgccaaccccaacgcgaacccgaacgccaaccccaacgccaaccccaacgccaaccccaacgcgaacccgaacgccaaccccaacgccaaccccaacgccaaccccaacgccaacccgaacgcgaaccccgccgccuacaucaagcccggcagcgccaacaagcccaaggacgagcuggacuacgccaacgacaucgaggcggccuacgccaaguucguggccgccuggacccucaaggcggccgccugaggacuagugcaucacauuuaaaagcaucucagccuaccaugagaauaagagaaagaaaaugaagaucaauagcuuauucaucucuuuuucuuuuucguugguguaaagccaacacccugucuaaaaaacauaaauuucuuuaaucauuuugccucuuuucucugugcuucaauuaauaaaaaauggaaagaaccuagaucuaaaaaaaaaaaaaaaaaaaaaaaaaaaaaaaaaaaaaaaaaaaaaaaaaaaaaaaaaaaaaaaaugcaucccccccccccccccccccccccccccccccaaaggcucuuuucagagccaccagaauu

SEQ ID NO: 969 - RNA, 1375 nt, Artificial Sequence
  mRNA Design i-2 (A64-N5-C30-hSL-N5) comprising derived and/or modified sequence from Pf(3D7)__XP_001351122.1__HsALB_Pf-CSP(19-272)_L(G4S)_Pf-CSP(310-3 27)_L(G4S)_Pf-CSP(346-375) (opt1)
ggggcgcugccuacggagguggcagccaucuccuucucggcaucaagcuuaccaugaagugggugaccuucaucagccuccuguuccuguucuccagcgccuacucccuguuccaggaguaccagugcuacggcagcuccagcaacacccgcguccucaacgagcugaacuacgacaacgccgggacgaaccuguacaacgagcucgagaugaacuacuacggcaagcaggagaacugguacucccugaagaagaacagccggucccugggggagaacgacgacggcaacaacgaggacaacgagaagcuccgcaagcccaagcacaagaagcugaagcagccggcggacgggaaccccgaccccaacgccaaccccaacguggacccgaacgccaaccccaacguggaccccaacgccaaccccaacgucgacccgaacgccaaccccaacgcgaaccccaacgccaaccccaacgccaacccgaacgccaaccccaacgcgaaccccaacgccaaccccaacgccaacccgaacgccaaccccaacgccaaccccaacgcgaaccccaacgccaacccgaacgccaaccccaacgccaaccccaacgccaaccccaacgcgaacccgaacgccaaccccaacguggaccccaacgccaaccccaacgccaacccgaacgccaaccccaacgcgaaccccaacgccaacccgaacgccaaccccaacgccaaccccaacgccaaccccaacgcgaacccgaacgccaaccccaacgccaaccccaacgccaaccccaacgcgaacccgaacgccaaccccaacgccaaccccaacgccaaccccaacgccaacccgaacgcgaaccccggcggcgggggcagcgagcccuccgacaagcacaucaaggaguaccugaacaagauccagaacagccucgggggcgggggcuccaucaagcccggcagcgccaacaagccgaaggacgagcuggacuacgccaacgacaucgagaagaagaucugcaagauggagaagugcuccugaggacuagugcaucacauuuaaaagcaucucagccuaccaugagaauaagagaaagaaaaugaagaucaauagcuuauucaucucuuuuucuuuuucguugguguaaagccaacacccugucuaaaaaacauaaauuucuuuaaucauuuugccucuuuucucugugcuucaauuaauaaaaaauggaaagaaccuagaucuaaaaaaaaaaaaaaaaaaaaaaaaaaaaaaaaaaaaaaaaaaaaaaaaaaaaaaaaaaaaaaaaugcaucccccccccccccccccccccccccccccccaaaggcucuuuucagagccaccagaauu

SEQ ID NO: 970 - RNA, 1360 nt, Artificial Sequence
  mRNA Design i-2 (A64-N5-C30-hSL-N5) comprising derived and/or modified sequence from Pf(3D7)__XP_001351122.1__HsALB_Pf-CSP(19-272)_L(G4S)_Pf-CSP(310-3 27)_Pf-CSP(346-375) (opt1)
ggggcgcugccuacggagguggcagccaucuccuucucggcaucaagcuuaccaugaagugggugaccuucaucagccuccuguuccuguucuccagcgccuacucccuguuccaggaguaccagugcuacggcagcuccagcaacacccgcguccucaacgagcugaacuacgacaacgccgggacgaaccuguacaacgagcucgagaugaacuacuacggcaagcaggagaacugguacucccugaagaagaacagccggucccugggggagaacgacgacggcaacaacgaggacaacgagaagcuccgcaagcccaagcacaagaagcugaagcagccggcggacgggaaccccgaccccaacgccaaccccaacguggacccgaacgccaaccccaacguggaccccaacgccaaccccaacgucgacccgaacgccaaccccaacgcgaaccccaacgccaaccccaacgccaacccgaacgccaaccccaacgcgaaccccaacgccaaccccaacgccaacccgaacgccaaccccaacgccaaccccaacgcgaaccccaacgccaacccgaacgccaaccccaacgccaaccccaacgccaaccccaacgcgaacccgaacgccaaccccaacguggaccccaacgccaaccccaacgccaacccgaacgccaaccccaacgcgaaccccaacgccaacccgaacgccaaccccaacgccaaccccaacgccaaccccaacgcgaacccgaacgccaaccccaacgccaaccccaacgccaaccccaacgcgaacccgaacgccaaccccaacgccaaccccaacgccaaccccaacgccaacccgaacgcgaaccccggcggcgggggcagcgagcccuccgacaagcacaucaaggaguaccugaacaagauccagaacagccucaucaagcccggguccgccaacaagccgaaggacgagcuggacuacgccaacgacaucgagaagaagaucugcaagauggagaagugcagcugaggacuagugcaucacauuuaaaagcaucucagccuaccaugagaauaagagaaagaaaaugaagaucaauagcuuauucaucucuuuuucuuuuucguugguguaaagccaacacccugucuaaaaaacauaaauuucuuuaaucauuuugccucuuuucucugugcuucaauuaauaaaaaauggaaagaaccuagaucuaaaaaaaaaaaaaaaaaaaaaaaaaaaaaaaaaaaaaaaaaaaaaaaaaaaaaaaaaaaaaaaaugcaucccccccccccccccccccccccccccccccaaaggcucuuuucagagccaccagaauu

SEQ ID NO: 971 - RNA, 1360 nt, Artificial Sequence
  mRNA Design i-2 (A64-N5-C30-hSL-N5) comprising derived and/or modified sequence from Pf(3D7)__XP_001351122.1__HsALB_Pf-CSP(19-325) (opt1)
ggggcgcugccuacggagguggcagccaucuccuucucggcaucaagcuuaccaugaagugggugaccuucaucagccuccuguuccuguucuccagcgccuacucccuguuccaggaguaccagugcuacggcagcuccagcaacacccgcguccucaacgagcugaacuacgacaacgccgggacgaaccuguacaacgagcucgagaugaacuacuacggcaagcaggagaacugguacucccugaagaagaacagccggucccugggggagaacgacgacggcaacaacgaggacaacgagaagcuccgcaagcccaagcacaagaagcugaagcagccggcggacgggaaccccgaccccaacgccaaccccaacguggacccgaacgccaaccccaacguggaccccaacgccaaccccaacgucgacccgaacgccaaccccaacgcgaaccccaacgccaaccccaacgccaacccgaacgccaaccccaacgcgaaccccaacgccaaccccaacgccaacccgaacgccaaccccaacgccaaccccaacgcgaaccccaacgccaacccgaacgccaaccccaacgccaaccccaacgccaaccccaacgcgaacccgaacgccaaccccaacguggaccccaacgccaaccccaacgccaacccgaacgccaaccccaacgcgaaccccaacgccaacccgaacgccaaccccaacgccaaccccaacgccaaccccaacgcgaacccgaacgccaaccccaacgccaaccccaacgccaaccccaacgcgaacccgaacgccaaccccaacgccaaccccaacgccaaccccaacgccaacccgaacgcgaaccccaacaagaacaaccagggcaacggccaggggcacaacaugcccaacgaccccaaccggaacguggacgagaacgccaacgccaacagcgccgucaagaacaacaacaacgaggagccguccgacaagcacaucaaggaguaccugaacaagauccagaacugaggacuagugcaucacauuuaaaagcaucucagccuaccaugagaauaagagaaagaaaaugaagaucaauagcuuauucaucucuuuuucuuuuucguugguguaaagccaacacccugucuaaaaaacauaaauuucuuuaaucauuuugccucuuuucucugugcuucaauuaauaaaaaauggaaagaaccuagaucuaaaaaaaaaaaaaaaaaaaaaaaaaaaaaaaaaaaaaaaaaaaaaaaaaaaaaaaaaaaaaaaaugcaucccccccccccccccccccccccccccccccaaaggcucuuuucagagccaccagaauu

SEQ ID NO: 972 - RNA, 1537 nt, Artificial Sequence
  mRNA Design i-2 (A64-N5-C30-hSL-N5) comprising derived and/or modified sequence from Pf(3D7)__XP_001351122.1__HsALB_Pf-CSP(19-384) (opt1)
ggggcgcugccuacggagguggcagccaucuccuucucggcaucaagcuuaccaugaagugggugaccuucaucagccuccuguuccuguucuccagcgccuacucccuguuccaggaguaccagugcuacggcagcuccagcaacacccgcguccucaacgagcugaacuacgacaacgccgggacgaaccuguacaacgagcucgagaugaacuacuacggcaagcaggagaacugguacucccugaagaagaacagccggucccugggggagaacgacgacggcaacaacgaggacaacgagaagcuccgcaagcccaagcacaagaagcugaagcagccggcggacgggaaccccgaccccaacgccaaccccaacguggacccgaacgccaaccccaacguggaccccaacgccaaccccaacgucgacccgaacgccaaccccaacgcgaaccccaacgccaaccccaacgccaacccgaacgccaaccccaacgcgaaccccaacgccaaccccaacgccaacccgaacgccaaccccaacgccaaccccaacgcgaaccccaacgccaacccgaacgccaaccccaacgccaaccccaacgccaaccccaacgcgaacccgaacgccaaccccaacguggaccccaacgccaaccccaacgccaacccgaacgccaaccccaacgcgaaccccaacgccaacccgaacgccaaccccaacgccaaccccaacgccaaccccaacgcgaacccgaacgccaaccccaacgccaaccccaacgccaaccccaacgcgaacccgaacgccaaccccaacgccaaccccaacgccaaccccaacgccaacccgaacgcgaaccccaacaagaacaaccagggcaacggccaggggcacaacaugcccaacgaccccaaccggaacguggacgagaacgccaacgccaacagcgccgucaagaacaacaacaacgaggagccguccgacaagcacaucaaggaguaccugaacaagauccagaacagccucuccaccgaguggagccccugcuccgugaccugcggcaacgggauccaggugcgcaucaagcccggcagcgccaacaagcccaaggacgagcuggacuacgcgaacgacaucgagaagaagaucugcaagauggagaagugcuccagcgucuucaacguggugaacuccagcugaggacuagugcaucacauuuaaaagcaucucagccuaccaugagaauaagagaaagaaaaugaagaucaauagcuuauucaucucuuuuucuuuuucguugguguaaagccaacacccugucuaaaaaacauaaauuucuuuaaucauuuugccucuuuucucugugcuucaauuaauaaaaaauggaaagaaccuagaucuaaaaaaaaaaaaaaaaaaaaaaaaaaaaaaaaaaaaaaaaaaaaaaaaaaaaaaaaaaaaaaaaugcaucccccccccccccccccccccccccccccccaaaggcucuuuucagagccaccagaauu

SEQ ID NO: 973 - RNA, 1675 nt, Artificial Sequence
  mRNA Design i-2 (A64-N5-C30-hSL-N5) comprising derived and/or modified sequence from Pf(3D7)__XP_001351122.1__HsALB_Pf-CSP(19-384)_TM domain HA (opt1)
ggggcgcugccuacggagguggcagccaucuccuucucggcaucaagcuuaccaugaagugggugaccuucaucagccuccuguuccuguucuccagcgccuacucccuguuccaggaguaccagugcuacggcagcuccagcaacacccgcguccucaacgagcugaacuacgacaacgccgggacgaaccuguacaacgagcucgagaugaacuacuacggcaagcaggagaacugguacucccugaagaagaacagccggucccugggggagaacgacgacggcaacaacgaggacaacgagaagcuccgcaagcccaagcacaagaagcugaagcagccggcggacgggaaccccgaccccaacgccaaccccaacguggacccgaacgccaaccccaacguggaccccaacgccaaccccaacgucgacccgaacgccaaccccaacgcgaaccccaacgccaaccccaacgccaacccgaacgccaaccccaacgcgaaccccaacgccaaccccaacgccaacccgaacgccaaccccaacgccaaccccaacgcgaaccccaacgccaacccgaacgccaaccccaacgccaaccccaacgccaaccccaacgcgaacccgaacgccaaccccaacguggaccccaacgccaaccccaacgccaacccgaacgccaaccccaacgcgaaccccaacgccaacccgaacgccaaccccaacgccaaccccaacgccaaccccaacgcgaacccgaacgccaaccccaacgccaaccccaacgccaaccccaacgcgaacccgaacgccaaccccaacgccaaccccaacgccaaccccaacgccaacccgaacgcgaaccccaacaagaacaaccagggcaacggccaggggcacaacaugcccaacgaccccaaccggaacguggacgagaacgccaacgccaacagcgccgucaagaacaacaacaacgaggagccguccgacaagcacaucaaggaguaccugaacaagauccagaacagccucuccaccgaguggagccccugcuccgugaccugcggcaacgggauccaggugcgcaucaagcccggcagcgccaacaagcccaaggacgagcuggacuacgcgaacgacaucgagaagaagaucugcaagauggagaagugcuccagcgucuucaacguggugaacuccagcaagcuggagagcacccggaucuaccagauccucgccaucuacuccacggucgccagcucccuggugcugguggucagccucggggccaucuccuucuggaugugcagcaacggcucccugcagugccgcaucugcaucugaggacuagugcaucacauuuaaaagcaucucagccuaccaugagaauaagagaaagaaaaugaagaucaauagcuuauucaucucuuuuucuuuuucguugguguaaagccaacacccugucuaaaaaacauaaauuucuuuaaucauuuugccucuuuucucugugcuucaauuaauaaaaaauggaaagaaccuagaucuaaaaaaaaaaaaaaaaaaaaaaaaaaaaaaaaaaaaaaaaaaaaaaaaaaaaaaaaaaaaaaaaugcaucccccccccccccccccccccccccccccccaaaggcucuuuucagagccaccagaauu

SEQ ID NO: 974 - RNA, 1387 nt, Artificial Sequence
  mRNA Design i-2 (A64-N5-C30-hSL-N5) comprising derived and/or modified sequence from Pf(3D7)__XP_001351122.1__HsALB_Pf-CSP(82-397) (opt1)
ggggcgcugccuacggagguggcagccaucuccuucucggcaucaagcuuaccaugaagugggugaccuucaucagccuccuguuccuguucuccagcgccuacuccgacaacgagaagcugcgcaagcccaagcacaagaagcucaagcagccggccgacggcaaccccgaccccaacgcgaaccccaacgucgacccgaacgccaaccccaacguggaccccaacgccaaccccaacguggacccgaacgccaaccccaacgccaaccccaacgcgaaccccaacgccaacccgaacgccaaccccaacgccaaccccaacgcgaaccccaacgccaacccgaacgccaaccccaacgccaaccccaacgccaaccccaacgcgaacccgaacgccaaccccaacgccaaccccaacgccaaccccaacgccaacccgaacgcgaaccccaacgucgaccccaacgccaaccccaacgccaacccgaacgccaaccccaacgccaaccccaacgcgaacccgaacgccaaccccaacgccaaccccaacgccaaccccaacgccaacccgaacgcgaaccccaacgccaaccccaacgccaaccccaacgccaacccgaacgcgaaccccaacgccaaccccaacgccaaccccaacgccaacccgaacgccaaccccaacaagaacaaccaggggaacggccaggggcacaacaugcccaacgaccccaaccggaacguggacgagaacgcgaacgccaacagcgccgugaagaacaacaacaacgaggagccguccgacaagcacaucaaggaguaccugaacaagauccagaacagccuguccaccgaguggagccccugcuccgucacgugcggcaacgggauccaggugcgcaucaagcccggcagcgccaacaagcccaaggacgagcucgacuacgccaacgacaucgagaagaagaucugcaagauggagaagugcuccagcguguucaacgucgugaacuccagcaucggccugaucauggugcuguccuuccucuuccugaacugaggacuagugcaucacauuuaaaagcaucucagccuaccaugagaauaagagaaagaaaaugaagaucaauagcuuauucaucucuuuuucuuuuucguugguguaaagccaacacccugucuaaaaaacauaaauuucuuuaaucauuuugccucuuuucucugugcuucaauuaauaaaaaauggaaagaaccuagaucuaaaaaaaaaaaaaaaaaaaaaaaaaaaaaaaaaaaaaaaaaaaaaaaaaaaaaaaaaaaaaaaaugcaucccccccccccccccccccccccccccccccaaaggcucuuuucagagccaccagaauu

SEQ ID NO: 975 - RNA, 739 nt, Artificial Sequence
  mRNA Design i-2 (A64-N5-C30-hSL-N5) comprising derived and/or modified sequence from Pf(3D7)__XP_001351122.1__HsALB_Pf-CSP(93-192) (opt1)
ggggcgcugccuacggagguggcagccaucuccuucucggcaucaagcuuaccaugaagugggugaccuucaucagccuccuguuccuguucuccagcgccuacuccaagcugaagcagcccgccgacggcaacccggaccccaacgcgaaccccaacgucgaccccaacgccaacccgaacguggaccccaacgccaaccccaacguggaccccaacgccaacccgaacgccaaccccaacgcgaaccccaacgccaaccccaacgccaacccgaacgccaaccccaacgcgaaccccaacgccaaccccaacgccaacccgaacgccaaccccaacgccaaccccaacgcgaaccccaacgccaacccgaacgccaaccccaacgccaaccccaacgccaaccccugaggacuagugcaucacauuuaaaagcaucucagccuaccaugagaauaagagaaagaaaaugaagaucaauagcuuauucaucucuuuuucuuuuucguugguguaaagccaacacccugucuaaaaaacauaaauuucuuuaaucauuuugccucuuuucucugugcuucaauuaauaaaaaauggaaagaaccuagaucuaaaaaaaaaaaaaaaaaaaaaaaaaaaaaaaaaaaaaaaaaaaaaaaaaaaaaaaaaaaaaaaaugcaucccccccccccccccccccccccccccccccaaaggcucuuuucagagccaccagaauu

SEQ ID NO: 976 - RNA, 979 nt, Artificial Sequence
  mRNA Design i-2 (A64-N5-C30-hSL-N5) comprising derived and/or modified sequence from Pf(3D7)__XP_001351122.1__HsALB_Pf-CSP(93-272) (opt1)
ggggcgcugccuacggagguggcagccaucuccuucucggcaucaagcuuaccaugaagugggugaccuucaucagccuccuguuccuguucuccagcgccuacuccaagcugaagcagcccgccgacggcaacccggaccccaacgcgaaccccaacgucgaccccaacgccaacccgaacguggaccccaacgccaaccccaacguggaccccaacgccaacccgaacgccaaccccaacgcgaaccccaacgccaaccccaacgccaacccgaacgccaaccccaacgcgaaccccaacgccaaccccaacgccaacccgaacgccaaccccaacgccaaccccaacgcgaaccccaacgccaacccgaacgccaaccccaacgccaaccccaacgccaaccccaacgcgaacccgaacgucgaccccaacgccaaccccaacgccaaccccaacgccaacccgaacgccaaccccaacgcgaaccccaacgccaacccgaacgccaaccccaacgccaaccccaacgccaaccccaacgcgaacccgaacgccaaccccaacgccaaccccaacgccaaccccaacgcgaacccgaacgccaaccccaacgccaaccccaacgccaaccccaacgccaacccgugaggacuagugcaucacauuuaaaagcaucucagccuaccaugagaauaagagaaagaaaaugaagaucaauagcuuauucaucucuuuuucuuuuucguugguguaaagccaacacccugucuaaaaaacauaaauuucuuuaaucauuuugccucuuuucucugugcuucaauuaauaaaaaauggaaagaaccuagaucuaaaaaaaaaaaaaaaaaaaaaaaaaaaaaaaaaaaaaaaaaaaaaaaaaaaaaaaaaaaaaaaaugcaucccccccccccccccccccccccccccccccaaaggcucuuuucagagccaccagaauu

SEQ ID NO: 977 - RNA, 1354 nt, Artificial Sequence
  mRNA Design i-2 (A64-N5-C30-hSL-N5) comprising derived and/or modified sequence from Pf(3D7)__XP_001351122.1__HsALB_Pf-CSP(93-397) (opt1)
ggggcgcugccuacggagguggcagccaucuccuucucggcaucaagcuuaccaugaagugggugaccuucaucagccuccuguuccuguucuccagcgccuacuccaagcugaagcagcccgccgacggcaacccggaccccaacgcgaaccccaacgucgaccccaacgccaacccgaacguggaccccaacgccaaccccaacguggaccccaacgccaacccgaacgccaaccccaacgcgaaccccaacgccaaccccaacgccaacccgaacgccaaccccaacgcgaaccccaacgccaaccccaacgccaacccgaacgccaaccccaacgccaaccccaacgcgaaccccaacgccaacccgaacgccaaccccaacgccaaccccaacgccaaccccaacgcgaacccgaacgucgaccccaacgccaaccccaacgccaaccccaacgccaacccgaacgccaaccccaacgcgaaccccaacgccaacccgaacgccaaccccaacgccaaccccaacgccaaccccaacgcgaacccgaacgccaaccccaacgccaaccccaacgccaaccccaacgcgaacccgaacgccaaccccaacgccaaccccaacgccaaccccaacgccaacccgaacaagaacaaccaggggaacggccaggggcacaacaugcccaacgaccccaaccgcaacguggacgagaacgcgaacgccaacagcgccgugaagaacaacaacaacgaggagcccuccgacaagcacaucaaggaguaccucaacaagauccagaacagccuguccaccgaguggagcccgugcuccgucacgugcggcaacgggauccaggugcggaucaagcccggcagcgccaacaagcccaaggacgagcuggacuacgccaacgacaucgagaagaagaucugcaagauggagaagugcuccagcguguucaacgucgugaacuccagcaucggccucaucauggugcuguccuuccuguuccucaacugaggacuagugcaucacauuuaaaagcaucucagccuaccaugagaauaagagaaagaaaaugaagaucaauagcuuauucaucucuuuuucuuuuucguugguguaaagccaacacccugucuaaaaaacauaaauuucuuuaaucauuuugccucuuuucucugugcuucaauuaauaaaaaauggaaagaaccuagaucuaaaaaaaaaaaaaaaaaaaaaaaaaaaaaaaaaaaaaaaaaaaaaaaaaaaaaaaaaaaaaaaaugcaucccccccccccccccccccccccccccccccaaaggcucuuuucagagccaccagaauu

SEQ ID NO: 978 - RNA, 724 nt, Artificial Sequence
  mRNA Design i-2 (A64-N5-C30-hSL-N5) comprising derived and/or modified sequence from Pf(3D7)__XP_001351122.1__HsALB_Pf-CSP(98-192) (opt1)
ggggcgcugccuacggagguggcagccaucuccuucucggcaucaagcuuaccaugaagugggugaccuucaucagccuccuguuccuguucuccagcgccuacuccgccgacggcaaccccgacccgaacgcgaaccccaacgucgaccccaacgccaaccccaacguggacccgaacgccaaccccaacguggaccccaacgccaaccccaacgccaacccgaacgcgaaccccaacgccaaccccaacgccaaccccaacgccaacccgaacgcgaaccccaacgccaaccccaacgccaaccccaacgccaacccgaacgccaaccccaacgcgaaccccaacgccaaccccaacgccaacccgaacgccaaccccaacgccaaccccugaggacuagugcaucacauuuaaaagcaucucagccuaccaugagaauaagagaaagaaaaugaagaucaauagcuuauucaucucuuuuucuuuuucguugguguaaagccaacacccugucuaaaaaacauaaauuucuuuaaucauuuugccucuuuucucugugcuucaauuaauaaaaaauggaaagaaccuagaucuaaaaaaaaaaaaaaaaaaaaaaaaaaaaaaaaaaaaaaaaaaaaaaaaaaaaaaaaaaaaaaaaugcaucccccccccccccccccccccccccccccccaaaggcucuuuucagagccaccagaauu

SEQ ID NO: 979 - RNA, 964 nt, Artificial Sequence
  mRNA Design i-2 (A64-N5-C30-hSL-N5) comprising derived and/or modified sequence from Pf(3D7)__XP_001351122.1__HsALB_Pf-CSP(98-272) (opt1)
ggggcgcugccuacggagguggcagccaucuccuucucggcaucaagcuuaccaugaagugggugaccuucaucagccuccuguuccuguucuccagcgccuacuccgccgacggcaaccccgacccgaacgcgaaccccaacgucgaccccaacgccaaccccaacguggacccgaacgccaaccccaacguggaccccaacgccaaccccaacgccaacccgaacgcgaaccccaacgccaaccccaacgccaaccccaacgccaacccgaacgcgaaccccaacgccaaccccaacgccaaccccaacgccaacccgaacgccaaccccaacgcgaaccccaacgccaaccccaacgccaacccgaacgccaaccccaacgccaaccccaacgcgaaccccaacgucgacccgaacgccaaccccaacgccaaccccaacgccaaccccaacgccaacccgaacgcgaaccccaacgccaaccccaacgccaacccgaacgccaaccccaacgccaaccccaacgcgaaccccaacgccaacccgaacgccaaccccaacgccaaccccaacgcgaaccccaacgccaacccgaacgccaaccccaacgccaaccccaacgccaaccccugaggacuagugcaucacauuuaaaagcaucucagccuaccaugagaauaagagaaagaaaaugaagaucaauagcuuauucaucucuuuuucuuuuucguugguguaaagccaacacccugucuaaaaaacauaaauuucuuuaaucauuuugccucuuuucucugugcuucaauuaauaaaaaauggaaagaaccuagaucuaaaaaaaaaaaaaaaaaaaaaaaaaaaaaaaaaaaaaaaaaaaaaaaaaaaaaaaaaaaaaaaaugcaucccccccccccccccccccccccccccccccaaaggcucuuuucagagccaccagaauu

SEQ ID NO: 980 - RNA, 1270 nt, Artificial Sequence
  mRNA Design i-2 (A64-N5-C30-hSL-N5) comprising derived and/or modified sequence from Pf(3D7)__XP_001351122.1__HsALB_Pf-CSP(98-374) (opt1)
ggggcgcugccuacggagguggcagccaucuccuucucggcaucaagcuuaccaugaagugggugaccuucaucagccuccuguuccuguucuccagcgccuacuccgccgacggcaaccccgacccgaacgcgaaccccaacgucgaccccaacgccaaccccaacguggacccgaacgccaaccccaacguggaccccaacgccaaccccaacgccaacccgaacgcgaaccccaacgccaaccccaacgccaaccccaacgccaacccgaacgcgaaccccaacgccaaccccaacgccaaccccaacgccaacccgaacgccaaccccaacgcgaaccccaacgccaaccccaacgccaacccgaacgccaaccccaacgccaaccccaacgcgaaccccaacgucgacccgaacgccaaccccaacgccaaccccaacgccaaccccaacgccaacccgaacgcgaaccccaacgccaaccccaacgccaacccgaacgccaaccccaacgccaaccccaacgcgaaccccaacgccaacccgaacgccaaccccaacgccaaccccaacgcgaaccccaacgccaacccgaacgccaaccccaacgccaaccccaacgccaaccccaacaagaacaaccaggggaacggccaggggcacaacaugccgaacgaccccaaccgcaacguggacgagaacgcgaacgccaacagcgccgugaagaacaacaacaacgaggagcccuccgacaagcacaucaaggaguaccugaacaagauccagaacagccucuccaccgaguggagccccugcuccgucacgugcggcaacgggauccaggugcggaucaagccgggcagcgccaacaagcccaaggacgagcuggacuacgccaacgacaucgagaagaagaucugcaagauggagaagugcugaggacuagugcaucacauuuaaaagcaucucagccuaccaugagaauaagagaaagaaaaugaagaucaauagcuuauucaucucuuuuucuuuuucguugguguaaagccaacacccugucuaaaaaacauaaauuucuuuaaucauuuugccucuuuucucugugcuucaauuaauaaaaaauggaaagaaccuagaucuaaaaaaaaaaaaaaaaaaaaaaaaaaaaaaaaaaaaaaaaaaaaaaaaaaaaaaaaaaaaaaaaugcaucccccccccccccccccccccccccccccccaaaggcucuuuucagagccaccagaauu

SEQ ID NO: 981 - RNA, 1339 nt, Artificial Sequence
  mRNA Design i-2 (A64-N5-C30-hSL-N5) comprising derived and/or modified sequence from Pf(3D7)__XP_001351122.1__HsALB_Pf-CSP(98-397) (opt1)
ggggcgcugccuacggagguggcagccaucuccuucucggcaucaagcuuaccaugaagugggugaccuucaucagccuccuguuccuguucuccagcgccuacuccgccgacggcaaccccgacccgaacgcgaaccccaacgucgaccccaacgccaaccccaacguggacccgaacgccaaccccaacguggaccccaacgccaaccccaacgccaacccgaacgcgaaccccaacgccaaccccaacgccaaccccaacgccaacccgaacgcgaaccccaacgccaaccccaacgccaaccccaacgccaacccgaacgccaaccccaacgcgaaccccaacgccaaccccaacgccaacccgaacgccaaccccaacgccaaccccaacgcgaaccccaacgucgacccgaacgccaaccccaacgccaaccccaacgccaaccccaacgccaacccgaacgcgaaccccaacgccaaccccaacgccaacccgaacgccaaccccaacgccaaccccaacgcgaaccccaacgccaacccgaacgccaaccccaacgccaaccccaacgcgaaccccaacgccaacccgaacgccaaccccaacgccaaccccaacgccaaccccaacaagaacaaccaggggaacggccaggggcacaacaugccgaacgaccccaaccgcaacguggacgagaacgcgaacgccaacagcgccgugaagaacaacaacaacgaggagcccuccgacaagcacaucaaggaguaccugaacaagauccagaacagccucuccaccgaguggagccccugcuccgucacgugcggcaacgggauccaggugcggaucaagccgggcagcgccaacaagcccaaggacgagcuggacuacgccaacgacaucgagaagaagaucugcaagauggagaagugcuccagcguguucaacgucgugaacuccagcaucggccugaucauggugcucuccuuccuguuccugaacugaggacuagugcaucacauuuaaaagcaucucagccuaccaugagaauaagagaaagaaaaugaagaucaauagcuuauucaucucuuuuucuuuuucguugguguaaagccaacacccugucuaaaaaacauaaauuucuuuaaucauuuugccucuuuucucugugcuucaauuaauaaaaaauggaaagaaccuagaucuaaaaaaaaaaaaaaaaaaaaaaaaaaaaaaaaaaaaaaaaaaaaaaaaaaaaaaaaaaaaaaaaugcaucccccccccccccccccccccccccccccccaaaggcucuuuucagagccaccagaauu

SEQ ID NO: 982 - RNA, 1666 nt, Artificial Sequence
  mRNA Design i-2 (A64-N5-C30-hSL-N5) comprising derived and/or modified sequence from Pf(3D7)__XP_001351122.1__HsALB_Pf-CSP(199-377)_L(PVTN)_HBsAg (opt1)
ggggcgcugccuacggagguggcagccaucuccuucucggcaucaagcuuaccaugaagugggugaccuucaucagccuccuguuccuguucuccagcgccuacuccgaccccaacgccaacccgaacgcgaaccccaacgccaaccccaacgccaaccccaacgccaacccgaacgccaaccccaacgcgaaccccaacgccaaccccaacgccaacccgaacgccaaccccaacgcgaaccccaacgccaaccccaacgccaacccgaacgccaaccccaacgccaaccccaacgcgaaccccaacgccaacccgaacgccaaccccaacaagaacaaccagggcaacgggcagggccacaacaugcccaacgaccccaaccgcaacgucgacgagaacgccaacgccaacagcgcggugaagaacaacaacaacgaggagccguccgacaagcacaucaaggaguaccugaacaagauccagaacagccucuccaccgaguggagccccugcuccgugaccugcgggaacggcauccagguccggaucaagcccgggagcgccaacaagcccaaggacgagcuggacuacgccaacgacaucgagaagaagaucugcaagauggagaagugcuccagcgugccggugaccaacauggagaacaucaccuccggcuuccugggcccccuccugguccugcaggccggguucuuccuccugacccgcauccugacgaucccccagagccucgacuccugguggaccagccugaacuuccugggcgggucccccgugugccucggccagaacagccaguccccgaccagcaaccacagccccaccuccugcccgcccaucugccccggguaccgguggaugugccugcgccgguucaucaucuuccuguucauccuccugcugugccucaucuuccugcuggugcuccuggacuaccagggcaugcugcccgucugcccccucaucccgggcagcacgaccaccaacaccgggcccugcaagacgugcaccacccccgcccagggcaacuccauguuccccagcugcugcugcaccaagccgacggacgggaacugcacgugcauccccauccccuccagcugggcguucgccaaguaccugugggagugggccuccgugcgcuucagcuggcugucccuccuggugcccuucguccagugguucgugggccugagcccgaccguguggcucuccgccaucuggaugaugugguacuggggccccagccuguacuccaucgucagccccuucaucccccugcucccgaucuucuucugccuguggguguacaucugaggacuagugcaucacauuuaaaagcaucucagccuaccaugagaauaagagaaagaaaaugaagaucaauagcuuauucaucucuuuuucuuuuucguugguguaaagccaacacccugucuaaaaaacauaaauuucuuuaaucauuuugccucuuuucucugugcuucaauuaauaaaaaauggaaagaaccuagaucuaaaaaaaaaaaaaaaaaaaaaaaaaaaaaaaaaaaaaaaaaaaaaaaaaaaaaaaaaaaaaaaaugcaucccccccccccccccccccccccccccccccaaaggcucuuuucagagccaccagaauu

SEQ ID NO: 983 - RNA, 1405 nt, Artificial Sequence
  mRNA Design i-2 (A64-N5-C30-hSL-N5) comprising derived and/or modified sequence from Pb(ANKA)__XP_022712148.1__Pb-CSP (opt1)
ggggcgcugccuacggagguggcagccaucuccuucucggcaucaagcuuaccaugaagaagugcaccauccugguggucgccagccuccugcuggugaacucccuccugcccggcuacgggcagaacaagagcauccaggcccagcgcaaccugaacgagcucugcuacaacgagggcaacgacaacaagcuguaccacgugcugaacuccaagaacgggaagaucuacaaccggaacaccgucaaccgccuccuggcggacgccccggagggcaagaagaacgagaagaagaacgagaagaucgagcggaacaacaagcugaagcagcccccccccccgcccaaccccaacgaccccccgccccccaaccccaacgacccgcccccccccaacccgaacgaccccccccccccgaaccccaacgacccccccccgcccaacgccaacgacccccccccgcccaacgccaacgaccccgccccgcccaacgcgaacgaccccgcccccccgaacgccaacgaccccgccccccccaacgcgaacgacccggccccccccaacgccaacgaccccccgccccccaaccccaacgacccggccccccccaacgccaacgaccccccgccccccaaccccaacgacccggcgcccccccaggggaacaacaacccgcagccccagccccgcccccagccgcagccccagccccagccccagccgcagccccagccccagccccagccgcggccccagccccagccccagccgggcggcaacaacaacaacaagaacaacaacaacgacgacagcuacauccccuccgccgagaagauccucgaguucgugaagcagauccgcgacagcaucacggaggaguggucccagugcaacgugaccugcgggagcggcauccggguccgcaagcggaagggguccaacaagaaggccgaggaccugacccuggaggacaucgacaccgagaucugcaagauggacaagugcagcuccaucuucaacaucgugagcaacucccucggcuucgugauccugcugguccucguguucuucaacugaggacuagugcaucacauuuaaaagcaucucagccuaccaugagaauaagagaaagaaaaugaagaucaauagcuuauucaucucuuuuucuuuuucguugguguaaagccaacacccugucuaaaaaacauaaauuucuuuaaucauuuugccucuuuucucugugcuucaauuaauaaaaaauggaaagaaccuagaucuaaaaaaaaaaaaaaaaaaaaaaaaaaaaaaaaaaaaaaaaaaaaaaaaaaaaaaaaaaaaaaaaugcaucccccccccccccccccccccccccccccccaaaggcucuuuucagagccaccagaauu

SEQ ID NO: 984 - RNA, 1570 nt, Artificial Sequence
  mRNA Design i-2 (A64-N5-C30-hSL-N5) comprising derived and/or modified sequence from Pb(ANKA)__XP_022712148.1__Pb-CSP_L(G4SG4)_TM domain HA (opt1)
ggggcgcugccuacggagguggcagccaucuccuucucggcaucaagcuuaccaugaagaagugcaccauccugguggucgccagccuccugcuggugaacucccuccugcccggcuacgggcagaacaagagcauccaggcccagcgcaaccugaacgagcucugcuacaacgagggcaacgacaacaagcuguaccacgugcugaacuccaagaacgggaagaucuacaaccggaacaccgucaaccgccuccuggcggacgccccggagggcaagaagaacgagaagaagaacgagaagaucgagcggaacaacaagcugaagcagcccccccccccgcccaaccccaacgaccccccgccccccaaccccaacgacccgcccccccccaacccgaacgaccccccccccccgaaccccaacgacccccccccgcccaacgccaacgacccccccccgcccaacgccaacgaccccgccccgcccaacgcgaacgaccccgcccccccgaacgccaacgaccccgccccccccaacgcgaacgacccggccccccccaacgccaacgaccccccgccccccaaccccaacgacccggccccccccaacgccaacgaccccccgccccccaaccccaacgacccggcgcccccccaggggaacaacaacccgcagccccagccccgcccccagccgcagccccagccccagccccagccgcagccccagccccagccccagccgcggccccagccccagccccagccgggcggcaacaacaacaacaagaacaacaacaacgacgacagcuacauccccuccgccgagaagauccucgaguucgugaagcagauccgcgacagcaucacggaggaguggucccagugcaacgugaccugcgggagcggcauccggguccgcaagcggaagggguccaacaagaaggccgaggaccugacccuggaggacaucgacaccgagaucugcaagauggacaagugcagcuccaucuucaacaucgugagcaacucccucggcuucgugauccugcugguccucguguucuucaacgggggcggcgggagcggcgggggcggcaagcuggaguccacgcgcaucuaccagauccuggccaucuacagcaccguggccuccagccucguccugguggugucccugggggcgaucagcuucuggaugugcagcaacggcucccuccagugccggaucugcaucugaggacuagugcaucacauuuaaaagcaucucagccuaccaugagaauaagagaaagaaaaugaagaucaauagcuuauucaucucuuuuucuuuuucguugguguaaagccaacacccugucuaaaaaacauaaauuucuuuaaucauuuugccucuuuucucugugcuucaauuaauaaaaaauggaaagaaccuagaucuaaaaaaaaaaaaaaaaaaaaaaaaaaaaaaaaaaaaaaaaaaaaaaaaaaaaaaaaaaaaaaaaugcaucccccccccccccccccccccccccccccccaaaggcucuuuucagagccaccagaauu

SEQ ID NO: 985 - RNA, 1390 nt, Artificial Sequence
  mRNA Design i-2 (A64-N5-C30-hSL-N5) comprising derived and/or modified sequence from Pb(ANKA)__XP_022712148.1__HsALB_Pb-CSP(24-340) (opt1)
ggggcgcugccuacggagguggcagccaucuccuucucggcaucaagcuuaccaugaagugggugaccuucaucagccugcucuuccuguucuccagcgccuacucccagaacaagagcauccaggcccagcgcaaccugaacgagcucugcuacaacgagggcaacgacaacaagcuguaccacguccugaacuccaagaacgggaagaucuacaaccggaacaccgugaaccgccuccuggcggacgcccccgagggcaagaagaacgagaagaagaacgagaagaucgagcggaacaacaagcugaagcagccgcccccccccccgaaccccaacgacccccccccgcccaaccccaacgaccccccgccccccaaccccaacgacccgcccccccccaacccgaacgaccccccccccccgaacgccaacgaccccccccccccgaacgccaacgaccccgcccccccgaacgcgaacgaccccgccccccccaacgccaacgacccggccccccccaacgcgaacgaccccgccccgcccaacgccaacgacccccccccgcccaaccccaacgaccccgccccgcccaacgccaacgacccccccccgcccaaccccaacgaccccgcgccgccccaggggaacaacaacccccagccgcagccccgcccccagccccagccgcagccccagccccagccccagccgcagccccagccccagccccggccgcagccccagccccagcccggcgggaacaacaacaacaagaacaacaacaacgacgacagcuacaucccguccgccgagaagauccucgaguucgugaagcagauccgcgacagcaucacggaggaguggucccagugcaacgucaccugcggcagcggcauccgggugcgcaagcggaagggguccaacaagaaggccgaggaccugacccuggaggacaucgacaccgagaucugcaagauggacaagugcagcuccaucuucaacaucgugagcaacucccucggcuucgucauccugcuggugcucguguucuucaacugaggacuagugcaucacauuuaaaagcaucucagccuaccaugagaauaagagaaagaaaaugaagaucaauagcuuauucaucucuuuuucuuuuucguugguguaaagccaacacccugucuaaaaaacauaaauuucuuuaaucauuuugccucuuuucucugugcuucaauuaauaaaaaauggaaagaaccuagaucuaaaaaaaaaaaaaaaaaaaaaaaaaaaaaaaaaaaaaaaaaaaaaaaaaaaaaaaaaaaaaaaaugcaucccccccccccccccccccccccccccccccaaaggcucuuuucagagccaccagaauu

SEQ ID NO: 986 - RNA, 1408 nt, Artificial Sequence
  mRNA Design i-2 (A64-N5-C30-hSL-N5) comprising derived and/or modified sequence from Pb(ANKA)__XP_022712148.1__HsIns-iso1_Pb-CSP(24-340) (opt1)
ggggcgcugccuacggagguggcagccaucuccuucucggcaucaagcuuaccauggcccuguggaugcgccuccugccccugcucgcccugcuggcgcucuggggcccggaccccgccgccgcccagaacaagagcauccaggcccagcggaaccugaacgagcugugcuacaacgaggggaacgacaacaagcucuaccacgugcugaacuccaagaacggcaagaucuacaaccgcaacaccgucaaccggcugcucgcggacgcccccgaggggaagaagaacgagaagaagaacgagaagaucgagcgcaacaacaagcugaagcagcccccgcccccccccaacccgaacgaccccccccccccgaaccccaacgacccccccccgcccaaccccaacgaccccccgccccccaaccccaacgacccgcccccccccaacgccaacgacccgccccccccgaacgccaacgaccccgcgccccccaacgccaacgacccggccccccccaacgccaacgaccccgccccgcccaacgcgaacgaccccgcccccccgaacgccaacgaccccccccccccgaaccccaacgaccccgcccccccgaacgccaacgaccccccccccccgaaccccaacgaccccgcgccgccccagggcaacaacaacccccagccccagccgcggccccagccccagccccagccgcagccccagccccagccccagccgcagccccagccccgcccccagccgcagccccagcccgggggcaacaacaacaacaagaacaacaacaacgacgacagcuacauccccuccgccgagaagauccuggaguucgugaagcagauccgggacagcaucaccgaggaguggucccagugcaacgugacgugcggcagcgggauccgcguccggaagcgcaagggcuccaacaagaaggccgaggaccucacccuggaggacaucgacaccgagaucugcaagauggacaagugcagcuccaucuucaacaucgugagcaacucccugggguucgugauccuccugguccugguguucuucaacugaggacuagugcaucacauuuaaaagcaucucagccuaccaugagaauaagagaaagaaaaugaagaucaauagcuuauucaucucuuuuucuuuuucguugguguaaagccaacacccugucuaaaaaacauaaauuucuuuaaucauuuugccucuuuucucugugcuucaauuaauaaaaaauggaaagaaccuagaucuaaaaaaaaaaaaaaaaaaaaaaaaaaaaaaaaaaaaaaaaaaaaaaaaaaaaaaaaaaaaaaaaugcaucccccccccccccccccccccccccccccccaaaggcucuuuucagagccaccagaauu

SEQ ID NO: 987 - RNA, 1387 nt, Artificial Sequence
  mRNA Design i-2 (A64-N5-C30-hSL-N5) comprising derived and/or modified sequence from Pb(ANKA)__XP_022712148.1__HsSPARC_Pb-CSP(24-340) (opt1)
ggggcgcugccuacggagguggcagccaucuccuucucggcaucaagcuuaccaugcgcgccuggaucuucuuccugcucugccuggccggccgggcgcuggcccagaacaagagcauccaggcccagcgcaaccucaacgagcugugcuacaacgaggggaacgacaacaagcuguaccacgugcucaacuccaagaacggcaagaucuacaaccggaacaccgucaaccgccugcuggccgacgcccccgaggggaagaagaacgagaagaagaacgagaagaucgagcggaacaacaagcucaagcagccgcccccccccccgaaccccaacgacccccccccgcccaaccccaacgaccccccgccccccaaccccaacgacccgcccccccccaacccgaacgaccccccccccccgaacgcgaacgaccccccccccccgaacgccaacgaccccgcccccccgaacgccaacgaccccgcgccccccaacgccaacgacccggccccccccaacgccaacgaccccgccccgcccaacgcgaacgacccccccccgcccaaccccaacgaccccgccccgcccaacgccaacgacccccccccgcccaaccccaacgaccccgccccgccccagggcaacaacaacccccagccgcagccccgcccccagccccagccgcagccccagccccagccccagccgcagccccagccccagccccggccgcagccccagccccagcccgggggcaacaacaacaacaagaacaacaacaacgacgacagcuacaucccguccgccgagaagauccuggaguucgugaagcagauccgcgacagcaucaccgaggaguggucccagugcaacgugacgugcggcagcgggauccggguccgcaagcggaagggcuccaacaagaaggcggaggaccugacccucgaggacaucgacaccgagaucugcaagauggacaagugcagcuccaucuucaacaucgugagcaacucccugggguucgugauccugcucguccugguguucuucaacugaggacuagugcaucacauuuaaaagcaucucagccuaccaugagaauaagagaaagaaaaugaagaucaauagcuuauucaucucuuuuucuuuuucguugguguaaagccaacacccugucuaaaaaacauaaauuucuuuaaucauuuugccucuuuucucugugcuucaauuaauaaaaaauggaaagaaccuagaucuaaaaaaaaaaaaaaaaaaaaaaaaaaaaaaaaaaaaaaaaaaaaaaaaaaaaaaaaaaaaaaaaugcaucccccccccccccccccccccccccccccccaaaggcucuuuucagagccaccagaauu

SEQ ID NO: 988 - RNA, 1390 nt, Artificial Sequence
  mRNA Design i-2 (A64-N5-C30-hSL-N5) comprising derived and/or modified sequence from Pb(ANKA)__XP_022712148.1__IgE_Pb-CSP(24-340) (opt1)
ggggcgcugccuacggagguggcagccaucuccuucucggcaucaagcuuaccauggacuggaccuggauccuguuccucguggccgccgcgacccgcguccacagccagaacaaguccauccaggcccagcggaaccugaacgagcugugcuacaacgagggcaacgacaacaagcucuaccacgugcugaacagcaagaacgggaagaucuacaaccgcaacacggugaaccggcugcucgccgacgcccccgagggcaagaagaacgagaagaagaacgagaagaucgagcgcaacaacaagcugaagcagccgcccccccccccgaaccccaacgacccccccccgcccaaccccaacgaccccccgccccccaaccccaacgacccgcccccccccaacccgaacgaccccccccccccgaacgccaacgaccccccccccccgaacgcgaacgaccccgcccccccgaacgccaacgaccccgccccccccaacgcgaacgacccggccccccccaacgccaacgaccccgccccgcccaacgccaacgacccccccccgcccaaccccaacgaccccgcgccgcccaacgccaacgacccccccccgcccaaccccaacgaccccgccccgccccaggggaacaacaacccccagccgcagccccggccccagccccagccgcagccccagccccagccccagccgcagccccagccccagccccgcccgcagccccagccccagcccggcgggaacaacaacaacaagaacaacaacaacgacgacuccuacaucccgagcgccgagaagauccuggaguucgucaagcagauccgggacuccaucaccgaggaguggagccagugcaacgugaccugcggcuccggcauccgcgugcggaagcgcaaggggagcaacaagaaggccgaggaccucacccuggaggacaucgacacggagaucugcaagauggacaagugcuccagcaucuucaacaucgucuccaacagccugggcuucgugauccuccuggugcuggucuucuucaacugaggacuagugcaucacauuuaaaagcaucucagccuaccaugagaauaagagaaagaaaaugaagaucaauagcuuauucaucucuuuuucuuuuucguugguguaaagccaacacccugucuaaaaaacauaaauuucuuuaaucauuuugccucuuuucucugugcuucaauuaauaaaaaauggaaagaaccuagaucuaaaaaaaaaaaaaaaaaaaaaaaaaaaaaaaaaaaaaaaaaaaaaaaaaaaaaaaaaaaaaaaaugcaucccccccccccccccccccccccccccccccaaaggcucuuuucagagccaccagaauu

SEQ ID NO: 989 - RNA, 1576 nt, Artificial Sequence
  mRNA Design i-2 (A64-N5-C30-hSL-N5) comprising derived and/or modified sequence from Pf(3D7)__XP_001351122.1__Pf-CSP (opt2)
ggggcgcugccuacggagguggcagccaucuccuucucggcaucaagcuuaccaugaugcgcaagcucgccauccucuccgucuccuccuuccucuucgucgaggcccucuuccaggaguaccagugcuacggcuccuccuccaacacccgcguccucaacgagcucaacuacgacaacgccggcaccaaccucuacaacgagcucgagaugaacuacuacggcaagcaggagaacugguacucccucaagaagaacucccgcucccucggcgagaacgacgacggcaacaacgaggacaacgagaagcuccgcaagcccaagcacaagaagcucaagcagcccgccgacggcaaccccgaccccaacgccaaccccaacgucgaccccaacgccaaccccaacgucgaccccaacgccaaccccaacgucgaccccaacgccaaccccaacgccaaccccaacgccaaccccaacgccaaccccaacgccaaccccaacgccaaccccaacgccaaccccaacgccaaccccaacgccaaccccaacgccaaccccaacgccaaccccaacgccaaccccaacgccaaccccaacgccaaccccaacgccaaccccaacgccaaccccaacgccaaccccaacgucgaccccaacgccaaccccaacgccaaccccaacgccaaccccaacgccaaccccaacgccaaccccaacgccaaccccaacgccaaccccaacgccaaccccaacgccaaccccaacgccaaccccaacgccaaccccaacgccaaccccaacgccaaccccaacgccaaccccaacgccaaccccaacgccaaccccaacgccaaccccaacgccaaccccaacaagaacaaccagggcaacggccagggccacaacaugcccaacgaccccaaccgcaacgucgacgagaacgccaacgccaacuccgccgucaagaacaacaacaacgaggagcccuccgacaagcacaucaaggaguaccucaacaagauccagaacucccucuccaccgaguggucccccugcuccgucaccugcggcaacggcauccagguccgcaucaagcccggcuccgccaacaagcccaaggacgagcucgacuacgccaacgacaucgagaagaagaucugcaagauggagaagugcuccuccgucuucaacgucgucaacuccuccaucggccucaucaugguccucuccuuccucuuccucaacugaggacuagugcaucacauuuaaaagcaucucagccuaccaugagaauaagagaaagaaaaugaagaucaauagcuuauucaucucuuuuucuuuuucguugguguaaagccaacacccugucuaaaaaacauaaauuucuuuaaucauuuugccucuuuucucugugcuucaauuaauaaaaaauggaaagaaccuagaucuaaaaaaaaaaaaaaaaaaaaaaaaaaaaaaaaaaaaaaaaaaaaaaaaaaaaaaaaaaaaaaaaugcaucccccccccccccccccccccccccccccccaaaggcucuuuucagagccaccagaauu

SEQ ID NO: 990 - RNA, 1507 nt, Artificial Sequence
  mRNA Design i-2 (A64-N5-C30-hSL-N5) comprising derived and/or modified sequence from Pf(3D7)__XP_001351122.1__Pf-CSP(1-374) (opt2)
ggggcgcugccuacggagguggcagccaucuccuucucggcaucaagcuuaccaugaugcgcaagcucgccauccucuccgucuccuccuuccucuucgucgaggcccucuuccaggaguaccagugcuacggcuccuccuccaacacccgcguccucaacgagcucaacuacgacaacgccggcaccaaccucuacaacgagcucgagaugaacuacuacggcaagcaggagaacugguacucccucaagaagaacucccgcucccucggcgagaacgacgacggcaacaacgaggacaacgagaagcuccgcaagcccaagcacaagaagcucaagcagcccgccgacggcaaccccgaccccaacgccaaccccaacgucgaccccaacgccaaccccaacgucgaccccaacgccaaccccaacgucgaccccaacgccaaccccaacgccaaccccaacgccaaccccaacgccaaccccaacgccaaccccaacgccaaccccaacgccaaccccaacgccaaccccaacgccaaccccaacgccaaccccaacgccaaccccaacgccaaccccaacgccaaccccaacgccaaccccaacgccaaccccaacgccaaccccaacgccaaccccaacgucgaccccaacgccaaccccaacgccaaccccaacgccaaccccaacgccaaccccaacgccaaccccaacgccaaccccaacgccaaccccaacgccaaccccaacgccaaccccaacgccaaccccaacgccaaccccaacgccaaccccaacgccaaccccaacgccaaccccaacgccaaccccaacgccaaccccaacgccaaccccaacgccaaccccaacaagaacaaccagggcaacggccagggccacaacaugcccaacgaccccaaccgcaacgucgacgagaacgccaacgccaacuccgccgucaagaacaacaacaacgaggagcccuccgacaagcacaucaaggaguaccucaacaagauccagaacucccucuccaccgaguggucccccugcuccgucaccugcggcaacggcauccagguccgcaucaagcccggcuccgccaacaagcccaaggacgagcucgacuacgccaacgacaucgagaagaagaucugcaagauggagaagugcugaggacuagugcaucacauuuaaaagcaucucagccuaccaugagaauaagagaaagaaaaugaagaucaauagcuuauucaucucuuuuucuuuuucguugguguaaagccaacacccugucuaaaaaacauaaauuucuuuaaucauuuugccucuuuucucugugcuucaauuaauaaaaaauggaaagaaccuagaucuaaaaaaaaaaaaaaaaaaaaaaaaaaaaaaaaaaaaaaaaaaaaaaaaaaaaaaaaaaaaaaaaugcaucccccccccccccccccccccccccccccccaaaggcucuuuucagagccaccagaauu

SEQ ID NO: 991 - RNA, 1360 nt, Artificial Sequence
  mRNA Design i-2 (A64-N5-C30-hSL-N5) comprising derived and/or modified sequence from Pf(3D7)__XP_001351122.1__Pf-CSP(1-325) (opt2)
ggggcgcugccuacggagguggcagccaucuccuucucggcaucaagcuuaccaugaugcgcaagcucgccauccucuccgucuccuccuuccucuucgucgaggcccucuuccaggaguaccagugcuacggcuccuccuccaacacccgcguccucaacgagcucaacuacgacaacgccggcaccaaccucuacaacgagcucgagaugaacuacuacggcaagcaggagaacugguacucccucaagaagaacucccgcucccucggcgagaacgacgacggcaacaacgaggacaacgagaagcuccgcaagcccaagcacaagaagcucaagcagcccgccgacggcaaccccgaccccaacgccaaccccaacgucgaccccaacgccaaccccaacgucgaccccaacgccaaccccaacgucgaccccaacgccaaccccaacgccaaccccaacgccaaccccaacgccaaccccaacgccaaccccaacgccaaccccaacgccaaccccaacgccaaccccaacgccaaccccaacgccaaccccaacgccaaccccaacgccaaccccaacgccaaccccaacgccaaccccaacgccaaccccaacgccaaccccaacgccaaccccaacgucgaccccaacgccaaccccaacgccaaccccaacgccaaccccaacgccaaccccaacgccaaccccaacgccaaccccaacgccaaccccaacgccaaccccaacgccaaccccaacgccaaccccaacgccaaccccaacgccaaccccaacgccaaccccaacgccaaccccaacgccaaccccaacgccaaccccaacgccaaccccaacgccaaccccaacaagaacaaccagggcaacggccagggccacaacaugcccaacgaccccaaccgcaacgucgacgagaacgccaacgccaacuccgccgucaagaacaacaacaacgaggagcccuccgacaagcacaucaaggaguaccucaacaagauccagaacugaggacuagugcaucacauuuaaaagcaucucagccuaccaugagaauaagagaaagaaaaugaagaucaauagcuuauucaucucuuuuucuuuuucguugguguaaagccaacacccugucuaaaaaacauaaauuucuuuaaucauuuugccucuuuucucugugcuucaauuaauaaaaaauggaaagaaccuagaucuaaaaaaaaaaaaaaaaaaaaaaaaaaaaaaaaaaaaaaaaaaaaaaaaaaaaaaaaaaaaaaaaugcaucccccccccccccccccccccccccccccccaaaggcucuuuucagagccaccagaauu

SEQ ID NO: 992 - RNA, 1576 nt, Artificial Sequence
  mRNA Design i-2 (A64-N5-C30-hSL-N5) comprising derived and/or modified sequence from Pf(3D7)__XP_001351122.1__HsALB_Pf-CSP(19-397) (opt2)
ggggcgcugccuacggagguggcagccaucuccuucucggcaucaagcuuaccaugaagugggucaccuucaucucccuccucuuccucuucuccuccgccuacucccucuuccaggaguaccagugcuacggcuccuccuccaacacccgcguccucaacgagcucaacuacgacaacgccggcaccaaccucuacaacgagcucgagaugaacuacuacggcaagcaggagaacugguacucccucaagaagaacucccgcucccucggcgagaacgacgacggcaacaacgaggacaacgagaagcuccgcaagcccaagcacaagaagcucaagcagcccgccgacggcaaccccgaccccaacgccaaccccaacgucgaccccaacgccaaccccaacgucgaccccaacgccaaccccaacgucgaccccaacgccaaccccaacgccaaccccaacgccaaccccaacgccaaccccaacgccaaccccaacgccaaccccaacgccaaccccaacgccaaccccaacgccaaccccaacgccaaccccaacgccaaccccaacgccaaccccaacgccaaccccaacgccaaccccaacgccaaccccaacgccaaccccaacgccaaccccaacgucgaccccaacgccaaccccaacgccaaccccaacgccaaccccaacgccaaccccaacgccaaccccaacgccaaccccaacgccaaccccaacgccaaccccaacgccaaccccaacgccaaccccaacgccaaccccaacgccaaccccaacgccaaccccaacgccaaccccaacgccaaccccaacgccaaccccaacgccaaccccaacgccaaccccaacaagaacaaccagggcaacggccagggccacaacaugcccaacgaccccaaccgcaacgucgacgagaacgccaacgccaacuccgccgucaagaacaacaacaacgaggagcccuccgacaagcacaucaaggaguaccucaacaagauccagaacucccucuccaccgaguggucccccugcuccgucaccugcggcaacggcauccagguccgcaucaagcccggcuccgccaacaagcccaaggacgagcucgacuacgccaacgacaucgagaagaagaucugcaagauggagaagugcuccuccgucuucaacgucgucaacuccuccaucggccucaucaugguccucuccuuccucuuccucaacugaggacuagugcaucacauuuaaaagcaucucagccuaccaugagaauaagagaaagaaaaugaagaucaauagcuuauucaucucuuuuucuuuuucguugguguaaagccaacacccugucuaaaaaacauaaauuucuuuaaucauuuugccucuuuucucugugcuucaauuaauaaaaaauggaaagaaccuagaucuaaaaaaaaaaaaaaaaaaaaaaaaaaaaaaaaaaaaaaaaaaaaaaaaaaaaaaaaaaaaaaaaugcaucccccccccccccccccccccccccccccccaaaggcucuuuucagagccaccagaauu

SEQ ID NO: 993 - RNA, 1594 nt, Artificial Sequence
  mRNA Design i-2 (A64-N5-C30-hSL-N5) comprising derived and/or modified sequence from Pf(3D7)__XP_001351122.1__HsIns-iso1_Pf-CSP(19-397) (opt2)
ggggcgcugccuacggagguggcagccaucuccuucucggcaucaagcuuaccauggcccucuggaugcgccuccucccccuccucgcccuccucgcccucuggggccccgaccccgccgccgcccucuuccaggaguaccagugcuacggcuccuccuccaacacccgcguccucaacgagcucaacuacgacaacgccggcaccaaccucuacaacgagcucgagaugaacuacuacggcaagcaggagaacugguacucccucaagaagaacucccgcucccucggcgagaacgacgacggcaacaacgaggacaacgagaagcuccgcaagcccaagcacaagaagcucaagcagcccgccgacggcaaccccgaccccaacgccaaccccaacgucgaccccaacgccaaccccaacgucgaccccaacgccaaccccaacgucgaccccaacgccaaccccaacgccaaccccaacgccaaccccaacgccaaccccaacgccaaccccaacgccaaccccaacgccaaccccaacgccaaccccaacgccaaccccaacgccaaccccaacgccaaccccaacgccaaccccaacgccaaccccaacgccaaccccaacgccaaccccaacgccaaccccaacgccaaccccaacgucgaccccaacgccaaccccaacgccaaccccaacgccaaccccaacgccaaccccaacgccaaccccaacgccaaccccaacgccaaccccaacgccaaccccaacgccaaccccaacgccaaccccaacgccaaccccaacgccaaccccaacgccaaccccaacgccaaccccaacgccaaccccaacgccaaccccaacgccaaccccaacgccaaccccaacaagaacaaccagggcaacggccagggccacaacaugcccaacgaccccaaccgcaacgucgacgagaacgccaacgccaacuccgccgucaagaacaacaacaacgaggagcccuccgacaagcacaucaaggaguaccucaacaagauccagaacucccucuccaccgaguggucccccugcuccgucaccugcggcaacggcauccagguccgcaucaagcccggcuccgccaacaagcccaaggacgagcucgacuacgccaacgacaucgagaagaagaucugcaagauggagaagugcuccuccgucuucaacgucgucaacuccuccaucggccucaucaugguccucuccuuccucuuccucaacugaggacuagugcaucacauuuaaaagcaucucagccuaccaugagaauaagagaaagaaaaugaagaucaauagcuuauucaucucuuuuucuuuuucguugguguaaagccaacacccugucuaaaaaacauaaauuucuuuaaucauuuugccucuuuucucugugcuucaauuaauaaaaaauggaaagaaccuagaucuaaaaaaaaaaaaaaaaaaaaaaaaaaaaaaaaaaaaaaaaaaaaaaaaaaaaaaaaaaaaaaaaugcaucccccccccccccccccccccccccccccccaaaggcucuuuucagagccaccagaauu

SEQ ID NO: 994 - RNA, 1573 nt, Artificial Sequence
  mRNA Design i-2 (A64-N5-C30-hSL-N5) comprising derived and/or modified sequence from Pf(3D7)__XP_001351122.1__HsSPARC_Pf-CSP(19-397) (opt2)
ggggcgcugccuacggagguggcagccaucuccuucucggcaucaagcuuaccaugcgcgccuggaucuucuuccuccucugccucgccggccgcgcccucgcccucuuccaggaguaccagugcuacggcuccuccuccaacacccgcguccucaacgagcucaacuacgacaacgccggcaccaaccucuacaacgagcucgagaugaacuacuacggcaagcaggagaacugguacucccucaagaagaacucccgcucccucggcgagaacgacgacggcaacaacgaggacaacgagaagcuccgcaagcccaagcacaagaagcucaagcagcccgccgacggcaaccccgaccccaacgccaaccccaacgucgaccccaacgccaaccccaacgucgaccccaacgccaaccccaacgucgaccccaacgccaaccccaacgccaaccccaacgccaaccccaacgccaaccccaacgccaaccccaacgccaaccccaacgccaaccccaacgccaaccccaacgccaaccccaacgccaaccccaacgccaaccccaacgccaaccccaacgccaaccccaacgccaaccccaacgccaaccccaacgccaaccccaacgccaaccccaacgucgaccccaacgccaaccccaacgccaaccccaacgccaaccccaacgccaaccccaacgccaaccccaacgccaaccccaacgccaaccccaacgccaaccccaacgccaaccccaacgccaaccccaacgccaaccccaacgccaaccccaacgccaaccccaacgccaaccccaacgccaaccccaacgccaaccccaacgccaaccccaacgccaaccccaacaagaacaaccagggcaacggccagggccacaacaugcccaacgaccccaaccgcaacgucgacgagaacgccaacgccaacuccgccgucaagaacaacaacaacgaggagcccuccgacaagcacaucaaggaguaccucaacaagauccagaacucccucuccaccgaguggucccccugcuccgucaccugcggcaacggcauccagguccgcaucaagcccggcuccgccaacaagcccaaggacgagcucgacuacgccaacgacaucgagaagaagaucugcaagauggagaagugcuccuccgucuucaacgucgucaacuccuccaucggccucaucaugguccucuccuuccucuuccucaacugaggacuagugcaucacauuuaaaagcaucucagccuaccaugagaauaagagaaagaaaaugaagaucaauagcuuauucaucucuuuuucuuuuucguugguguaaagccaacacccugucuaaaaaacauaaauuucuuuaaucauuuugccucuuuucucugugcuucaauuaauaaaaaauggaaagaaccuagaucuaaaaaaaaaaaaaaaaaaaaaaaaaaaaaaaaaaaaaaaaaaaaaaaaaaaaaaaaaaaaaaaaugcaucccccccccccccccccccccccccccccccaaaggcucuuuucagagccaccagaauu

SEQ ID NO: 995 - RNA, 1576 nt, Artificial Sequence
  mRNA Design i-2 (A64-N5-C30-hSL-N5) comprising derived and/or modified sequence from Pf(3D7)__XP_001351122.1__IgE_Pf-CSP(19-397) (opt2)
ggggcgcugccuacggagguggcagccaucuccuucucggcaucaagcuuaccauggacuggaccuggauccucuuccucgucgccgccgccacccgcguccacucccucuuccaggaguaccagugcuacggcuccuccuccaacacccgcguccucaacgagcucaacuacgacaacgccggcaccaaccucuacaacgagcucgagaugaacuacuacggcaagcaggagaacugguacucccucaagaagaacucccgcucccucggcgagaacgacgacggcaacaacgaggacaacgagaagcuccgcaagcccaagcacaagaagcucaagcagcccgccgacggcaaccccgaccccaacgccaaccccaacgucgaccccaacgccaaccccaacgucgaccccaacgccaaccccaacgucgaccccaacgccaaccccaacgccaaccccaacgccaaccccaacgccaaccccaacgccaaccccaacgccaaccccaacgccaaccccaacgccaaccccaacgccaaccccaacgccaaccccaacgccaaccccaacgccaaccccaacgccaaccccaacgccaaccccaacgccaaccccaacgccaaccccaacgccaaccccaacgucgaccccaacgccaaccccaacgccaaccccaacgccaaccccaacgccaaccccaacgccaaccccaacgccaaccccaacgccaaccccaacgccaaccccaacgccaaccccaacgccaaccccaacgccaaccccaacgccaaccccaacgccaaccccaacgccaaccccaacgccaaccccaacgccaaccccaacgccaaccccaacgccaaccccaacaagaacaaccagggcaacggccagggccacaacaugcccaacgaccccaaccgcaacgucgacgagaacgccaacgccaacuccgccgucaagaacaacaacaacgaggagcccuccgacaagcacaucaaggaguaccucaacaagauccagaacucccucuccaccgaguggucccccugcuccgucaccugcggcaacggcauccagguccgcaucaagcccggcuccgccaacaagcccaaggacgagcucgacuacgccaacgacaucgagaagaagaucugcaagauggagaagugcuccuccgucuucaacgucgucaacuccuccaucggccucaucaugguccucuccuuccucuuccucaacugaggacuagugcaucacauuuaaaagcaucucagccuaccaugagaauaagagaaagaaaaugaagaucaauagcuuauucaucucuuuuucuuuuucguugguguaaagccaacacccugucuaaaaaacauaaauuucuuuaaucauuuugccucuuuucucugugcuucaauuaauaaaaaauggaaagaaccuagaucuaaaaaaaaaaaaaaaaaaaaaaaaaaaaaaaaaaaaaaaaaaaaaaaaaaaaaaaaaaaaaaaaugcaucccccccccccccccccccccccccccccccaaaggcucuuuucagagccaccagaauu

SEQ ID NO: 996 - RNA, 1741 nt, Artificial Sequence
  mRNA Design i-2 (A64-N5-C30-hSL-N5) comprising derived and/or modified sequence from Pf(3D7)__XP_001351122.1__Pf-CSP_L(G4SG4)_TM domain HA (opt2)
ggggcgcugccuacggagguggcagccaucuccuucucggcaucaagcuuaccaugaugcgcaagcucgccauccucuccgucuccuccuuccucuucgucgaggcccucuuccaggaguaccagugcuacggcuccuccuccaacacccgcguccucaacgagcucaacuacgacaacgccggcaccaaccucuacaacgagcucgagaugaacuacuacggcaagcaggagaacugguacucccucaagaagaacucccgcucccucggcgagaacgacgacggcaacaacgaggacaacgagaagcuccgcaagcccaagcacaagaagcucaagcagcccgccgacggcaaccccgaccccaacgccaaccccaacgucgaccccaacgccaaccccaacgucgaccccaacgccaaccccaacgucgaccccaacgccaaccccaacgccaaccccaacgccaaccccaacgccaaccccaacgccaaccccaacgccaaccccaacgccaaccccaacgccaaccccaacgccaaccccaacgccaaccccaacgccaaccccaacgccaaccccaacgccaaccccaacgccaaccccaacgccaaccccaacgccaaccccaacgccaaccccaacgucgaccccaacgccaaccccaacgccaaccccaacgccaaccccaacgccaaccccaacgccaaccccaacgccaaccccaacgccaaccccaacgccaaccccaacgccaaccccaacgccaaccccaacgccaaccccaacgccaaccccaacgccaaccccaacgccaaccccaacgccaaccccaacgccaaccccaacgccaaccccaacgccaaccccaacaagaacaaccagggcaacggccagggccacaacaugcccaacgaccccaaccgcaacgucgacgagaacgccaacgccaacuccgccgucaagaacaacaacaacgaggagcccuccgacaagcacaucaaggaguaccucaacaagauccagaacucccucuccaccgaguggucccccugcuccgucaccugcggcaacggcauccagguccgcaucaagcccggcuccgccaacaagcccaaggacgagcucgacuacgccaacgacaucgagaagaagaucugcaagauggagaagugcuccuccgucuucaacgucgucaacuccuccaucggccucaucaugguccucuccuuccucuuccucaacggcggcggcggcuccggcggcggcggcaagcucgaguccacccgcaucuaccagauccucgccaucuacuccaccgucgccuccucccucguccucgucgucucccucggcgccaucuccuucuggaugugcuccaacggcucccuccagugccgcaucugcaucugaggacuagugcaucacauuuaaaagcaucucagccuaccaugagaauaagagaaagaaaaugaagaucaauagcuuauucaucucuuuuucuuuuucguugguguaaagccaacacccugucuaaaaaacauaaauuucuuuaaucauuuugccucuuuucucugugcuucaauuaauaaaaaauggaaagaaccuagaucuaaaaaaaaaaaaaaaaaaaaaaaaaaaaaaaaaaaaaaaaaaaaaaaaaaaaaaaaaaaaaaaaugcaucccccccccccccccccccccccccccccccaaaggcucuuuucagagccaccagaauu

SEQ ID NO: 997 - RNA, 1615 nt, Artificial Sequence
  mRNA Design i-2 (A64-N5-C30-hSL-N5) comprising derived and/or modified sequence from Pf(3D7)__XP_001351122.1__Pf-CSP(199-377)_L(PVTN)_HBsAg (opt2)
ggggcgcugccuacggagguggcagccaucuccuucucggcaucaagcuuaccauggaccccaacgccaaccccaacgccaaccccaacgccaaccccaacgccaaccccaacgccaaccccaacgccaaccccaacgccaaccccaacgccaaccccaacgccaaccccaacgccaaccccaacgccaaccccaacgccaaccccaacgccaaccccaacgccaaccccaacgccaaccccaacgccaaccccaacgccaaccccaacgccaaccccaacaagaacaaccagggcaacggccagggccacaacaugcccaacgaccccaaccgcaacgucgacgagaacgccaacgccaacuccgccgucaagaacaacaacaacgaggagcccuccgacaagcacaucaaggaguaccucaacaagauccagaacucccucuccaccgaguggucccccugcuccgucaccugcggcaacggcauccagguccgcaucaagcccggcuccgccaacaagcccaaggacgagcucgacuacgccaacgacaucgagaagaagaucugcaagauggagaagugcuccuccguccccgucaccaacauggagaacaucaccuccggcuuccucggcccccuccucguccuccaggccggcuucuuccuccucacccgcauccucaccaucccccagucccucgacuccugguggaccucccucaacuuccucggcggcucccccgucugccucggccagaacucccagucccccaccuccaaccacucccccaccuccugcccccccaucugccccggcuaccgcuggaugugccuccgccgcuucaucaucuuccucuucauccuccuccucugccucaucuuccuccucguccuccucgacuaccagggcaugcuccccgucugcccccucauccccggcuccaccaccaccaacaccggccccugcaagaccugcaccacccccgcccagggcaacuccauguuccccuccugcugcugcaccaagcccaccgacggcaacugcaccugcauccccauccccuccuccugggccuucgccaaguaccucugggagugggccuccguccgcuucuccuggcucucccuccucguccccuucguccagugguucgucggccucucccccaccgucuggcucuccgccaucuggaugaugugguacuggggccccucccucuacuccaucgucucccccuucaucccccuccuccccaucuucuucugccucugggucuacaucugaggacuagugcaucacauuuaaaagcaucucagccuaccaugagaauaagagaaagaaaaugaagaucaauagcuuauucaucucuuuuucuuuuucguugguguaaagccaacacccugucuaaaaaacauaaauuucuuuaaucauuuugccucuuuucucugugcuucaauuaauaaaaaauggaaagaaccuagaucuaaaaaaaaaaaaaaaaaaaaaaaaaaaaaaaaaaaaaaaaaaaaaaaaaaaaaaaaaaaaaaaaugcaucccccccccccccccccccccccccccccccaaaggcucuuuucagagccaccagaauu

SEQ ID NO: 998 - RNA, 1657 nt, Artificial Sequence
  mRNA Design i-2 (A64-N5-C30-hSL-N5) comprising derived and/or modified sequence from Pf(3D7)__XP_001351122.1__Pf-CSP(199-387)_L(PVTN)_HBsAg (opt2)
ggggcgcugccuacggagguggcagccaucuccuucucggcaucaagcuuaccaugauggcccccgaccccaacgccaaccccaacgccaaccccaacgccaaccccaacgccaaccccaacgccaaccccaacgccaaccccaacgccaaccccaacgccaaccccaacgccaaccccaacgccaaccccaacgccaaccccaacgccaaccccaacgccaaccccaacgccaaccccaacgccaaccccaacgccaaccccaacgccaaccccaacgccaaccccaacaagaacaaccagggcaacggccagggccacaacaugcccaacgaccccaaccgcaacgucgacgagaacgccaacgccaacuccgccgucaagaacaacaacaacgaggagcccuccgacaagcacaucaaggaguaccucaacaagauccagaacucccucuccaccgaguggucccccugcuccgucaccugcggcaacggcauccagguccgcaucaagcccggcuccgccaacaagcccaaggacgagcucgacuacgccaacgacaucgagaagaagaucugcaagauggagaagugcuccuccgucuucaacgucgucaacuccuccaucggccucggccccgucaccaacauggagaacaucaccuccggcuuccucggcccccuccucguccuccaggccggcuucuuccuccucacccgcauccucaccaucccccagucccucgacuccugguggaccucccucaacuuccucggcggcucccccgucugccucggccagaacucccagucccccaccuccaaccacucccccaccuccugcccccccaucugccccggcuaccgcuggaugugccuccgccgcuucaucaucuuccucuucauccuccuccucugccucaucuuccuccucguccuccucgacuaccagggcaugcuccccgucugcccccucauccccggcuccaccaccaccaacaccggccccugcaagaccugcaccacccccgcccagggcaacuccauguuccccuccugcugcugcaccaagcccaccgacggcaacugcaccugcauccccauccccuccuccugggccuucgccaaguaccucugggagugggccuccguccgcuucuccuggcucucccuccucguccccuucguccagugguucgucggccucucccccaccgucuggcucuccgccaucuggaugaugugguacuggggccccucccucuacuccaucgucucccccuucaucccccuccuccccaucuucuucugccucugggucuacaucugaggacuagugcaucacauuuaaaagcaucucagccuaccaugagaauaagagaaagaaaaugaagaucaauagcuuauucaucucuuuuucuuuuucguugguguaaagccaacacccugucuaaaaaacauaaauuucuuuaaucauuuugccucuuuucucugugcuucaauuaauaaaaaauggaaagaaccuagaucuaaaaaaaaaaaaaaaaaaaaaaaaaaaaaaaaaaaaaaaaaaaaaaaaaaaaaaaaaaaaaaaaugcaucccccccccccccccccccccccccccccccaaaggcucuuuucagagccaccagaauu

SEQ ID NO: 999 - RNA, 841 nt, Artificial Sequence
  mRNA Design i-2 (A64-N5-C30-hSL-N5) comprising derived and/or modified sequence from Pf(3D7)__XP_001351122.1__HsALB_Pf-CSP(19-152) (opt2)
ggggcgcugccuacggagguggcagccaucuccuucucggcaucaagcuuaccaugaagugggucaccuucaucucccuccucuuccucuucuccuccgccuacucccucuuccaggaguaccagugcuacggcuccuccuccaacacccgcguccucaacgagcucaacuacgacaacgccggcaccaaccucuacaacgagcucgagaugaacuacuacggcaagcaggagaacugguacucccucaagaagaacucccgcucccucggcgagaacgacgacggcaacaacgaggacaacgagaagcuccgcaagcccaagcacaagaagcucaagcagcccgccgacggcaaccccgaccccaacgccaaccccaacgucgaccccaacgccaaccccaacgucgaccccaacgccaaccccaacgucgaccccaacgccaaccccaacgccaaccccaacgccaaccccaacgccaaccccaacgccaaccccaacgccaaccccugaggacuagugcaucacauuuaaaagcaucucagccuaccaugagaauaagagaaagaaaaugaagaucaauagcuuauucaucucuuuuucuuuuucguugguguaaagccaacacccugucuaaaaaacauaaauuucuuuaaucauuuugccucuuuucucugugcuucaauuaauaaaaaauggaaagaaccuagaucuaaaaaaaaaaaaaaaaaaaaaaaaaaaaaaaaaaaaaaaaaaaaaaaaaaaaaaaaaaaaaaaaugcaucccccccccccccccccccccccccccccccaaaggcucuuuucagagccaccagaauu

SEQ ID NO: 1000 - RNA, 961 nt, Artificial Sequence
  mRNA Design i-2 (A64-N5-C30-hSL-N5) comprising derived and/or modified sequence from Pf(3D7)__XP_001351122.1__HsALB_Pf-CSP(19-192) (opt2)
ggggcgcugccuacggagguggcagccaucuccuucucggcaucaagcuuaccaugaagugggucaccuucaucucccuccucuuccucuucuccuccgccuacucccucuuccaggaguaccagugcuacggcuccuccuccaacacccgcguccucaacgagcucaacuacgacaacgccggcaccaaccucuacaacgagcucgagaugaacuacuacggcaagcaggagaacugguacucccucaagaagaacucccgcucccucggcgagaacgacgacggcaacaacgaggacaacgagaagcuccgcaagcccaagcacaagaagcucaagcagcccgccgacggcaaccccgaccccaacgccaaccccaacgucgaccccaacgccaaccccaacgucgaccccaacgccaaccccaacgucgaccccaacgccaaccccaacgccaaccccaacgccaaccccaacgccaaccccaacgccaaccccaacgccaaccccaacgccaaccccaacgccaaccccaacgccaaccccaacgccaaccccaacgccaaccccaacgccaaccccaacgccaaccccaacgccaaccccaacgccaaccccaacgccaaccccugaggacuagugcaucacauuuaaaagcaucucagccuaccaugagaauaagagaaagaaaaugaagaucaauagcuuauucaucucuuuuucuuuuucguugguguaaagccaacacccugucuaaaaaacauaaauuucuuuaaucauuuugccucuuuucucugugcuucaauuaauaaaaaauggaaagaaccuagaucuaaaaaaaaaaaaaaaaaaaaaaaaaaaaaaaaaaaaaaaaaaaaaaaaaaaaaaaaaaaaaaaaugcaucccccccccccccccccccccccccccccccaaaggcucuuuucagagccaccagaauu

SEQ ID NO: 1001 - RNA, 1201 nt, Artificial Sequence
  mRNA Design i-2 (A64-N5-C30-hSL-N5) comprising derived and/or modified sequence from Pf(3D7)__XP_001351122.1__HsALB_Pf-CSP(19-272) (opt2)
ggggcgcugccuacggagguggcagccaucuccuucucggcaucaagcuuaccaugaagugggucaccuucaucucccuccucuuccucuucuccuccgccuacucccucuuccaggaguaccagugcuacggcuccuccuccaacacccgcguccucaacgagcucaacuacgacaacgccggcaccaaccucuacaacgagcucgagaugaacuacuacggcaagcaggagaacugguacucccucaagaagaacucccgcucccucggcgagaacgacgacggcaacaacgaggacaacgagaagcuccgcaagcccaagcacaagaagcucaagcagcccgccgacggcaaccccgaccccaacgccaaccccaacgucgaccccaacgccaaccccaacgucgaccccaacgccaaccccaacgucgaccccaacgccaaccccaacgccaaccccaacgccaaccccaacgccaaccccaacgccaaccccaacgccaaccccaacgccaaccccaacgccaaccccaacgccaaccccaacgccaaccccaacgccaaccccaacgccaaccccaacgccaaccccaacgccaaccccaacgccaaccccaacgccaaccccaacgccaaccccaacgucgaccccaacgccaaccccaacgccaaccccaacgccaaccccaacgccaaccccaacgccaaccccaacgccaaccccaacgccaaccccaacgccaaccccaacgccaaccccaacgccaaccccaacgccaaccccaacgccaaccccaacgccaaccccaacgccaaccccaacgccaaccccaacgccaaccccaacgccaaccccaacgccaaccccugaggacuagugcaucacauuuaaaagcaucucagccuaccaugagaauaagagaaagaaaaugaagaucaauagcuuauucaucucuuuuucuuuuucguugguguaaagccaacacccugucuaaaaaacauaaauuucuuuaaucauuuugccucuuuucucugugcuucaauuaauaaaaaauggaaagaaccuagaucuaaaaaaaaaaaaaaaaaaaaaaaaaaaaaaaaaaaaaaaaaaaaaaaaaaaaaaaaaaaaaaaaugcaucccccccccccccccccccccccccccccccaaaggcucuuuucagagccaccagaauu

SEQ ID NO: 1002 - RNA, 1363 nt, Artificial Sequence
  mRNA Design i-2 (A64-N5-C30-hSL-N5) comprising derived and/or modified sequence from Pf(3D7)__XP_001351122.1__HsALB_Pf-CSP(19-272)_L(AAY)_Pf-CSP(310-3 27)_L(AAY)_Pf-CSP(346-375) (opt2)
ggggcgcugccuacggagguggcagccaucuccuucucggcaucaagcuuaccaugaagugggucaccuucaucucccuccucuuccucuucuccuccgccuacucccucuuccaggaguaccagugcuacggcuccuccuccaacacccgcguccucaacgagcucaacuacgacaacgccggcaccaaccucuacaacgagcucgagaugaacuacuacggcaagcaggagaacugguacucccucaagaagaacucccgcucccucggcgagaacgacgacggcaacaacgaggacaacgagaagcuccgcaagcccaagcacaagaagcucaagcagcccgccgacggcaaccccgaccccaacgccaaccccaacgucgaccccaacgccaaccccaacgucgaccccaacgccaaccccaacgucgaccccaacgccaaccccaacgccaaccccaacgccaaccccaacgccaaccccaacgccaaccccaacgccaaccccaacgccaaccccaacgccaaccccaacgccaaccccaacgccaaccccaacgccaaccccaacgccaaccccaacgccaaccccaacgccaaccccaacgccaaccccaacgccaaccccaacgccaaccccaacgucgaccccaacgccaaccccaacgccaaccccaacgccaaccccaacgccaaccccaacgccaaccccaacgccaaccccaacgccaaccccaacgccaaccccaacgccaaccccaacgccaaccccaacgccaaccccaacgccaaccccaacgccaaccccaacgccaaccccaacgccaaccccaacgccaaccccaacgccaaccccaacgccaaccccgccgccuacgagcccuccgacaagcacaucaaggaguaccucaacaagauccagaacucccucgccgccuacaucaagcccggcuccgccaacaagcccaaggacgagcucgacuacgccaacgacaucgagaagaagaucugcaagauggagaagugcuccugaggacuagugcaucacauuuaaaagcaucucagccuaccaugagaauaagagaaagaaaaugaagaucaauagcuuauucaucucuuuuucuuuuucguugguguaaagccaacacccugucuaaaaaacauaaauuucuuuaaucauuuugccucuuuucucugugcuucaauuaauaaaaaauggaaagaaccuagaucuaaaaaaaaaaaaaaaaaaaaaaaaaaaaaaaaaaaaaaaaaaaaaaaaaaaaaaaaaaaaaaaaugcaucccccccccccccccccccccccccccccccaaaggcucuuuucagagccaccagaauu

SEQ ID NO: 1003 - RNA, 1324 nt, Artificial Sequence
  mRNA Design i-2 (A64-N5-C30-hSL-N5) comprising derived and/or modified sequence from Pf(3D7)__XP_001351122.1__HsALB_Pf-CSP(19-272)_L(AAY)_Pf-CSP(346-3 65)_L(AAY)_P2 (opt2)
ggggcgcugccuacggagguggcagccaucuccuucucggcaucaagcuuaccaugaagugggucaccuucaucucccuccucuuccucuucuccuccgccuacucccucuuccaggaguaccagugcuacggcuccuccuccaacacccgcguccucaacgagcucaacuacgacaacgccggcaccaaccucuacaacgagcucgagaugaacuacuacggcaagcaggagaacugguacucccucaagaagaacucccgcucccucggcgagaacgacgacggcaacaacgaggacaacgagaagcuccgcaagcccaagcacaagaagcucaagcagcccgccgacggcaaccccgaccccaacgccaaccccaacgucgaccccaacgccaaccccaacgucgaccccaacgccaaccccaacgucgaccccaacgccaaccccaacgccaaccccaacgccaaccccaacgccaaccccaacgccaaccccaacgccaaccccaacgccaaccccaacgccaaccccaacgccaaccccaacgccaaccccaacgccaaccccaacgccaaccccaacgccaaccccaacgccaaccccaacgccaaccccaacgccaaccccaacgccaaccccaacgucgaccccaacgccaaccccaacgccaaccccaacgccaaccccaacgccaaccccaacgccaaccccaacgccaaccccaacgccaaccccaacgccaaccccaacgccaaccccaacgccaaccccaacgccaaccccaacgccaaccccaacgccaaccccaacgccaaccccaacgccaaccccaacgccaaccccaacgccaaccccaacgccaaccccgccgccuacaucaagcccggcuccgccaacaagcccaaggacgagcucgacuacgccaacgacaucgaggccgccuaccaguacaucaaggccaacuccaaguucaucggcaucaccgagcucugaggacuagugcaucacauuuaaaagcaucucagccuaccaugagaauaagagaaagaaaaugaagaucaauagcuuauucaucucuuuuucuuuuucguugguguaaagccaacacccugucuaaaaaacauaaauuucuuuaaucauuuugccucuuuucucugugcuucaauuaauaaaaaauggaaagaaccuagaucuaaaaaaaaaaaaaaaaaaaaaaaaaaaaaaaaaaaaaaaaaaaaaaaaaaaaaaaaaaaaaaaaugcaucccccccccccccccccccccccccccccccaaaggcucuuuucagagccaccagaauu

SEQ ID NO: 1004 - RNA, 1318 nt, Artificial Sequence
  mRNA Design i-2 (A64-N5-C30-hSL-N5) comprising derived and/or modified sequence from Pf(3D7)__XP_001351122.1__HsALB_Pf-CSP(19-272)_L(AAY)_Pf-CSP(346-3 65)_L(AAY)_PADRE (opt2)
ggggcgcugccuacggagguggcagccaucuccuucucggcaucaagcuuaccaugaagugggucaccuucaucucccuccucuuccucuucuccuccgccuacucccucuuccaggaguaccagugcuacggcuccuccuccaacacccgcguccucaacgagcucaacuacgacaacgccggcaccaaccucuacaacgagcucgagaugaacuacuacggcaagcaggagaacugguacucccucaagaagaacucccgcucccucggcgagaacgacgacggcaacaacgaggacaacgagaagcuccgcaagcccaagcacaagaagcucaagcagcccgccgacggcaaccccgaccccaacgccaaccccaacgucgaccccaacgccaaccccaacgucgaccccaacgccaaccccaacgucgaccccaacgccaaccccaacgccaaccccaacgccaaccccaacgccaaccccaacgccaaccccaacgccaaccccaacgccaaccccaacgccaaccccaacgccaaccccaacgccaaccccaacgccaaccccaacgccaaccccaacgccaaccccaacgccaaccccaacgccaaccccaacgccaaccccaacgccaaccccaacgucgaccccaacgccaaccccaacgccaaccccaacgccaaccccaacgccaaccccaacgccaaccccaacgccaaccccaacgccaaccccaacgccaaccccaacgccaaccccaacgccaaccccaacgccaaccccaacgccaaccccaacgccaaccccaacgccaaccccaacgccaaccccaacgccaaccccaacgccaaccccaacgccaaccccgccgccuacaucaagcccggcuccgccaacaagcccaaggacgagcucgacuacgccaacgacaucgaggccgccuacgccaaguucgucgccgccuggacccucaaggccgccgccugaggacuagugcaucacauuuaaaagcaucucagccuaccaugagaauaagagaaagaaaaugaagaucaauagcuuauucaucucuuuuucuuuuucguugguguaaagccaacacccugucuaaaaaacauaaauuucuuuaaucauuuugccucuuuucucugugcuucaauuaauaaaaaauggaaagaaccuagaucuaaaaaaaaaaaaaaaaaaaaaaaaaaaaaaaaaaaaaaaaaaaaaaaaaaaaaaaaaaaaaaaaugcaucccccccccccccccccccccccccccccccaaaggcucuuuucagagccaccagaauu

SEQ ID NO: 1005 - RNA, 1375 nt, Artificial Sequence
  mRNA Design i-2 (A64-N5-C30-hSL-N5) comprising derived and/or modified sequence from Pf(3D7)__XP_001351122.1__HsALB_Pf-CSP(19-272)_L(G4S)_Pf-CSP(310-3 27)_L(G4S)_Pf-CSP(346-375) (opt2)
ggggcgcugccuacggagguggcagccaucuccuucucggcaucaagcuuaccaugaagugggucaccuucaucucccuccucuuccucuucuccuccgccuacucccucuuccaggaguaccagugcuacggcuccuccuccaacacccgcguccucaacgagcucaacuacgacaacgccggcaccaaccucuacaacgagcucgagaugaacuacuacggcaagcaggagaacugguacucccucaagaagaacucccgcucccucggcgagaacgacgacggcaacaacgaggacaacgagaagcuccgcaagcccaagcacaagaagcucaagcagcccgccgacggcaaccccgaccccaacgccaaccccaacgucgaccccaacgccaaccccaacgucgaccccaacgccaaccccaacgucgaccccaacgccaaccccaacgccaaccccaacgccaaccccaacgccaaccccaacgccaaccccaacgccaaccccaacgccaaccccaacgccaaccccaacgccaaccccaacgccaaccccaacgccaaccccaacgccaaccccaacgccaaccccaacgccaaccccaacgccaaccccaacgccaaccccaacgccaaccccaacgucgaccccaacgccaaccccaacgccaaccccaacgccaaccccaacgccaaccccaacgccaaccccaacgccaaccccaacgccaaccccaacgccaaccccaacgccaaccccaacgccaaccccaacgccaaccccaacgccaaccccaacgccaaccccaacgccaaccccaacgccaaccccaacgccaaccccaacgccaaccccaacgccaaccccggcggcggcggcuccgagcccuccgacaagcacaucaaggaguaccucaacaagauccagaacucccucggcggcggcggcuccaucaagcccggcuccgccaacaagcccaaggacgagcucgacuacgccaacgacaucgagaagaagaucugcaagauggagaagugcuccugaggacuagugcaucacauuuaaaagcaucucagccuaccaugagaauaagagaaagaaaaugaagaucaauagcuuauucaucucuuuuucuuuuucguugguguaaagccaacacccugucuaaaaaacauaaauuucuuuaaucauuuugccucuuuucucugugcuucaauuaauaaaaaauggaaagaaccuagaucuaaaaaaaaaaaaaaaaaaaaaaaaaaaaaaaaaaaaaaaaaaaaaaaaaaaaaaaaaaaaaaaaugcaucccccccccccccccccccccccccccccccaaaggcucuuuucagagccaccagaauu

SEQ ID NO: 1006 - RNA, 1360 nt, Artificial Sequence
  mRNA Design i-2 (A64-N5-C30-hSL-N5) comprising derived and/or modified sequence from Pf(3D7)__XP_001351122.1__HsALB_Pf-CSP(19-272)_L(G4S)_Pf-CSP(310-3 27)_Pf-CSP(346-375) (opt2)
ggggcgcugccuacggagguggcagccaucuccuucucggcaucaagcuuaccaugaagugggucaccuucaucucccuccucuuccucuucuccuccgccuacucccucuuccaggaguaccagugcuacggcuccuccuccaacacccgcguccucaacgagcucaacuacgacaacgccggcaccaaccucuacaacgagcucgagaugaacuacuacggcaagcaggagaacugguacucccucaagaagaacucccgcucccucggcgagaacgacgacggcaacaacgaggacaacgagaagcuccgcaagcccaagcacaagaagcucaagcagcccgccgacggcaaccccgaccccaacgccaaccccaacgucgaccccaacgccaaccccaacgucgaccccaacgccaaccccaacgucgaccccaacgccaaccccaacgccaaccccaacgccaaccccaacgccaaccccaacgccaaccccaacgccaaccccaacgccaaccccaacgccaaccccaacgccaaccccaacgccaaccccaacgccaaccccaacgccaaccccaacgccaaccccaacgccaaccccaacgccaaccccaacgccaaccccaacgccaaccccaacgucgaccccaacgccaaccccaacgccaaccccaacgccaaccccaacgccaaccccaacgccaaccccaacgccaaccccaacgccaaccccaacgccaaccccaacgccaaccccaacgccaaccccaacgccaaccccaacgccaaccccaacgccaaccccaacgccaaccccaacgccaaccccaacgccaaccccaacgccaaccccaacgccaaccccggcggcggcggcuccgagcccuccgacaagcacaucaaggaguaccucaacaagauccagaacucccucaucaagcccggcuccgccaacaagcccaaggacgagcucgacuacgccaacgacaucgagaagaagaucugcaagauggagaagugcuccugaggacuagugcaucacauuuaaaagcaucucagccuaccaugagaauaagagaaagaaaaugaagaucaauagcuuauucaucucuuuuucuuuuucguugguguaaagccaacacccugucuaaaaaacauaaauuucuuuaaucauuuugccucuuuucucugugcuucaauuaauaaaaaauggaaagaaccuagaucuaaaaaaaaaaaaaaaaaaaaaaaaaaaaaaaaaaaaaaaaaaaaaaaaaaaaaaaaaaaaaaaaugcaucccccccccccccccccccccccccccccccaaaggcucuuuucagagccaccagaauu

SEQ ID NO: 1007 - RNA, 1360 nt, Artificial Sequence
  mRNA Design i-2 (A64-N5-C30-hSL-N5) comprising derived and/or modified sequence from Pf(3D7)__XP_001351122.1__HsALB_Pf-CSP(19-325) (opt2)
ggggcgcugccuacggagguggcagccaucuccuucucggcaucaagcuuaccaugaagugggucaccuucaucucccuccucuuccucuucuccuccgccuacucccucuuccaggaguaccagugcuacggcuccuccuccaacacccgcguccucaacgagcucaacuacgacaacgccggcaccaaccucuacaacgagcucgagaugaacuacuacggcaagcaggagaacugguacucccucaagaagaacucccgcucccucggcgagaacgacgacggcaacaacgaggacaacgagaagcuccgcaagcccaagcacaagaagcucaagcagcccgccgacggcaaccccgaccccaacgccaaccccaacgucgaccccaacgccaaccccaacgucgaccccaacgccaaccccaacgucgaccccaacgccaaccccaacgccaaccccaacgccaaccccaacgccaaccccaacgccaaccccaacgccaaccccaacgccaaccccaacgccaaccccaacgccaaccccaacgccaaccccaacgccaaccccaacgccaaccccaacgccaaccccaacgccaaccccaacgccaaccccaacgccaaccccaacgccaaccccaacgucgaccccaacgccaaccccaacgccaaccccaacgccaaccccaacgccaaccccaacgccaaccccaacgccaaccccaacgccaaccccaacgccaaccccaacgccaaccccaacgccaaccccaacgccaaccccaacgccaaccccaacgccaaccccaacgccaaccccaacgccaaccccaacgccaaccccaacgccaaccccaacgccaaccccaacaagaacaaccagggcaacggccagggccacaacaugcccaacgaccccaaccgcaacgucgacgagaacgccaacgccaacuccgccgucaagaacaacaacaacgaggagcccuccgacaagcacaucaaggaguaccucaacaagauccagaacugaggacuagugcaucacauuuaaaagcaucucagccuaccaugagaauaagagaaagaaaaugaagaucaauagcuuauucaucucuuuuucuuuuucguugguguaaagccaacacccugucuaaaaaacauaaauuucuuuaaucauuuugccucuuuucucugugcuucaauuaauaaaaaauggaaagaaccuagaucuaaaaaaaaaaaaaaaaaaaaaaaaaaaaaaaaaaaaaaaaaaaaaaaaaaaaaaaaaaaaaaaaugcaucccccccccccccccccccccccccccccccaaaggcucuuuucagagccaccagaauu

SEQ ID NO: 1008 - RNA, 1537 nt, Artificial Sequence
  mRNA Design i-2 (A64-N5-C30-hSL-N5) comprising derived and/or modified sequence from Pf(3D7)__XP_001351122.1__HsALB_Pf-CSP(19-384) (opt2)
ggggcgcugccuacggagguggcagccaucuccuucucggcaucaagcuuaccaugaagugggucaccuucaucucccuccucuuccucuucuccuccgccuacucccucuuccaggaguaccagugcuacggcuccuccuccaacacccgcguccucaacgagcucaacuacgacaacgccggcaccaaccucuacaacgagcucgagaugaacuacuacggcaagcaggagaacugguacucccucaagaagaacucccgcucccucggcgagaacgacgacggcaacaacgaggacaacgagaagcuccgcaagcccaagcacaagaagcucaagcagcccgccgacggcaaccccgaccccaacgccaaccccaacgucgaccccaacgccaaccccaacgucgaccccaacgccaaccccaacgucgaccccaacgccaaccccaacgccaaccccaacgccaaccccaacgccaaccccaacgccaaccccaacgccaaccccaacgccaaccccaacgccaaccccaacgccaaccccaacgccaaccccaacgccaaccccaacgccaaccccaacgccaaccccaacgccaaccccaacgccaaccccaacgccaaccccaacgccaaccccaacgucgaccccaacgccaaccccaacgccaaccccaacgccaaccccaacgccaaccccaacgccaaccccaacgccaaccccaacgccaaccccaacgccaaccccaacgccaaccccaacgccaaccccaacgccaaccccaacgccaaccccaacgccaaccccaacgccaaccccaacgccaaccccaacgccaaccccaacgccaaccccaacgccaaccccaacaagaacaaccagggcaacggccagggccacaacaugcccaacgaccccaaccgcaacgucgacgagaacgccaacgccaacuccgccgucaagaacaacaacaacgaggagcccuccgacaagcacaucaaggaguaccucaacaagauccagaacucccucuccaccgaguggucccccugcuccgucaccugcggcaacggcauccagguccgcaucaagcccggcuccgccaacaagcccaaggacgagcucgacuacgccaacgacaucgagaagaagaucugcaagauggagaagugcuccuccgucuucaacgucgucaacuccuccugaggacuagugcaucacauuuaaaagcaucucagccuaccaugagaauaagagaaagaaaaugaagaucaauagcuuauucaucucuuuuucuuuuucguugguguaaagccaacacccugucuaaaaaacauaaauuucuuuaaucauuuugccucuuuucucugugcuucaauuaauaaaaaauggaaagaaccuagaucuaaaaaaaaaaaaaaaaaaaaaaaaaaaaaaaaaaaaaaaaaaaaaaaaaaaaaaaaaaaaaaaaugcaucccccccccccccccccccccccccccccccaaaggcucuuuucagagccaccagaauu

SEQ ID NO: 1009 - RNA, 1675 nt, Artificial Sequence
  mRNA Design i-2 (A64-N5-C30-hSL-N5) comprising derived and/or modified sequence from Pf(3D7)__XP_001351122.1__HsALB_Pf-CSP(19-384)_TM domain HA (opt2)
ggggcgcugccuacggagguggcagccaucuccuucucggcaucaagcuuaccaugaagugggucaccuucaucucccuccucuuccucuucuccuccgccuacucccucuuccaggaguaccagugcuacggcuccuccuccaacacccgcguccucaacgagcucaacuacgacaacgccggcaccaaccucuacaacgagcucgagaugaacuacuacggcaagcaggagaacugguacucccucaagaagaacucccgcucccucggcgagaacgacgacggcaacaacgaggacaacgagaagcuccgcaagcccaagcacaagaagcucaagcagcccgccgacggcaaccccgaccccaacgccaaccccaacgucgaccccaacgccaaccccaacgucgaccccaacgccaaccccaacgucgaccccaacgccaaccccaacgccaaccccaacgccaaccccaacgccaaccccaacgccaaccccaacgccaaccccaacgccaaccccaacgccaaccccaacgccaaccccaacgccaaccccaacgccaaccccaacgccaaccccaacgccaaccccaacgccaaccccaacgccaaccccaacgccaaccccaacgccaaccccaacgucgaccccaacgccaaccccaacgccaaccccaacgccaaccccaacgccaaccccaacgccaaccccaacgccaaccccaacgccaaccccaacgccaaccccaacgccaaccccaacgccaaccccaacgccaaccccaacgccaaccccaacgccaaccccaacgccaaccccaacgccaaccccaacgccaaccccaacgccaaccccaacgccaaccccaacaagaacaaccagggcaacggccagggccacaacaugcccaacgaccccaaccgcaacgucgacgagaacgccaacgccaacuccgccgucaagaacaacaacaacgaggagcccuccgacaagcacaucaaggaguaccucaacaagauccagaacucccucuccaccgaguggucccccugcuccgucaccugcggcaacggcauccagguccgcaucaagcccggcuccgccaacaagcccaaggacgagcucgacuacgccaacgacaucgagaagaagaucugcaagauggagaagugcuccuccgucuucaacgucgucaacuccuccaagcucgaguccacccgcaucuaccagauccucgccaucuacuccaccgucgccuccucccucguccucgucgucucccucggcgccaucuccuucuggaugugcuccaacggcucccuccagugccgcaucugcaucugaggacuagugcaucacauuuaaaagcaucucagccuaccaugagaauaagagaaagaaaaugaagaucaauagcuuauucaucucuuuuucuuuuucguugguguaaagccaacacccugucuaaaaaacauaaauuucuuuaaucauuuugccucuuuucucugugcuucaauuaauaaaaaauggaaagaaccuagaucuaaaaaaaaaaaaaaaaaaaaaaaaaaaaaaaaaaaaaaaaaaaaaaaaaaaaaaaaaaaaaaaaugcaucccccccccccccccccccccccccccccccaaaggcucuuuucagagccaccagaauu

SEQ ID NO: 1010 - RNA, 1387 nt, Artificial Sequence
  mRNA Design i-2 (A64-N5-C30-hSL-N5) comprising derived and/or modified sequence from Pf(3D7)__XP_001351122.1__HsALB_Pf-CSP(82-397) (opt2)
ggggcgcugccuacggagguggcagccaucuccuucucggcaucaagcuuaccaugaagugggucaccuucaucucccuccucuuccucuucuccuccgccuacuccgacaacgagaagcuccgcaagcccaagcacaagaagcucaagcagcccgccgacggcaaccccgaccccaacgccaaccccaacgucgaccccaacgccaaccccaacgucgaccccaacgccaaccccaacgucgaccccaacgccaaccccaacgccaaccccaacgccaaccccaacgccaaccccaacgccaaccccaacgccaaccccaacgccaaccccaacgccaaccccaacgccaaccccaacgccaaccccaacgccaaccccaacgccaaccccaacgccaaccccaacgccaaccccaacgccaaccccaacgccaaccccaacgccaaccccaacgucgaccccaacgccaaccccaacgccaaccccaacgccaaccccaacgccaaccccaacgccaaccccaacgccaaccccaacgccaaccccaacgccaaccccaacgccaaccccaacgccaaccccaacgccaaccccaacgccaaccccaacgccaaccccaacgccaaccccaacgccaaccccaacgccaaccccaacgccaaccccaacgccaaccccaacaagaacaaccagggcaacggccagggccacaacaugcccaacgaccccaaccgcaacgucgacgagaacgccaacgccaacuccgccgucaagaacaacaacaacgaggagcccuccgacaagcacaucaaggaguaccucaacaagauccagaacucccucuccaccgaguggucccccugcuccgucaccugcggcaacggcauccagguccgcaucaagcccggcuccgccaacaagcccaaggacgagcucgacuacgccaacgacaucgagaagaagaucugcaagauggagaagugcuccuccgucuucaacgucgucaacuccuccaucggccucaucaugguccucuccuuccucuuccucaacugaggacuagugcaucacauuuaaaagcaucucagccuaccaugagaauaagagaaagaaaaugaagaucaauagcuuauucaucucuuuuucuuuuucguugguguaaagccaacacccugucuaaaaaacauaaauuucuuuaaucauuuugccucuuuucucugugcuucaauuaauaaaaaauggaaagaaccuagaucuaaaaaaaaaaaaaaaaaaaaaaaaaaaaaaaaaaaaaaaaaaaaaaaaaaaaaaaaaaaaaaaaugcaucccccccccccccccccccccccccccccccaaaggcucuuuucagagccaccagaauu

SEQ ID NO: 1011 - RNA, 739 nt, Artificial Sequence
  mRNA Design i-2 (A64-N5-C30-hSL-N5) comprising derived and/or modified sequence from Pf(3D7)__XP_001351122.1__HsALB_Pf-CSP(93-192) (opt2)
ggggcgcugccuacggagguggcagccaucuccuucucggcaucaagcuuaccaugaagugggucaccuucaucucccuccucuuccucuucuccuccgccuacuccaagcucaagcagcccgccgacggcaaccccgaccccaacgccaaccccaacgucgaccccaacgccaaccccaacgucgaccccaacgccaaccccaacgucgaccccaacgccaaccccaacgccaaccccaacgccaaccccaacgccaaccccaacgccaaccccaacgccaaccccaacgccaaccccaacgccaaccccaacgccaaccccaacgccaaccccaacgccaaccccaacgccaaccccaacgccaaccccaacgccaaccccaacgccaaccccaacgccaaccccugaggacuagugcaucacauuuaaaagcaucucagccuaccaugagaauaagagaaagaaaaugaagaucaauagcuuauucaucucuuuuucuuuuucguugguguaaagccaacacccugucuaaaaaacauaaauuucuuuaaucauuuugccucuuuucucugugcuucaauuaauaaaaaauggaaagaaccuagaucuaaaaaaaaaaaaaaaaaaaaaaaaaaaaaaaaaaaaaaaaaaaaaaaaaaaaaaaaaaaaaaaaugcaucccccccccccccccccccccccccccccccaaaggcucuuuucagagccaccagaauu

SEQ ID NO: 1012 - RNA, 979 nt, Artificial Sequence
  mRNA Design i-2 (A64-N5-C30-hSL-N5) comprising derived and/or modified sequence from Pf(3D7)__XP_001351122.1__HsALB_Pf-CSP(93-272) (opt2)
ggggcgcugccuacggagguggcagccaucuccuucucggcaucaagcuuaccaugaagugggucaccuucaucucccuccucuuccucuucuccuccgccuacuccaagcucaagcagcccgccgacggcaaccccgaccccaacgccaaccccaacgucgaccccaacgccaaccccaacgucgaccccaacgccaaccccaacgucgaccccaacgccaaccccaacgccaaccccaacgccaaccccaacgccaaccccaacgccaaccccaacgccaaccccaacgccaaccccaacgccaaccccaacgccaaccccaacgccaaccccaacgccaaccccaacgccaaccccaacgccaaccccaacgccaaccccaacgccaaccccaacgccaaccccaacgccaaccccaacgucgaccccaacgccaaccccaacgccaaccccaacgccaaccccaacgccaaccccaacgccaaccccaacgccaaccccaacgccaaccccaacgccaaccccaacgccaaccccaacgccaaccccaacgccaaccccaacgccaaccccaacgccaaccccaacgccaaccccaacgccaaccccaacgccaaccccaacgccaaccccaacgccaaccccugaggacuagugcaucacauuuaaaagcaucucagccuaccaugagaauaagagaaagaaaaugaagaucaauagcuuauucaucucuuuuucuuuuucguugguguaaagccaacacccugucuaaaaaacauaaauuucuuuaaucauuuugccucuuuucucugugcuucaauuaauaaaaaauggaaagaaccuagaucuaaaaaaaaaaaaaaaaaaaaaaaaaaaaaaaaaaaaaaaaaaaaaaaaaaaaaaaaaaaaaaaaugcaucccccccccccccccccccccccccccccccaaaggcucuuuucagagccaccagaauu

SEQ ID NO: 1013 - RNA, 1354 nt, Artificial Sequence
  mRNA Design i-2 (A64-N5-C30-hSL-N5) comprising derived and/or modified sequence from Pf(3D7)__XP_001351122.1__HsALB_Pf-CSP(93-397) (opt2)
ggggcgcugccuacggagguggcagccaucuccuucucggcaucaagcuuaccaugaagugggucaccuucaucucccuccucuuccucuucuccuccgccuacuccaagcucaagcagcccgccgacggcaaccccgaccccaacgccaaccccaacgucgaccccaacgccaaccccaacgucgaccccaacgccaaccccaacgucgaccccaacgccaaccccaacgccaaccccaacgccaaccccaacgccaaccccaacgccaaccccaacgccaaccccaacgccaaccccaacgccaaccccaacgccaaccccaacgccaaccccaacgccaaccccaacgccaaccccaacgccaaccccaacgccaaccccaacgccaaccccaacgccaaccccaacgccaaccccaacgucgaccccaacgccaaccccaacgccaaccccaacgccaaccccaacgccaaccccaacgccaaccccaacgccaaccccaacgccaaccccaacgccaaccccaacgccaaccccaacgccaaccccaacgccaaccccaacgccaaccccaacgccaaccccaacgccaaccccaacgccaaccccaacgccaaccccaacgccaaccccaacgccaaccccaacaagaacaaccagggcaacggccagggccacaacaugcccaacgaccccaaccgcaacgucgacgagaacgccaacgccaacuccgccgucaagaacaacaacaacgaggagcccuccgacaagcacaucaaggaguaccucaacaagauccagaacucccucuccaccgaguggucccccugcuccgucaccugcggcaacggcauccagguccgcaucaagcccggcuccgccaacaagcccaaggacgagcucgacuacgccaacgacaucgagaagaagaucugcaagauggagaagugcuccuccgucuucaacgucgucaacuccuccaucggccucaucaugguccucuccuuccucuuccucaacugaggacuagugcaucacauuuaaaagcaucucagccuaccaugagaauaagagaaagaaaaugaagaucaauagcuuauucaucucuuuuucuuuuucguugguguaaagccaacacccugucuaaaaaacauaaauuucuuuaaucauuuugccucuuuucucugugcuucaauuaauaaaaaauggaaagaaccuagaucuaaaaaaaaaaaaaaaaaaaaaaaaaaaaaaaaaaaaaaaaaaaaaaaaaaaaaaaaaaaaaaaaugcaucccccccccccccccccccccccccccccccaaaggcucuuuucagagccaccagaauu

SEQ ID NO: 1014 - RNA, 724 nt, Artificial Sequence
  mRNA Design i-2 (A64-N5-C30-hSL-N5) comprising derived and/or modified sequence from Pf(3D7)__XP_001351122.1__HsALB_Pf-CSP(98-192) (opt2)
ggggcgcugccuacggagguggcagccaucuccuucucggcaucaagcuuaccaugaagugggucaccuucaucucccuccucuuccucuucuccuccgccuacuccgccgacggcaaccccgaccccaacgccaaccccaacgucgaccccaacgccaaccccaacgucgaccccaacgccaaccccaacgucgaccccaacgccaaccccaacgccaaccccaacgccaaccccaacgccaaccccaacgccaaccccaacgccaaccccaacgccaaccccaacgccaaccccaacgccaaccccaacgccaaccccaacgccaaccccaacgccaaccccaacgccaaccccaacgccaaccccaacgccaaccccaacgccaaccccugaggacuagugcaucacauuuaaaagcaucucagccuaccaugagaauaagagaaagaaaaugaagaucaauagcuuauucaucucuuuuucuuuuucguugguguaaagccaacacccugucuaaaaaacauaaauuucuuuaaucauuuugccucuuuucucugugcuucaauuaauaaaaaauggaaagaaccuagaucuaaaaaaaaaaaaaaaaaaaaaaaaaaaaaaaaaaaaaaaaaaaaaaaaaaaaaaaaaaaaaaaaugcaucccccccccccccccccccccccccccccccaaaggcucuuuucagagccaccagaauu

SEQ ID NO: 1015 - RNA, 964 nt, Artificial Sequence
  mRNA Design i-2 (A64-N5-C30-hSL-N5) comprising derived and/or modified sequence from Pf(3D7)__XP_001351122.1__HsALB_Pf-CSP(98-272) (opt2)
ggggcgcugccuacggagguggcagccaucuccuucucggcaucaagcuuaccaugaagugggucaccuucaucucccuccucuuccucuucuccuccgccuacuccgccgacggcaaccccgaccccaacgccaaccccaacgucgaccccaacgccaaccccaacgucgaccccaacgccaaccccaacgucgaccccaacgccaaccccaacgccaaccccaacgccaaccccaacgccaaccccaacgccaaccccaacgccaaccccaacgccaaccccaacgccaaccccaacgccaaccccaacgccaaccccaacgccaaccccaacgccaaccccaacgccaaccccaacgccaaccccaacgccaaccccaacgccaaccccaacgccaaccccaacgucgaccccaacgccaaccccaacgccaaccccaacgccaaccccaacgccaaccccaacgccaaccccaacgccaaccccaacgccaaccccaacgccaaccccaacgccaaccccaacgccaaccccaacgccaaccccaacgccaaccccaacgccaaccccaacgccaaccccaacgccaaccccaacgccaaccccaacgccaaccccaacgccaaccccugaggacuagugcaucacauuuaaaagcaucucagccuaccaugagaauaagagaaagaaaaugaagaucaauagcuuauucaucucuuuuucuuuuucguugguguaaagccaacacccugucuaaaaaacauaaauuucuuuaaucauuuugccucuuuucucugugcuucaauuaauaaaaaauggaaagaaccuagaucuaaaaaaaaaaaaaaaaaaaaaaaaaaaaaaaaaaaaaaaaaaaaaaaaaaaaaaaaaaaaaaaaugcaucccccccccccccccccccccccccccccccaaaggcucuuuucagagccaccagaauu

SEQ ID NO: 1016 - RNA, 1270 nt, Artificial Sequence
  mRNA Design i-2 (A64-N5-C30-hSL-N5) comprising derived and/or modified sequence from Pf(3D7)__XP_001351122.1__HsALB_Pf-CSP(98-374) (opt2)
ggggcgcugccuacggagguggcagccaucuccuucucggcaucaagcuuaccaugaagugggucaccuucaucucccuccucuuccucuucuccuccgccuacuccgccgacggcaaccccgaccccaacgccaaccccaacgucgaccccaacgccaaccccaacgucgaccccaacgccaaccccaacgucgaccccaacgccaaccccaacgccaaccccaacgccaaccccaacgccaaccccaacgccaaccccaacgccaaccccaacgccaaccccaacgccaaccccaacgccaaccccaacgccaaccccaacgccaaccccaacgccaaccccaacgccaaccccaacgccaaccccaacgccaaccccaacgccaaccccaacgccaaccccaacgucgaccccaacgccaaccccaacgccaaccccaacgccaaccccaacgccaaccccaacgccaaccccaacgccaaccccaacgccaaccccaacgccaaccccaacgccaaccccaacgccaaccccaacgccaaccccaacgccaaccccaacgccaaccccaacgccaaccccaacgccaaccccaacgccaaccccaacgccaaccccaacgccaaccccaacaagaacaaccagggcaacggccagggccacaacaugcccaacgaccccaaccgcaacgucgacgagaacgccaacgccaacuccgccgucaagaacaacaacaacgaggagcccuccgacaagcacaucaaggaguaccucaacaagauccagaacucccucuccaccgaguggucccccugcuccgucaccugcggcaacggcauccagguccgcaucaagcccggcuccgccaacaagcccaaggacgagcucgacuacgccaacgacaucgagaagaagaucugcaagauggagaagugcugaggacuagugcaucacauuuaaaagcaucucagccuaccaugagaauaagagaaagaaaaugaagaucaauagcuuauucaucucuuuuucuuuuucguugguguaaagccaacacccugucuaaaaaacauaaauuucuuuaaucauuuugccucuuuucucugugcuucaauuaauaaaaaauggaaagaaccuagaucuaaaaaaaaaaaaaaaaaaaaaaaaaaaaaaaaaaaaaaaaaaaaaaaaaaaaaaaaaaaaaaaaugcaucccccccccccccccccccccccccccccccaaaggcucuuuucagagccaccagaauu

SEQ ID NO: 1017 - RNA, 1339 nt, Artificial Sequence
  mRNA Design i-2 (A64-N5-C30-hSL-N5) comprising derived and/or modified sequence from Pf(3D7)__XP_001351122.1__HsALB_Pf-CSP(98-397) (opt2)
ggggcgcugccuacggagguggcagccaucuccuucucggcaucaagcuuaccaugaagugggucaccuucaucucccuccucuuccucuucuccuccgccuacuccgccgacggcaaccccgaccccaacgccaaccccaacgucgaccccaacgccaaccccaacgucgaccccaacgccaaccccaacgucgaccccaacgccaaccccaacgccaaccccaacgccaaccccaacgccaaccccaacgccaaccccaacgccaaccccaacgccaaccccaacgccaaccccaacgccaaccccaacgccaaccccaacgccaaccccaacgccaaccccaacgccaaccccaacgccaaccccaacgccaaccccaacgccaaccccaacgccaaccccaacgucgaccccaacgccaaccccaacgccaaccccaacgccaaccccaacgccaaccccaacgccaaccccaacgccaaccccaacgccaaccccaacgccaaccccaacgccaaccccaacgccaaccccaacgccaaccccaacgccaaccccaacgccaaccccaacgccaaccccaacgccaaccccaacgccaaccccaacgccaaccccaacgccaaccccaacaagaacaaccagggcaacggccagggccacaacaugcccaacgaccccaaccgcaacgucgacgagaacgccaacgccaacuccgccgucaagaacaacaacaacgaggagcccuccgacaagcacaucaaggaguaccucaacaagauccagaacucccucuccaccgaguggucccccugcuccgucaccugcggcaacggcauccagguccgcaucaagcccggcuccgccaacaagcccaaggacgagcucgacuacgccaacgacaucgagaagaagaucugcaagauggagaagugcuccuccgucuucaacgucgucaacuccuccaucggccucaucaugguccucuccuuccucuuccucaacugaggacuagugcaucacauuuaaaagcaucucagccuaccaugagaauaagagaaagaaaaugaagaucaauagcuuauucaucucuuuuucuuuuucguugguguaaagccaacacccugucuaaaaaacauaaauuucuuuaaucauuuugccucuuuucucugugcuucaauuaauaaaaaauggaaagaaccuagaucuaaaaaaaaaaaaaaaaaaaaaaaaaaaaaaaaaaaaaaaaaaaaaaaaaaaaaaaaaaaaaaaaugcaucccccccccccccccccccccccccccccccaaaggcucuuuucagagccaccagaauu

SEQ ID NO: 1018 - RNA, 1666 nt, Artificial Sequence
  mRNA Design i-2 (A64-N5-C30-hSL-N5) comprising derived and/or modified sequence from Pf(3D7)__XP_001351122.1__HsALB_Pf-CSP(199-377)_L(PVTN)_HBsAg (opt2)
ggggcgcugccuacggagguggcagccaucuccuucucggcaucaagcuuaccaugaagugggucaccuucaucucccuccucuuccucuucuccuccgccuacuccgaccccaacgccaaccccaacgccaaccccaacgccaaccccaacgccaaccccaacgccaaccccaacgccaaccccaacgccaaccccaacgccaaccccaacgccaaccccaacgccaaccccaacgccaaccccaacgccaaccccaacgccaaccccaacgccaaccccaacgccaaccccaacgccaaccccaacgccaaccccaacgccaaccccaacaagaacaaccagggcaacggccagggccacaacaugcccaacgaccccaaccgcaacgucgacgagaacgccaacgccaacuccgccgucaagaacaacaacaacgaggagcccuccgacaagcacaucaaggaguaccucaacaagauccagaacucccucuccaccgaguggucccccugcuccgucaccugcggcaacggcauccagguccgcaucaagcccggcuccgccaacaagcccaaggacgagcucgacuacgccaacgacaucgagaagaagaucugcaagauggagaagugcuccuccguccccgucaccaacauggagaacaucaccuccggcuuccucggcccccuccucguccuccaggccggcuucuuccuccucacccgcauccucaccaucccccagucccucgacuccugguggaccucccucaacuuccucggcggcucccccgucugccucggccagaacucccagucccccaccuccaaccacucccccaccuccugcccccccaucugccccggcuaccgcuggaugugccuccgccgcuucaucaucuuccucuucauccuccuccucugccucaucuuccuccucguccuccucgacuaccagggcaugcuccccgucugcccccucauccccggcuccaccaccaccaacaccggccccugcaagaccugcaccacccccgcccagggcaacuccauguuccccuccugcugcugcaccaagcccaccgacggcaacugcaccugcauccccauccccuccuccugggccuucgccaaguaccucugggagugggccuccguccgcuucuccuggcucucccuccucguccccuucguccagugguucgucggccucucccccaccgucuggcucuccgccaucuggaugaugugguacuggggccccucccucuacuccaucgucucccccuucaucccccuccuccccaucuucuucugccucugggucuacaucugaggacuagugcaucacauuuaaaagcaucucagccuaccaugagaauaagagaaagaaaaugaagaucaauagcuuauucaucucuuuuucuuuuucguugguguaaagccaacacccugucuaaaaaacauaaauuucuuuaaucauuuugccucuuuucucugugcuucaauuaauaaaaaauggaaagaaccuagaucuaaaaaaaaaaaaaaaaaaaaaaaaaaaaaaaaaaaaaaaaaaaaaaaaaaaaaaaaaaaaaaaaugcaucccccccccccccccccccccccccccccccaaaggcucuuuucagagccaccagaauu

SEQ ID NO: 1019 - RNA, 1405 nt, Artificial Sequence
  mRNA Design i-2 (A64-N5-C30-hSL-N5) comprising derived and/or modified sequence from Pb(ANKA)__XP_022712148.1__Pb-CSP (opt2)
ggggcgcugccuacggagguggcagccaucuccuucucggcaucaagcuuaccaugaagaagugcaccauccucgucgucgccucccuccuccucgucaacucccuccuccccggcuacggccagaacaaguccauccaggcccagcgcaaccucaacgagcucugcuacaacgagggcaacgacaacaagcucuaccacguccucaacuccaagaacggcaagaucuacaaccgcaacaccgucaaccgccuccucgccgacgcccccgagggcaagaagaacgagaagaagaacgagaagaucgagcgcaacaacaagcucaagcagcccccccccccccccaaccccaacgacccccccccccccaaccccaacgacccccccccccccaaccccaacgacccccccccccccaaccccaacgacccccccccccccaacgccaacgacccccccccccccaacgccaacgaccccgccccccccaacgccaacgaccccgccccccccaacgccaacgaccccgccccccccaacgccaacgaccccgccccccccaacgccaacgacccccccccccccaaccccaacgaccccgccccccccaacgccaacgacccccccccccccaaccccaacgaccccgcccccccccagggcaacaacaacccccagccccagccccgcccccagccccagccccagccccagccccagccccagccccagccccagccccagccccgcccccagccccagccccagcccggcggcaacaacaacaacaagaacaacaacaacgacgacuccuacauccccuccgccgagaagauccucgaguucgucaagcagauccgcgacuccaucaccgaggaguggucccagugcaacgucaccugcggcuccggcauccgcguccgcaagcgcaagggcuccaacaagaaggccgaggaccucacccucgaggacaucgacaccgagaucugcaagauggacaagugcuccuccaucuucaacaucgucuccaacucccucggcuucgucauccuccucguccucgucuucuucaacugaggacuagugcaucacauuuaaaagcaucucagccuaccaugagaauaagagaaagaaaaugaagaucaauagcuuauucaucucuuuuucuuuuucguugguguaaagccaacacccugucuaaaaaacauaaauuucuuuaaucauuuugccucuuuucucugugcuucaauuaauaaaaaauggaaagaaccuagaucuaaaaaaaaaaaaaaaaaaaaaaaaaaaaaaaaaaaaaaaaaaaaaaaaaaaaaaaaaaaaaaaaugcaucccccccccccccccccccccccccccccccaaaggcucuuuucagagccaccagaauu

SEQ ID NO: 1020 - RNA, 1570 nt, Artificial Sequence
  mRNA Design i-2 (A64-N5-C30-hSL-N5) comprising derived and/or modified sequence from Pb(ANKA)__XP_022712148.1__Pb-CSP_L(G4SG4)_TM domain HA (opt2)
ggggcgcugccuacggagguggcagccaucuccuucucggcaucaagcuuaccaugaagaagugcaccauccucgucgucgccucccuccuccucgucaacucccuccuccccggcuacggccagaacaaguccauccaggcccagcgcaaccucaacgagcucugcuacaacgagggcaacgacaacaagcucuaccacguccucaacuccaagaacggcaagaucuacaaccgcaacaccgucaaccgccuccucgccgacgcccccgagggcaagaagaacgagaagaagaacgagaagaucgagcgcaacaacaagcucaagcagcccccccccccccccaaccccaacgacccccccccccccaaccccaacgacccccccccccccaaccccaacgacccccccccccccaaccccaacgacccccccccccccaacgccaacgacccccccccccccaacgccaacgaccccgccccccccaacgccaacgaccccgccccccccaacgccaacgaccccgccccccccaacgccaacgaccccgccccccccaacgccaacgacccccccccccccaaccccaacgaccccgccccccccaacgccaacgacccccccccccccaaccccaacgaccccgcccccccccagggcaacaacaacccccagccccagccccgcccccagccccagccccagccccagccccagccccagccccagccccagccccagccccgcccccagccccagccccagcccggcggcaacaacaacaacaagaacaacaacaacgacgacuccuacauccccuccgccgagaagauccucgaguucgucaagcagauccgcgacuccaucaccgaggaguggucccagugcaacgucaccugcggcuccggcauccgcguccgcaagcgcaagggcuccaacaagaaggccgaggaccucacccucgaggacaucgacaccgagaucugcaagauggacaagugcuccuccaucuucaacaucgucuccaacucccucggcuucgucauccuccucguccucgucuucuucaacggcggcggcggcuccggcggcggcggcaagcucgaguccacccgcaucuaccagauccucgccaucuacuccaccgucgccuccucccucguccucgucgucucccucggcgccaucuccuucuggaugugcuccaacggcucccuccagugccgcaucugcaucugaggacuagugcaucacauuuaaaagcaucucagccuaccaugagaauaagagaaagaaaaugaagaucaauagcuuauucaucucuuuuucuuuuucguugguguaaagccaacacccugucuaaaaaacauaaauuucuuuaaucauuuugccucuuuucucugugcuucaauuaauaaaaaauggaaagaaccuagaucuaaaaaaaaaaaaaaaaaaaaaaaaaaaaaaaaaaaaaaaaaaaaaaaaaaaaaaaaaaaaaaaaugcaucccccccccccccccccccccccccccccccaaaggcucuuuucagagccaccagaauu

SEQ ID NO: 1021 - RNA, 1390 nt, Artificial Sequence
  mRNA Design i-2 (A64-N5-C30-hSL-N5) comprising derived and/or modified sequence from Pb(ANKA)__XP_022712148.1__HsALB_Pb-CSP(24-340) (opt2)
ggggcgcugccuacggagguggcagccaucuccuucucggcaucaagcuuaccaugaagugggucaccuucaucucccuccucuuccucuucuccuccgccuacucccagaacaaguccauccaggcccagcgcaaccucaacgagcucugcuacaacgagggcaacgacaacaagcucuaccacguccucaacuccaagaacggcaagaucuacaaccgcaacaccgucaaccgccuccucgccgacgcccccgagggcaagaagaacgagaagaagaacgagaagaucgagcgcaacaacaagcucaagcagcccccccccccccccaaccccaacgacccccccccccccaaccccaacgacccccccccccccaaccccaacgacccccccccccccaaccccaacgacccccccccccccaacgccaacgacccccccccccccaacgccaacgaccccgccccccccaacgccaacgaccccgccccccccaacgccaacgaccccgccccccccaacgccaacgaccccgccccccccaacgccaacgacccccccccccccaaccccaacgaccccgccccccccaacgccaacgacccccccccccccaaccccaacgaccccgcccccccccagggcaacaacaacccccagccccagccccgcccccagccccagccccagccccagccccagccccagccccagccccagccccagccccgcccccagccccagccccagcccggcggcaacaacaacaacaagaacaacaacaacgacgacuccuacauccccuccgccgagaagauccucgaguucgucaagcagauccgcgacuccaucaccgaggaguggucccagugcaacgucaccugcggcuccggcauccgcguccgcaagcgcaagggcuccaacaagaaggccgaggaccucacccucgaggacaucgacaccgagaucugcaagauggacaagugcuccuccaucuucaacaucgucuccaacucccucggcuucgucauccuccucguccucgucuucuucaacugaggacuagugcaucacauuuaaaagcaucucagccuaccaugagaauaagagaaagaaaaugaagaucaauagcuuauucaucucuuuuucuuuuucguugguguaaagccaacacccugucuaaaaaacauaaauuucuuuaaucauuuugccucuuuucucugugcuucaauuaauaaaaaauggaaagaaccuagaucuaaaaaaaaaaaaaaaaaaaaaaaaaaaaaaaaaaaaaaaaaaaaaaaaaaaaaaaaaaaaaaaaugcaucccccccccccccccccccccccccccccccaaaggcucuuuucagagccaccagaauu

SEQ ID NO: 1022 - RNA, 1408 nt, Artificial Sequence
  mRNA Design i-2 (A64-N5-C30-hSL-N5) comprising derived and/or modified sequence from Pb(ANKA)__XP_022712148.1__HsIns-iso1_Pb-CSP(24-340) (opt2)
ggggcgcugccuacggagguggcagccaucuccuucucggcaucaagcuuaccauggcccucuggaugcgccuccucccccuccucgcccuccucgcccucuggggccccgaccccgccgccgcccagaacaaguccauccaggcccagcgcaaccucaacgagcucugcuacaacgagggcaacgacaacaagcucuaccacguccucaacuccaagaacggcaagaucuacaaccgcaacaccgucaaccgccuccucgccgacgcccccgagggcaagaagaacgagaagaagaacgagaagaucgagcgcaacaacaagcucaagcagcccccccccccccccaaccccaacgacccccccccccccaaccccaacgacccccccccccccaaccccaacgacccccccccccccaaccccaacgacccccccccccccaacgccaacgacccccccccccccaacgccaacgaccccgccccccccaacgccaacgaccccgccccccccaacgccaacgaccccgccccccccaacgccaacgaccccgccccccccaacgccaacgacccccccccccccaaccccaacgaccccgccccccccaacgccaacgacccccccccccccaaccccaacgaccccgcccccccccagggcaacaacaacccccagccccagccccgcccccagccccagccccagccccagccccagccccagccccagccccagccccagccccgcccccagccccagccccagcccggcggcaacaacaacaacaagaacaacaacaacgacgacuccuacauccccuccgccgagaagauccucgaguucgucaagcagauccgcgacuccaucaccgaggaguggucccagugcaacgucaccugcggcuccggcauccgcguccgcaagcgcaagggcuccaacaagaaggccgaggaccucacccucgaggacaucgacaccgagaucugcaagauggacaagugcuccuccaucuucaacaucgucuccaacucccucggcuucgucauccuccucguccucgucuucuucaacugaggacuagugcaucacauuuaaaagcaucucagccuaccaugagaauaagagaaagaaaaugaagaucaauagcuuauucaucucuuuuucuuuuucguugguguaaagccaacacccugucuaaaaaacauaaauuucuuuaaucauuuugccucuuuucucugugcuucaauuaauaaaaaauggaaagaaccuagaucuaaaaaaaaaaaaaaaaaaaaaaaaaaaaaaaaaaaaaaaaaaaaaaaaaaaaaaaaaaaaaaaaugcaucccccccccccccccccccccccccccccccaaaggcucuuuucagagccaccagaauu

SEQ ID NO: 1023 - RNA, 1387 nt, Artificial Sequence
  mRNA Design i-2 (A64-N5-C30-hSL-N5) comprising derived and/or modified sequence from Pb(ANKA)__XP_022712148.1__HsSPARC_Pb-CSP(24-340) (opt2)
ggggcgcugccuacggagguggcagccaucuccuucucggcaucaagcuuaccaugcgcgccuggaucuucuuccuccucugccucgccggccgcgcccucgcccagaacaaguccauccaggcccagcgcaaccucaacgagcucugcuacaacgagggcaacgacaacaagcucuaccacguccucaacuccaagaacggcaagaucuacaaccgcaacaccgucaaccgccuccucgccgacgcccccgagggcaagaagaacgagaagaagaacgagaagaucgagcgcaacaacaagcucaagcagcccccccccccccccaaccccaacgacccccccccccccaaccccaacgacccccccccccccaaccccaacgacccccccccccccaaccccaacgacccccccccccccaacgccaacgacccccccccccccaacgccaacgaccccgccccccccaacgccaacgaccccgccccccccaacgccaacgaccccgccccccccaacgccaacgaccccgccccccccaacgccaacgacccccccccccccaaccccaacgaccccgccccccccaacgccaacgacccccccccccccaaccccaacgaccccgcccccccccagggcaacaacaacccccagccccagccccgcccccagccccagccccagccccagccccagccccagccccagccccagccccagccccgcccccagccccagccccagcccggcggcaacaacaacaacaagaacaacaacaacgacgacuccuacauccccuccgccgagaagauccucgaguucgucaagcagauccgcgacuccaucaccgaggaguggucccagugcaacgucaccugcggcuccggcauccgcguccgcaagcgcaagggcuccaacaagaaggccgaggaccucacccucgaggacaucgacaccgagaucugcaagauggacaagugcuccuccaucuucaacaucgucuccaacucccucggcuucgucauccuccucguccucgucuucuucaacugaggacuagugcaucacauuuaaaagcaucucagccuaccaugagaauaagagaaagaaaaugaagaucaauagcuuauucaucucuuuuucuuuuucguugguguaaagccaacacccugucuaaaaaacauaaauuucuuuaaucauuuugccucuuuucucugugcuucaauuaauaaaaaauggaaagaaccuagaucuaaaaaaaaaaaaaaaaaaaaaaaaaaaaaaaaaaaaaaaaaaaaaaaaaaaaaaaaaaaaaaaaugcaucccccccccccccccccccccccccccccccaaaggcucuuuucagagccaccagaauu

SEQ ID NO: 1024 - RNA, 1390 nt, Artificial Sequence
  mRNA Design i-2 (A64-N5-C30-hSL-N5) comprising derived and/or modified sequence from Pb(ANKA)__XP_022712148.1__IgE_Pb-CSP(24-340) (opt2)
ggggcgcugccuacggagguggcagccaucuccuucucggcaucaagcuuaccauggacuggaccuggauccucuuccucgucgccgccgccacccgcguccacucccagaacaaguccauccaggcccagcgcaaccucaacgagcucugcuacaacgagggcaacgacaacaagcucuaccacguccucaacuccaagaacggcaagaucuacaaccgcaacaccgucaaccgccuccucgccgacgcccccgagggcaagaagaacgagaagaagaacgagaagaucgagcgcaacaacaagcucaagcagcccccccccccccccaaccccaacgacccccccccccccaaccccaacgacccccccccccccaaccccaacgacccccccccccccaaccccaacgacccccccccccccaacgccaacgacccccccccccccaacgccaacgaccccgccccccccaacgccaacgaccccgccccccccaacgccaacgaccccgccccccccaacgccaacgaccccgccccccccaacgccaacgacccccccccccccaaccccaacgaccccgccccccccaacgccaacgacccccccccccccaaccccaacgaccccgcccccccccagggcaacaacaacccccagccccagccccgcccccagccccagccccagccccagccccagccccagccccagccccagccccagccccgcccccagccccagccccagcccggcggcaacaacaacaacaagaacaacaacaacgacgacuccuacauccccuccgccgagaagauccucgaguucgucaagcagauccgcgacuccaucaccgaggaguggucccagugcaacgucaccugcggcuccggcauccgcguccgcaagcgcaagggcuccaacaagaaggccgaggaccucacccucgaggacaucgacaccgagaucugcaagauggacaagugcuccuccaucuucaacaucgucuccaacucccucggcuucgucauccuccucguccucgucuucuucaacugaggacuagugcaucacauuuaaaagcaucucagccuaccaugagaauaagagaaagaaaaugaagaucaauagcuuauucaucucuuuuucuuuuucguugguguaaagccaacacccugucuaaaaaacauaaauuucuuuaaucauuuugccucuuuucucugugcuucaauuaauaaaaaauggaaagaaccuagaucuaaaaaaaaaaaaaaaaaaaaaaaaaaaaaaaaaaaaaaaaaaaaaaaaaaaaaaaaaaaaaaaaugcaucccccccccccccccccccccccccccccccaaaggcucuuuucagagccaccagaauu

SEQ ID NO: 1025 - RNA, 1576 nt, Artificial Sequence
  mRNA Design i-2 (A64-N5-C30-hSL-N5) comprising derived and/or modified sequence from Pf(3D7)__XP_001351122.1__Pf-CSP (opt3)
ggggcgcugccuacggagguggcagccaucuccuucucggcaucaagcuuaccaugaugagaaagcuggccauccucagcguguccucuuuccuuuuugucgaggcucuguuccaggaauaccaaugcuauggcucaaguagcaacaccaggguuuugaaugaguuaaacuacgacaaugcagggacaaaccuguauaaugaacuagagaugaacuacuauggaaaacaggaaaauugguacucccucaagaaaaacucucggucgcugggugagaaugaugacggcaacaaugaggauaacgaaaaacuucgcaagcccaagcacaagaaacugaagcagccugccgacgggaauccagauccgaacgcgaaucccaacguggacccuaacgcuaauccaaacguagaucccaaugccaacccuaauguggacccaaacgcaaaucccaacgccaauccuaacgcuaauccaaacgcaaauccgaacgccaaucccaacgcuaacccuaaugccaacccaaaugcgaaccccaaugcaaacccuaaugccaacccaaaugcuaaccccaaugccaacccgaaugcaaacccuaaugcuaaccccaacgccaauccaaacgcgaauccuaacgccaaucccaacgucgauccaaaugcaaaccccaaugcuaacccuaaugccaacccaaaugcuaacccgaaugccaaccccaacgcaaauccuaacgccaauccaaacgcuaaucccaacgcgaauccuaacgcaaauccaaacgccaaucccaacgcuaauccgaacgccaauccuaacgcaaauccaaacgccaaccccaaugcuaacccuaaugccaaccccaaugcaaacccaaauaaaaacaaucagggaaacggccaaggucauaauaugccuaacgaccccaaucgaaacguggaugagaaugcgaacgcuaacucagccguuaagaauaacaauaacgaggaaccaagcgacaaacacauuaaggaguauuugaauaagauacagaacagucucuccacugaauggucuccguguagcgugacgugcgggaauggaauccagguccguauuaaaccuggcuccgcaaacaagcccaaagaugagcuggacuacgccaaugacaucgaaaagaaaauuuguaagauggagaaaugcucaaguguguuuaacguaguuaauagcucuaucggccugauaauggugcucuccuucuuauuucugaacugaggacuagugcaucacauuuaaaagcaucucagccuaccaugagaauaagagaaagaaaaugaagaucaauagcuuauucaucucuuuuucuuuuucguugguguaaagccaacacccugucuaaaaaacauaaauuucuuuaaucauuuugccucuuuucucugugcuucaauuaauaaaaaauggaaagaaccuagaucuaaaaaaaaaaaaaaaaaaaaaaaaaaaaaaaaaaaaaaaaaaaaaaaaaaaaaaaaaaaaaaaaugcaucccccccccccccccccccccccccccccccaaaggcucuuuucagagccaccagaauu

SEQ ID NO: 1026 - RNA, 1507 nt, Artificial Sequence
  mRNA Design i-2 (A64-N5-C30-hSL-N5) comprising derived and/or modified sequence from Pf(3D7)__XP_001351122.1__Pf-CSP(1-374) (opt3)
ggggcgcugccuacggagguggcagccaucuccuucucggcaucaagcuuaccaugaugagaaagcuggccauccucagcguguccucuuuccuuuuugucgaggcucuguuccaggaauaccaaugcuauggcucaaguagcaacaccaggguuuugaaugaguuaaacuacgacaaugcagggacaaaccuguauaaugaacuagagaugaacuacuauggaaaacaggaaaauugguacucccucaagaaaaacucucggucgcugggugagaaugaugacggcaacaaugaggauaacgaaaaacuucgcaagcccaagcacaagaaacugaagcagccugccgacgggaauccagauccgaacgcgaaucccaacguggacccuaacgcuaauccaaacguagaucccaaugccaacccuaauguggacccaaacgcaaaucccaacgccaauccuaacgcuaauccaaacgcaaauccgaacgccaaucccaacgcuaacccuaaugccaacccaaaugcgaaccccaaugcaaacccuaaugccaacccaaaugcuaaccccaaugccaacccgaaugcaaacccuaaugcuaaccccaacgccaauccaaacgcgaauccuaacgccaaucccaacgucgauccaaaugcaaaccccaaugcuaacccuaaugccaacccaaaugcuaacccgaaugccaaccccaacgcaaauccuaacgccaauccaaacgcuaaucccaacgcgaauccuaacgcaaauccaaacgccaaucccaacgcuaauccgaacgccaauccuaacgcaaauccaaacgccaaccccaaugcuaacccuaaugccaaccccaaugcaaacccaaauaaaaacaaucagggaaacggccaaggucauaauaugccuaacgaccccaaucgaaacguggaugagaaugcgaacgcuaacucagccguuaagaauaacaauaacgaggaaccaagcgacaaacacauuaaggaguauuugaauaagauacagaacagucucuccacugaauggucuccguguagcgugacgugcgggaauggaauccagguccguauuaaaccuggcuccgcaaacaagcccaaagaugagcuggacuacgccaaugacaucgaaaagaaaauuuguaagauggagaaaugcugaggacuagugcaucacauuuaaaagcaucucagccuaccaugagaauaagagaaagaaaaugaagaucaauagcuuauucaucucuuuuucuuuuucguugguguaaagccaacacccugucuaaaaaacauaaauuucuuuaaucauuuugccucuuuucucugugcuucaauuaauaaaaaauggaaagaaccuagaucuaaaaaaaaaaaaaaaaaaaaaaaaaaaaaaaaaaaaaaaaaaaaaaaaaaaaaaaaaaaaaaaaugcaucccccccccccccccccccccccccccccccaaaggcucuuuucagagccaccagaauu

SEQ ID NO: 1027 - RNA, 1360 nt, Artificial Sequence
  mRNA Design i-2 (A64-N5-C30-hSL-N5) comprising derived and/or modified sequence from Pf(3D7)__XP_001351122.1__Pf-CSP(1-325) (opt3)
ggggcgcugccuacggagguggcagccaucuccuucucggcaucaagcuuaccaugaugagaaagcuggccauccucagcguguccucuuuccuuuuugucgaggcucuguuccaggaauaccaaugcuauggcucaaguagcaacaccaggguuuugaaugaguuaaacuacgacaaugcagggacaaaccuguauaaugaacuagagaugaacuacuauggaaaacaggaaaauugguacucccucaagaaaaacucucggucgcugggugagaaugaugacggcaacaaugaggauaacgaaaaacuucgcaagcccaagcacaagaaacugaagcagccugccgacgggaauccagauccgaacgcgaaucccaacguggacccuaacgcuaauccaaacguagaucccaaugccaacccuaauguggacccaaacgcaaaucccaacgccaauccuaacgcuaauccaaacgcaaauccgaacgccaaucccaacgcuaacccuaaugccaacccaaaugcgaaccccaaugcaaacccuaaugccaacccaaaugcuaaccccaaugccaacccgaaugcaaacccuaaugcuaaccccaacgccaauccaaacgcgaauccuaacgccaaucccaacgucgauccaaaugcaaaccccaaugcuaacccuaaugccaacccaaaugcuaacccgaaugccaaccccaacgcaaauccuaacgccaauccaaacgcuaaucccaacgcgaauccuaacgcaaauccaaacgccaaucccaacgcuaauccgaacgccaauccuaacgcaaauccaaacgccaaccccaaugcuaacccuaaugccaaccccaaugcaaacccaaauaaaaacaaucagggaaacggccaaggucauaauaugccuaacgaccccaaucgaaacguggaugagaaugcgaacgcuaacucagccguuaagaauaacaauaacgaggaaccaagcgacaaacacauuaaggaguauuugaauaagauacagaacugaggacuagugcaucacauuuaaaagcaucucagccuaccaugagaauaagagaaagaaaaugaagaucaauagcuuauucaucucuuuuucuuuuucguugguguaaagccaacacccugucuaaaaaacauaaauuucuuuaaucauuuugccucuuuucucugugcuucaauuaauaaaaaauggaaagaaccuagaucuaaaaaaaaaaaaaaaaaaaaaaaaaaaaaaaaaaaaaaaaaaaaaaaaaaaaaaaaaaaaaaaaugcaucccccccccccccccccccccccccccccccaaaggcucuuuucagagccaccagaauu

SEQ ID NO: 1028 - RNA, 1576 nt, Artificial Sequence
  mRNA Design i-2 (A64-N5-C30-hSL-N5) comprising derived and/or modified sequence from Pf(3D7)__XP_001351122.1__HsALB_Pf-CSP(19-397) (opt3)
ggggcgcugccuacggagguggcagccaucuccuucucggcaucaagcuuaccaugaagugggugaccuucaucagccugcucuuucuuuucuccucugccuacucacuguuucaggaguaucaaugcuacggcaguagcuccaacacaagagucuugaaugaauuaaacuaugacaaugcugggacuaaccuguacaaugagcuagaaaugaacuauuacggaaaacaggagaauugguauucucucaagaaaaacucgaggucacugggugaaaaugaugacggcaacaaugaggauaacgagaaacuucggaagcccaagcacaagaaacugaagcagccugcagacgggaauccagauccgaacgccaaucccaacguugacccuaacgcgaauccaaacguggaucccaaugcuaacccuaauguagacccaaacgccaaucccaacgcaaauccuaacgccaauccaaacgcuaauccgaacgcaaaucccaacgccaacccuaaugcuaacccaaaugccaaccccaaugcgaacccuaaugcaaacccaaaugccaaccccaaugcuaacccgaaugccaacccuaaugcaaaccccaacgcuaauccaaacgccaauccuaacgcgaaucccaacguggauccaaaugccaaccccaaugcaaacccuaaugcuaacccaaaugccaacccgaaugcuaaccccaacgccaauccuaacgcaaauccaaacgccaaucccaacgcuaauccuaacgcgaauccaaacgcaaaucccaacgccaauccgaacgcuaauccuaacgccaauccaaacgcaaaccccaaugccaacccuaaugcuaaccccaaugccaacccaaauaaaaacaaucagggaaacggccaaggucauaauaugccuaacgaccccaaucgcaacgucgaugaaaaugcaaacgcgaacagcgcugugaagaauaacaauaacgaggaaccaagugacaaacacauuaaggaguacuugaauaagauacagaacucccucucuacggaguggagcccguguuccguuaccugcgggaauggaauccaggugcgaauuaaaccuggcucagccaacaagcccaaagaugaacuggacuacgcaaaugacaucgagaagaaaauuuguaagauggaaaaaugcaguagcgucuucaacgugguaaauucuuccaucggccugauaaugguucucucauuuuuauuccugaacugaggacuagugcaucacauuuaaaagcaucucagccuaccaugagaauaagagaaagaaaaugaagaucaauagcuuauucaucucuuuuucuuuuucguugguguaaagccaacacccugucuaaaaaacauaaauuucuuuaaucauuuugccucuuuucucugugcuucaauuaauaaaaaauggaaagaaccuagaucuaaaaaaaaaaaaaaaaaaaaaaaaaaaaaaaaaaaaaaaaaaaaaaaaaaaaaaaaaaaaaaaaugcaucccccccccccccccccccccccccccccccaaaggcucuuuucagagccaccagaauu

SEQ ID NO: 1029 - RNA, 1594 nt, Artificial Sequence
  mRNA Design i-2 (A64-N5-C30-hSL-N5) comprising derived and/or modified sequence from Pf(3D7)__XP_001351122.1__HsIns-iso1_Pf-CSP(19-397) (opt3)
ggggcgcugccuacggagguggcagccaucuccuucucggcaucaagcuuaccauggcccuguggaugagacuccuuccccuguuggcuuuacuggcacuauggggcccugacccagccgcggcucucuuccaggaguaccaaugcuaugggagcuccucuaacaccagggugcugaaugaacuuaacuacgauaaugccggaacaaaccuguauaaugaguuggaaaugaacuacuaugguaagcaggagaauugguacucacucaaaaagaacagucggagccugggcgaaaaugacgaugggaacaaugaggacaacgagaaacugcgcaagccgaaacacaagaagcucaaacagcccgcagauggaaauccugacccaaacgccaaucccaacgucgauccuaacgcuaauccaaacguugaccccaaugcaaacccuaauguggauccaaacgccaauccgaacgcuaaucccaacgccaauccuaacgcgaauccaaacgcaaaucccaacgccaacccuaaugcuaacccaaaugccaaccccaaugcaaacccgaaugcuaacccuaaugccaaccccaaugcgaacccaaaugccaacccuaaugcaaaccccaacgcuaauccaaacgccaaucccaacgcuaauccuaacguagacccaaaugccaacccgaaugcaaaccccaaugccaacccuaaugcuaacccaaaugcgaaccccaacgcaaauccuaacgccaauccaaacgcuaaucccaacgccaauccgaacgcaaauccuaacgccaauccaaacgcuaaucccaacgccaauccuaacgcaaaucccaacgcgaacccaaaugcuaacccuaaugccaaccccaaugcaaacccaaauaagaacaaucagggcaacggucaagggcauaauaugccgaacgauccuaaucgaaacguggacgaaaaugccaacgcuaacuccgccgucaaaaauaacaauaacgaggaacccucugauaagcacaucaaagaguauuuaaauaagauucagaacucgcugucaacugaguggagcccauguagugugacgugcggaaauggcauacagguucguaucaagcccggcuccgcaaacaaaccuaaggacgaacuugacuacgcuaaugauauugagaaaaagaucuguaaaauggaaaagugcucuagcguguuuaacgucguaaauuccucaauuggguugaucauggugcugaguuuccuauuucucaacugaggacuagugcaucacauuuaaaagcaucucagccuaccaugagaauaagagaaagaaaaugaagaucaauagcuuauucaucucuuuuucuuuuucguugguguaaagccaacacccugucuaaaaaacauaaauuucuuuaaucauuuugccucuuuucucugugcuucaauuaauaaaaaauggaaagaaccuagaucuaaaaaaaaaaaaaaaaaaaaaaaaaaaaaaaaaaaaaaaaaaaaaaaaaaaaaaaaaaaaaaaaugcaucccccccccccccccccccccccccccccccaaaggcucuuuucagagccaccagaauu

SEQ ID NO: 1030 - RNA, 1573 nt, Artificial Sequence
  mRNA Design i-2 (A64-N5-C30-hSL-N5) comprising derived and/or modified sequence from Pf(3D7)__XP_001351122.1__HsSPARC_Pf-CSP(19-397) (opt3)
ggggcgcugccuacggagguggcagccaucuccuucucggcaucaagcuuaccaugagagccuggaucuucuuucugcucugccuugcuggcagggcacuggccuuguuccaggaguaccaauguuaugggagcuccucuaacacccggguguuaaaugaacugaacuacgacaaugcgggaacaaaccuauauaaugagcucgaaaugaacuacuaugguaagcaggagaauugguacucacugaaaaagaacagucgcagccuuggcgaaaaugaugacgggaacaaugaggauaacgagaaacugcgaaagcccaaacacaagaaguugaaacagccugcugacggaaauccagauccgaacgccaaucccaacgucgacccuaacgcaaauccaaacguugaucccaaugccaacccuaauguggacccaaacgcuaaucccaacgcaaauccuaacgccaauccaaacgcuaauccgaacgccaaucccaacgcgaacccuaaugcaaacccaaaugccaaccccaaugcuaacccuaaugccaacccaaaugcaaaccccaaugcuaacccgaaugccaacccuaaugcgaaccccaacgccaauccaaacgcaaauccuaacgcuaaucccaacguagauccaaaugccaaccccaaugcuaacccuaaugccaacccaaaugcaaacccgaaugccaaccccaacgcuaauccuaacgcgaauccaaacgcaaaucccaacgccaauccuaacgcuaauccaaacgccaaucccaacgcaaauccgaacgccaauccuaacgcuaauccaaacgccaaccccaaugcaaacccuaaugcgaaccccaaugcuaacccaaauaagaacaaucagggcaacggucaagggcauaauaugccuaacgaccccaaucguaacguggaugaaaaugccaacgcaaacuccgccgucaaaaauaacaauaacgaggaaccaucugacaagcacauuaaagaguaucucaauaagauacagaacucgcugucaacugaguggagcccgugcagugugacguguggaaauggcauccagguuagaauuaagccuggcuccgcuaacaaacccaaggaugaacuggacuacgccaaugacaucgagaaaaagauuugcaaaauggaaaaguguucuagcguguuuaacgucguaaauuccucaaucgggcucauaaugguguuaaguuuccuguuucuuaacugaggacuagugcaucacauuuaaaagcaucucagccuaccaugagaauaagagaaagaaaaugaagaucaauagcuuauucaucucuuuuucuuuuucguugguguaaagccaacacccugucuaaaaaacauaaauuucuuuaaucauuuugccucuuuucucugugcuucaauuaauaaaaaauggaaagaaccuagaucuaaaaaaaaaaaaaaaaaaaaaaaaaaaaaaaaaaaaaaaaaaaaaaaaaaaaaaaaaaaaaaaaugcaucccccccccccccccccccccccccccccccaaaggcucuuuucagagccaccagaauu

SEQ ID NO: 1031 - RNA, 1576 nt, Artificial Sequence
  mRNA Design i-2 (A64-N5-C30-hSL-N5) comprising derived and/or modified sequence from Pf(3D7)__XP_001351122.1__IgE_Pf-CSP(19-397) (opt3)
ggggcgcugccuacggagguggcagccaucuccuucucggcaucaagcuuaccauggacuggaccuggauccuguuccucguggccgcugcaacaagaguccacagccuuuuucaggaguaccaaugcuauggcuccucuucaaacacuaggguucugaaugaauugaacuacgauaaugccgggacgaacuuauauaaugagcuggaaaugaacuacuauggaaagcaggagaauugguacagucuaaagaagaacagccggucccucggugaaaaugacgauggcaacaaugaggacaacgagaaacugcgcaagcccaaacauaagaaacuuaaacagccugcggaugggaauccagacccgaacgcuaaucccaacguggauccuaacgccaauccaaacguagaccccaaugcaaacccuaauguggauccaaacgccaaucccaacgcuaauccuaacgcaaauccaaacgccaauccgaacgcuaaucccaacgccaacccuaaugcgaacccaaaugcaaaccccaaugccaacccuaaugcuaacccaaaugccaaccccaaugcaaacccgaaugcuaacccuaaugccaaccccaacgcgaauccaaacgccaauccuaacgcaaaucccaacgucgacccaaaugcuaaccccaaugccaacccuaaugcuaacccaaaugccaacccgaaugcaaaccccaacgccaauccuaacgcuaauccaaacgcgaaucccaacgcaaauccuaacgccaauccaaacgcuaaucccaacgccaauccgaacgcaaauccuaacgccaauccaaacgcuaaccccaaugccaacccuaaugcaaaccccaaugcgaacccaaauaagaacaaucagggaaacggccaaggucacaauaugccuaacgaucccaaucgaaacguggacgaaaaugcuaacgccaacucugcaguuaaaaauaacaauaacgaggaaccaucggauaagcauauuaaagaguaucugaauaagauacagaacucauugagcaccgaguggaguccguguuccgugacaugcgggaauggaauccagguccguauuaagccuggcucugccaacaaacccaaggacgaacucgacuacgcuaaugauaucgagaaaaagauuuguaaaauggaaaagugcagcuccguguucaacguaguuaauucaaguaucggccugauaauggugcugagcuuucucuucuuaaacugaggacuagugcaucacauuuaaaagcaucucagccuaccaugagaauaagagaaagaaaaugaagaucaauagcuuauucaucucuuuuucuuuuucguugguguaaagccaacacccugucuaaaaaacauaaauuucuuuaaucauuuugccucuuuucucugugcuucaauuaauaaaaaauggaaagaaccuagaucuaaaaaaaaaaaaaaaaaaaaaaaaaaaaaaaaaaaaaaaaaaaaaaaaaaaaaaaaaaaaaaaaugcaucccccccccccccccccccccccccccccccaaaggcucuuuucagagccaccagaauu

SEQ ID NO: 1032 - RNA, 1741 nt, Artificial Sequence
  mRNA Design i-2 (A64-N5-C30-hSL-N5) comprising derived and/or modified sequence from Pf(3D7)__XP_001351122.1__Pf-CSP_L(G4SG4)_TM domain HA (opt3)
ggggcgcugccuacggagguggcagccaucuccuucucggcaucaagcuuaccaugaugagaaagcuggccauccucagcguguccucuuuccuuuuugucgaggcucuguuccaggaauaccaaugcuauggcucaaguagcaacaccaggguuuugaaugaguuaaacuacgacaaugcagggacaaaccuguauaaugaacuagagaugaacuacuauggaaagcaggaaaauugguacucccucaagaaaaacucucggucgcugggugagaaugaugacggcaacaaugaggauaacgaaaaacuucgcaagcccaagcacaagaaacugaagcagccugccgacgggaauccagauccgaacgcgaaucccaacguggacccuaacgcuaauccaaacguagaucccaaugccaacccuaauguggacccaaacgcaaaucccaacgccaauccuaacgcuaauccaaacgcaaauccgaacgccaaucccaacgcuaacccuaaugccaacccaaaugcgaaccccaaugcaaacccuaaugccaacccaaaugcuaaccccaaugccaacccgaaugcaaacccuaaugcuaaccccaacgccaauccaaacgcgaauccuaacgccaaucccaacgucgauccaaaugcaaaccccaaugcuaacccuaaugccaacccaaaugcuaacccgaaugccaaccccaacgcaaauccuaacgccaauccaaacgcuaaucccaacgcgaauccuaacgcaaauccaaacgccaaucccaacgcuaauccgaacgccaauccuaacgcaaauccaaacgccaaccccaaugcuaacccuaaugccaaccccaaugcaaacccaaauaaaaacaaucagggaaacggccaaggucauaauaugccuaacgaccccaaucgaaacguggaugagaaugcgaacgcuaacucagccguuaagaauaacaauaacgaggaaccaagcgacaaacacauuaaggaguauuugaauaagauacagaacagucucuccacugaauggucuccguguagcgugacgugcgggaauggaauccagguccguauuaaaccuggcuccgcaaacaagcccaaagaugagcuggacuacgccaaugacaucgaaaagaaaauuuguaagauggagaaaugcucaaguguguuuaacguaguuaauagcucuaucggccugauaauggugcucuccuucuuauuucugaacgggggagguggcucagggggaggcgguaaacuugaaagcaccagaaucuaccagauuuuggcuaucuauaguacagucgccucuucccuggugcuaguggucagccucggggcaauuucguucuggauguguucuaauggaucccugcaaugcaggaucuguauaugaggacuagugcaucacauuuaaaagcaucucagccuaccaugagaauaagagaaagaaaaugaagaucaauagcuuauucaucucuuuuucuuuuucguugguguaaagccaacacccugucuaaaaaacauaaauuucuuuaaucauuuugccucuuuucucugugcuucaauuaauaaaaaauggaaagaaccuagaucuaaaaaaaaaaaaaaaaaaaaaaaaaaaaaaaaaaaaaaaaaaaaaaaaaaaaaaaaaaaaaaaaugcaucccccccccccccccccccccccccccccccaaaggcucuuuucagagccaccagaauu

SEQ ID NO: 1033 - RNA, 1615 nt, Artificial Sequence
  mRNA Design i-2 (A64-N5-C30-hSL-N5) comprising derived and/or modified sequence from Pf(3D7)__XP_001351122.1__Pf-CSP(199-377)_L(PVTN)_HBsAg (opt3)
ggggcgcugccuacggagguggcagccaucuccuucucggcaucaagcuuaccauggaccccaacgccaauccuaacgcuaauccaaacgcaaauccgaacgccaaucccaacgcgaauccuaacgcuaauccaaacgccaaucccaacgcaaauccuaacgccaacccaaaugcuaaccccaaugcaaacccuaaugccaacccaaaugcuaacccgaaugccaaccccaaugcgaacccuaaugcaaacccaaaugccaaccccaacgcuaauccuaacaagaauaaccagggcaaugggcaaggacacaacaugccaaaugaucccaacagaaauguggacgagaacgccaaugcaaacagcgcugucaaaaauaacaauaacgaggaaccguccgauaagcauaucaaagaauaccugaacaagauucaaaauucucucucaaccgaguggaguccuugcagcguuacaugugguaacggcauacaggugaggaucaaacccggguccgccaauaagccaaaggacgaacuugauuaugcgaacgacauugagaaaaagaucugcaaaauggagaaguguucuucgguaccugugacuaauauggaaaacauuacgucaggauuccugggccccuuguuaguccugcaggccggguuuuuccuacucacccggauccugacaauaccacagagccuugauaguugguggacuucccugaauuuucucgguggaucucccgugugcuugggccagaacagccaguccccuaccucaaaucacaguccaacaagcuguccgcccaucugcccuggcuaccgcuggaugugucugcgacguuucauuaucuuucuguucauucucuuacugugccuuaucuuuuugcugguucuacucgacuaucaggggaugcugccaguguguccccuuauaccuggaucuaccacuacaaacaccgguccaugcaaaacguguacuacccccgcacaaggcaauuccauguucccgucaugcugcuguacaaagccuacugaugggaacugcaccuguauuccaauccccagcaguugggcuuuugccaaguaccugugggagugggcuucugucagauucuccugguugagccuccuggugccuuuuguacagugguucguuggauuaucgcccacaguguggcugucugccauuuggaugaugugguauuggggcccaucccucuacucaaucgucaguccuuuuaucccccuucugccaauuuucuucugcuuguggguguauauaugaggacuagugcaucacauuuaaaagcaucucagccuaccaugagaauaagagaaagaaaaugaagaucaauagcuuauucaucucuuuuucuuuuucguugguguaaagccaacacccugucuaaaaaacauaaauuucuuuaaucauuuugccucuuuucucugugcuucaauuaauaaaaaauggaaagaaccuagaucuaaaaaaaaaaaaaaaaaaaaaaaaaaaaaaaaaaaaaaaaaaaaaaaaaaaaaaaaaaaaaaaaugcaucccccccccccccccccccccccccccccccaaaggcucuuuucagagccaccagaauu

SEQ ID NO: 1034 - RNA, 1657 nt, Artificial Sequence
  mRNA Design i-2 (A64-N5-C30-hSL-N5) comprising derived and/or modified sequence from Pf(3D7)__XP_001351122.1__Pf-CSP(199-387)_L(PVTN)_HBsAg (opt3)
ggggcgcugccuacggagguggcagccaucuccuucucggcaucaagcuuaccaugauggcccccgacccuaacgcuaauccaaacgcaaauccgaacgccaaucccaacgcgaauccuaacgcuaauccaaacgccaaucccaacgcaaauccuaacgccaauccaaacgcuaaccccaaugcaaacccuaaugccaacccaaaugcuaacccgaaugccaaccccaaugcgaacccuaaugcaaacccaaaugccaaccccaaugcuaacccuaacgccaauccaaacaagaauaaccagggcaaugggcaaggacacaacaugcccaaugauccgaacagaaauguggacgagaacgcaaaugcuaacagcgccgucaaaaauaacaauaacgaggaaccuuccgauaagcauaucaaagaauaccugaacaagauucaaaauucucucucaaccgaguggagucccugcagcguuacaugugguaacggcauacaggugaggaucaaaccaggguccgcgaauaagccuaaggacgaacuugauuaugccaacgacauugagaaaaagaucugcaaaauggagaaguguucuucgguauucaauguggucaacucaagcauuggacugggccccgugacuaauauggaaaacaucacgaguggguuuuuggguccauuacugguucuacaggcaggauucuuucuccugacccggauacuuacaaucccccagucccuggauucuugguggacuagcuugaauuuccucggcggcuccccugugugccuggggcagaacucacagaguccaaccagcaaucacucuccgacauccugucccccuauuugcccaggauaccgcuggaugugucugcgacguuuuaucauuuuccucuuuaucuuacugcuuugcuugauauuccugcuaguccuccuggacuaucaggguaugcuucccguguguccucugauuccaggcucaaccacuacaaacaccgggcccugcaaaacguguacuaccccggcucaaggaaauagcauguuuccuaguugcugcuguacaaagccaacugauggcaacugcaccuguauccccauuccuucuuccugggccuucgcuaaguacuugugggagugggccagcguaagauuuucguggcucucucuguuaguucccuucgugcagugguuugucggucuguccccaacaguguggcucucagcaaucuggaugaugugguauugggggccuagucuuuacagcaucgugucccccuucauuccacuguugccgauauucuuuugccuaugggucuauaucugaggacuagugcaucacauuuaaaagcaucucagccuaccaugagaauaagagaaagaaaaugaagaucaauagcuuauucaucucuuuuucuuuuucguugguguaaagccaacacccugucuaaaaaacauaaauuucuuuaaucauuuugccucuuuucucugugcuucaauuaauaaaaaauggaaagaaccuagaucuaaaaaaaaaaaaaaaaaaaaaaaaaaaaaaaaaaaaaaaaaaaaaaaaaaaaaaaaaaaaaaaaugcaucccccccccccccccccccccccccccccccaaaggcucuuuucagagccaccagaauu

SEQ ID NO: 1035 - RNA, 841 nt, Artificial Sequence
  mRNA Design i-2 (A64-N5-C30-hSL-N5) comprising derived and/or modified sequence from Pf(3D7)__XP_001351122.1__HsALB_Pf-CSP(19-152) (opt3)
ggggcgcugccuacggagguggcagccaucuccuucucggcaucaagcuuaccaugaagugggugaccuucaucagccugcucuuucuuuucuccucugccuacucacuguuucaggaguaucaaugcuacggcaguagcuccaacacaagagucuugaaugaauuaaacuaugacaaugcugggacuaaccuguacaaugagcuagaaaugaacuauuacggaaaacaggagaauugguauucucucaagaaaaacucgaggucacugggugaaaaugaugacggcaacaaugaggauaacgagaaacuucggaagcccaagcacaagaaacugaagcagccugcagacgggaauccagauccgaacgccaaucccaacguugacccuaacgcgaauccaaacguggaucccaaugcuaacccuaauguagacccaaacgccaaucccaacgcaaauccuaacgccaauccaaacgcuaauccgaacgcaaaucccaacgccaacccuugaggacuagugcaucacauuuaaaagcaucucagccuaccaugagaauaagagaaagaaaaugaagaucaauagcuuauucaucucuuuuucuuuuucguugguguaaagccaacacccugucuaaaaaacauaaauuucuuuaaucauuuugccucuuuucucugugcuucaauuaauaaaaaauggaaagaaccuagaucuaaaaaaaaaaaaaaaaaaaaaaaaaaaaaaaaaaaaaaaaaaaaaaaaaaaaaaaaaaaaaaaaugcaucccccccccccccccccccccccccccccccaaaggcucuuuucagagccaccagaauu

SEQ ID NO: 1036 - RNA, 961 nt, Artificial Sequence
  mRNA Design i-2 (A64-N5-C30-hSL-N5) comprising derived and/or modified sequence from Pf(3D7)__XP_001351122.1__HsALB_Pf-CSP(19-192) (opt3)
ggggcgcugccuacggagguggcagccaucuccuucucggcaucaagcuuaccaugaagugggugaccuucaucagccugcucuuucuuuucuccucugccuacucacuguuucaggaguaucaaugcuacggcaguagcuccaacacaagagucuugaaugaauuaaacuaugacaaugcugggacuaaccuguacaaugagcuagaaaugaacuauuacggaaaacaggagaauugguauucucucaagaaaaacucgaggucacugggugaaaaugaugacggcaacaaugaggauaacgagaaacuucggaagcccaagcacaagaaacugaagcagccugcagacgggaauccagauccgaacgccaaucccaacguugacccuaacgcgaauccaaacguggaucccaaugcuaacccuaauguagacccaaacgccaaucccaacgcaaauccuaacgccaauccaaacgcuaauccgaacgcaaaucccaacgccaacccuaaugcuaacccaaaugccaaccccaaugcgaacccuaaugcaaacccaaaugccaaccccaaugcuaacccgaaugccaacccuaaugcaaaccccaacgcuaauccaaacgccaauccuugaggacuagugcaucacauuuaaaagcaucucagccuaccaugagaauaagagaaagaaaaugaagaucaauagcuuauucaucucuuuuucuuuuucguugguguaaagccaacacccugucuaaaaaacauaaauuucuuuaaucauuuugccucuuuucucugugcuucaauuaauaaaaaauggaaagaaccuagaucuaaaaaaaaaaaaaaaaaaaaaaaaaaaaaaaaaaaaaaaaaaaaaaaaaaaaaaaaaaaaaaaaugcaucccccccccccccccccccccccccccccccaaaggcucuuuucagagccaccagaauu

SEQ ID NO: 1037 - RNA, 1201 nt, Artificial Sequence
  mRNA Design i-2 (A64-N5-C30-hSL-N5) comprising derived and/or modified sequence from Pf(3D7)__XP_001351122.1__HsALB_Pf-CSP(19-272) (opt3)
ggggcgcugccuacggagguggcagccaucuccuucucggcaucaagcuuaccaugaagugggugaccuucaucagccugcucuuucuuuucuccucugccuacucacuguuucaggaguaucaaugcuacggcaguagcuccaacacaagagucuugaaugaauuaaacuaugacaaugcugggacuaaccuguacaaugagcuagaaaugaacuauuacggaaaacaggagaauugguauucucucaagaaaaacucgaggucacugggugaaaaugaugacggcaacaaugaggauaacgagaaacuucggaagcccaagcacaagaaacugaagcagccugcagacgggaauccagauccgaacgccaaucccaacguugacccuaacgcgaauccaaacguggaucccaaugcuaacccuaauguagacccaaacgccaaucccaacgcaaauccuaacgccaauccaaacgcuaauccgaacgcaaaucccaacgccaacccuaaugcuaacccaaaugccaaccccaaugcgaacccuaaugcaaacccaaaugccaaccccaaugcuaacccgaaugccaacccuaaugcaaaccccaacgcuaauccaaacgccaauccuaacgcgaaucccaacguggauccaaaugccaaccccaaugcaaacccuaaugcuaacccaaaugccaacccgaaugcuaaccccaacgccaauccuaacgcaaauccaaacgccaaucccaacgcuaauccuaacgcgaauccaaacgcaaaucccaacgccaauccgaacgcuaauccuaacgccaauccaaacgcaaaccccaaugccaacccuaaugcuaaccccaaugccaacccaugaggacuagugcaucacauuuaaaagcaucucagccuaccaugagaauaagagaaagaaaaugaagaucaauagcuuauucaucucuuuuucuuuuucguugguguaaagccaacacccugucuaaaaaacauaaauuucuuuaaucauuuugccucuuuucucugugcuucaauuaauaaaaaauggaaagaaccuagaucuaaaaaaaaaaaaaaaaaaaaaaaaaaaaaaaaaaaaaaaaaaaaaaaaaaaaaaaaaaaaaaaaugcaucccccccccccccccccccccccccccccccaaaggcucuuuucagagccaccagaauu

SEQ ID NO: 1038 - RNA, 1363 nt, Artificial Sequence
  mRNA Design i-2 (A64-N5-C30-hSL-N5) comprising derived and/or modified sequence from Pf(3D7)__XP_001351122.1__HsALB_Pf-CSP(19-272)_L(AAY)_Pf-CSP(310-3 27)_L(AAY)_Pf-CSP(346-375) (opt3)
ggggcgcugccuacggagguggcagccaucuccuucucggcaucaagcuuaccaugaagugggugaccuucaucagccugcucuuucuuuucuccucugccuacucacuguuucaggaguaucaaugcuacggcaguagcuccaacacaagagucuugaaugaauuaaacuaugacaaugcugggacuaaccuguacaaugagcuagaaaugaacuauuacggaaaacaggagaauugguauucucucaagaaaaacucgaggucacugggugaaaaugaugacggcaacaaugaggauaacgagaaacuucggaagcccaagcacaagaaacugaagcagccugcagacgggaauccagauccgaacgccaaucccaacguugacccuaacgcgaauccaaacguggaucccaaugcuaacccuaauguagacccaaacgccaaucccaacgcaaauccuaacgccaauccaaacgcuaauccgaacgcaaaucccaacgccaacccuaaugcuaacccaaaugccaaccccaaugcgaacccuaaugcaaacccaaaugccaaccccaaugcuaacccgaaugccaacccuaaugcaaaccccaacgcuaauccaaacgccaauccuaacgcgaaucccaacguggauccaaaugccaaccccaaugcaaacccuaaugcuaacccaaaugccaacccgaaugcuaaccccaacgccaauccuaacgcaaauccaaacgccaaucccaacgcuaauccuaacgcgaauccaaacgcaaaucccaacgccaauccgaacgcuaauccuaacgccaauccaaacgcaaaccccaaugccaacccuaaugcuaaccccaaugccaacccagcagcguacgaaccuagcgacaaacauauuaaggaguacuugaauaaaauacagaacagucucgcugccuauaucaagcccggauccgcaaauaagccaaaagaugaacuggacuacgccaacgauauugagaagaaaaucuguaagauggagaaaugcucuugaggacuagugcaucacauuuaaaagcaucucagccuaccaugagaauaagagaaagaaaaugaagaucaauagcuuauucaucucuuuuucuuuuucguugguguaaagccaacacccugucuaaaaaacauaaauuucuuuaaucauuuugccucuuuucucugugcuucaauuaauaaaaaauggaaagaaccuagaucuaaaaaaaaaaaaaaaaaaaaaaaaaaaaaaaaaaaaaaaaaaaaaaaaaaaaaaaaaaaaaaaaugcaucccccccccccccccccccccccccccccccaaaggcucuuuucagagccaccagaauu

SEQ ID NO: 1039 - RNA, 1324 nt, Artificial Sequence
  mRNA Design i-2 (A64-N5-C30-hSL-N5) comprising derived and/or modified sequence from Pf(3D7)__XP_001351122.1__HsALB_Pf-CSP(19-272)_L(AAY)_Pf-CSP(346-3 65)_L(AAY)_P2 (opt3)
ggggcgcugccuacggagguggcagccaucuccuucucggcaucaagcuuaccaugaagugggugaccuucaucagccugcucuuucuuuucuccucugccuacucacuguuucaggaguaucaaugcuacggcaguagcuccaacacaagagucuugaaugaauuaaacuaugacaaugcugggacuaaccuguacaaugagcuagaaaugaacuauuacggaaaacaggagaauugguauucucucaagaaaaacucgaggucacugggugaaaaugaugacggcaacaaugaggauaacgagaaacuucggaagcccaagcacaagaaacugaagcagccugcagacgggaauccagauccgaacgccaaucccaacguugacccuaacgcgaauccaaacguggaucccaaugcuaacccuaauguagacccaaacgccaaucccaacgcaaauccuaacgccaauccaaacgcuaauccgaacgcaaaucccaacgccaacccuaaugcuaacccaaaugccaaccccaaugcgaacccuaaugcaaacccaaaugccaaccccaaugcuaacccgaaugccaacccuaaugcaaaccccaacgcuaauccaaacgccaauccuaacgcgaaucccaacguggauccaaaugccaaccccaaugcaaacccuaaugcuaacccaaaugccaacccgaaugcuaaccccaacgccaauccuaacgcaaauccaaacgccaaucccaacgcuaauccuaacgcgaauccaaacgcaaaucccaacgccaauccgaacgcuaauccuaacgccaauccaaacgcaaaccccaaugccaacccuaaugcuaaccccaaugccaacccagcagcguacauuaaaccuggaagcgcuaauaagcccaaagacgaauuggauuacgccaacgacauagaggcagccuaucaguacaucaaggcuaauaguaaguucauuggcaucacggaacucugaggacuagugcaucacauuuaaaagcaucucagccuaccaugagaauaagagaaagaaaaugaagaucaauagcuuauucaucucuuuuucuuuuucguugguguaaagccaacacccugucuaaaaaacauaaauuucuuuaaucauuuugccucuuuucucugugcuucaauuaauaaaaaauggaaagaaccuagaucuaaaaaaaaaaaaaaaaaaaaaaaaaaaaaaaaaaaaaaaaaaaaaaaaaaaaaaaaaaaaaaaaugcaucccccccccccccccccccccccccccccccaaaggcucuuuucagagccaccagaauu

SEQ ID NO: 1040 - RNA, 1318 nt, Artificial Sequence
  mRNA Design i-2 (A64-N5-C30-hSL-N5) comprising derived and/or modified sequence from Pf(3D7)__XP_001351122.1__HsALB_Pf-CSP(19-272)_L(AAY)_Pf-CSP(346-3 65)_L(AAY)_PADRE (opt3)
ggggcgcugccuacggagguggcagccaucuccuucucggcaucaagcuuaccaugaagugggugaccuucaucagccugcucuuucuuuucuccucugccuacucacuguuucaggaguaucaaugcuacggcaguagcuccaacacaagagucuugaaugaauuaaacuaugacaaugcugggacuaaccuguacaaugagcuagaaaugaacuauuacggaaaacaggagaauugguauucucucaagaaaaacucgaggucacugggugaaaaugaugacggcaacaaugaggauaacgagaaacuucggaagcccaagcacaagaaacugaagcagccugcagacgggaauccagauccgaacgccaaucccaacguugacccuaacgcgaauccaaacguggaucccaaugcuaacccuaauguagacccaaacgccaaucccaacgcaaauccuaacgccaauccaaacgcuaauccgaacgcaaaucccaacgccaacccuaaugcuaacccaaaugccaaccccaaugcgaacccuaaugcaaacccaaaugccaaccccaaugcuaacccgaaugccaacccuaaugcaaaccccaacgcuaauccaaacgccaauccuaacgcgaaucccaacguggauccaaaugccaaccccaaugcaaacccuaaugcuaacccaaaugccaacccgaaugcuaaccccaacgccaauccuaacgcaaauccaaacgccaaucccaacgcuaauccuaacgcgaauccaaacgcaaaucccaacgccaauccgaacgcuaauccuaacgccaauccaaacgcaaaccccaaugccaacccuaaugcuaaccccaaugccaacccagcagcguacauuaaaccuggaagcgcuaauaagcccaaagacgaauuggauuacgccaacgacauagaggcagccuaugcuaaguucgucgccgcauggacgcucaaggcugccgcgugaggacuagugcaucacauuuaaaagcaucucagccuaccaugagaauaagagaaagaaaaugaagaucaauagcuuauucaucucuuuuucuuuuucguugguguaaagccaacacccugucuaaaaaacauaaauuucuuuaaucauuuugccucuuuucucugugcuucaauuaauaaaaaauggaaagaaccuagaucuaaaaaaaaaaaaaaaaaaaaaaaaaaaaaaaaaaaaaaaaaaaaaaaaaaaaaaaaaaaaaaaaugcaucccccccccccccccccccccccccccccccaaaggcucuuuucagagccaccagaauu

SEQ ID NO: 1041 - RNA, 1375 nt, Artificial Sequence
  mRNA Design i-2 (A64-N5-C30-hSL-N5) comprising derived and/or modified sequence from Pf(3D7)__XP_001351122.1__HsALB_Pf-CSP(19-272)_L(G4S)_Pf-CSP(310-3 27)_L(G4S)_Pf-CSP(346-375) (opt3)
ggggcgcugccuacggagguggcagccaucuccuucucggcaucaagcuuaccaugaagugggugaccuucaucagccugcucuuucuuuucuccucugccuacucacuguuucaggaguaucaaugcuacggcaguagcuccaacacaagagucuugaaugaauuaaacuaugacaaugcugggacuaaccuguacaaugagcuagaaaugaacuauuacggaaaacaggagaauugguauucucucaagaaaaacucgaggucacugggugaaaaugaugacggcaacaaugaggauaacgagaaacuucggaagcccaagcacaagaaacugaagcagccugcagacgggaauccagauccgaacgccaaucccaacguugacccuaacgcgaauccaaacguggaucccaaugcuaacccuaauguagacccaaacgccaaucccaacgcaaauccuaacgccaauccaaacgcuaauccgaacgcaaaucccaacgccaacccuaaugcuaacccaaaugccaaccccaaugcgaacccuaaugcaaacccaaaugccaaccccaaugcuaacccgaaugccaacccuaaugcaaaccccaacgcuaauccaaacgccaauccuaacgcgaaucccaacguggauccaaaugccaaccccaaugcaaacccuaaugcuaacccaaaugccaacccgaaugcuaaccccaacgccaauccuaacgcaaauccaaacgccaaucccaacgcuaauccuaacgcgaauccaaacgcaaaucccaacgccaauccgaacgcuaauccuaacgccaauccaaacgcaaaccccaaugccaacccuaaugcuaaccccaaugccaacccaggaggcggugggagcgaaccuagugacaaacauauuaaggaguacuugaauaaaauacagaacucccucggaggcggcgggucuaucaagcccggaagcgcaaauaagccaaaagaugaacuggacuacgcgaacgauauugagaagaaaaucuguaagauggagaaaugcuccugaggacuagugcaucacauuuaaaagcaucucagccuaccaugagaauaagagaaagaaaaugaagaucaauagcuuauucaucucuuuuucuuuuucguugguguaaagccaacacccugucuaaaaaacauaaauuucuuuaaucauuuugccucuuuucucugugcuucaauuaauaaaaaauggaaagaaccuagaucuaaaaaaaaaaaaaaaaaaaaaaaaaaaaaaaaaaaaaaaaaaaaaaaaaaaaaaaaaaaaaaaaugcaucccccccccccccccccccccccccccccccaaaggcucuuuucagagccaccagaauu

SEQ ID NO: 1042 - RNA, 1360 nt, Artificial Sequence
  mRNA Design i-2 (A64-N5-C30-hSL-N5) comprising derived and/or modified sequence from Pf(3D7)__XP_001351122.1__HsALB_Pf-CSP(19-272)_L(G4S)_Pf-CSP(310-3 27)_Pf-CSP(346-375) (opt3)
ggggcgcugccuacggagguggcagccaucuccuucucggcaucaagcuuaccaugaagugggugaccuucaucagccugcucuuucuuuucuccucugccuacucacuguuucaggaguaucaaugcuacggcaguagcuccaacacaagagucuugaaugaauuaaacuaugacaaugcugggacuaaccuguacaaugagcuagaaaugaacuauuacggaaaacaggagaauugguauucucucaagaaaaacucgaggucacugggugaaaaugaugacggcaacaaugaggauaacgagaaacuucggaagcccaagcacaagaaacugaagcagccugcagacgggaauccagauccgaacgccaaucccaacguugacccuaacgcgaauccaaacguggaucccaaugcuaacccuaauguagacccaaacgccaaucccaacgcaaauccuaacgccaauccaaacgcuaauccgaacgcaaaucccaacgccaacccuaaugcuaacccaaaugccaaccccaaugcgaacccuaaugcaaacccaaaugccaaccccaaugcuaacccgaaugccaacccuaaugcaaaccccaacgcuaauccaaacgccaauccuaacgcgaaucccaacguggauccaaaugccaaccccaaugcaaacccuaaugcuaacccaaaugccaacccgaaugcuaaccccaacgccaauccuaacgcaaauccaaacgccaaucccaacgcuaauccuaacgcgaauccaaacgcaaaucccaacgccaauccgaacgcuaauccuaacgccaauccaaacgcaaaccccaaugccaacccuaaugcuaaccccaaugccaacccaggaggcggugggagcgaaccuagugacaaacauauuaaggaguacuugaauaaaauacagaacucccucaucaagcccggaucugcaaauaagccaaaagaugaacuggacuacgcgaacgauauugagaagaaaaucuguaagauggagaaaugcagcugaggacuagugcaucacauuuaaaagcaucucagccuaccaugagaauaagagaaagaaaaugaagaucaauagcuuauucaucucuuuuucuuuuucguugguguaaagccaacacccugucuaaaaaacauaaauuucuuuaaucauuuugccucuuuucucugugcuucaauuaauaaaaaauggaaagaaccuagaucuaaaaaaaaaaaaaaaaaaaaaaaaaaaaaaaaaaaaaaaaaaaaaaaaaaaaaaaaaaaaaaaaugcaucccccccccccccccccccccccccccccccaaaggcucuuuucagagccaccagaauu

SEQ ID NO: 1043 - RNA, 1360 nt, Artificial Sequence
  mRNA Design i-2 (A64-N5-C30-hSL-N5) comprising derived and/or modified sequence from Pf(3D7)__XP_001351122.1__HsALB_Pf-CSP(19-325) (opt3)
ggggcgcugccuacggagguggcagccaucuccuucucggcaucaagcuuaccaugaagugggugaccuucaucagccugcucuuucuuuucuccucugccuacucacuguuucaggaguaucaaugcuacggcaguagcuccaacacaagagucuugaaugaauuaaacuaugacaaugcugggacuaaccuguacaaugagcuagaaaugaacuauuacggaaaacaggagaauugguauucucucaagaaaaacucgaggucacugggugaaaaugaugacggcaacaaugaggauaacgagaaacuucggaagcccaagcacaagaaacugaagcagccugcagacgggaauccagauccgaacgccaaucccaacguugacccuaacgcgaauccaaacguggaucccaaugcuaacccuaauguagacccaaacgccaaucccaacgcaaauccuaacgccaauccaaacgcuaauccgaacgcaaaucccaacgccaacccuaaugcuaacccaaaugccaaccccaaugcgaacccuaaugcaaacccaaaugccaaccccaaugcuaacccgaaugccaacccuaaugcaaaccccaacgcuaauccaaacgccaauccuaacgcgaaucccaacguggauccaaaugccaaccccaaugcaaacccuaaugcuaacccaaaugccaacccgaaugcuaaccccaacgccaauccuaacgcaaauccaaacgccaaucccaacgcuaauccuaacgcgaauccaaacgcaaaucccaacgccaauccgaacgcuaauccuaacgccaauccaaacgcaaaccccaaugccaacccuaaugcuaaccccaaugccaacccaaauaaaaacaaucagggaaacggccaaggucauaauaugccuaacgaccccaaucgcaacgucgaugaaaaugcaaacgcgaacagcgcugugaagaauaacaauaacgaggaaccaagugacaaacacauuaaggaguacuugaauaagauacagaacugaggacuagugcaucacauuuaaaagcaucucagccuaccaugagaauaagagaaagaaaaugaagaucaauagcuuauucaucucuuuuucuuuuucguugguguaaagccaacacccugucuaaaaaacauaaauuucuuuaaucauuuugccucuuuucucugugcuucaauuaauaaaaaauggaaagaaccuagaucuaaaaaaaaaaaaaaaaaaaaaaaaaaaaaaaaaaaaaaaaaaaaaaaaaaaaaaaaaaaaaaaaugcaucccccccccccccccccccccccccccccccaaaggcucuuuucagagccaccagaauu

SEQ ID NO: 1044 - RNA, 1537 nt, Artificial Sequence
  mRNA Design i-2 (A64-N5-C30-hSL-N5) comprising derived and/or modified sequence from Pf(3D7)__XP_001351122.1__HsALB_Pf-CSP(19-384) (opt3)
ggggcgcugccuacggagguggcagccaucuccuucucggcaucaagcuuaccaugaagugggugaccuucaucagccugcucuuucuuuucuccucugccuacucacuguuucaggaguaucaaugcuacggcaguagcuccaacacaagagucuugaaugaauuaaacuaugacaaugcugggacuaaccuguacaaugagcuagaaaugaacuauuacggaaaacaggagaauugguauucucucaagaaaaacucgaggucacugggugaaaaugaugacggcaacaaugaggauaacgagaaacuucggaagcccaagcacaagaaacugaagcagccugcagacgggaauccagauccgaacgccaaucccaacguugacccuaacgcgaauccaaacguggaucccaaugcuaacccuaauguagacccaaacgccaaucccaacgcaaauccuaacgccaauccaaacgcuaauccgaacgcaaaucccaacgccaacccuaaugcuaacccaaaugccaaccccaaugcgaacccuaaugcaaacccaaaugccaaccccaaugcuaacccgaaugccaacccuaaugcaaaccccaacgcuaauccaaacgccaauccuaacgcgaaucccaacguggauccaaaugccaaccccaaugcaaacccuaaugcuaacccaaaugccaacccgaaugcuaaccccaacgccaauccuaacgcaaauccaaacgccaaucccaacgcuaauccuaacgcgaauccaaacgcaaaucccaacgccaauccgaacgcuaauccuaacgccaauccaaacgcaaaccccaaugccaacccuaaugcuaaccccaaugccaacccaaauaaaaacaaucagggaaacggccaaggucauaauaugccuaacgaccccaaucgcaacgucgaugaaaaugcaaacgcgaacagcgcugugaagaauaacaauaacgaggaaccaagugacaaacacauuaaggaguacuugaauaagauacagaacucccucucuacggaguggagcccguguuccguuaccugcgggaauggaauccaggugcgaauuaaaccuggcucagccaacaagcccaaagaugaacuggacuacgcaaaugacaucgagaagaaaauuuguaagauggaaaaaugcaguagcgucuucaacgugguaaauucuuccugaggacuagugcaucacauuuaaaagcaucucagccuaccaugagaauaagagaaagaaaaugaagaucaauagcuuauucaucucuuuuucuuuuucguugguguaaagccaacacccugucuaaaaaacauaaauuucuuuaaucauuuugccucuuuucucugugcuucaauuaauaaaaaauggaaagaaccuagaucuaaaaaaaaaaaaaaaaaaaaaaaaaaaaaaaaaaaaaaaaaaaaaaaaaaaaaaaaaaaaaaaaugcaucccccccccccccccccccccccccccccccaaaggcucuuuucagagccaccagaauu

SEQ ID NO: 1045 - RNA, 1675 nt, Artificial Sequence
  mRNA Design i-2 (A64-N5-C30-hSL-N5) comprising derived and/or modified sequence from Pf(3D7)__XP_001351122.1__HsALB_Pf-CSP(19-384)_TM domain HA (opt3)
ggggcgcugccuacggagguggcagccaucuccuucucggcaucaagcuuaccaugaagugggugaccuucaucagccugcucuuucuuuucuccucugccuacucacuguuucaggaguaucaaugcuacggcaguagcuccaacacaagagucuugaaugaauuaaacuaugacaaugcugggacuaaccuguacaaugagcuagaaaugaacuauuacggaaaacaggagaauugguauucucucaagaaaaacucgaggucacugggugaaaaugaugacggcaacaaugaggauaacgagaaacuucggaagcccaagcacaagaaacugaagcagccugcagacgggaauccagauccgaacgccaaucccaacguugacccuaacgcgaauccaaacguggaucccaaugcuaacccuaauguagacccaaacgccaaucccaacgcaaauccuaacgccaauccaaacgcuaauccgaacgcaaaucccaacgccaacccuaaugcuaacccaaaugccaaccccaaugcgaacccuaaugcaaacccaaaugccaaccccaaugcuaacccgaaugccaacccuaaugcaaaccccaacgcuaauccaaacgccaauccuaacgcgaaucccaacguggauccaaaugccaaccccaaugcaaacccuaaugcuaacccaaaugccaacccgaaugcuaaccccaacgccaauccuaacgcaaauccaaacgccaaucccaacgcuaauccuaacgcgaauccaaacgcaaaucccaacgccaauccgaacgcuaauccuaacgccaauccaaacgcaaaccccaaugccaacccuaaugcuaaccccaaugccaacccaaauaaaaacaaucagggaaacggccaaggucauaauaugccuaacgaccccaaucgcaacgucgaugaaaaugcaaacgcgaacagcgcugugaagaauaacaauaacgaggaaccaagugacaaacacauuaaggaguacuugaauaagauacagaacucccucucuacggaguggagcccguguuccguuaccugcgggaauggaauccaggugcgaauuaaaccuggcucagccaacaagcccaaagaugaacuggacuacgcaaaugacaucgagaagaaaauuuguaagauggaaaaaugcaguagcgucuucaacgugguaaauucuuccaagcuggagucaacacguaucuaucagauacucgccaucuacagcacuguugcuaguucuuuagugcuggucgugucccuuggcgccauuagcuuuuggauguguucgaacgggucuuugcaaugcagaaucuguauuugaggacuagugcaucacauuuaaaagcaucucagccuaccaugagaauaagagaaagaaaaugaagaucaauagcuuauucaucucuuuuucuuuuucguugguguaaagccaacacccugucuaaaaaacauaaauuucuuuaaucauuuugccucuuuucucugugcuucaauuaauaaaaaauggaaagaaccuagaucuaaaaaaaaaaaaaaaaaaaaaaaaaaaaaaaaaaaaaaaaaaaaaaaaaaaaaaaaaaaaaaaaugcaucccccccccccccccccccccccccccccccaaaggcucuuuucagagccaccagaauu

SEQ ID NO: 1046 - RNA, 1387 nt, Artificial Sequence
  mRNA Design i-2 (A64-N5-C30-hSL-N5) comprising derived and/or modified sequence from Pf(3D7)__XP_001351122.1__HsALB_Pf-CSP(82-397) (opt3)
ggggcgcugccuacggagguggcagccaucuccuucucggcaucaagcuuaccaugaagugggugaccuucaucagccugcucuuucuuuucuccucugccuacucagacaacgagaaacugagaaagcccaaacacaagaaauugaagcagccugcugauggcaauccagacccgaacgcaaaucccaacgucgauccuaaugccaacccaaauguugaccccaacgcgaauccuaacguggauccaaaugcuaaccccaaugccaacccuaaugcaaacccaaacgccaauccgaacgcuaaucccaacgcaaauccuaacgccaauccaaacgcuaaucccaacgccaauccuaacgcgaauccaaacgcaaaucccaacgccaacccgaaugcuaacccuaaugccaaccccaaugcaaacccaaaugcuaacccuaaugccaaccccaauguagacccaaacgcgaaucccaacgccaauccuaacgcaaacccaaaugcuaacccgaaugccaaccccaaugcuaacccuaaugccaacccaaaugcaaaccccaaugccaacccuaaugcuaacccaaaugcgaaccccaacgcaaauccgaacgccaauccuaacgcuaauccaaacgccaaucccaacgcaaauccuaacgccaaucccaacgcuaauccaaacaagaauaaccaggggaauggacagggucauaacaugccuaacgaucccaauaggaacguggacgaaaaugccaacgcaaauagugcggucaaaaacaauaacaaugaggaaccaagcgauaagcacauuaaagaguauuuaaacaagauacaaaauucccugucuacagaauggucgccgugcucagugacuuguggcaacgggauccagguucggauuaaaccuggaagcgcuaauaagcccaaggacgagcuagauuacgccaacgacaucgagaaaaagauuugcaaaauggaaaaguguaguuccguguuuaaugucgugaacucuagcaucggccucauaaugguacuguccuuccuuuuucugaacugaggacuagugcaucacauuuaaaagcaucucagccuaccaugagaauaagagaaagaaaaugaagaucaauagcuuauucaucucuuuuucuuuuucguugguguaaagccaacacccugucuaaaaaacauaaauuucuuuaaucauuuugccucuuuucucugugcuucaauuaauaaaaaauggaaagaaccuagaucuaaaaaaaaaaaaaaaaaaaaaaaaaaaaaaaaaaaaaaaaaaaaaaaaaaaaaaaaaaaaaaaaugcaucccccccccccccccccccccccccccccccaaaggcucuuuucagagccaccagaauu

SEQ ID NO: 1047 - RNA, 739 nt, Artificial Sequence
  mRNA Design i-2 (A64-N5-C30-hSL-N5) comprising derived and/or modified sequence from Pf(3D7)__XP_001351122.1__HsALB_Pf-CSP(93-192) (opt3)
ggggcgcugccuacggagguggcagccaucuccuucucggcaucaagcuuaccaugaagugggugaccuucaucagccugcucuuucuuuucuccucugccuacucaaaacugaagcagcccgcugacggcaacccugauccaaaugcaaacccgaaugucgaccccaacgccaauccuaacguugauccaaaugcgaaccccaauguggacccuaacgcuaauccaaacgccaaucccaacgcaaauccuaacgccaacccaaaugcuaacccgaaugcaaaccccaaugccaacccuaaugcuaacccaaaugccaaccccaaugcgaacccuaaugcaaacccaaaugccaaccccaacgcuaauccgaacgccaauccuaacgcaaaucccaacgcuaauccaugaggacuagugcaucacauuuaaaagcaucucagccuaccaugagaauaagagaaagaaaaugaagaucaauagcuuauucaucucuuuuucuuuuucguugguguaaagccaacacccugucuaaaaaacauaaauuucuuuaaucauuuugccucuuuucucugugcuucaauuaauaaaaaauggaaagaaccuagaucuaaaaaaaaaaaaaaaaaaaaaaaaaaaaaaaaaaaaaaaaaaaaaaaaaaaaaaaaaaaaaaaaugcaucccccccccccccccccccccccccccccccaaaggcucuuuucagagccaccagaauu

SEQ ID NO: 1048 - RNA, 979 nt, Artificial Sequence
  mRNA Design i-2 (A64-N5-C30-hSL-N5) comprising derived and/or modified sequence from Pf(3D7)__XP_001351122.1__HsALB_Pf-CSP(93-272) (opt3)
ggggcgcugccuacggagguggcagccaucuccuucucggcaucaagcuuaccaugaagugggugaccuucaucagccugcucuuucuuuucuccucugccuacucaaaacugaagcagcccgcugacggcaacccugauccaaaugcaaacccgaaugucgaccccaacgccaauccuaacguugauccaaaugcgaaccccaauguggacccuaacgcuaauccaaacgccaaucccaacgcaaauccuaacgccaacccaaaugcuaacccgaaugcaaaccccaaugccaacccuaaugcuaacccaaaugccaaccccaaugcgaacccuaaugcaaacccaaaugccaaccccaacgcuaauccgaacgccaauccuaacgcaaaucccaacgcuaauccaaacgccaauccuaacguagaucccaaugcgaacccaaaugccaaccccaaugcaaacccuaacgcuaauccaaacgccaauccgaacgcuaaucccaacgccaauccuaacgcaaauccaaacgccaaucccaacgcuaauccuaacgcgaauccaaacgcaaaccccaaugccaacccgaaugcuaacccuaaugccaacccaaaugcaaaccccaaugccaacccuaaugcuaaccccugaggacuagugcaucacauuuaaaagcaucucagccuaccaugagaauaagagaaagaaaaugaagaucaauagcuuauucaucucuuuuucuuuuucguugguguaaagccaacacccugucuaaaaaacauaaauuucuuuaaucauuuugccucuuuucucugugcuucaauuaauaaaaaauggaaagaaccuagaucuaaaaaaaaaaaaaaaaaaaaaaaaaaaaaaaaaaaaaaaaaaaaaaaaaaaaaaaaaaaaaaaaugcaucccccccccccccccccccccccccccccccaaaggcucuuuucagagccaccagaauu

SEQ ID NO: 1049 - RNA, 1354 nt, Artificial Sequence
  mRNA Design i-2 (A64-N5-C30-hSL-N5) comprising derived and/or modified sequence from Pf(3D7)__XP_001351122.1__HsALB_Pf-CSP(93-397) (opt3)
ggggcgcugccuacggagguggcagccaucuccuucucggcaucaagcuuaccaugaagugggugaccuucaucagccugcucuuucuuuucuccucugccuacucaaaacugaagcagcccgcugacggcaacccugauccaaaugcaaacccgaaugucgaccccaacgccaauccuaacguugauccaaaugcgaaccccaauguggacccuaacgcuaauccaaacgccaaucccaacgcaaauccuaacgccaacccaaaugcuaacccgaaugcaaaccccaaugccaacccuaaugcuaacccaaaugccaaccccaaugcgaacccuaaugcaaacccaaaugccaaccccaacgcuaauccgaacgccaauccuaacgcaaaucccaacgcuaauccaaacgccaauccuaacguagaucccaaugcgaacccaaaugccaaccccaaugcaaacccuaacgcuaauccaaacgccaauccgaacgcuaaucccaacgccaauccuaacgcaaauccaaacgccaaucccaacgcuaauccuaacgcgaauccaaacgcaaaccccaaugccaacccgaaugcuaacccuaaugccaacccaaaugcaaaccccaaugccaacccuaaugcuaaccccaauaaaaacaaucaagggaacggacagggucacaauaugccaaacgacccuaacagaaauguggaugagaacgccaaugcaaacagugcggucaagaauaacaauaacgaggaacccagcgacaaacauauuaaggaauauuugaauaagauacagaacuccuuaucuacagaguggucgccaugcucagugacuuguggcaaugggauccagguuaggauuaaaccgggaagcgcuaacaagccuaaagaugaacuggacuacgccaaugauaucgagaagaaaauuugcaagauggagaaguguaguuccguguuuaacgucguaaauucuagcaucggccuaauaauggugcucuccuuccuguuucuuaacugaggacuagugcaucacauuuaaaagcaucucagccuaccaugagaauaagagaaagaaaaugaagaucaauagcuuauucaucucuuuuucuuuuucguugguguaaagccaacacccugucuaaaaaacauaaauuucuuuaaucauuuugccucuuuucucugugcuucaauuaauaaaaaauggaaagaaccuagaucuaaaaaaaaaaaaaaaaaaaaaaaaaaaaaaaaaaaaaaaaaaaaaaaaaaaaaaaaaaaaaaaaugcaucccccccccccccccccccccccccccccccaaaggcucuuuucagagccaccagaauu

SEQ ID NO: 1050 - RNA, 724 nt, Artificial Sequence
  mRNA Design i-2 (A64-N5-C30-hSL-N5) comprising derived and/or modified sequence from Pf(3D7)__XP_001351122.1__HsALB_Pf-CSP(98-192) (opt3)
ggggcgcugccuacggagguggcagccaucuccuucucggcaucaagcuuaccaugaagugggugaccuucaucagccugcucuuucuuuucuccucugccuacucagcugacggcaaccccgauccuaaugcaaacccaaaugucgacccgaacgccaaucccaacguugauccuaaugcgaacccaaauguggaccccaacgcuaauccuaacgccaauccaaacgcaaaucccaacgccaacccuaaugcuaacccaaaugcaaacccgaaugccaaccccaaugcuaacccuaaugccaacccaaaugcgaaccccaaugcaaacccuaaugccaacccaaacgcuaaucccaacgccaauccgaacgcaaauccuaacgcuaaucccugaggacuagugcaucacauuuaaaagcaucucagccuaccaugagaauaagagaaagaaaaugaagaucaauagcuuauucaucucuuuuucuuuuucguugguguaaagccaacacccugucuaaaaaacauaaauuucuuuaaucauuuugccucuuuucucugugcuucaauuaauaaaaaauggaaagaaccuagaucuaaaaaaaaaaaaaaaaaaaaaaaaaaaaaaaaaaaaaaaaaaaaaaaaaaaaaaaaaaaaaaaaugcaucccccccccccccccccccccccccccccccaaaggcucuuuucagagccaccagaauu

SEQ ID NO: 1051 - RNA, 964 nt, Artificial Sequence
  mRNA Design i-2 (A64-N5-C30-hSL-N5) comprising derived and/or modified sequence from Pf(3D7)__XP_001351122.1__HsALB_Pf-CSP(98-272) (opt3)
ggggcgcugccuacggagguggcagccaucuccuucucggcaucaagcuuaccaugaagugggugaccuucaucagccugcucuuucuuuucuccucugccuacucagcugacggcaaccccgauccuaaugcaaacccaaaugucgacccgaacgccaaucccaacguugauccuaaugcgaacccaaauguggaccccaacgcuaauccuaacgccaauccaaacgcaaaucccaacgccaacccuaaugcuaacccaaaugcaaacccgaaugccaaccccaaugcuaacccuaaugccaacccaaaugcgaaccccaaugcaaacccuaaugccaacccaaacgcuaaucccaacgccaauccgaacgcaaauccuaacgcuaaucccaacgccaauccaaacguagauccuaaugcgaaccccaaugccaacccaaaugcaaaccccaacgcuaauccuaacgccaauccaaacgcuaauccgaacgccaaucccaacgcaaauccuaacgccaauccaaacgcuaaucccaacgcgaauccuaacgcaaacccaaaugccaaccccaaugcuaacccgaaugccaacccuaaugcaaacccaaaugccaaccccaaugcuaacccuugaggacuagugcaucacauuuaaaagcaucucagccuaccaugagaauaagagaaagaaaaugaagaucaauagcuuauucaucucuuuuucuuuuucguugguguaaagccaacacccugucuaaaaaacauaaauuucuuuaaucauuuugccucuuuucucugugcuucaauuaauaaaaaauggaaagaaccuagaucuaaaaaaaaaaaaaaaaaaaaaaaaaaaaaaaaaaaaaaaaaaaaaaaaaaaaaaaaaaaaaaaaugcaucccccccccccccccccccccccccccccccaaaggcucuuuucagagccaccagaauu

SEQ ID NO: 1052 - RNA, 1270 nt, Artificial Sequence
  mRNA Design i-2 (A64-N5-C30-hSL-N5) comprising derived and/or modified sequence from Pf(3D7)__XP_001351122.1__HsALB_Pf-CSP(98-374) (opt3)
ggggcgcugccuacggagguggcagccaucuccuucucggcaucaagcuuaccaugaagugggugaccuucaucagccugcucuuucuuuucuccucugccuacucagcugacggcaaccccgauccuaaugcaaacccaaaugucgacccgaacgccaaucccaacguugauccuaaugcgaacccaaauguggaccccaacgcuaauccuaacgccaauccaaacgcaaaucccaacgccaacccuaaugcuaacccaaaugcaaacccgaaugccaaccccaaugcuaacccuaaugccaacccaaaugcgaaccccaaugcaaacccuaaugccaacccaaacgcuaaucccaacgccaauccgaacgcaaauccuaacgcuaaucccaacgccaauccaaacguagauccuaaugcgaaccccaaugccaacccaaaugcaaaccccaacgcuaauccuaacgccaauccaaacgcuaauccgaacgccaaucccaacgcaaauccuaacgccaauccaaacgcuaaucccaacgcgaauccuaacgcaaacccaaaugccaaccccaaugcuaacccgaaugccaacccuaaugcaaacccaaaugccaaccccaaugcuaacccuaauaaaaacaaucaggggaacggacaaggucacaauaugcccaacgacccaaacagaaauguggaugagaacgccaaugcaaacagugcggucaagaauaacaauaacgaggaaccuagcgacaaacauauuaaggaauaucugaauaaaauacagaacuccuugucuacagaguggucgcccugcucagugacuuguggcaaugggauccagguuaggauuaagccaggaagcgcuaacaagccgaaagaugaauuagacuacgccaaugauaucgagaagaaaauuugcaagauggagaaauguugaggacuagugcaucacauuuaaaagcaucucagccuaccaugagaauaagagaaagaaaaugaagaucaauagcuuauucaucucuuuuucuuuuucguugguguaaagccaacacccugucuaaaaaacauaaauuucuuuaaucauuuugccucuuuucucugugcuucaauuaauaaaaaauggaaagaaccuagaucuaaaaaaaaaaaaaaaaaaaaaaaaaaaaaaaaaaaaaaaaaaaaaaaaaaaaaaaaaaaaaaaaugcaucccccccccccccccccccccccccccccccaaaggcucuuuucagagccaccagaauu

SEQ ID NO: 1053 - RNA, 1339 nt, Artificial Sequence
  mRNA Design i-2 (A64-N5-C30-hSL-N5) comprising derived and/or modified sequence from Pf(3D7)__XP_001351122.1__HsALB_Pf-CSP(98-397) (opt3)
ggggcgcugccuacggagguggcagccaucuccuucucggcaucaagcuuaccaugaagugggugaccuucaucagccugcucuuucuuuucuccucugccuacucagcugacggcaaccccgauccuaaugcaaacccaaaugucgacccgaacgccaaucccaacguugauccuaaugcgaacccaaauguggaccccaacgcuaauccuaacgccaauccaaacgcaaaucccaacgccaacccuaaugcuaacccaaaugcaaacccgaaugccaaccccaaugcuaacccuaaugccaacccaaaugcgaaccccaaugcaaacccuaaugccaacccaaacgcuaaucccaacgccaauccgaacgcaaauccuaacgcuaaucccaacgccaauccaaacguagauccuaaugcgaaccccaaugccaacccaaaugcaaaccccaacgcuaauccuaacgccaauccaaacgcuaauccgaacgccaaucccaacgcaaauccuaacgccaauccaaacgcuaaucccaacgcgaauccuaacgcaaacccaaaugccaaccccaaugcuaacccgaaugccaacccuaaugcaaacccaaaugccaaccccaaugcuaacccuaauaaaaacaaucaggggaacggacaaggucacaauaugcccaacgacccaaacagaaauguggaugagaacgccaaugcaaacagugcggucaagaauaacaauaacgaggaaccuagcgacaaacauauuaaggaauaucugaauaaaauacagaacuccuugucuacagaguggucgcccugcucagugacuuguggcaaugggauccagguuaggauuaagccaggaagcgcuaacaagccgaaagaugaauuagacuacgccaaugauaucgagaagaaaauuugcaagauggagaaauguaguuccguguuuaacgucguaaauucuagcaucggccugauaauggugcuauccuuccucuuucugaacugaggacuagugcaucacauuuaaaagcaucucagccuaccaugagaauaagagaaagaaaaugaagaucaauagcuuauucaucucuuuuucuuuuucguugguguaaagccaacacccugucuaaaaaacauaaauuucuuuaaucauuuugccucuuuucucugugcuucaauuaauaaaaaauggaaagaaccuagaucuaaaaaaaaaaaaaaaaaaaaaaaaaaaaaaaaaaaaaaaaaaaaaaaaaaaaaaaaaaaaaaaaugcaucccccccccccccccccccccccccccccccaaaggcucuuuucagagccaccagaauu

SEQ ID NO: 1054 - RNA, 1666 nt, Artificial Sequence
  mRNA Design i-2 (A64-N5-C30-hSL-N5) comprising derived and/or modified sequence from Pf(3D7)__XP_001351122.1__HsALB_Pf-CSP(199-377)_L(PVTN)_HBsAg (opt3)
ggggcgcugccuacggagguggcagccaucuccuucucggcaucaagcuuaccaugaagugggugaccuucaucagccugcucuuucuuuucuccucugccuacucagaccccaacgcuaauccuaacgcaaauccaaacgccaauccgaacgcgaaucccaacgcuaauccuaacgccaauccaaacgcaaaucccaacgccaauccuaacgcuaacccaaaugcaaaccccaaugccaacccuaaugcuaacccaaaugccaacccgaaugcgaaccccaaugcaaacccuaaugccaacccaaaugcuaaccccaacgccaauccuaacaaaaauaaccagggcaaugggcaaggacacaacaugccaaaugaucccaacagaaaugucgacgagaacgcaaaugcuaacagugccguuaagaauaacaauaacgaggaaccgagcgauaaacauauuaaggaauaucugaacaaaauacaaaauuccuugucuacagaguggucgccuugcucagugacuugugguaacggcauccagguaaggauuaagcccgggagcgcgaauaagccaaaagacgaauuagauuacgccaacgacaucgagaagaaaauuugcaagauggagaaauguaguuccgugccugucacgaauauggaaaacaucaccucuggauuucugggcccccuacucgugcugcaggcagguuucuuucuucugacacggauauugacuaucccacagagccucgauuccugguggaccucacugaauuuccucgggggaagucccguuugccugggccagaacagccagucuccuacauccaaucacucaccaaccagcuguccgcccauuugcccuggcuaucgcuggauguguuuacgacguuuuaucauuuuccuguuuauccuuuugcugugccuaauauuccuccuggugcuucuggacuaccaggggauguugccagucuguccccucauuccuggaaguacuacaaccaacacggguccaugcaagacuuguaccacacccgcucaaggcaauucuauguuuccguccugcugcuguacuaagccuaccgaugggaacugcacauguaucccaauucccagcucgugggccuucgcuaaauaucugugggagugggccucugugagauuuuccugguuaucacugcucguaccuuucguucagugguucgugggacuuagucccaccgucuggcugagcgcaaucuggaugaugugguacuggggcccauccuuguauucuaucgugagcccuuuuauuccccuacugccaauauucuuuugccucuggguguacaucugaggacuagugcaucacauuuaaaagcaucucagccuaccaugagaauaagagaaagaaaaugaagaucaauagcuuauucaucucuuuuucuuuuucguugguguaaagccaacacccugucuaaaaaacauaaauuucuuuaaucauuuugccucuuuucucugugcuucaauuaauaaaaaauggaaagaaccuagaucuaaaaaaaaaaaaaaaaaaaaaaaaaaaaaaaaaaaaaaaaaaaaaaaaaaaaaaaaaaaaaaaaugcaucccccccccccccccccccccccccccccccaaaggcucuuuucagagccaccagaauu

SEQ ID NO: 1055 - RNA, 1405 nt, Artificial Sequence
  mRNA Design i-2 (A64-N5-C30-hSL-N5) comprising derived and/or modified sequence from Pb(ANKA)__XP_022712148.1__Pb-CSP (opt3)
ggggcgcugccuacggagguggcagccaucuccuucucggcaucaagcuuaccaugaagaaaugcaccauccugguggucgccagccuccuucugguuaacuccuuguuacccggcuacgggcagaauaagucuauucaagcucagagaaaccugaaugagcuauguuauaacgaaggaaaugacaacaaacucuaccacgugcuuaauucaaagaacgguaaaauauauaauaggaacacaguaaaucggcugcuggcagaugccccugagggcaagaagaacgaaaagaaaaaugagaaaaucgaacgcaacaauaaguugaaacagccaccgcccccuccaaaccccaacgacccuccacccccuaauccaaacgauccgcccccuccaaaucccaacgacccuccacccccgaauccuaacgaucccccaccucccaaugcgaacgacccacccccuccaaaugcuaacgauccggcacccccuaaugccaacgacccagcucccccuaaugccaacgauccagcacccccgaaugccaacgacccugcuccacccaacgccaaugauccucccccaccuaaccccaaugacccagcgccgccuaacgcaaaugaucccccacccccuaacccaaaugaccccgccccuccgcaggggaacaauaacccacaaccccagccucgaccacagccccagccucaaccgcagccccagccacagccucaaccccagccacagccucguccccaaccacagccgcagccuggaggcaauaacaauaacaagaauaacaacaaugacgauaguuacauucccagcgcugagaagauccucgaguucgugaaacagauuagagacuccaucacugaagaguggucucaaugcaacgucacgugugguucggggauaagggugcggaagcgcaaaggaucaaauaagaaagccgaagaucugacccuggaggacaucgauacagagauuugcaagauggacaaauguagcaguaucuuuaacauuguuuccaauucucucggcuucgugaucuuacugguccuuguguuuuucaacugaggacuagugcaucacauuuaaaagcaucucagccuaccaugagaauaagagaaagaaaaugaagaucaauagcuuauucaucucuuuuucuuuuucguugguguaaagccaacacccugucuaaaaaacauaaauuucuuuaaucauuuugccucuuuucucugugcuucaauuaauaaaaaauggaaagaaccuagaucuaaaaaaaaaaaaaaaaaaaaaaaaaaaaaaaaaaaaaaaaaaaaaaaaaaaaaaaaaaaaaaaaugcaucccccccccccccccccccccccccccccccaaaggcucuuuucagagccaccagaauu

SEQ ID NO: 1056 - RNA, 1570 nt, Artificial Sequence
  mRNA Design i-2 (A64-N5-C30-hSL-N5) comprising derived and/or modified sequence from Pb(ANKA)__XP_022712148.1__Pb-CSP_L(G4SG4)_TM domain HA (opt3)
ggggcgcugccuacggagguggcagccaucuccuucucggcaucaagcuuaccaugaagaaaugcaccauccugguggucgccagccuccuucugguuaacuccuuguuacccggcuacgggcagaauaagucuauucaagcucagagaaaccugaaugagcuauguuauaacgaaggaaaugacaacaaacucuaccacgugcuuaauucaaagaacgguaaaauauauaauaggaacacaguaaaucggcugcuggcagaugccccugagggcaagaagaacgaaaagaaaaaugagaaaaucgaacgcaacaauaaguugaaacagccaccgcccccuccaaaccccaacgacccuccacccccuaauccaaacgauccgcccccuccaaaucccaacgacccuccacccccgaauccuaacgaucccccaccucccaaugcgaacgacccacccccuccaaaugcuaacgauccggcacccccuaaugccaacgacccagcucccccuaaugccaacgauccagcacccccgaaugccaacgacccugcuccacccaacgccaaugauccucccccaccuaaccccaaugacccagcgccgccuaacgcaaaugaucccccacccccuaacccaaaugaccccgccccuccgcaggggaacaauaacccacaaccccagccucgaccacagccccagccucaaccgcagccccagccacagccucaaccccagccacagccucguccccaaccacagccgcagccuggaggcaauaacaauaacaagaauaacaacaaugacgauaguuacauucccagcgcugagaagauccucgaguucgugaaacagauuagagacuccaucacugaagaguggucucaaugcaacgucacgugugguucggggauaagggugcggaagcgcaaaggaucaaauaagaaagccgaagaucugacccuggaggacaucgauacagagauuugcaagauggacaaauguagcaguaucuuuaacauuguuuccaauucucucggcuucgugaucuuacugguccuuguguuuuucaacggcgggggagguagcggcgggggaggcaaguuggaauccacuagaauauaucagauucuggcaaucuacucaaccguagcuaguagccuaguucucguggucucucugggugccauuuccuuuuggaugugcucaaaugggagccuucaguguaggaucugcaucugaggacuagugcaucacauuuaaaagcaucucagccuaccaugagaauaagagaaagaaaaugaagaucaauagcuuauucaucucuuuuucuuuuucguugguguaaagccaacacccugucuaaaaaacauaaauuucuuuaaucauuuugccucuuuucucugugcuucaauuaauaaaaaauggaaagaaccuagaucuaaaaaaaaaaaaaaaaaaaaaaaaaaaaaaaaaaaaaaaaaaaaaaaaaaaaaaaaaaaaaaaaugcaucccccccccccccccccccccccccccccccaaaggcucuuuucagagccaccagaauu

SEQ ID NO: 1057 - RNA, 1390 nt, Artificial Sequence
  mRNA Design i-2 (A64-N5-C30-hSL-N5) comprising derived and/or modified sequence from Pb(ANKA)__XP_022712148.1__HsALB_Pb-CSP(24-340) (opt3)
ggggcgcugccuacggagguggcagccaucuccuucucggcaucaagcuuaccaugaagugggugaccuucaucagccugcucuuucuuuucuccucugccuacucacagaacaaaaguauucaagcucagagaaaucugaacgaguugugcuauaaugaaggcaacgacaauaaguuauaccacguccugaacagcaaaaaugggaagauauauaacaggaauacaguuaaccggcuacucgcagaugcccccgaggguaaaaagaaugaaaagaaaaacgagaagaucgaacgcaauaacaaacugaagcagccuccaccgcccccuaauccaaacgaucccccuccacccaacccuaaugacccaccgcccccuaacccaaaugaucccccuccacccaacccgaaugacccucccccaccuaacgcgaaugaucccccacccccuaacgcuaaugacccagccccgcccaacgcaaaugacccugccccacccaacgcuaaugauccugcaccacccaacgccaaugacccggcuccuccaaacgccaacgaucccccucccccaaauccuaacgaccccgcgccaccgaaugcaaacgauccucccccacccaauccuaacgacccagcucccccucagggaaauaacaauccgcaaccacagccccgaccucagccacagccccaaccucagccgcagccccagccacaaccucagccccagccacguccucaaccccagccacagccgggcgggaacaauaacaauaaaaacaauaacaacgacgauuccuacauuccuucugccgagaagauccuugaguuugugaagcagauuagagacucgaucacugaagaguggucacaauguaauguaacgugcggaagcggcauaagggugcggaaacgcaaggguaguaacaaaaaggccgaagaucugaccuuggaggacaucgauacagagauuuguaaaauggacaagugcuccucuaucuucaauauugucagcaacucccucggguuugugauccugcugguucucguguucuuuaauugaggacuagugcaucacauuuaaaagcaucucagccuaccaugagaauaagagaaagaaaaugaagaucaauagcuuauucaucucuuuuucuuuuucguugguguaaagccaacacccugucuaaaaaacauaaauuucuuuaaucauuuugccucuuuucucugugcuucaauuaauaaaaaauggaaagaaccuagaucuaaaaaaaaaaaaaaaaaaaaaaaaaaaaaaaaaaaaaaaaaaaaaaaaaaaaaaaaaaaaaaaaugcaucccccccccccccccccccccccccccccccaaaggcucuuuucagagccaccagaauu

SEQ ID NO: 1058 - RNA, 1408 nt, Artificial Sequence
  mRNA Design i-2 (A64-N5-C30-hSL-N5) comprising derived and/or modified sequence from Pb(ANKA)__XP_022712148.1__HsIns-iso1_Pb-CSP(24-340) (opt3)
ggggcgcugccuacggagguggcagccaucuccuucucggcaucaagcuuaccauggcccuguggaugagacuccuuccccuguuggcuuuacuggcacuauggggcccugacccagccgcggcucagaacaagagcauccaagcccagaggaaucucaacgagcugugcuacaaugaagggaacgauaauaaacuuuaucacguucugaacuccaagaauggaaaaauuuacaaccggaauaccgucaaccgcuugcucgcagacgccccggaggguaagaaaaaugaaaagaagaacgagaaaauagaacgaaauaacaagcugaaacagcccccuccacccccuaauccaaacgaucccccuccaccgaaccccaaugacccuccacccccuaacccaaaugaucccccgccucccaacccaaaugacccucccccacccaacgcuaaugauccuccaccgcccaacgcaaaugacccugccccacccaacgcuaaugauccugccccacccaacgcgaaugacccggcaccuccaaacgccaaugaucccgcuccucccaacgccaacgacccaccucccccaaauccgaacgauccugcacccccaaaugcuaacgaucccccuccacccaauccuaacgacccggccccaccccagggcaauaacaauccucaaccacagccccguccucagccgcagccccaaccacagccucagccccagccacaaccucagccccagccaagaccgcaaccucagccccagccagggggaaacaauaacaauaagaacaauaacaacgacgacucuuauauccccucagcggagaaaauucuggaguucguuaagcagaucagggauaguauuacagaagaguggagccaauguaaugugacuugcggcuccgguauccggguacgcaagagaaaagggucuaacaagaaagccgaagaccucacguuagaggauauagacaccgagaucuguaagauggauaaaugcucgucaauuuuuaauaucgugagcaacagucugggauucgucauucuuuuggugcugguguuuuucaauugaggacuagugcaucacauuuaaaagcaucucagccuaccaugagaauaagagaaagaaaaugaagaucaauagcuuauucaucucuuuuucuuuuucguugguguaaagccaacacccugucuaaaaaacauaaauuucuuuaaucauuuugccucuuuucucugugcuucaauuaauaaaaaauggaaagaaccuagaucuaaaaaaaaaaaaaaaaaaaaaaaaaaaaaaaaaaaaaaaaaaaaaaaaaaaaaaaaaaaaaaaaugcaucccccccccccccccccccccccccccccccaaaggcucuuuucagagccaccagaauu

SEQ ID NO: 1059 - RNA, 1387 nt, Artificial Sequence
  mRNA Design i-2 (A64-N5-C30-hSL-N5) comprising derived and/or modified sequence from Pb(ANKA)__XP_022712148.1__HsSPARC_Pb-CSP(24-340) (opt3)
ggggcgcugccuacggagguggcagccaucuccuucucggcaucaagcuuaccaugagagccuggaucuucuuucugcucugccuugcuggcagggcacuggcccagaacaagagcauucaagcgcagcggaauuugaacgaguuauguuacaaugaagggaacgacaauaaacuguaucacguucuaaacuccaagaauggaaaaauauacaaccgcaauaccgucaaccgacuccuggcugaugcccccgaggguaagaaaaaugaaaagaagaacgagaaaaucgaacguaauaacaaacuuaagcagccuccaccgcccccuaauccaaacgacccgccuccacccaacccuaaugauccaccgcccccuaacccaaaugaucccccuccacccaacccgaaugacccucccccaccuaacgcaaaugaucccccacccccuaacgccaaugacccagcuccgcccaacgcaaaugacccugccccacccaacgcuaaugauccugccccacccaacgcgaaugacccggcaccuccaaacgccaacgaucccccucccccaaauccuaacgaccccgcuccaccgaaugccaacgauccucccccacccaauccuaacgacccagcacccccucagggcaauaacaauccgcaaccacagcccagaccucagccacagccccaaccucagccgcagccccagccacaaccucagccccagccaaggccucaaccccagccacagcccgggggaaacaauaacaauaagaacaauaacaacgacgauucuuauauuccuucagcugagaaaauccuggaguucguuaagcagauucgggacaguaucacagaagaguggagccaaugcaaugugacuuguggcuccgguauacgcguaagaaagaggaaagggucuaacaagaaagccgaagauuugacgcucgaggacaucgauaccgagauuugcaagauggacaaauguucgucaaucuuuaauauugugagcaacagucugggauucgucauccugcucguguuaguguuuuucaauugaggacuagugcaucacauuuaaaagcaucucagccuaccaugagaauaagagaaagaaaaugaagaucaauagcuuauucaucucuuuuucuuuuucguugguguaaagccaacacccugucuaaaaaacauaaauuucuuuaaucauuuugccucuuuucucugugcuucaauuaauaaaaaauggaaagaaccuagaucuaaaaaaaaaaaaaaaaaaaaaaaaaaaaaaaaaaaaaaaaaaaaaaaaaaaaaaaaaaaaaaaaugcaucccccccccccccccccccccccccccccccaaaggcucuuuucagagccaccagaauu

SEQ ID NO: 1060 - RNA, 1390 nt, Artificial Sequence
  mRNA Design i-2 (A64-N5-C30-hSL-N5) comprising derived and/or modified sequence from Pb(ANKA)__XP_022712148.1__IgE_Pb-CSP(24-340) (opt3)
ggggcgcugccuacggagguggcagccaucuccuucucggcaucaagcuuaccauggacuggaccuggauccuguuccucguggccgcugcaacaagaguccacagccagaacaaguccauucaagcccagaggaaucuuaacgagcugugcuacaaugaaggcaacgauaauaaauuguaucauguuuuaaacucuaagaaugggaaaauauacaaccggaauacugugaaccgccugcuagcggacgcucccgagggaaagaaaaaugaaaagaagaacgagaaaaucgaacgaaauaacaagcucaaacagccuccaccgcccccuaauccaaacgaucccccuccacccaacccuaaugacccaccgcccccuaacccaaaugaucccccuccacccaacccgaaugacccucccccaccuaacgccaaugaucccccacccccuaacgcaaaugacccagccccgcccaacgcuaaugauccugcaccacccaacgccaaugacccugcuccacccaacgccaaugauccggcgccuccaaacgcaaacgaucccccucccccaaauccuaacgaccccgccccaccgaaugcuaacgacccucccccacccaauccuaacgacccagcacccccucaggguaauaacaauccgcaaccacagccccguccucagccacagccccaaccucagccgcagccccagccacaaccucagccccagccaagaccucaaccccagccacagccgggcgggaacaauaacaauaagaacaauaacaacgaugacucauauauuccuagugccgagaaaauccuggaguuuguaaagcagauuagggauagcaucacggaagaguggucccaauguaaugugaccugcggaucuggcauacggguccgcaagagaaaagguucgaacaagaaagcugaagaccuuacacuggaggauaucgacacugagauuuguaagauggauaaaugcucaagcaucuucaauauugugaguaacuccuugggguuuguuauccuccuggugcuggucuucuuuaauugaggacuagugcaucacauuuaaaagcaucucagccuaccaugagaauaagagaaagaaaaugaagaucaauagcuuauucaucucuuuuucuuuuucguugguguaaagccaacacccugucuaaaaaacauaaauuucuuuaaucauuuugccucuuuucucugugcuucaauuaauaaaaaauggaaagaaccuagaucuaaaaaaaaaaaaaaaaaaaaaaaaaaaaaaaaaaaaaaaaaaaaaaaaaaaaaaaaaaaaaaaaugcaucccccccccccccccccccccccccccccccaaaggcucuuuucagagccaccagaauu

SEQ ID NO: 1061 - RNA, 1576 nt, Artificial Sequence
  mRNA Design i-2 (A64-N5-C30-hSL-N5) comprising derived and/or modified sequence from Pf(3D7)__XP_001351122.1__Pf-CSP (opt4)
ggggcgcugccuacggagguggcagccaucuccuucucggcaucaagcuuaccaugaugagaaagcuggccauccugagcgugagcagcuuccuguucguggaggcccuguuccaggaguaccagugcuacggcagcagcagcaacaccagagugcugaacgagcugaacuacgacaacgccggcaccaaccuguacaacgagcuggagaugaacuacuacggcaagcaggagaacugguacagccugaagaagaacagcagaagccugggcgagaacgacgacggcaacaacgaggacaacgagaagcugagaaagcccaagcacaagaagcugaagcagcccgccgacggcaaccccgaccccaacgccaaccccaacguggaccccaacgccaaccccaacguggaccccaacgccaaccccaacguggaccccaacgccaaccccaacgccaaccccaacgccaaccccaacgccaaccccaacgccaaccccaacgccaaccccaacgccaaccccaacgccaaccccaacgccaaccccaacgccaaccccaacgccaaccccaacgccaaccccaacgccaaccccaacgccaaccccaacgccaaccccaacgccaaccccaacgccaaccccaacguggaccccaacgccaaccccaacgccaaccccaacgccaaccccaacgccaaccccaacgccaaccccaacgccaaccccaacgccaaccccaacgccaaccccaacgccaaccccaacgccaaccccaacgccaaccccaacgccaaccccaacgccaaccccaacgccaaccccaacgccaaccccaacgccaaccccaacgccaaccccaacgccaaccccaacaagaacaaccagggcaacggccagggccacaacaugcccaacgaccccaacagaaacguggacgagaacgccaacgccaacagcgccgugaagaacaacaacaacgaggagcccagcgacaagcacaucaaggaguaccugaacaagauccagaacagccugagcaccgaguggagccccugcagcgugaccugcggcaacggcauccaggugagaaucaagcccggcagcgccaacaagcccaaggacgagcuggacuacgccaacgacaucgagaagaagaucugcaagauggagaagugcagcagcguguucaacguggugaacagcagcaucggccugaucauggugcugagcuuccuguuccugaacugaggacuagugcaucacauuuaaaagcaucucagccuaccaugagaauaagagaaagaaaaugaagaucaauagcuuauucaucucuuuuucuuuuucguugguguaaagccaacacccugucuaaaaaacauaaauuucuuuaaucauuuugccucuuuucucugugcuucaauuaauaaaaaauggaaagaaccuagaucuaaaaaaaaaaaaaaaaaaaaaaaaaaaaaaaaaaaaaaaaaaaaaaaaaaaaaaaaaaaaaaaaugcaucccccccccccccccccccccccccccccccaaaggcucuuuucagagccaccagaauu

SEQ ID NO: 1062 - RNA, 1507 nt, Artificial Sequence
  mRNA Design i-2 (A64-N5-C30-hSL-N5) comprising derived and/or modified sequence from Pf(3D7)__XP_001351122.1__Pf-CSP(1-374) (opt4)
ggggcgcugccuacggagguggcagccaucuccuucucggcaucaagcuuaccaugaugagaaagcuggccauccugagcgugagcagcuuccuguucguggaggcccuguuccaggaguaccagugcuacggcagcagcagcaacaccagagugcugaacgagcugaacuacgacaacgccggcaccaaccuguacaacgagcuggagaugaacuacuacggcaagcaggagaacugguacagccugaagaagaacagcagaagccugggcgagaacgacgacggcaacaacgaggacaacgagaagcugagaaagcccaagcacaagaagcugaagcagcccgccgacggcaaccccgaccccaacgccaaccccaacguggaccccaacgccaaccccaacguggaccccaacgccaaccccaacguggaccccaacgccaaccccaacgccaaccccaacgccaaccccaacgccaaccccaacgccaaccccaacgccaaccccaacgccaaccccaacgccaaccccaacgccaaccccaacgccaaccccaacgccaaccccaacgccaaccccaacgccaaccccaacgccaaccccaacgccaaccccaacgccaaccccaacgccaaccccaacguggaccccaacgccaaccccaacgccaaccccaacgccaaccccaacgccaaccccaacgccaaccccaacgccaaccccaacgccaaccccaacgccaaccccaacgccaaccccaacgccaaccccaacgccaaccccaacgccaaccccaacgccaaccccaacgccaaccccaacgccaaccccaacgccaaccccaacgccaaccccaacgccaaccccaacaagaacaaccagggcaacggccagggccacaacaugcccaacgaccccaacagaaacguggacgagaacgccaacgccaacagcgccgugaagaacaacaacaacgaggagcccagcgacaagcacaucaaggaguaccugaacaagauccagaacagccugagcaccgaguggagccccugcagcgugaccugcggcaacggcauccaggugagaaucaagcccggcagcgccaacaagcccaaggacgagcuggacuacgccaacgacaucgagaagaagaucugcaagauggagaagugcugaggacuagugcaucacauuuaaaagcaucucagccuaccaugagaauaagagaaagaaaaugaagaucaauagcuuauucaucucuuuuucuuuuucguugguguaaagccaacacccugucuaaaaaacauaaauuucuuuaaucauuuugccucuuuucucugugcuucaauuaauaaaaaauggaaagaaccuagaucuaaaaaaaaaaaaaaaaaaaaaaaaaaaaaaaaaaaaaaaaaaaaaaaaaaaaaaaaaaaaaaaaugcaucccccccccccccccccccccccccccccccaaaggcucuuuucagagccaccagaauu

SEQ ID NO: 1063 - RNA, 1360 nt, Artificial Sequence
  mRNA Design i-2 (A64-N5-C30-hSL-N5) comprising derived and/or modified sequence from Pf(3D7)__XP_001351122.1__Pf-CSP(1-325) (opt4)
ggggcgcugccuacggagguggcagccaucuccuucucggcaucaagcuuaccaugaugagaaagcuggccauccugagcgugagcagcuuccuguucguggaggcccuguuccaggaguaccagugcuacggcagcagcagcaacaccagagugcugaacgagcugaacuacgacaacgccggcaccaaccuguacaacgagcuggagaugaacuacuacggcaagcaggagaacugguacagccugaagaagaacagcagaagccugggcgagaacgacgacggcaacaacgaggacaacgagaagcugagaaagcccaagcacaagaagcugaagcagcccgccgacggcaaccccgaccccaacgccaaccccaacguggaccccaacgccaaccccaacguggaccccaacgccaaccccaacguggaccccaacgccaaccccaacgccaaccccaacgccaaccccaacgccaaccccaacgccaaccccaacgccaaccccaacgccaaccccaacgccaaccccaacgccaaccccaacgccaaccccaacgccaaccccaacgccaaccccaacgccaaccccaacgccaaccccaacgccaaccccaacgccaaccccaacgccaaccccaacguggaccccaacgccaaccccaacgccaaccccaacgccaaccccaacgccaaccccaacgccaaccccaacgccaaccccaacgccaaccccaacgccaaccccaacgccaaccccaacgccaaccccaacgccaaccccaacgccaaccccaacgccaaccccaacgccaaccccaacgccaaccccaacgccaaccccaacgccaaccccaacgccaaccccaacaagaacaaccagggcaacggccagggccacaacaugcccaacgaccccaacagaaacguggacgagaacgccaacgccaacagcgccgugaagaacaacaacaacgaggagcccagcgacaagcacaucaaggaguaccugaacaagauccagaacugaggacuagugcaucacauuuaaaagcaucucagccuaccaugagaauaagagaaagaaaaugaagaucaauagcuuauucaucucuuuuucuuuuucguugguguaaagccaacacccugucuaaaaaacauaaauuucuuuaaucauuuugccucuuuucucugugcuucaauuaauaaaaaauggaaagaaccuagaucuaaaaaaaaaaaaaaaaaaaaaaaaaaaaaaaaaaaaaaaaaaaaaaaaaaaaaaaaaaaaaaaaugcaucccccccccccccccccccccccccccccccaaaggcucuuuucagagccaccagaauu

SEQ ID NO: 1064 - RNA, 1576 nt, Artificial Sequence
  mRNA Design i-2 (A64-N5-C30-hSL-N5) comprising derived and/or modified sequence from Pf(3D7)__XP_001351122.1__HsALB_Pf-CSP(19-397) (opt4)
ggggcgcugccuacggagguggcagccaucuccuucucggcaucaagcuuaccaugaagugggugaccuucaucagccugcuguuccuguucagcagcgccuacagccuguuccaggaguaccagugcuacggcagcagcagcaacaccagagugcugaacgagcugaacuacgacaacgccggcaccaaccuguacaacgagcuggagaugaacuacuacggcaagcaggagaacugguacagccugaagaagaacagcagaagccugggcgagaacgacgacggcaacaacgaggacaacgagaagcugagaaagcccaagcacaagaagcugaagcagcccgccgacggcaaccccgaccccaacgccaaccccaacguggaccccaacgccaaccccaacguggaccccaacgccaaccccaacguggaccccaacgccaaccccaacgccaaccccaacgccaaccccaacgccaaccccaacgccaaccccaacgccaaccccaacgccaaccccaacgccaaccccaacgccaaccccaacgccaaccccaacgccaaccccaacgccaaccccaacgccaaccccaacgccaaccccaacgccaaccccaacgccaaccccaacgccaaccccaacguggaccccaacgccaaccccaacgccaaccccaacgccaaccccaacgccaaccccaacgccaaccccaacgccaaccccaacgccaaccccaacgccaaccccaacgccaaccccaacgccaaccccaacgccaaccccaacgccaaccccaacgccaaccccaacgccaaccccaacgccaaccccaacgccaaccccaacgccaaccccaacgccaaccccaacaagaacaaccagggcaacggccagggccacaacaugcccaacgaccccaacagaaacguggacgagaacgccaacgccaacagcgccgugaagaacaacaacaacgaggagcccagcgacaagcacaucaaggaguaccugaacaagauccagaacagccugagcaccgaguggagccccugcagcgugaccugcggcaacggcauccaggugagaaucaagcccggcagcgccaacaagcccaaggacgagcuggacuacgccaacgacaucgagaagaagaucugcaagauggagaagugcagcagcguguucaacguggugaacagcagcaucggccugaucauggugcugagcuuccuguuccugaacugaggacuagugcaucacauuuaaaagcaucucagccuaccaugagaauaagagaaagaaaaugaagaucaauagcuuauucaucucuuuuucuuuuucguugguguaaagccaacacccugucuaaaaaacauaaauuucuuuaaucauuuugccucuuuucucugugcuucaauuaauaaaaaauggaaagaaccuagaucuaaaaaaaaaaaaaaaaaaaaaaaaaaaaaaaaaaaaaaaaaaaaaaaaaaaaaaaaaaaaaaaaugcaucccccccccccccccccccccccccccccccaaaggcucuuuucagagccaccagaauu

SEQ ID NO: 1065 - RNA, 1594 nt, Artificial Sequence
  mRNA Design i-2 (A64-N5-C30-hSL-N5) comprising derived and/or modified sequence from Pf(3D7)__XP_001351122.1__HsIns-iso1_Pf-CSP(19-397) (opt4)
ggggcgcugccuacggagguggcagccaucuccuucucggcaucaagcuuaccauggcccuguggaugagacugcugccccugcuggcccugcuggcccuguggggccccgaccccgccgccgcccuguuccaggaguaccagugcuacggcagcagcagcaacaccagagugcugaacgagcugaacuacgacaacgccggcaccaaccuguacaacgagcuggagaugaacuacuacggcaagcaggagaacugguacagccugaagaagaacagcagaagccugggcgagaacgacgacggcaacaacgaggacaacgagaagcugagaaagcccaagcacaagaagcugaagcagcccgccgacggcaaccccgaccccaacgccaaccccaacguggaccccaacgccaaccccaacguggaccccaacgccaaccccaacguggaccccaacgccaaccccaacgccaaccccaacgccaaccccaacgccaaccccaacgccaaccccaacgccaaccccaacgccaaccccaacgccaaccccaacgccaaccccaacgccaaccccaacgccaaccccaacgccaaccccaacgccaaccccaacgccaaccccaacgccaaccccaacgccaaccccaacgccaaccccaacguggaccccaacgccaaccccaacgccaaccccaacgccaaccccaacgccaaccccaacgccaaccccaacgccaaccccaacgccaaccccaacgccaaccccaacgccaaccccaacgccaaccccaacgccaaccccaacgccaaccccaacgccaaccccaacgccaaccccaacgccaaccccaacgccaaccccaacgccaaccccaacgccaaccccaacaagaacaaccagggcaacggccagggccacaacaugcccaacgaccccaacagaaacguggacgagaacgccaacgccaacagcgccgugaagaacaacaacaacgaggagcccagcgacaagcacaucaaggaguaccugaacaagauccagaacagccugagcaccgaguggagccccugcagcgugaccugcggcaacggcauccaggugagaaucaagcccggcagcgccaacaagcccaaggacgagcuggacuacgccaacgacaucgagaagaagaucugcaagauggagaagugcagcagcguguucaacguggugaacagcagcaucggccugaucauggugcugagcuuccuguuccugaacugaggacuagugcaucacauuuaaaagcaucucagccuaccaugagaauaagagaaagaaaaugaagaucaauagcuuauucaucucuuuuucuuuuucguugguguaaagccaacacccugucuaaaaaacauaaauuucuuuaaucauuuugccucuuuucucugugcuucaauuaauaaaaaauggaaagaaccuagaucuaaaaaaaaaaaaaaaaaaaaaaaaaaaaaaaaaaaaaaaaaaaaaaaaaaaaaaaaaaaaaaaaugcaucccccccccccccccccccccccccccccccaaaggcucuuuucagagccaccagaauu

SEQ ID NO: 1066 - RNA, 1573 nt, Artificial Sequence
  mRNA Design i-2 (A64-N5-C30-hSL-N5) comprising derived and/or modified sequence from Pf(3D7)__XP_001351122.1__HsSPARC_Pf-CSP(19-397) (opt4)
ggggcgcugccuacggagguggcagccaucuccuucucggcaucaagcuuaccaugagagccuggaucuucuuccugcugugccuggccggcagagcccuggcccuguuccaggaguaccagugcuacggcagcagcagcaacaccagagugcugaacgagcugaacuacgacaacgccggcaccaaccuguacaacgagcuggagaugaacuacuacggcaagcaggagaacugguacagccugaagaagaacagcagaagccugggcgagaacgacgacggcaacaacgaggacaacgagaagcugagaaagcccaagcacaagaagcugaagcagcccgccgacggcaaccccgaccccaacgccaaccccaacguggaccccaacgccaaccccaacguggaccccaacgccaaccccaacguggaccccaacgccaaccccaacgccaaccccaacgccaaccccaacgccaaccccaacgccaaccccaacgccaaccccaacgccaaccccaacgccaaccccaacgccaaccccaacgccaaccccaacgccaaccccaacgccaaccccaacgccaaccccaacgccaaccccaacgccaaccccaacgccaaccccaacgccaaccccaacguggaccccaacgccaaccccaacgccaaccccaacgccaaccccaacgccaaccccaacgccaaccccaacgccaaccccaacgccaaccccaacgccaaccccaacgccaaccccaacgccaaccccaacgccaaccccaacgccaaccccaacgccaaccccaacgccaaccccaacgccaaccccaacgccaaccccaacgccaaccccaacgccaaccccaacaagaacaaccagggcaacggccagggccacaacaugcccaacgaccccaacagaaacguggacgagaacgccaacgccaacagcgccgugaagaacaacaacaacgaggagcccagcgacaagcacaucaaggaguaccugaacaagauccagaacagccugagcaccgaguggagccccugcagcgugaccugcggcaacggcauccaggugagaaucaagcccggcagcgccaacaagcccaaggacgagcuggacuacgccaacgacaucgagaagaagaucugcaagauggagaagugcagcagcguguucaacguggugaacagcagcaucggccugaucauggugcugagcuuccuguuccugaacugaggacuagugcaucacauuuaaaagcaucucagccuaccaugagaauaagagaaagaaaaugaagaucaauagcuuauucaucucuuuuucuuuuucguugguguaaagccaacacccugucuaaaaaacauaaauuucuuuaaucauuuugccucuuuucucugugcuucaauuaauaaaaaauggaaagaaccuagaucuaaaaaaaaaaaaaaaaaaaaaaaaaaaaaaaaaaaaaaaaaaaaaaaaaaaaaaaaaaaaaaaaugcaucccccccccccccccccccccccccccccccaaaggcucuuuucagagccaccagaauu

SEQ ID NO: 1067 - RNA, 1576 nt, Artificial Sequence
  mRNA Design i-2 (A64-N5-C30-hSL-N5) comprising derived and/or modified sequence from Pf(3D7)__XP_001351122.1__IgE_Pf-CSP(19-397) (opt4)
ggggcgcugccuacggagguggcagccaucuccuucucggcaucaagcuuaccauggacuggaccuggauccuguuccugguggccgccgccaccagagugcacagccuguuccaggaguaccagugcuacggcagcagcagcaacaccagagugcugaacgagcugaacuacgacaacgccggcaccaaccuguacaacgagcuggagaugaacuacuacggcaagcaggagaacugguacagccugaagaagaacagcagaagccugggcgagaacgacgacggcaacaacgaggacaacgagaagcugagaaagcccaagcacaagaagcugaagcagcccgccgacggcaaccccgaccccaacgccaaccccaacguggaccccaacgccaaccccaacguggaccccaacgccaaccccaacguggaccccaacgccaaccccaacgccaaccccaacgccaaccccaacgccaaccccaacgccaaccccaacgccaaccccaacgccaaccccaacgccaaccccaacgccaaccccaacgccaaccccaacgccaaccccaacgccaaccccaacgccaaccccaacgccaaccccaacgccaaccccaacgccaaccccaacgccaaccccaacguggaccccaacgccaaccccaacgccaaccccaacgccaaccccaacgccaaccccaacgccaaccccaacgccaaccccaacgccaaccccaacgccaaccccaacgccaaccccaacgccaaccccaacgccaaccccaacgccaaccccaacgccaaccccaacgccaaccccaacgccaaccccaacgccaaccccaacgccaaccccaacgccaaccccaacaagaacaaccagggcaacggccagggccacaacaugcccaacgaccccaacagaaacguggacgagaacgccaacgccaacagcgccgugaagaacaacaacaacgaggagcccagcgacaagcacaucaaggaguaccugaacaagauccagaacagccugagcaccgaguggagccccugcagcgugaccugcggcaacggcauccaggugagaaucaagcccggcagcgccaacaagcccaaggacgagcuggacuacgccaacgacaucgagaagaagaucugcaagauggagaagugcagcagcguguucaacguggugaacagcagcaucggccugaucauggugcugagcuuccuguuccugaacugaggacuagugcaucacauuuaaaagcaucucagccuaccaugagaauaagagaaagaaaaugaagaucaauagcuuauucaucucuuuuucuuuuucguugguguaaagccaacacccugucuaaaaaacauaaauuucuuuaaucauuuugccucuuuucucugugcuucaauuaauaaaaaauggaaagaaccuagaucuaaaaaaaaaaaaaaaaaaaaaaaaaaaaaaaaaaaaaaaaaaaaaaaaaaaaaaaaaaaaaaaaugcaucccccccccccccccccccccccccccccccaaaggcucuuuucagagccaccagaauu

SEQ ID NO: 1068 - RNA, 1741 nt, Artificial Sequence
  mRNA Design i-2 (A64-N5-C30-hSL-N5) comprising derived and/or modified sequence from Pf(3D7)__XP_001351122.1__Pf-CSP_L(G4SG4)_TM domain HA (opt4)
ggggcgcugccuacggagguggcagccaucuccuucucggcaucaagcuuaccaugaugagaaagcuggccauccugagcgugagcagcuuccuguucguggaggcccuguuccaggaguaccagugcuacggcagcagcagcaacaccagagugcugaacgagcugaacuacgacaacgccggcaccaaccuguacaacgagcuggagaugaacuacuacggcaagcaggagaacugguacagccugaagaagaacagcagaagccugggcgagaacgacgacggcaacaacgaggacaacgagaagcugagaaagcccaagcacaagaagcugaagcagcccgccgacggcaaccccgaccccaacgccaaccccaacguggaccccaacgccaaccccaacguggaccccaacgccaaccccaacguggaccccaacgccaaccccaacgccaaccccaacgccaaccccaacgccaaccccaacgccaaccccaacgccaaccccaacgccaaccccaacgccaaccccaacgccaaccccaacgccaaccccaacgccaaccccaacgccaaccccaacgccaaccccaacgccaaccccaacgccaaccccaacgccaaccccaacgccaaccccaacguggaccccaacgccaaccccaacgccaaccccaacgccaaccccaacgccaaccccaacgccaaccccaacgccaaccccaacgccaaccccaacgccaaccccaacgccaaccccaacgccaaccccaacgccaaccccaacgccaaccccaacgccaaccccaacgccaaccccaacgccaaccccaacgccaaccccaacgccaaccccaacgccaaccccaacaagaacaaccagggcaacggccagggccacaacaugcccaacgaccccaacagaaacguggacgagaacgccaacgccaacagcgccgugaagaacaacaacaacgaggagcccagcgacaagcacaucaaggaguaccugaacaagauccagaacagccugagcaccgaguggagccccugcagcgugaccugcggcaacggcauccaggugagaaucaagcccggcagcgccaacaagcccaaggacgagcuggacuacgccaacgacaucgagaagaagaucugcaagauggagaagugcagcagcguguucaacguggugaacagcagcaucggccugaucauggugcugagcuuccuguuccugaacggcggcggcggcagcggcggcggcggcaagcuggagagcaccagaaucuaccagauccuggccaucuacagcaccguggccagcagccuggugcugguggugagccugggcgccaucagcuucuggaugugcagcaacggcagccugcagugcagaaucugcaucugaggacuagugcaucacauuuaaaagcaucucagccuaccaugagaauaagagaaagaaaaugaagaucaauagcuuauucaucucuuuuucuuuuucguugguguaaagccaacacccugucuaaaaaacauaaauuucuuuaaucauuuugccucuuuucucugugcuucaauuaauaaaaaauggaaagaaccuagaucuaaaaaaaaaaaaaaaaaaaaaaaaaaaaaaaaaaaaaaaaaaaaaaaaaaaaaaaaaaaaaaaaugcaucccccccccccccccccccccccccccccccaaaggcucuuuucagagccaccagaauu

SEQ ID NO: 1069 - RNA, 1615 nt, Artificial Sequence
  mRNA Design i-2 (A64-N5-C30-hSL-N5) comprising derived and/or modified sequence from Pf(3D7)__XP_001351122.1__Pf-CSP(199-377)_L(PVTN)_HBsAg (opt4)
ggggcgcugccuacggagguggcagccaucuccuucucggcaucaagcuuaccauggaccccaacgccaaccccaacgccaaccccaacgccaaccccaacgccaaccccaacgccaaccccaacgccaaccccaacgccaaccccaacgccaaccccaacgccaaccccaacgccaaccccaacgccaaccccaacgccaaccccaacgccaaccccaacgccaaccccaacgccaaccccaacgccaaccccaacgccaaccccaacgccaaccccaacaagaacaaccagggcaacggccagggccacaacaugcccaacgaccccaacagaaacguggacgagaacgccaacgccaacagcgccgugaagaacaacaacaacgaggagcccagcgacaagcacaucaaggaguaccugaacaagauccagaacagccugagcaccgaguggagccccugcagcgugaccugcggcaacggcauccaggugagaaucaagcccggcagcgccaacaagcccaaggacgagcuggacuacgccaacgacaucgagaagaagaucugcaagauggagaagugcagcagcgugcccgugaccaacauggagaacaucaccagcggcuuccugggcccccugcuggugcugcaggccggcuucuuccugcugaccagaauccugaccaucccccagagccuggacagcugguggaccagccugaacuuccugggcggcagccccgugugccugggccagaacagccagagccccaccagcaaccacagccccaccagcugcccccccaucugccccggcuacagauggaugugccugagaagauucaucaucuuccuguucauccugcugcugugccugaucuuccugcuggugcugcuggacuaccagggcaugcugcccgugugcccccugauccccggcagcaccaccaccaacaccggccccugcaagaccugcaccacccccgcccagggcaacagcauguuccccagcugcugcugcaccaagcccaccgacggcaacugcaccugcauccccauccccagcagcugggccuucgccaaguaccugugggagugggccagcgugagauucagcuggcugagccugcuggugcccuucgugcagugguucgugggccugagccccaccguguggcugagcgccaucuggaugaugugguacuggggccccagccuguacagcaucgugagccccuucaucccccugcugcccaucuucuucugccuguggguguacaucugaggacuagugcaucacauuuaaaagcaucucagccuaccaugagaauaagagaaagaaaaugaagaucaauagcuuauucaucucuuuuucuuuuucguugguguaaagccaacacccugucuaaaaaacauaaauuucuuuaaucauuuugccucuuuucucugugcuucaauuaauaaaaaauggaaagaaccuagaucuaaaaaaaaaaaaaaaaaaaaaaaaaaaaaaaaaaaaaaaaaaaaaaaaaaaaaaaaaaaaaaaaugcaucccccccccccccccccccccccccccccccaaaggcucuuuucagagccaccagaauu

SEQ ID NO: 1070 - RNA, 1657 nt, Artificial Sequence
  mRNA Design i-2 (A64-N5-C30-hSL-N5) comprising derived and/or modified sequence from Pf(3D7)__XP_001351122.1__Pf-CSP(199-387)_L(PVTN)_HBsAg (opt4)
ggggcgcugccuacggagguggcagccaucuccuucucggcaucaagcuuaccaugauggcccccgaccccaacgccaaccccaacgccaaccccaacgccaaccccaacgccaaccccaacgccaaccccaacgccaaccccaacgccaaccccaacgccaaccccaacgccaaccccaacgccaaccccaacgccaaccccaacgccaaccccaacgccaaccccaacgccaaccccaacgccaaccccaacgccaaccccaacgccaaccccaacgccaaccccaacaagaacaaccagggcaacggccagggccacaacaugcccaacgaccccaacagaaacguggacgagaacgccaacgccaacagcgccgugaagaacaacaacaacgaggagcccagcgacaagcacaucaaggaguaccugaacaagauccagaacagccugagcaccgaguggagccccugcagcgugaccugcggcaacggcauccaggugagaaucaagcccggcagcgccaacaagcccaaggacgagcuggacuacgccaacgacaucgagaagaagaucugcaagauggagaagugcagcagcguguucaacguggugaacagcagcaucggccugggccccgugaccaacauggagaacaucaccagcggcuuccugggcccccugcuggugcugcaggccggcuucuuccugcugaccagaauccugaccaucccccagagccuggacagcugguggaccagccugaacuuccugggcggcagccccgugugccugggccagaacagccagagccccaccagcaaccacagccccaccagcugcccccccaucugccccggcuacagauggaugugccugagaagauucaucaucuuccuguucauccugcugcugugccugaucuuccugcuggugcugcuggacuaccagggcaugcugcccgugugcccccugauccccggcagcaccaccaccaacaccggccccugcaagaccugcaccacccccgcccagggcaacagcauguuccccagcugcugcugcaccaagcccaccgacggcaacugcaccugcauccccauccccagcagcugggccuucgccaaguaccugugggagugggccagcgugagauucagcuggcugagccugcuggugcccuucgugcagugguucgugggccugagccccaccguguggcugagcgccaucuggaugaugugguacuggggccccagccuguacagcaucgugagccccuucaucccccugcugcccaucuucuucugccuguggguguacaucugaggacuagugcaucacauuuaaaagcaucucagccuaccaugagaauaagagaaagaaaaugaagaucaauagcuuauucaucucuuuuucuuuuucguugguguaaagccaacacccugucuaaaaaacauaaauuucuuuaaucauuuugccucuuuucucugugcuucaauuaauaaaaaauggaaagaaccuagaucuaaaaaaaaaaaaaaaaaaaaaaaaaaaaaaaaaaaaaaaaaaaaaaaaaaaaaaaaaaaaaaaaugcaucccccccccccccccccccccccccccccccaaaggcucuuuucagagccaccagaauu

SEQ ID NO: 1071 - RNA, 841 nt, Artificial Sequence
  mRNA Design i-2 (A64-N5-C30-hSL-N5) comprising derived and/or modified sequence from Pf(3D7)__XP_001351122.1__HsALB_Pf-CSP(19-152) (opt4)
ggggcgcugccuacggagguggcagccaucuccuucucggcaucaagcuuaccaugaagugggugaccuucaucagccugcuguuccuguucagcagcgccuacagccuguuccaggaguaccagugcuacggcagcagcagcaacaccagagugcugaacgagcugaacuacgacaacgccggcaccaaccuguacaacgagcuggagaugaacuacuacggcaagcaggagaacugguacagccugaagaagaacagcagaagccugggcgagaacgacgacggcaacaacgaggacaacgagaagcugagaaagcccaagcacaagaagcugaagcagcccgccgacggcaaccccgaccccaacgccaaccccaacguggaccccaacgccaaccccaacguggaccccaacgccaaccccaacguggaccccaacgccaaccccaacgccaaccccaacgccaaccccaacgccaaccccaacgccaaccccaacgccaaccccugaggacuagugcaucacauuuaaaagcaucucagccuaccaugagaauaagagaaagaaaaugaagaucaauagcuuauucaucucuuuuucuuuuucguugguguaaagccaacacccugucuaaaaaacauaaauuucuuuaaucauuuugccucuuuucucugugcuucaauuaauaaaaaauggaaagaaccuagaucuaaaaaaaaaaaaaaaaaaaaaaaaaaaaaaaaaaaaaaaaaaaaaaaaaaaaaaaaaaaaaaaaugcaucccccccccccccccccccccccccccccccaaaggcucuuuucagagccaccagaauu

SEQ ID NO: 1072 - RNA, 961 nt, Artificial Sequence
  mRNA Design i-2 (A64-N5-C30-hSL-N5) comprising derived and/or modified sequence from Pf(3D7)__XP_001351122.1__HsALB_Pf-CSP(19-192) (opt4)
ggggcgcugccuacggagguggcagccaucuccuucucggcaucaagcuuaccaugaagugggugaccuucaucagccugcuguuccuguucagcagcgccuacagccuguuccaggaguaccagugcuacggcagcagcagcaacaccagagugcugaacgagcugaacuacgacaacgccggcaccaaccuguacaacgagcuggagaugaacuacuacggcaagcaggagaacugguacagccugaagaagaacagcagaagccugggcgagaacgacgacggcaacaacgaggacaacgagaagcugagaaagcccaagcacaagaagcugaagcagcccgccgacggcaaccccgaccccaacgccaaccccaacguggaccccaacgccaaccccaacguggaccccaacgccaaccccaacguggaccccaacgccaaccccaacgccaaccccaacgccaaccccaacgccaaccccaacgccaaccccaacgccaaccccaacgccaaccccaacgccaaccccaacgccaaccccaacgccaaccccaacgccaaccccaacgccaaccccaacgccaaccccaacgccaaccccaacgccaaccccaacgccaaccccugaggacuagugcaucacauuuaaaagcaucucagccuaccaugagaauaagagaaagaaaaugaagaucaauagcuuauucaucucuuuuucuuuuucguugguguaaagccaacacccugucuaaaaaacauaaauuucuuuaaucauuuugccucuuuucucugugcuucaauuaauaaaaaauggaaagaaccuagaucuaaaaaaaaaaaaaaaaaaaaaaaaaaaaaaaaaaaaaaaaaaaaaaaaaaaaaaaaaaaaaaaaugcaucccccccccccccccccccccccccccccccaaaggcucuuuucagagccaccagaauu

SEQ ID NO: 1073 - RNA, 1201 nt, Artificial Sequence
  mRNA Design i-2 (A64-N5-C30-hSL-N5) comprising derived and/or modified sequence from Pf(3D7)__XP_001351122.1__HsALB_Pf-CSP(19-272) (opt4)
ggggcgcugccuacggagguggcagccaucuccuucucggcaucaagcuuaccaugaagugggugaccuucaucagccugcuguuccuguucagcagcgccuacagccuguuccaggaguaccagugcuacggcagcagcagcaacaccagagugcugaacgagcugaacuacgacaacgccggcaccaaccuguacaacgagcuggagaugaacuacuacggcaagcaggagaacugguacagccugaagaagaacagcagaagccugggcgagaacgacgacggcaacaacgaggacaacgagaagcugagaaagcccaagcacaagaagcugaagcagcccgccgacggcaaccccgaccccaacgccaaccccaacguggaccccaacgccaaccccaacguggaccccaacgccaaccccaacguggaccccaacgccaaccccaacgccaaccccaacgccaaccccaacgccaaccccaacgccaaccccaacgccaaccccaacgccaaccccaacgccaaccccaacgccaaccccaacgccaaccccaacgccaaccccaacgccaaccccaacgccaaccccaacgccaaccccaacgccaaccccaacgccaaccccaacgccaaccccaacguggaccccaacgccaaccccaacgccaaccccaacgccaaccccaacgccaaccccaacgccaaccccaacgccaaccccaacgccaaccccaacgccaaccccaacgccaaccccaacgccaaccccaacgccaaccccaacgccaaccccaacgccaaccccaacgccaaccccaacgccaaccccaacgccaaccccaacgccaaccccaacgccaaccccugaggacuagugcaucacauuuaaaagcaucucagccuaccaugagaauaagagaaagaaaaugaagaucaauagcuuauucaucucuuuuucuuuuucguugguguaaagccaacacccugucuaaaaaacauaaauuucuuuaaucauuuugccucuuuucucugugcuucaauuaauaaaaaauggaaagaaccuagaucuaaaaaaaaaaaaaaaaaaaaaaaaaaaaaaaaaaaaaaaaaaaaaaaaaaaaaaaaaaaaaaaaugcaucccccccccccccccccccccccccccccccaaaggcucuuuucagagccaccagaauu

SEQ ID NO: 1074 - RNA, 1363 nt, Artificial Sequence
  mRNA Design i-2 (A64-N5-C30-hSL-N5) comprising derived and/or modified sequence from Pf(3D7)__XP_001351122.1__HsALB_Pf-CSP(19-272)_L(AAY)_Pf-CSP(310-3 27)_L(AAY)_Pf-CSP(346-375) (opt4)
ggggcgcugccuacggagguggcagccaucuccuucucggcaucaagcuuaccaugaagugggugaccuucaucagccugcuguuccuguucagcagcgccuacagccuguuccaggaguaccagugcuacggcagcagcagcaacaccagagugcugaacgagcugaacuacgacaacgccggcaccaaccuguacaacgagcuggagaugaacuacuacggcaagcaggagaacugguacagccugaagaagaacagcagaagccugggcgagaacgacgacggcaacaacgaggacaacgagaagcugagaaagcccaagcacaagaagcugaagcagcccgccgacggcaaccccgaccccaacgccaaccccaacguggaccccaacgccaaccccaacguggaccccaacgccaaccccaacguggaccccaacgccaaccccaacgccaaccccaacgccaaccccaacgccaaccccaacgccaaccccaacgccaaccccaacgccaaccccaacgccaaccccaacgccaaccccaacgccaaccccaacgccaaccccaacgccaaccccaacgccaaccccaacgccaaccccaacgccaaccccaacgccaaccccaacgccaaccccaacguggaccccaacgccaaccccaacgccaaccccaacgccaaccccaacgccaaccccaacgccaaccccaacgccaaccccaacgccaaccccaacgccaaccccaacgccaaccccaacgccaaccccaacgccaaccccaacgccaaccccaacgccaaccccaacgccaaccccaacgccaaccccaacgccaaccccaacgccaaccccaacgccaaccccgccgccuacgagcccagcgacaagcacaucaaggaguaccugaacaagauccagaacagccuggccgccuacaucaagcccggcagcgccaacaagcccaaggacgagcuggacuacgccaacgacaucgagaagaagaucugcaagauggagaagugcagcugaggacuagugcaucacauuuaaaagcaucucagccuaccaugagaauaagagaaagaaaaugaagaucaauagcuuauucaucucuuuuucuuuuucguugguguaaagccaacacccugucuaaaaaacauaaauuucuuuaaucauuuugccucuuuucucugugcuucaauuaauaaaaaauggaaagaaccuagaucuaaaaaaaaaaaaaaaaaaaaaaaaaaaaaaaaaaaaaaaaaaaaaaaaaaaaaaaaaaaaaaaaugcaucccccccccccccccccccccccccccccccaaaggcucuuuucagagccaccagaauu

SEQ ID NO: 1075 - RNA, 1324 nt, Artificial Sequence
  mRNA Design i-2 (A64-N5-C30-hSL-N5) comprising derived and/or modified sequence from Pf(3D7)__XP_001351122.1__HsALB_Pf-CSP(19-272)_L(AAY)_Pf-CSP(346-3 65)_L(AAY)_P2 (opt4)
ggggcgcugccuacggagguggcagccaucuccuucucggcaucaagcuuaccaugaagugggugaccuucaucagccugcuguuccuguucagcagcgccuacagccuguuccaggaguaccagugcuacggcagcagcagcaacaccagagugcugaacgagcugaacuacgacaacgccggcaccaaccuguacaacgagcuggagaugaacuacuacggcaagcaggagaacugguacagccugaagaagaacagcagaagccugggcgagaacgacgacggcaacaacgaggacaacgagaagcugagaaagcccaagcacaagaagcugaagcagcccgccgacggcaaccccgaccccaacgccaaccccaacguggaccccaacgccaaccccaacguggaccccaacgccaaccccaacguggaccccaacgccaaccccaacgccaaccccaacgccaaccccaacgccaaccccaacgccaaccccaacgccaaccccaacgccaaccccaacgccaaccccaacgccaaccccaacgccaaccccaacgccaaccccaacgccaaccccaacgccaaccccaacgccaaccccaacgccaaccccaacgccaaccccaacgccaaccccaacguggaccccaacgccaaccccaacgccaaccccaacgccaaccccaacgccaaccccaacgccaaccccaacgccaaccccaacgccaaccccaacgccaaccccaacgccaaccccaacgccaaccccaacgccaaccccaacgccaaccccaacgccaaccccaacgccaaccccaacgccaaccccaacgccaaccccaacgccaaccccaacgccaaccccgccgccuacaucaagcccggcagcgccaacaagcccaaggacgagcuggacuacgccaacgacaucgaggccgccuaccaguacaucaaggccaacagcaaguucaucggcaucaccgagcugugaggacuagugcaucacauuuaaaagcaucucagccuaccaugagaauaagagaaagaaaaugaagaucaauagcuuauucaucucuuuuucuuuuucguugguguaaagccaacacccugucuaaaaaacauaaauuucuuuaaucauuuugccucuuuucucugugcuucaauuaauaaaaaauggaaagaaccuagaucuaaaaaaaaaaaaaaaaaaaaaaaaaaaaaaaaaaaaaaaaaaaaaaaaaaaaaaaaaaaaaaaaugcaucccccccccccccccccccccccccccccccaaaggcucuuuucagagccaccagaauu

SEQ ID NO: 1076 - RNA, 1318 nt, Artificial Sequence
  mRNA Design i-2 (A64-N5-C30-hSL-N5) comprising derived and/or modified sequence from Pf(3D7)__XP_001351122.1__HsALB_Pf-CSP(19-272)_L(AAY)_Pf-CSP(346-3 65)_L(AAY)_PADRE (opt4)
ggggcgcugccuacggagguggcagccaucuccuucucggcaucaagcuuaccaugaagugggugaccuucaucagccugcuguuccuguucagcagcgccuacagccuguuccaggaguaccagugcuacggcagcagcagcaacaccagagugcugaacgagcugaacuacgacaacgccggcaccaaccuguacaacgagcuggagaugaacuacuacggcaagcaggagaacugguacagccugaagaagaacagcagaagccugggcgagaacgacgacggcaacaacgaggacaacgagaagcugagaaagcccaagcacaagaagcugaagcagcccgccgacggcaaccccgaccccaacgccaaccccaacguggaccccaacgccaaccccaacguggaccccaacgccaaccccaacguggaccccaacgccaaccccaacgccaaccccaacgccaaccccaacgccaaccccaacgccaaccccaacgccaaccccaacgccaaccccaacgccaaccccaacgccaaccccaacgccaaccccaacgccaaccccaacgccaaccccaacgccaaccccaacgccaaccccaacgccaaccccaacgccaaccccaacgccaaccccaacguggaccccaacgccaaccccaacgccaaccccaacgccaaccccaacgccaaccccaacgccaaccccaacgccaaccccaacgccaaccccaacgccaaccccaacgccaaccccaacgccaaccccaacgccaaccccaacgccaaccccaacgccaaccccaacgccaaccccaacgccaaccccaacgccaaccccaacgccaaccccaacgccaaccccgccgccuacaucaagcccggcagcgccaacaagcccaaggacgagcuggacuacgccaacgacaucgaggccgccuacgccaaguucguggccgccuggacccugaaggccgccgccugaggacuagugcaucacauuuaaaagcaucucagccuaccaugagaauaagagaaagaaaaugaagaucaauagcuuauucaucucuuuuucuuuuucguugguguaaagccaacacccugucuaaaaaacauaaauuucuuuaaucauuuugccucuuuucucugugcuucaauuaauaaaaaauggaaagaaccuagaucuaaaaaaaaaaaaaaaaaaaaaaaaaaaaaaaaaaaaaaaaaaaaaaaaaaaaaaaaaaaaaaaaugcaucccccccccccccccccccccccccccccccaaaggcucuuuucagagccaccagaauu

SEQ ID NO: 1077 - RNA, 1375 nt, Artificial Sequence
  mRNA Design i-2 (A64-N5-C30-hSL-N5) comprising derived and/or modified sequence from Pf(3D7)__XP_001351122.1__HsALB_Pf-CSP(19-272)_L(G4S)_Pf-CSP(310-3 27)_L(G4S)_Pf-CSP(346-375) (opt4)
ggggcgcugccuacggagguggcagccaucuccuucucggcaucaagcuuaccaugaagugggugaccuucaucagccugcuguuccuguucagcagcgccuacagccuguuccaggaguaccagugcuacggcagcagcagcaacaccagagugcugaacgagcugaacuacgacaacgccggcaccaaccuguacaacgagcuggagaugaacuacuacggcaagcaggagaacugguacagccugaagaagaacagcagaagccugggcgagaacgacgacggcaacaacgaggacaacgagaagcugagaaagcccaagcacaagaagcugaagcagcccgccgacggcaaccccgaccccaacgccaaccccaacguggaccccaacgccaaccccaacguggaccccaacgccaaccccaacguggaccccaacgccaaccccaacgccaaccccaacgccaaccccaacgccaaccccaacgccaaccccaacgccaaccccaacgccaaccccaacgccaaccccaacgccaaccccaacgccaaccccaacgccaaccccaacgccaaccccaacgccaaccccaacgccaaccccaacgccaaccccaacgccaaccccaacgccaaccccaacguggaccccaacgccaaccccaacgccaaccccaacgccaaccccaacgccaaccccaacgccaaccccaacgccaaccccaacgccaaccccaacgccaaccccaacgccaaccccaacgccaaccccaacgccaaccccaacgccaaccccaacgccaaccccaacgccaaccccaacgccaaccccaacgccaaccccaacgccaaccccaacgccaaccccggcggcggcggcagcgagcccagcgacaagcacaucaaggaguaccugaacaagauccagaacagccugggcggcggcggcagcaucaagcccggcagcgccaacaagcccaaggacgagcuggacuacgccaacgacaucgagaagaagaucugcaagauggagaagugcagcugaggacuagugcaucacauuuaaaagcaucucagccuaccaugagaauaagagaaagaaaaugaagaucaauagcuuauucaucucuuuuucuuuuucguugguguaaagccaacacccugucuaaaaaacauaaauuucuuuaaucauuuugccucuuuucucugugcuucaauuaauaaaaaauggaaagaaccuagaucuaaaaaaaaaaaaaaaaaaaaaaaaaaaaaaaaaaaaaaaaaaaaaaaaaaaaaaaaaaaaaaaaugcaucccccccccccccccccccccccccccccccaaaggcucuuuucagagccaccagaauu

SEQ ID NO: 1078 - RNA, 1360 nt, Artificial Sequence
  mRNA Design i-2 (A64-N5-C30-hSL-N5) comprising derived and/or modified sequence from Pf(3D7)__XP_001351122.1__HsALB_Pf-CSP(19-272)_L(G4S)_Pf-CSP(310-3 27)_Pf-CSP(346-375) (opt4)
ggggcgcugccuacggagguggcagccaucuccuucucggcaucaagcuuaccaugaagugggugaccuucaucagccugcuguuccuguucagcagcgccuacagccuguuccaggaguaccagugcuacggcagcagcagcaacaccagagugcugaacgagcugaacuacgacaacgccggcaccaaccuguacaacgagcuggagaugaacuacuacggcaagcaggagaacugguacagccugaagaagaacagcagaagccugggcgagaacgacgacggcaacaacgaggacaacgagaagcugagaaagcccaagcacaagaagcugaagcagcccgccgacggcaaccccgaccccaacgccaaccccaacguggaccccaacgccaaccccaacguggaccccaacgccaaccccaacguggaccccaacgccaaccccaacgccaaccccaacgccaaccccaacgccaaccccaacgccaaccccaacgccaaccccaacgccaaccccaacgccaaccccaacgccaaccccaacgccaaccccaacgccaaccccaacgccaaccccaacgccaaccccaacgccaaccccaacgccaaccccaacgccaaccccaacgccaaccccaacguggaccccaacgccaaccccaacgccaaccccaacgccaaccccaacgccaaccccaacgccaaccccaacgccaaccccaacgccaaccccaacgccaaccccaacgccaaccccaacgccaaccccaacgccaaccccaacgccaaccccaacgccaaccccaacgccaaccccaacgccaaccccaacgccaaccccaacgccaaccccaacgccaaccccggcggcggcggcagcgagcccagcgacaagcacaucaaggaguaccugaacaagauccagaacagccugaucaagcccggcagcgccaacaagcccaaggacgagcuggacuacgccaacgacaucgagaagaagaucugcaagauggagaagugcagcugaggacuagugcaucacauuuaaaagcaucucagccuaccaugagaauaagagaaagaaaaugaagaucaauagcuuauucaucucuuuuucuuuuucguugguguaaagccaacacccugucuaaaaaacauaaauuucuuuaaucauuuugccucuuuucucugugcuucaauuaauaaaaaauggaaagaaccuagaucuaaaaaaaaaaaaaaaaaaaaaaaaaaaaaaaaaaaaaaaaaaaaaaaaaaaaaaaaaaaaaaaaugcaucccccccccccccccccccccccccccccccaaaggcucuuuucagagccaccagaauu

SEQ ID NO: 1079 - RNA, 1360 nt, Artificial Sequence
  mRNA Design i-2 (A64-N5-C30-hSL-N5) comprising derived and/or modified sequence from Pf(3D7)__XP_001351122.1__HsALB_Pf-CSP(19-325) (opt4)
ggggcgcugccuacggagguggcagccaucuccuucucggcaucaagcuuaccaugaagugggugaccuucaucagccugcuguuccuguucagcagcgccuacagccuguuccaggaguaccagugcuacggcagcagcagcaacaccagagugcugaacgagcugaacuacgacaacgccggcaccaaccuguacaacgagcuggagaugaacuacuacggcaagcaggagaacugguacagccugaagaagaacagcagaagccugggcgagaacgacgacggcaacaacgaggacaacgagaagcugagaaagcccaagcacaagaagcugaagcagcccgccgacggcaaccccgaccccaacgccaaccccaacguggaccccaacgccaaccccaacguggaccccaacgccaaccccaacguggaccccaacgccaaccccaacgccaaccccaacgccaaccccaacgccaaccccaacgccaaccccaacgccaaccccaacgccaaccccaacgccaaccccaacgccaaccccaacgccaaccccaacgccaaccccaacgccaaccccaacgccaaccccaacgccaaccccaacgccaaccccaacgccaaccccaacgccaaccccaacguggaccccaacgccaaccccaacgccaaccccaacgccaaccccaacgccaaccccaacgccaaccccaacgccaaccccaacgccaaccccaacgccaaccccaacgccaaccccaacgccaaccccaacgccaaccccaacgccaaccccaacgccaaccccaacgccaaccccaacgccaaccccaacgccaaccccaacgccaaccccaacgccaaccccaacaagaacaaccagggcaacggccagggccacaacaugcccaacgaccccaacagaaacguggacgagaacgccaacgccaacagcgccgugaagaacaacaacaacgaggagcccagcgacaagcacaucaaggaguaccugaacaagauccagaacugaggacuagugcaucacauuuaaaagcaucucagccuaccaugagaauaagagaaagaaaaugaagaucaauagcuuauucaucucuuuuucuuuuucguugguguaaagccaacacccugucuaaaaaacauaaauuucuuuaaucauuuugccucuuuucucugugcuucaauuaauaaaaaauggaaagaaccuagaucuaaaaaaaaaaaaaaaaaaaaaaaaaaaaaaaaaaaaaaaaaaaaaaaaaaaaaaaaaaaaaaaaugcaucccccccccccccccccccccccccccccccaaaggcucuuuucagagccaccagaauu

SEQ ID NO: 1080 - RNA, 1537 nt, Artificial Sequence
  mRNA Design i-2 (A64-N5-C30-hSL-N5) comprising derived and/or modified sequence from Pf(3D7)__XP_001351122.1__HsALB_Pf-CSP(19-384) (opt4)
ggggcgcugccuacggagguggcagccaucuccuucucggcaucaagcuuaccaugaagugggugaccuucaucagccugcuguuccuguucagcagcgccuacagccuguuccaggaguaccagugcuacggcagcagcagcaacaccagagugcugaacgagcugaacuacgacaacgccggcaccaaccuguacaacgagcuggagaugaacuacuacggcaagcaggagaacugguacagccugaagaagaacagcagaagccugggcgagaacgacgacggcaacaacgaggacaacgagaagcugagaaagcccaagcacaagaagcugaagcagcccgccgacggcaaccccgaccccaacgccaaccccaacguggaccccaacgccaaccccaacguggaccccaacgccaaccccaacguggaccccaacgccaaccccaacgccaaccccaacgccaaccccaacgccaaccccaacgccaaccccaacgccaaccccaacgccaaccccaacgccaaccccaacgccaaccccaacgccaaccccaacgccaaccccaacgccaaccccaacgccaaccccaacgccaaccccaacgccaaccccaacgccaaccccaacgccaaccccaacguggaccccaacgccaaccccaacgccaaccccaacgccaaccccaacgccaaccccaacgccaaccccaacgccaaccccaacgccaaccccaacgccaaccccaacgccaaccccaacgccaaccccaacgccaaccccaacgccaaccccaacgccaaccccaacgccaaccccaacgccaaccccaacgccaaccccaacgccaaccccaacgccaaccccaacaagaacaaccagggcaacggccagggccacaacaugcccaacgaccccaacagaaacguggacgagaacgccaacgccaacagcgccgugaagaacaacaacaacgaggagcccagcgacaagcacaucaaggaguaccugaacaagauccagaacagccugagcaccgaguggagccccugcagcgugaccugcggcaacggcauccaggugagaaucaagcccggcagcgccaacaagcccaaggacgagcuggacuacgccaacgacaucgagaagaagaucugcaagauggagaagugcagcagcguguucaacguggugaacagcagcugaggacuagugcaucacauuuaaaagcaucucagccuaccaugagaauaagagaaagaaaaugaagaucaauagcuuauucaucucuuuuucuuuuucguugguguaaagccaacacccugucuaaaaaacauaaauuucuuuaaucauuuugccucuuuucucugugcuucaauuaauaaaaaauggaaagaaccuagaucuaaaaaaaaaaaaaaaaaaaaaaaaaaaaaaaaaaaaaaaaaaaaaaaaaaaaaaaaaaaaaaaaugcaucccccccccccccccccccccccccccccccaaaggcucuuuucagagccaccagaauu

SEQ ID NO: 1081 - RNA, 1675 nt, Artificial Sequence
  mRNA Design i-2 (A64-N5-C30-hSL-N5) comprising derived and/or modified sequence from Pf(3D7)__XP_001351122.1__HsALB_Pf-CSP(19-384)_TM domain HA (opt4)
ggggcgcugccuacggagguggcagccaucuccuucucggcaucaagcuuaccaugaagugggugaccuucaucagccugcuguuccuguucagcagcgccuacagccuguuccaggaguaccagugcuacggcagcagcagcaacaccagagugcugaacgagcugaacuacgacaacgccggcaccaaccuguacaacgagcuggagaugaacuacuacggcaagcaggagaacugguacagccugaagaagaacagcagaagccugggcgagaacgacgacggcaacaacgaggacaacgagaagcugagaaagcccaagcacaagaagcugaagcagcccgccgacggcaaccccgaccccaacgccaaccccaacguggaccccaacgccaaccccaacguggaccccaacgccaaccccaacguggaccccaacgccaaccccaacgccaaccccaacgccaaccccaacgccaaccccaacgccaaccccaacgccaaccccaacgccaaccccaacgccaaccccaacgccaaccccaacgccaaccccaacgccaaccccaacgccaaccccaacgccaaccccaacgccaaccccaacgccaaccccaacgccaaccccaacgccaaccccaacguggaccccaacgccaaccccaacgccaaccccaacgccaaccccaacgccaaccccaacgccaaccccaacgccaaccccaacgccaaccccaacgccaaccccaacgccaaccccaacgccaaccccaacgccaaccccaacgccaaccccaacgccaaccccaacgccaaccccaacgccaaccccaacgccaaccccaacgccaaccccaacgccaaccccaacaagaacaaccagggcaacggccagggccacaacaugcccaacgaccccaacagaaacguggacgagaacgccaacgccaacagcgccgugaagaacaacaacaacgaggagcccagcgacaagcacaucaaggaguaccugaacaagauccagaacagccugagcaccgaguggagccccugcagcgugaccugcggcaacggcauccaggugagaaucaagcccggcagcgccaacaagcccaaggacgagcuggacuacgccaacgacaucgagaagaagaucugcaagauggagaagugcagcagcguguucaacguggugaacagcagcaagcuggagagcaccagaaucuaccagauccuggccaucuacagcaccguggccagcagccuggugcugguggugagccugggcgccaucagcuucuggaugugcagcaacggcagccugcagugcagaaucugcaucugaggacuagugcaucacauuuaaaagcaucucagccuaccaugagaauaagagaaagaaaaugaagaucaauagcuuauucaucucuuuuucuuuuucguugguguaaagccaacacccugucuaaaaaacauaaauuucuuuaaucauuuugccucuuuucucugugcuucaauuaauaaaaaauggaaagaaccuagaucuaaaaaaaaaaaaaaaaaaaaaaaaaaaaaaaaaaaaaaaaaaaaaaaaaaaaaaaaaaaaaaaaugcaucccccccccccccccccccccccccccccccaaaggcucuuuucagagccaccagaauu

SEQ ID NO: 1082 - RNA, 1387 nt, Artificial Sequence
  mRNA Design i-2 (A64-N5-C30-hSL-N5) comprising derived and/or modified sequence from Pf(3D7)__XP_001351122.1__HsALB_Pf-CSP(82-397) (opt4)
ggggcgcugccuacggagguggcagccaucuccuucucggcaucaagcuuaccaugaagugggugaccuucaucagccugcuguuccuguucagcagcgccuacagcgacaacgagaagcugagaaagcccaagcacaagaagcugaagcagcccgccgacggcaaccccgaccccaacgccaaccccaacguggaccccaacgccaaccccaacguggaccccaacgccaaccccaacguggaccccaacgccaaccccaacgccaaccccaacgccaaccccaacgccaaccccaacgccaaccccaacgccaaccccaacgccaaccccaacgccaaccccaacgccaaccccaacgccaaccccaacgccaaccccaacgccaaccccaacgccaaccccaacgccaaccccaacgccaaccccaacgccaaccccaacgccaaccccaacguggaccccaacgccaaccccaacgccaaccccaacgccaaccccaacgccaaccccaacgccaaccccaacgccaaccccaacgccaaccccaacgccaaccccaacgccaaccccaacgccaaccccaacgccaaccccaacgccaaccccaacgccaaccccaacgccaaccccaacgccaaccccaacgccaaccccaacgccaaccccaacgccaaccccaacaagaacaaccagggcaacggccagggccacaacaugcccaacgaccccaacagaaacguggacgagaacgccaacgccaacagcgccgugaagaacaacaacaacgaggagcccagcgacaagcacaucaaggaguaccugaacaagauccagaacagccugagcaccgaguggagccccugcagcgugaccugcggcaacggcauccaggugagaaucaagcccggcagcgccaacaagcccaaggacgagcuggacuacgccaacgacaucgagaagaagaucugcaagauggagaagugcagcagcguguucaacguggugaacagcagcaucggccugaucauggugcugagcuuccuguuccugaacugaggacuagugcaucacauuuaaaagcaucucagccuaccaugagaauaagagaaagaaaaugaagaucaauagcuuauucaucucuuuuucuuuuucguugguguaaagccaacacccugucuaaaaaacauaaauuucuuuaaucauuuugccucuuuucucugugcuucaauuaauaaaaaauggaaagaaccuagaucuaaaaaaaaaaaaaaaaaaaaaaaaaaaaaaaaaaaaaaaaaaaaaaaaaaaaaaaaaaaaaaaaugcaucccccccccccccccccccccccccccccccaaaggcucuuuucagagccaccagaauu

SEQ ID NO: 1083 - RNA, 739 nt, Artificial Sequence
  mRNA Design i-2 (A64-N5-C30-hSL-N5) comprising derived and/or modified sequence from Pf(3D7)__XP_001351122.1__HsALB_Pf-CSP(93-192) (opt4)
ggggcgcugccuacggagguggcagccaucuccuucucggcaucaagcuuaccaugaagugggugaccuucaucagccugcuguuccuguucagcagcgccuacagcaagcugaagcagcccgccgacggcaaccccgaccccaacgccaaccccaacguggaccccaacgccaaccccaacguggaccccaacgccaaccccaacguggaccccaacgccaaccccaacgccaaccccaacgccaaccccaacgccaaccccaacgccaaccccaacgccaaccccaacgccaaccccaacgccaaccccaacgccaaccccaacgccaaccccaacgccaaccccaacgccaaccccaacgccaaccccaacgccaaccccaacgccaaccccaacgccaaccccugaggacuagugcaucacauuuaaaagcaucucagccuaccaugagaauaagagaaagaaaaugaagaucaauagcuuauucaucucuuuuucuuuuucguugguguaaagccaacacccugucuaaaaaacauaaauuucuuuaaucauuuugccucuuuucucugugcuucaauuaauaaaaaauggaaagaaccuagaucuaaaaaaaaaaaaaaaaaaaaaaaaaaaaaaaaaaaaaaaaaaaaaaaaaaaaaaaaaaaaaaaaugcaucccccccccccccccccccccccccccccccaaaggcucuuuucagagccaccagaauu

SEQ ID NO: 1084 - RNA, 979 nt, Artificial Sequence
  mRNA Design i-2 (A64-N5-C30-hSL-N5) comprising derived and/or modified sequence from Pf(3D7)__XP_001351122.1__HsALB_Pf-CSP(93-272) (opt4)
ggggcgcugccuacggagguggcagccaucuccuucucggcaucaagcuuaccaugaagugggugaccuucaucagccugcuguuccuguucagcagcgccuacagcaagcugaagcagcccgccgacggcaaccccgaccccaacgccaaccccaacguggaccccaacgccaaccccaacguggaccccaacgccaaccccaacguggaccccaacgccaaccccaacgccaaccccaacgccaaccccaacgccaaccccaacgccaaccccaacgccaaccccaacgccaaccccaacgccaaccccaacgccaaccccaacgccaaccccaacgccaaccccaacgccaaccccaacgccaaccccaacgccaaccccaacgccaaccccaacgccaaccccaacgccaaccccaacguggaccccaacgccaaccccaacgccaaccccaacgccaaccccaacgccaaccccaacgccaaccccaacgccaaccccaacgccaaccccaacgccaaccccaacgccaaccccaacgccaaccccaacgccaaccccaacgccaaccccaacgccaaccccaacgccaaccccaacgccaaccccaacgccaaccccaacgccaaccccaacgccaaccccugaggacuagugcaucacauuuaaaagcaucucagccuaccaugagaauaagagaaagaaaaugaagaucaauagcuuauucaucucuuuuucuuuuucguugguguaaagccaacacccugucuaaaaaacauaaauuucuuuaaucauuuugccucuuuucucugugcuucaauuaauaaaaaauggaaagaaccuagaucuaaaaaaaaaaaaaaaaaaaaaaaaaaaaaaaaaaaaaaaaaaaaaaaaaaaaaaaaaaaaaaaaugcaucccccccccccccccccccccccccccccccaaaggcucuuuucagagccaccagaauu

SEQ ID NO: 1085 - RNA, 1354 nt, Artificial Sequence
  mRNA Design i-2 (A64-N5-C30-hSL-N5) comprising derived and/or modified sequence from Pf(3D7)__XP_001351122.1__HsALB_Pf-CSP(93-397) (opt4)
ggggcgcugccuacggagguggcagccaucuccuucucggcaucaagcuuaccaugaagugggugaccuucaucagccugcuguuccuguucagcagcgccuacagcaagcugaagcagcccgccgacggcaaccccgaccccaacgccaaccccaacguggaccccaacgccaaccccaacguggaccccaacgccaaccccaacguggaccccaacgccaaccccaacgccaaccccaacgccaaccccaacgccaaccccaacgccaaccccaacgccaaccccaacgccaaccccaacgccaaccccaacgccaaccccaacgccaaccccaacgccaaccccaacgccaaccccaacgccaaccccaacgccaaccccaacgccaaccccaacgccaaccccaacgccaaccccaacguggaccccaacgccaaccccaacgccaaccccaacgccaaccccaacgccaaccccaacgccaaccccaacgccaaccccaacgccaaccccaacgccaaccccaacgccaaccccaacgccaaccccaacgccaaccccaacgccaaccccaacgccaaccccaacgccaaccccaacgccaaccccaacgccaaccccaacgccaaccccaacgccaaccccaacaagaacaaccagggcaacggccagggccacaacaugcccaacgaccccaacagaaacguggacgagaacgccaacgccaacagcgccgugaagaacaacaacaacgaggagcccagcgacaagcacaucaaggaguaccugaacaagauccagaacagccugagcaccgaguggagccccugcagcgugaccugcggcaacggcauccaggugagaaucaagcccggcagcgccaacaagcccaaggacgagcuggacuacgccaacgacaucgagaagaagaucugcaagauggagaagugcagcagcguguucaacguggugaacagcagcaucggccugaucauggugcugagcuuccuguuccugaacugaggacuagugcaucacauuuaaaagcaucucagccuaccaugagaauaagagaaagaaaaugaagaucaauagcuuauucaucucuuuuucuuuuucguugguguaaagccaacacccugucuaaaaaacauaaauuucuuuaaucauuuugccucuuuucucugugcuucaauuaauaaaaaauggaaagaaccuagaucuaaaaaaaaaaaaaaaaaaaaaaaaaaaaaaaaaaaaaaaaaaaaaaaaaaaaaaaaaaaaaaaaugcaucccccccccccccccccccccccccccccccaaaggcucuuuucagagccaccagaauu

SEQ ID NO: 1086 - RNA, 724 nt, Artificial Sequence
  mRNA Design i-2 (A64-N5-C30-hSL-N5) comprising derived and/or modified sequence from Pf(3D7)__XP_001351122.1__HsALB_Pf-CSP(98-192) (opt4)
ggggcgcugccuacggagguggcagccaucuccuucucggcaucaagcuuaccaugaagugggugaccuucaucagccugcuguuccuguucagcagcgccuacagcgccgacggcaaccccgaccccaacgccaaccccaacguggaccccaacgccaaccccaacguggaccccaacgccaaccccaacguggaccccaacgccaaccccaacgccaaccccaacgccaaccccaacgccaaccccaacgccaaccccaacgccaaccccaacgccaaccccaacgccaaccccaacgccaaccccaacgccaaccccaacgccaaccccaacgccaaccccaacgccaaccccaacgccaaccccaacgccaaccccaacgccaaccccugaggacuagugcaucacauuuaaaagcaucucagccuaccaugagaauaagagaaagaaaaugaagaucaauagcuuauucaucucuuuuucuuuuucguugguguaaagccaacacccugucuaaaaaacauaaauuucuuuaaucauuuugccucuuuucucugugcuucaauuaauaaaaaauggaaagaaccuagaucuaaaaaaaaaaaaaaaaaaaaaaaaaaaaaaaaaaaaaaaaaaaaaaaaaaaaaaaaaaaaaaaaugcaucccccccccccccccccccccccccccccccaaaggcucuuuucagagccaccagaauu

SEQ ID NO: 1087 - RNA, 964 nt, Artificial Sequence
  mRNA Design i-2 (A64-N5-C30-hSL-N5) comprising derived and/or modified sequence from Pf(3D7)__XP_001351122.1__HsALB_Pf-CSP(98-272) (opt4)
ggggcgcugccuacggagguggcagccaucuccuucucggcaucaagcuuaccaugaagugggugaccuucaucagccugcuguuccuguucagcagcgccuacagcgccgacggcaaccccgaccccaacgccaaccccaacguggaccccaacgccaaccccaacguggaccccaacgccaaccccaacguggaccccaacgccaaccccaacgccaaccccaacgccaaccccaacgccaaccccaacgccaaccccaacgccaaccccaacgccaaccccaacgccaaccccaacgccaaccccaacgccaaccccaacgccaaccccaacgccaaccccaacgccaaccccaacgccaaccccaacgccaaccccaacgccaaccccaacgccaaccccaacguggaccccaacgccaaccccaacgccaaccccaacgccaaccccaacgccaaccccaacgccaaccccaacgccaaccccaacgccaaccccaacgccaaccccaacgccaaccccaacgccaaccccaacgccaaccccaacgccaaccccaacgccaaccccaacgccaaccccaacgccaaccccaacgccaaccccaacgccaaccccaacgccaaccccugaggacuagugcaucacauuuaaaagcaucucagccuaccaugagaauaagagaaagaaaaugaagaucaauagcuuauucaucucuuuuucuuuuucguugguguaaagccaacacccugucuaaaaaacauaaauuucuuuaaucauuuugccucuuuucucugugcuucaauuaauaaaaaauggaaagaaccuagaucuaaaaaaaaaaaaaaaaaaaaaaaaaaaaaaaaaaaaaaaaaaaaaaaaaaaaaaaaaaaaaaaaugcaucccccccccccccccccccccccccccccccaaaggcucuuuucagagccaccagaauu

SEQ ID NO: 1088 - RNA, 1270 nt, Artificial Sequence
  mRNA Design i-2 (A64-N5-C30-hSL-N5) comprising derived and/or modified sequence from Pf(3D7)__XP_001351122.1__HsALB_Pf-CSP(98-374) (opt4)
ggggcgcugccuacggagguggcagccaucuccuucucggcaucaagcuuaccaugaagugggugaccuucaucagccugcuguuccuguucagcagcgccuacagcgccgacggcaaccccgaccccaacgccaaccccaacguggaccccaacgccaaccccaacguggaccccaacgccaaccccaacguggaccccaacgccaaccccaacgccaaccccaacgccaaccccaacgccaaccccaacgccaaccccaacgccaaccccaacgccaaccccaacgccaaccccaacgccaaccccaacgccaaccccaacgccaaccccaacgccaaccccaacgccaaccccaacgccaaccccaacgccaaccccaacgccaaccccaacgccaaccccaacguggaccccaacgccaaccccaacgccaaccccaacgccaaccccaacgccaaccccaacgccaaccccaacgccaaccccaacgccaaccccaacgccaaccccaacgccaaccccaacgccaaccccaacgccaaccccaacgccaaccccaacgccaaccccaacgccaaccccaacgccaaccccaacgccaaccccaacgccaaccccaacgccaaccccaacaagaacaaccagggcaacggccagggccacaacaugcccaacgaccccaacagaaacguggacgagaacgccaacgccaacagcgccgugaagaacaacaacaacgaggagcccagcgacaagcacaucaaggaguaccugaacaagauccagaacagccugagcaccgaguggagccccugcagcgugaccugcggcaacggcauccaggugagaaucaagcccggcagcgccaacaagcccaaggacgagcuggacuacgccaacgacaucgagaagaagaucugcaagauggagaagugcugaggacuagugcaucacauuuaaaagcaucucagccuaccaugagaauaagagaaagaaaaugaagaucaauagcuuauucaucucuuuuucuuuuucguugguguaaagccaacacccugucuaaaaaacauaaauuucuuuaaucauuuugccucuuuucucugugcuucaauuaauaaaaaauggaaagaaccuagaucuaaaaaaaaaaaaaaaaaaaaaaaaaaaaaaaaaaaaaaaaaaaaaaaaaaaaaaaaaaaaaaaaugcaucccccccccccccccccccccccccccccccaaaggcucuuuucagagccaccagaauu

SEQ ID NO: 1089 - RNA, 1339 nt, Artificial Sequence
  mRNA Design i-2 (A64-N5-C30-hSL-N5) comprising derived and/or modified sequence from Pf(3D7)__XP_001351122.1__HsALB_Pf-CSP(98-397) (opt4)
ggggcgcugccuacggagguggcagccaucuccuucucggcaucaagcuuaccaugaagugggugaccuucaucagccugcuguuccuguucagcagcgccuacagcgccgacggcaaccccgaccccaacgccaaccccaacguggaccccaacgccaaccccaacguggaccccaacgccaaccccaacguggaccccaacgccaaccccaacgccaaccccaacgccaaccccaacgccaaccccaacgccaaccccaacgccaaccccaacgccaaccccaacgccaaccccaacgccaaccccaacgccaaccccaacgccaaccccaacgccaaccccaacgccaaccccaacgccaaccccaacgccaaccccaacgccaaccccaacgccaaccccaacguggaccccaacgccaaccccaacgccaaccccaacgccaaccccaacgccaaccccaacgccaaccccaacgccaaccccaacgccaaccccaacgccaaccccaacgccaaccccaacgccaaccccaacgccaaccccaacgccaaccccaacgccaaccccaacgccaaccccaacgccaaccccaacgccaaccccaacgccaaccccaacgccaaccccaacaagaacaaccagggcaacggccagggccacaacaugcccaacgaccccaacagaaacguggacgagaacgccaacgccaacagcgccgugaagaacaacaacaacgaggagcccagcgacaagcacaucaaggaguaccugaacaagauccagaacagccugagcaccgaguggagccccugcagcgugaccugcggcaacggcauccaggugagaaucaagcccggcagcgccaacaagcccaaggacgagcuggacuacgccaacgacaucgagaagaagaucugcaagauggagaagugcagcagcguguucaacguggugaacagcagcaucggccugaucauggugcugagcuuccuguuccugaacugaggacuagugcaucacauuuaaaagcaucucagccuaccaugagaauaagagaaagaaaaugaagaucaauagcuuauucaucucuuuuucuuuuucguugguguaaagccaacacccugucuaaaaaacauaaauuucuuuaaucauuuugccucuuuucucugugcuucaauuaauaaaaaauggaaagaaccuagaucuaaaaaaaaaaaaaaaaaaaaaaaaaaaaaaaaaaaaaaaaaaaaaaaaaaaaaaaaaaaaaaaaugcaucccccccccccccccccccccccccccccccaaaggcucuuuucagagccaccagaauu

SEQ ID NO: 1090 - RNA, 1666 nt, Artificial Sequence
  mRNA Design i-2 (A64-N5-C30-hSL-N5) comprising derived and/or modified sequence from Pf(3D7)__XP_001351122.1__HsALB_Pf-CSP(199-377)_L(PVTN)_HBsAg (opt4)
ggggcgcugccuacggagguggcagccaucuccuucucggcaucaagcuuaccaugaagugggugaccuucaucagccugcuguuccuguucagcagcgccuacagcgaccccaacgccaaccccaacgccaaccccaacgccaaccccaacgccaaccccaacgccaaccccaacgccaaccccaacgccaaccccaacgccaaccccaacgccaaccccaacgccaaccccaacgccaaccccaacgccaaccccaacgccaaccccaacgccaaccccaacgccaaccccaacgccaaccccaacgccaaccccaacgccaaccccaacaagaacaaccagggcaacggccagggccacaacaugcccaacgaccccaacagaaacguggacgagaacgccaacgccaacagcgccgugaagaacaacaacaacgaggagcccagcgacaagcacaucaaggaguaccugaacaagauccagaacagccugagcaccgaguggagccccugcagcgugaccugcggcaacggcauccaggugagaaucaagcccggcagcgccaacaagcccaaggacgagcuggacuacgccaacgacaucgagaagaagaucugcaagauggagaagugcagcagcgugcccgugaccaacauggagaacaucaccagcggcuuccugggcccccugcuggugcugcaggccggcuucuuccugcugaccagaauccugaccaucccccagagccuggacagcugguggaccagccugaacuuccugggcggcagccccgugugccugggccagaacagccagagccccaccagcaaccacagccccaccagcugcccccccaucugccccggcuacagauggaugugccugagaagauucaucaucuuccuguucauccugcugcugugccugaucuuccugcuggugcugcuggacuaccagggcaugcugcccgugugcccccugauccccggcagcaccaccaccaacaccggccccugcaagaccugcaccacccccgcccagggcaacagcauguuccccagcugcugcugcaccaagcccaccgacggcaacugcaccugcauccccauccccagcagcugggccuucgccaaguaccugugggagugggccagcgugagauucagcuggcugagccugcuggugcccuucgugcagugguucgugggccugagccccaccguguggcugagcgccaucuggaugaugugguacuggggccccagccuguacagcaucgugagccccuucaucccccugcugcccaucuucuucugccuguggguguacaucugaggacuagugcaucacauuuaaaagcaucucagccuaccaugagaauaagagaaagaaaaugaagaucaauagcuuauucaucucuuuuucuuuuucguugguguaaagccaacacccugucuaaaaaacauaaauuucuuuaaucauuuugccucuuuucucugugcuucaauuaauaaaaaauggaaagaaccuagaucuaaaaaaaaaaaaaaaaaaaaaaaaaaaaaaaaaaaaaaaaaaaaaaaaaaaaaaaaaaaaaaaaugcaucccccccccccccccccccccccccccccccaaaggcucuuuucagagccaccagaauu

SEQ ID NO: 1091 - RNA, 1405 nt, Artificial Sequence
  mRNA Design i-2 (A64-N5-C30-hSL-N5) comprising derived and/or modified sequence from Pb(ANKA)__XP_022712148.1__Pb-CSP (opt4)
ggggcgcugccuacggagguggcagccaucuccuucucggcaucaagcuuaccaugaagaagugcaccauccuggugguggccagccugcugcuggugaacagccugcugcccggcuacggccagaacaagagcauccaggcccagagaaaccugaacgagcugugcuacaacgagggcaacgacaacaagcuguaccacgugcugaacagcaagaacggcaagaucuacaacagaaacaccgugaacagacugcuggccgacgcccccgagggcaagaagaacgagaagaagaacgagaagaucgagagaaacaacaagcugaagcagcccccccccccccccaaccccaacgacccccccccccccaaccccaacgacccccccccccccaaccccaacgacccccccccccccaaccccaacgacccccccccccccaacgccaacgacccccccccccccaacgccaacgaccccgccccccccaacgccaacgaccccgccccccccaacgccaacgaccccgccccccccaacgccaacgaccccgccccccccaacgccaacgacccccccccccccaaccccaacgaccccgccccccccaacgccaacgacccccccccccccaaccccaacgaccccgcccccccccagggcaacaacaacccccagccccagcccagaccccagccccagccccagccccagccccagccccagccccagccccagccccagcccagaccccagccccagccccagcccggcggcaacaacaacaacaagaacaacaacaacgacgacagcuacauccccagcgccgagaagauccuggaguucgugaagcagaucagagacagcaucaccgaggaguggagccagugcaacgugaccugcggcagcggcaucagagugagaaagagaaagggcagcaacaagaaggccgaggaccugacccuggaggacaucgacaccgagaucugcaagauggacaagugcagcagcaucuucaacaucgugagcaacagccugggcuucgugauccugcuggugcugguguucuucaacugaggacuagugcaucacauuuaaaagcaucucagccuaccaugagaauaagagaaagaaaaugaagaucaauagcuuauucaucucuuuuucuuuuucguugguguaaagccaacacccugucuaaaaaacauaaauuucuuuaaucauuuugccucuuuucucugugcuucaauuaauaaaaaauggaaagaaccuagaucuaaaaaaaaaaaaaaaaaaaaaaaaaaaaaaaaaaaaaaaaaaaaaaaaaaaaaaaaaaaaaaaaugcaucccccccccccccccccccccccccccccccaaaggcucuuuucagagccaccagaauu

SEQ ID NO: 1092 - RNA, 1570 nt, Artificial Sequence
  mRNA Design i-2 (A64-N5-C30-hSL-N5) comprising derived and/or modified sequence from Pb(ANKA)__XP_022712148.1__Pb-CSP_L(G4SG4)_TM domain HA (opt4)
ggggcgcugccuacggagguggcagccaucuccuucucggcaucaagcuuaccaugaagaagugcaccauccuggugguggccagccugcugcuggugaacagccugcugcccggcuacggccagaacaagagcauccaggcccagagaaaccugaacgagcugugcuacaacgagggcaacgacaacaagcuguaccacgugcugaacagcaagaacggcaagaucuacaacagaaacaccgugaacagacugcuggccgacgcccccgagggcaagaagaacgagaagaagaacgagaagaucgagagaaacaacaagcugaagcagcccccccccccccccaaccccaacgacccccccccccccaaccccaacgacccccccccccccaaccccaacgacccccccccccccaaccccaacgacccccccccccccaacgccaacgacccccccccccccaacgccaacgaccccgccccccccaacgccaacgaccccgccccccccaacgccaacgaccccgccccccccaacgccaacgaccccgccccccccaacgccaacgacccccccccccccaaccccaacgaccccgccccccccaacgccaacgacccccccccccccaaccccaacgaccccgcccccccccagggcaacaacaacccccagccccagcccagaccccagccccagccccagccccagccccagccccagccccagccccagccccagcccagaccccagccccagccccagcccggcggcaacaacaacaacaagaacaacaacaacgacgacagcuacauccccagcgccgagaagauccuggaguucgugaagcagaucagagacagcaucaccgaggaguggagccagugcaacgugaccugcggcagcggcaucagagugagaaagagaaagggcagcaacaagaaggccgaggaccugacccuggaggacaucgacaccgagaucugcaagauggacaagugcagcagcaucuucaacaucgugagcaacagccugggcuucgugauccugcuggugcugguguucuucaacggcggcggcggcagcggcggcggcggcaagcuggagagcaccagaaucuaccagauccuggccaucuacagcaccguggccagcagccuggugcugguggugagccugggcgccaucagcuucuggaugugcagcaacggcagccugcagugcagaaucugcaucugaggacuagugcaucacauuuaaaagcaucucagccuaccaugagaauaagagaaagaaaaugaagaucaauagcuuauucaucucuuuuucuuuuucguugguguaaagccaacacccugucuaaaaaacauaaauuucuuuaaucauuuugccucuuuucucugugcuucaauuaauaaaaaauggaaagaaccuagaucuaaaaaaaaaaaaaaaaaaaaaaaaaaaaaaaaaaaaaaaaaaaaaaaaaaaaaaaaaaaaaaaaugcaucccccccccccccccccccccccccccccccaaaggcucuuuucagagccaccagaauu

SEQ ID NO: 1093 - RNA, 1390 nt, Artificial Sequence
  mRNA Design i-2 (A64-N5-C30-hSL-N5) comprising derived and/or modified sequence from Pb(ANKA)__XP_022712148.1__HsALB_Pb-CSP(24-340) (opt4)
ggggcgcugccuacggagguggcagccaucuccuucucggcaucaagcuuaccaugaagugggugaccuucaucagccugcuguuccuguucagcagcgccuacagccagaacaagagcauccaggcccagagaaaccugaacgagcugugcuacaacgagggcaacgacaacaagcuguaccacgugcugaacagcaagaacggcaagaucuacaacagaaacaccgugaacagacugcuggccgacgcccccgagggcaagaagaacgagaagaagaacgagaagaucgagagaaacaacaagcugaagcagcccccccccccccccaaccccaacgacccccccccccccaaccccaacgacccccccccccccaaccccaacgacccccccccccccaaccccaacgacccccccccccccaacgccaacgacccccccccccccaacgccaacgaccccgccccccccaacgccaacgaccccgccccccccaacgccaacgaccccgccccccccaacgccaacgaccccgccccccccaacgccaacgacccccccccccccaaccccaacgaccccgccccccccaacgccaacgacccccccccccccaaccccaacgaccccgcccccccccagggcaacaacaacccccagccccagcccagaccccagccccagccccagccccagccccagccccagccccagccccagccccagcccagaccccagccccagccccagcccggcggcaacaacaacaacaagaacaacaacaacgacgacagcuacauccccagcgccgagaagauccuggaguucgugaagcagaucagagacagcaucaccgaggaguggagccagugcaacgugaccugcggcagcggcaucagagugagaaagagaaagggcagcaacaagaaggccgaggaccugacccuggaggacaucgacaccgagaucugcaagauggacaagugcagcagcaucuucaacaucgugagcaacagccugggcuucgugauccugcuggugcugguguucuucaacugaggacuagugcaucacauuuaaaagcaucucagccuaccaugagaauaagagaaagaaaaugaagaucaauagcuuauucaucucuuuuucuuuuucguugguguaaagccaacacccugucuaaaaaacauaaauuucuuuaaucauuuugccucuuuucucugugcuucaauuaauaaaaaauggaaagaaccuagaucuaaaaaaaaaaaaaaaaaaaaaaaaaaaaaaaaaaaaaaaaaaaaaaaaaaaaaaaaaaaaaaaaugcaucccccccccccccccccccccccccccccccaaaggcucuuuucagagccaccagaauu

SEQ ID NO: 1094 - RNA, 1408 nt, Artificial Sequence
  mRNA Design i-2 (A64-N5-C30-hSL-N5) comprising derived and/or modified sequence from Pb(ANKA)__XP_022712148.1__HsIns-iso1_Pb-CSP(24-340) (opt4)
ggggcgcugccuacggagguggcagccaucuccuucucggcaucaagcuuaccauggcccuguggaugagacugcugccccugcuggcccugcuggcccuguggggccccgaccccgccgccgcccagaacaagagcauccaggcccagagaaaccugaacgagcugugcuacaacgagggcaacgacaacaagcuguaccacgugcugaacagcaagaacggcaagaucuacaacagaaacaccgugaacagacugcuggccgacgcccccgagggcaagaagaacgagaagaagaacgagaagaucgagagaaacaacaagcugaagcagcccccccccccccccaaccccaacgacccccccccccccaaccccaacgacccccccccccccaaccccaacgacccccccccccccaaccccaacgacccccccccccccaacgccaacgacccccccccccccaacgccaacgaccccgccccccccaacgccaacgaccccgccccccccaacgccaacgaccccgccccccccaacgccaacgaccccgccccccccaacgccaacgacccccccccccccaaccccaacgaccccgccccccccaacgccaacgacccccccccccccaaccccaacgaccccgcccccccccagggcaacaacaacccccagccccagcccagaccccagccccagccccagccccagccccagccccagccccagccccagccccagcccagaccccagccccagccccagcccggcggcaacaacaacaacaagaacaacaacaacgacgacagcuacauccccagcgccgagaagauccuggaguucgugaagcagaucagagacagcaucaccgaggaguggagccagugcaacgugaccugcggcagcggcaucagagugagaaagagaaagggcagcaacaagaaggccgaggaccugacccuggaggacaucgacaccgagaucugcaagauggacaagugcagcagcaucuucaacaucgugagcaacagccugggcuucgugauccugcuggugcugguguucuucaacugaggacuagugcaucacauuuaaaagcaucucagccuaccaugagaauaagagaaagaaaaugaagaucaauagcuuauucaucucuuuuucuuuuucguugguguaaagccaacacccugucuaaaaaacauaaauuucuuuaaucauuuugccucuuuucucugugcuucaauuaauaaaaaauggaaagaaccuagaucuaaaaaaaaaaaaaaaaaaaaaaaaaaaaaaaaaaaaaaaaaaaaaaaaaaaaaaaaaaaaaaaaugcaucccccccccccccccccccccccccccccccaaaggcucuuuucagagccaccagaauu

SEQ ID NO: 1095 - RNA, 1387 nt, Artificial Sequence
  mRNA Design i-2 (A64-N5-C30-hSL-N5) comprising derived and/or modified sequence from Pb(ANKA)__XP_022712148.1__HsSPARC_Pb-CSP(24-340) (opt4)
ggggcgcugccuacggagguggcagccaucuccuucucggcaucaagcuuaccaugagagccuggaucuucuuccugcugugccuggccggcagagcccuggcccagaacaagagcauccaggcccagagaaaccugaacgagcugugcuacaacgagggcaacgacaacaagcuguaccacgugcugaacagcaagaacggcaagaucuacaacagaaacaccgugaacagacugcuggccgacgcccccgagggcaagaagaacgagaagaagaacgagaagaucgagagaaacaacaagcugaagcagcccccccccccccccaaccccaacgacccccccccccccaaccccaacgacccccccccccccaaccccaacgacccccccccccccaaccccaacgacccccccccccccaacgccaacgacccccccccccccaacgccaacgaccccgccccccccaacgccaacgaccccgccccccccaacgccaacgaccccgccccccccaacgccaacgaccccgccccccccaacgccaacgacccccccccccccaaccccaacgaccccgccccccccaacgccaacgacccccccccccccaaccccaacgaccccgcccccccccagggcaacaacaacccccagccccagcccagaccccagccccagccccagccccagccccagccccagccccagccccagccccagcccagaccccagccccagccccagcccggcggcaacaacaacaacaagaacaacaacaacgacgacagcuacauccccagcgccgagaagauccuggaguucgugaagcagaucagagacagcaucaccgaggaguggagccagugcaacgugaccugcggcagcggcaucagagugagaaagagaaagggcagcaacaagaaggccgaggaccugacccuggaggacaucgacaccgagaucugcaagauggacaagugcagcagcaucuucaacaucgugagcaacagccugggcuucgugauccugcuggugcugguguucuucaacugaggacuagugcaucacauuuaaaagcaucucagccuaccaugagaauaagagaaagaaaaugaagaucaauagcuuauucaucucuuuuucuuuuucguugguguaaagccaacacccugucuaaaaaacauaaauuucuuuaaucauuuugccucuuuucucugugcuucaauuaauaaaaaauggaaagaaccuagaucuaaaaaaaaaaaaaaaaaaaaaaaaaaaaaaaaaaaaaaaaaaaaaaaaaaaaaaaaaaaaaaaaugcaucccccccccccccccccccccccccccccccaaaggcucuuuucagagccaccagaauu

SEQ ID NO: 1096 - RNA, 1390 nt, Artificial Sequence
  mRNA Design i-2 (A64-N5-C30-hSL-N5) comprising derived and/or modified sequence from Pb(ANKA)__XP_022712148.1__IgE_Pb-CSP(24-340) (opt4)
ggggcgcugccuacggagguggcagccaucuccuucucggcaucaagcuuaccauggacuggaccuggauccuguuccugguggccgccgccaccagagugcacagccagaacaagagcauccaggcccagagaaaccugaacgagcugugcuacaacgagggcaacgacaacaagcuguaccacgugcugaacagcaagaacggcaagaucuacaacagaaacaccgugaacagacugcuggccgacgcccccgagggcaagaagaacgagaagaagaacgagaagaucgagagaaacaacaagcugaagcagcccccccccccccccaaccccaacgacccccccccccccaaccccaacgacccccccccccccaaccccaacgacccccccccccccaaccccaacgacccccccccccccaacgccaacgacccccccccccccaacgccaacgaccccgccccccccaacgccaacgaccccgccccccccaacgccaacgaccccgccccccccaacgccaacgaccccgccccccccaacgccaacgacccccccccccccaaccccaacgaccccgccccccccaacgccaacgacccccccccccccaaccccaacgaccccgcccccccccagggcaacaacaacccccagccccagcccagaccccagccccagccccagccccagccccagccccagccccagccccagccccagcccagaccccagccccagccccagcccggcggcaacaacaacaacaagaacaacaacaacgacgacagcuacauccccagcgccgagaagauccuggaguucgugaagcagaucagagacagcaucaccgaggaguggagccagugcaacgugaccugcggcagcggcaucagagugagaaagagaaagggcagcaacaagaaggccgaggaccugacccuggaggacaucgacaccgagaucugcaagauggacaagugcagcagcaucuucaacaucgugagcaacagccugggcuucgugauccugcuggugcugguguucuucaacugaggacuagugcaucacauuuaaaagcaucucagccuaccaugagaauaagagaaagaaaaugaagaucaauagcuuauucaucucuuuuucuuuuucguugguguaaagccaacacccugucuaaaaaacauaaauuucuuuaaucauuuugccucuuuucucugugcuucaauuaauaaaaaauggaaagaaccuagaucuaaaaaaaaaaaaaaaaaaaaaaaaaaaaaaaaaaaaaaaaaaaaaaaaaaaaaaaaaaaaaaaaugcaucccccccccccccccccccccccccccccccaaaggcucuuuucagagccaccagaauu

SEQ ID NO: 1097 - RNA, 1576 nt, Artificial Sequence
  mRNA Design i-2 (A64-N5-C30-hSL-N5) comprising derived and/or modified sequence from Pf(3D7)__XP_001351122.1__Pf-CSP (opt5)
ggggcgcugccuacggagguggcagccaucuccuucucggcaucaagcuuaccaugaugagaaagcuggccauccucagcguguccucuuuccuguuugucgaggcucuuuuccaggaauaccaaugcuauggcagcuccucuaacacccggguucugaaugagcucaacuacgacaaugccgggacaaaccuguauaaugaacuugagaugaacuacuauggaaaacaggaaaauugguacagccugaagaaaaacucccgcucucucggcgagaaugaugacgggaacaaugaggauaacgaaaagcugagaaaacccaagcacaagaaacugaagcagccugcggacggaaauccggaucccaacgcuaauccuaacguggaccccaacgccaauccuaacguggaucccaaugccaacccuaaugucgacccgaacgcuaaucccaacgccaauccuaacgcuaaucccaacgccaauccuaacgcgaaucccaacgccaacccgaaugcuaacccuaaugccaaccccaaugcuaacccuaaugccaaccccaaugcgaaccccaaugccaacccuaaugcuaacccgaaugccaaccccaacgcuaauccuaacgccaaucccaacgccaauccuaacguggaucccaaugcuaacccgaaugcgaacccuaaugccaaccccaaugcuaacccuaaugccaaccccaacgccaauccuaacgcuaaucccaacgccaauccgaacgcgaauccuaacgcuaaucccaacgccaaucccaacgccaauccuaacgcuaauccgaacgccaaucccaacgcuaacccuaaugccaaccccaaugcgaacccuaaugccaaccccaauaaaaacaaucagggcaacgggcaaggacauaauaugccuaacgaccccaaucggaacguugaugagaaugcuaacgccaacagcgcugugaagaauaacaauaacgaggaaccguccgacaaacacauuaaggaguaucucaauaagauccagaacagccugucuacggaaugguccccuuguagcgugaccugcggcaauggcauucagguccgcaucaaacccgggucugccaacaagccuaaagaugagcuugacuacgcgaaugacauugaaaagaaaaucuguaagauggagaaaugcuccagcguuuuuaacguggucaauucuuccaucggacugauuauggugcucagcuuccuguuucuuaacugaggacuagugcaucacauuuaaaagcaucucagccuaccaugagaauaagagaaagaaaaugaagaucaauagcuuauucaucucuuuuucuuuuucguugguguaaagccaacacccugucuaaaaaacauaaauuucuuuaaucauuuugccucuuuucucugugcuucaauuaauaaaaaauggaaagaaccuagaucuaaaaaaaaaaaaaaaaaaaaaaaaaaaaaaaaaaaaaaaaaaaaaaaaaaaaaaaaaaaaaaaaugcaucccccccccccccccccccccccccccccccaaaggcucuuuucagagccaccagaauu

SEQ ID NO: 1098 - RNA, 1507 nt, Artificial Sequence
  mRNA Design i-2 (A64-N5-C30-hSL-N5) comprising derived and/or modified sequence from Pf(3D7)__XP_001351122.1__Pf-CSP(1-374) (opt5)
ggggcgcugccuacggagguggcagccaucuccuucucggcaucaagcuuaccaugaugagaaagcuggccauccucagcguguccucuuuccuguuugucgaggcucuuuuccaggaauaccaaugcuauggcagcuccucuaacacccggguucugaaugagcucaacuacgacaaugccgggacaaaccuguauaaugaacuugagaugaacuacuauggaaaacaggaaaauugguacagccugaagaaaaacucccgcucucucggcgagaaugaugacgggaacaaugaggauaacgaaaagcugagaaaacccaagcacaagaaacugaagcagccugcggacggaaauccggaucccaacgcuaauccuaacguggaccccaacgccaauccuaacguggaucccaaugccaacccuaaugucgacccgaacgcuaaucccaacgccaauccuaacgcuaaucccaacgccaauccuaacgcgaaucccaacgccaacccgaaugcuaacccuaaugccaaccccaaugcuaacccuaaugccaaccccaaugcgaaccccaaugccaacccuaaugcuaacccgaaugccaaccccaacgcuaauccuaacgccaaucccaacgccaauccuaacguggaucccaaugcuaacccgaaugcgaacccuaaugccaaccccaaugcuaacccuaaugccaaccccaacgccaauccuaacgcuaaucccaacgccaauccgaacgcgaauccuaacgcuaaucccaacgccaaucccaacgccaauccuaacgcuaauccgaacgccaaucccaacgcuaacccuaaugccaaccccaaugcgaacccuaaugccaaccccaauaaaaacaaucagggcaacgggcaaggacauaauaugccuaacgaccccaaucggaacguugaugagaaugcuaacgccaacagcgcugugaagaauaacaauaacgaggaaccguccgacaaacacauuaaggaguaucucaauaagauccagaacagccugucuacggaaugguccccuuguagcgugaccugcggcaauggcauucagguccgcaucaaacccgggucugccaacaagccuaaagaugagcuugacuacgcgaaugacauugaaaagaaaaucuguaagauggagaaaugcugaggacuagugcaucacauuuaaaagcaucucagccuaccaugagaauaagagaaagaaaaugaagaucaauagcuuauucaucucuuuuucuuuuucguugguguaaagccaacacccugucuaaaaaacauaaauuucuuuaaucauuuugccucuuuucucugugcuucaauuaauaaaaaauggaaagaaccuagaucuaaaaaaaaaaaaaaaaaaaaaaaaaaaaaaaaaaaaaaaaaaaaaaaaaaaaaaaaaaaaaaaaugcaucccccccccccccccccccccccccccccccaaaggcucuuuucagagccaccagaauu

SEQ ID NO: 1099 - RNA, 1360 nt, Artificial Sequence
  mRNA Design i-2 (A64-N5-C30-hSL-N5) comprising derived and/or modified sequence from Pf(3D7)__XP_001351122.1__Pf-CSP(1-325) (opt5)
ggggcgcugccuacggagguggcagccaucuccuucucggcaucaagcuuaccaugaugagaaagcuggccauccucagcguguccucuuuccuguuugucgaggcucuuuuccaggaauaccaaugcuauggcagcuccucuaacacccggguucugaaugagcucaacuacgacaaugccgggacaaaccuguauaaugaacuugagaugaacuacuauggaaaacaggaaaauugguacagccugaagaaaaacucccgcucucucggcgagaaugaugacgggaacaaugaggauaacgaaaagcugagaaaacccaagcacaagaaacugaagcagccugcggacggaaauccggaucccaacgcuaauccuaacguggaccccaacgccaauccuaacguggaucccaaugccaacccuaaugucgacccgaacgcuaaucccaacgccaauccuaacgcuaaucccaacgccaauccuaacgcgaaucccaacgccaacccgaaugcuaacccuaaugccaaccccaaugcuaacccuaaugccaaccccaaugcgaaccccaaugccaacccuaaugcuaacccgaaugccaaccccaacgcuaauccuaacgccaaucccaacgccaauccuaacguggaucccaaugcuaacccgaaugcgaacccuaaugccaaccccaaugcuaacccuaaugccaaccccaacgccaauccuaacgcuaaucccaacgccaauccgaacgcgaauccuaacgcuaaucccaacgccaaucccaacgccaauccuaacgcuaauccgaacgccaaucccaacgcuaacccuaaugccaaccccaaugcgaacccuaaugccaaccccaauaaaaacaaucagggcaacgggcaaggacauaauaugccuaacgaccccaaucggaacguugaugagaaugcuaacgccaacagcgcugugaagaauaacaauaacgaggaaccguccgacaaacacauuaaggaguaucucaauaagauccagaacugaggacuagugcaucacauuuaaaagcaucucagccuaccaugagaauaagagaaagaaaaugaagaucaauagcuuauucaucucuuuuucuuuuucguugguguaaagccaacacccugucuaaaaaacauaaauuucuuuaaucauuuugccucuuuucucugugcuucaauuaauaaaaaauggaaagaaccuagaucuaaaaaaaaaaaaaaaaaaaaaaaaaaaaaaaaaaaaaaaaaaaaaaaaaaaaaaaaaaaaaaaaugcaucccccccccccccccccccccccccccccccaaaggcucuuuucagagccaccagaauu

SEQ ID NO: 1100 - RNA, 1576 nt, Artificial Sequence
  mRNA Design i-2 (A64-N5-C30-hSL-N5) comprising derived and/or modified sequence from Pf(3D7)__XP_001351122.1__HsALB_Pf-CSP(19-397) (opt5)
ggggcgcugccuacggagguggcagccaucuccuucucggcaucaagcuuaccaugaagugggugaccuucaucagccugcucuuucuguucuccucugccuacagccuuuuucaggaguaucaaugcuacggcuccucuagcaacacaagaguccugaaugaacucaacuaugacaaugcugggacgaaccuguacaaugagcuugaaaugaacuauuacggaaaacaggagaauugguauucccugaagaaaaacucucggagccucggcgaaaaugaugacgggaacaaugaggauaacgagaagcugcgcaaacccaagcacaagaaacugaagcagccugccgacggaaauccggaucccaacgcgaauccuaacguugaccccaacgcuaauccuaacguggaucccaaugccaacccuaauguggacccgaacgccaaucccaacgcuaauccuaacgccaaucccaacgcuaauccuaacgccaaucccaacgcgaacccgaaugccaacccuaaugcuaaccccaaugccaacccuaaugcuaaccccaaugccaaccccaaugcgaacccuaaugccaacccgaaugcuaaccccaacgccaauccuaacgcuaaucccaacgccaauccuaacgucgaucccaaugccaacccgaaugcuaacccuaaugcgaaccccaaugccaacccuaaugcuaaccccaacgccaauccuaacgccaaucccaacgcuaauccgaacgccaauccuaacgcgaaucccaacgcuaaucccaacgccaauccuaacgccaauccgaacgcuaaucccaacgccaacccuaaugcuaaccccaaugccaacccuaaugcgaaccccaauaaaaacaaucagggcaacgggcaaggacauaauaugccuaacgaccccaauagaaacguggaugaaaaugccaacgcuaacuccgccguuaagaauaacaauaacgaggaaccgagcgacaaacacauuaaggaguaccucaauaagauccagaacucucuguccaccgaguggagcccuuguucugugacaugcggcaauggcauucagguccggaucaaacccggguccgcuaacaagccuaaagaugaacuugacuacgccaaugacauugagaagaaaaucuguaagauggaaaaaugcagcucuguguucaacguugucaauuccagcaucggacugauuauggugcucuccuuucuguuccuuaacugaggacuagugcaucacauuuaaaagcaucucagccuaccaugagaauaagagaaagaaaaugaagaucaauagcuuauucaucucuuuuucuuuuucguugguguaaagccaacacccugucuaaaaaacauaaauuucuuuaaucauuuugccucuuuucucugugcuucaauuaauaaaaaauggaaagaaccuagaucuaaaaaaaaaaaaaaaaaaaaaaaaaaaaaaaaaaaaaaaaaaaaaaaaaaaaaaaaaaaaaaaaugcaucccccccccccccccccccccccccccccccaaaggcucuuuucagagccaccagaauu

SEQ ID NO: 1101 - RNA, 1594 nt, Artificial Sequence
  mRNA Design i-2 (A64-N5-C30-hSL-N5) comprising derived and/or modified sequence from Pf(3D7)__XP_001351122.1__HsIns-iso1_Pf-CSP(19-397) (opt5)
ggggcgcugccuacggagguggcagccaucuccuucucggcaucaagcuuaccauggcccuguggaugagacuccugccccuucuggcucuccuggcccuuuggggcccugacccggcggcugcccuguuccaggaguaccaaugcuaugggagcuccucuaacacccgggugcucaaugaacugaacuacgauaaugccggaacaaaccuguauaaugagcucgaaaugaacuacuauggcaagcaggagaauugguacagccugaaaaagaacucccgcucucuuggggaaaaugacgauggaaacaaugaggacaacgagaaacugagaaagcccaaacacaagaagcucaaacagccugcugauggcaaucccgacccuaacgccaaucccaacgucgauccuaacgcuaauccgaacguugaccccaaugccaacccuaauguggaucccaacgcgaauccuaacgccaaucccaacgcuaauccgaacgccaauccuaacgcuaaucccaacgccaacccuaaugcgaaccccaaugccaaccccaaugcuaacccuaaugccaacccgaaugcuaaccccaaugccaacccuaaugccaaccccaaugcuaacccuaacgcgaaucccaacgccaauccgaacgcuaauccuaacguggaccccaaugccaacccuaaugccaaccccaaugcuaacccuaaugccaaccccaaugcgaacccgaacgcuaauccuaacgccaaucccaacgccaaucccaacgcuaauccuaacgccaauccgaacgcuaaucccaacgccaauccuaacgcgaaucccaacgccaauccuaacgcuaaccccaaugccaacccuaaugcuaaccccaaugccaacccgaauaagaacaaucaggggaacggacaaggccauaauaugccuaacgaucccaaucggaacgucgacgaaaaugcgaacgccaacagcgcugugaaaaauaacaauaacgaggaaccuuccgauaagcacaucaaagaguaucugaauaagauucagaacucucuuagcacggaguggucccccuguagcguuaccugcggcaaugggauccaggugcgcauuaagccgggaucugccaacaaaccuaaggacgaacuggacuacgcuaaugauaucgagaaaaagauuuguaaaauggaaaagugcuccagcgucuuuaacgugguuaauucuuccaucggccucaucauggugcugagcuuccuguuucucaacugaggacuagugcaucacauuuaaaagcaucucagccuaccaugagaauaagagaaagaaaaugaagaucaauagcuuauucaucucuuuuucuuuuucguugguguaaagccaacacccugucuaaaaaacauaaauuucuuuaaucauuuugccucuuuucucugugcuucaauuaauaaaaaauggaaagaaccuagaucuaaaaaaaaaaaaaaaaaaaaaaaaaaaaaaaaaaaaaaaaaaaaaaaaaaaaaaaaaaaaaaaaugcaucccccccccccccccccccccccccccccccaaaggcucuuuucagagccaccagaauu

SEQ ID NO: 1102 - RNA, 1573 nt, Artificial Sequence
  mRNA Design i-2 (A64-N5-C30-hSL-N5) comprising derived and/or modified sequence from Pf(3D7)__XP_001351122.1__HsSPARC_Pf-CSP(19-397) (opt5)
ggggcgcugccuacggagguggcagccaucuccuucucggcaucaagcuuaccaugagagccuggaucuucuuucugcucugccuggcuggccgggcccuugcgcuguuccaggaguaccaauguuaugggagcuccucuaacacccgcgugcucaaugaacugaacuacgacaaugcuggaacaaaccuuuauaaugagcuggaaaugaacuacuauggcaagcaggagaauugguacagccucaaaaagaacuccagaucucugggggaaaaugaugacggaaacaaugaggauaacgagaaacugcggaagcccaaacacaagaagcucaaacagccugccgacggcaauccggaucccaacgccaauccuaacgucgaccccaacgcuaauccuaacguugaucccaaugccaacccuaauguggacccgaacgcuaaucccaacgccaauccuaacgcgaaucccaacgccaauccuaacgcuaaucccaacgccaacccgaaugcuaacccuaaugccaaccccaaugcgaacccuaaugccaaccccaaugcuaaccccaaugccaacccuaaugcuaacccgaaugccaaccccaacgccaauccuaacgcuaaucccaacgcgaauccuaacguggaucccaaugccaacccgaaugcuaacccuaaugccaaccccaaugccaacccuaaugcuaaccccaacgccaauccuaacgcgaaucccaacgcuaauccgaacgccaauccuaacgccaaucccaacgcuaaucccaacgccaauccuaacgcuaauccgaacgccaaucccaacgcgaacccuaaugccaaccccaaugcuaacccuaaugccaaccccaauaagaacaaucaggggaacggacaaggccauaauaugccuaacgaccccaaucgcaacgucgaugaaaaugcuaacgccaacagcgcggugaaaaauaacaauaacgaggaaccguccgacaagcacauuaaagaguaucugaauaagauccagaacucucuuagcacggagugguccccuugcagcguuaccuguggcaaugggauucaggugagaaucaagcccggaucugccaacaaaccuaaggaugaacuggacuacgcuaaugacauugagaaaaagaucugcaaaauggaaaaguguuccagcgucuuuaacgugguuaauucuuccaucggccucauuauggugcugagcuuccuuuuucugaacugaggacuagugcaucacauuuaaaagcaucucagccuaccaugagaauaagagaaagaaaaugaagaucaauagcuuauucaucucuuuuucuuuuucguugguguaaagccaacacccugucuaaaaaacauaaauuucuuuaaucauuuugccucuuuucucugugcuucaauuaauaaaaaauggaaagaaccuagaucuaaaaaaaaaaaaaaaaaaaaaaaaaaaaaaaaaaaaaaaaaaaaaaaaaaaaaaaaaaaaaaaaugcaucccccccccccccccccccccccccccccccaaaggcucuuuucagagccaccagaauu

SEQ ID NO: 1103 - RNA, 1576 nt, Artificial Sequence
  mRNA Design i-2 (A64-N5-C30-hSL-N5) comprising derived and/or modified sequence from Pf(3D7)__XP_001351122.1__IgE_Pf-CSP(19-397) (opt5)
ggggcgcugccuacggagguggcagccaucuccuucucggcaucaagcuuaccauggacuggaccuggauccuguuccucguggccgcugccacaagaguccacagccuguuucaggaguaccaaugcuauggcuccucuagcaacacgcggguucuuaaugaacugaacuacgauaaugcggggaccaaccucuauaaugagcuggaaaugaacuacuauggaaagcaggagaauugguacucccuuaaaaagaacucucgcagccugggcgaaaaugacgaugggaacaaugaggacaacgagaaacucagaaagcccaaacauaagaagcugaaacagccugcugauggaaauccggaccccaacgccaauccuaacguggaucccaacgccaauccuaacguggaccccaaugcuaacccuaaugucgauccgaacgccaaucccaacgcuaauccuaacgccaaucccaacgcgaauccuaacgccaaucccaacgcuaacccgaaugccaacccuaaugcuaaccccaaugccaacccuaaugcgaaccccaaugccaaccccaaugcuaacccuaaugccaacccgaaugcuaaccccaacgccaauccuaacgccaaucccaacgcuaauccuaacguggaccccaaugcgaacccgaaugccaacccuaaugcuaaccccaaugccaacccuaaugccaaccccaacgcuaauccuaacgccaaucccaacgcgaauccgaacgcuaauccuaacgccaaucccaacgccaaucccaacgcuaauccuaacgccaauccgaacgcuaaucccaacgccaacccuaaugcgaaccccaaugccaacccuaaugcuaaccccaauaagaacaaucagggcaacgggcaaggacacaauaugccuaacgaucccaaucggaacguugacgaaaaugccaacgcuaacuccgccgugaaaaauaacaauaacgaggaaccgucugauaagcauauuaaagaguaucugaauaagauccagaacagccucuccacagaguggagcccuuguucugugaccugcggcaauggcauucagguccgcaucaagcccggguccgcgaacaaaccuaaggacgaacuggacuacgccaaugauauugagaaaaagaucuguaaaauggaaaagugcagcucuguuuucaacguggucaauuccagcaucggacuuauuauggugcugucuuuucucuuccugaacugaggacuagugcaucacauuuaaaagcaucucagccuaccaugagaauaagagaaagaaaaugaagaucaauagcuuauucaucucuuuuucuuuuucguugguguaaagccaacacccugucuaaaaaacauaaauuucuuuaaucauuuugccucuuuucucugugcuucaauuaauaaaaaauggaaagaaccuagaucuaaaaaaaaaaaaaaaaaaaaaaaaaaaaaaaaaaaaaaaaaaaaaaaaaaaaaaaaaaaaaaaaugcaucccccccccccccccccccccccccccccccaaaggcucuuuucagagccaccagaauu

SEQ ID NO: 1104 - RNA, 1741 nt, Artificial Sequence
  mRNA Design i-2 (A64-N5-C30-hSL-N5) comprising derived and/or modified sequence from Pf(3D7)__XP_001351122.1__Pf-CSP_L(G4SG4)_TM domain HA (opt5)
ggggcgcugccuacggagguggcagccaucuccuucucggcaucaagcuuaccaugaugagaaagcuggccauccucagcguguccucuuuccuguuugucgaggcucuuuuccaggaauaccaaugcuauggcagcuccucuaacacccggguucugaaugagcucaacuacgacaaugccgggacaaaccuguauaaugaacuugagaugaacuacuauggaaaacaggaaaauugguacagccugaagaaaaacucccgcucucucggcgagaaugaugacgggaacaaugaggauaacgaaaagcugagaaaacccaagcacaagaaacugaagcagccugcggacggaaauccggaucccaacgcuaauccuaacguggaccccaacgccaauccuaacguggaucccaaugccaacccuaaugucgacccgaacgcuaaucccaacgccaauccuaacgcuaaucccaacgccaauccuaacgcgaaucccaacgccaacccgaaugcuaacccuaaugccaaccccaaugcuaacccuaaugccaaccccaaugcgaaccccaaugccaacccuaaugcuaacccgaaugccaaccccaacgcuaauccuaacgccaaucccaacgccaauccuaacguggaucccaaugcuaacccgaaugcgaacccuaaugccaaccccaaugcuaacccuaaugccaaccccaacgccaauccuaacgcuaaucccaacgccaauccgaacgcgaauccuaacgcuaaucccaacgccaaucccaacgccaauccuaacgcuaauccgaacgccaaucccaacgcuaacccuaaugccaaccccaaugcgaacccuaaugccaaccccaauaaaaacaaucagggcaacgggcaaggacauaauaugccuaacgaccccaaucggaacguugaugagaaugcuaacgccaacagcgcugugaagaauaacaauaacgaggaaccguccgacaaacacauuaaggaguaucucaauaagauccagaacagccugucuacggaaugguccccuuguagcgugaccugcggcaauggcauucagguccgcaucaaacccgggucugccaacaagccuaaagaugagcuugacuacgcgaaugacauugaaaagaaaaucuguaagauggagaaaugcuccagcguuuuuaacguggucaauucuuccaucggacugauuauggugcucagcuuccuguuucuuaacggcgggggaggcuccgggggaggcggcaagcuggaaucuacaagaaucuaccagauucucgccaucuauagcaccguggcuuccagccugguccugguugugucucucggggccauuuccuucuggauguguagcaauggaucucugcaaugccggaucuguauuugaggacuagugcaucacauuuaaaagcaucucagccuaccaugagaauaagagaaagaaaaugaagaucaauagcuuauucaucucuuuuucuuuuucguugguguaaagccaacacccugucuaaaaaacauaaauuucuuuaaucauuuugccucuuuucucugugcuucaauuaauaaaaaauggaaagaaccuagaucuaaaaaaaaaaaaaaaaaaaaaaaaaaaaaaaaaaaaaaaaaaaaaaaaaaaaaaaaaaaaaaaaugcaucccccccccccccccccccccccccccccccaaaggcucuuuucagagccaccagaauu

SEQ ID NO: 1105 - RNA, 1615 nt, Artificial Sequence
  mRNA Design i-2 (A64-N5-C30-hSL-N5) comprising derived and/or modified sequence from Pf(3D7)__XP_001351122.1__Pf-CSP(199-377)_L(PVTN)_HBsAg (opt5)
ggggcgcugccuacggagguggcagccaucuccuucucggcaucaagcuuaccauggaccccaacgccaauccuaacgcuaauccgaacgccaaucccaacgcgaauccuaacgcuaaucccaacgccaauccuaacgccaaucccaacgcuaauccuaacgccaacccgaaugcuaaccccaaugccaacccuaaugcgaaccccaaugccaacccuaaugcuaaccccaaugccaacccgaaugcuaacccuaaugccaaccccaacgcgaauccuaacaagaauaaccagggcaaugggcaaggacacaacaugcccaaugaucccaacagaaauguggacgagaacgccaaugcuaacagcgccgucaaaaauaacaauaacgaggaaccuuccgauaagcauaucaaagaauaccugaacaagauucaaaauucucucagcaccgagugguccccgugcucuguuacauguggcaacgggauccaggugcggauuaaacccggaagcgcuaauaagccuaaggacgaacuggauuaugccaacgacaucgagaaaaagauuugcaaaauggagaaguguuccucugugcccgucacgaauauggaaaacaucaccagcggcuuccuugggccucugcucgugcugcaggccggauuuuuccuucugacacgcauccucaccauuccccagucccuggauagcugguggacaucucugaauuuucucggcggcuccccgguuugccuggggcagaacagccagucuccuaccuccaaucacagccccacaucuuguccucccaucugcccuggauacagauggaugugucuucggcgcuucauuaucuuucuguucauucuccugcuuugccugaucuuucuccuggugcugcucgacuaucagggcaugcugcccgucuguccgcuuauuccuggguccaccacgaccaacacaggacccugcaaaaccuguacaacccccgcucaaggcaauagcauguucccuuccugcugcuguacgaagccgacagaugggaacugcaccuguauccccaucccuucuagcugggcguuugccaaguaccugugggagugggcuuccgugagauucagcuggcucucucugcuuguucccuuugugcagugguucgucggacuguccccuacaguguggcucagcgccauuuggaugaugugguauuggggccccucucuguacagcaucguguccccuuuuauuccccugcucccgaucuucuucugccugugggucuauauuugaggacuagugcaucacauuuaaaagcaucucagccuaccaugagaauaagagaaagaaaaugaagaucaauagcuuauucaucucuuuuucuuuuucguugguguaaagccaacacccugucuaaaaaacauaaauuucuuuaaucauuuugccucuuuucucugugcuucaauuaauaaaaaauggaaagaaccuagaucuaaaaaaaaaaaaaaaaaaaaaaaaaaaaaaaaaaaaaaaaaaaaaaaaaaaaaaaaaaaaaaaaugcaucccccccccccccccccccccccccccccccaaaggcucuuuucagagccaccagaauu

SEQ ID NO: 1106 - RNA, 1657 nt, Artificial Sequence
  mRNA Design i-2 (A64-N5-C30-hSL-N5) comprising derived and/or modified sequence from Pf(3D7)__XP_001351122.1__Pf-CSP(199-387)_L(PVTN)_HBsAg (opt5)
ggggcgcugccuacggagguggcagccaucuccuucucggcaucaagcuuaccaugauggcccccgacccuaacgcuaauccgaacgccaaucccaacgcgaauccuaacgcuaaucccaacgccaauccuaacgccaaucccaacgcuaauccuaacgccaauccgaacgcuaaccccaaugccaacccuaaugcgaaccccaaugccaacccuaaugcuaaccccaaugccaacccgaaugcuaacccuaaugccaaccccaaugcgaacccuaacgccaaucccaacaagaauaaccagggcaaugggcaaggacacaacaugcccaaugauccuaacagaaauguggacgagaacgcuaaugccaacagcgcugucaaaaauaacaauaacgaggaaccguccgauaagcauaucaaagaauaccugaacaagauucaaaauucucucagcaccgaguggucccccugcucuguuacauguggcaacgggauccaggugcggauuaaaccuggaagcgccaauaagcccaaggacgaacuggauuaugccaacgacaucgagaaaaagauuugcaaaauggagaaguguuccucuguguucaaugucgugaacagcuccaucggccuugggccuguuacgaauauggaaaacaucaccagcggauuucugggcccccuccuggugcuucaggcuggcuucuuucugcucacacgcauucugaccaucccgcagucucuggauuccugguggacaagccucaauuuccuugggggaucuccugucugccugggccagaacucccagagccccaccucuaaucacuccccuacaagcugucccccuauuugccccggguacagauggaugugucugcggcgcuuuaucauuuuccucuuuauccugcuucugugccucauuuuccugcuggugcuccuggacuaucagggaaugcuuccgguuuguccucugauccccggcuccaccacgaccaacacagggcccugcaaaaccuguacaaccccugcgcaaggaaauucuauguuuccgagcugcugcuguacgaagcccacagauggcaacugcaccuguaucccuauucccuccagcugggccuucgcuaaguaccucugggagugggccucugugagauuuuccuggcugagccuucuggucccuuucgugcagugguuugugggccucucucccacagucuggcugagcgccaucuggaugaugugguauugggggccuucccuguacucuauuguuagccccuucaucccgcuccugccuauuuucuuuugccuuuggguguauaucugaggacuagugcaucacauuuaaaagcaucucagccuaccaugagaauaagagaaagaaaaugaagaucaauagcuuauucaucucuuuuucuuuuucguugguguaaagccaacacccugucuaaaaaacauaaauuucuuuaaucauuuugccucuuuucucugugcuucaauuaauaaaaaauggaaagaaccuagaucuaaaaaaaaaaaaaaaaaaaaaaaaaaaaaaaaaaaaaaaaaaaaaaaaaaaaaaaaaaaaaaaaugcaucccccccccccccccccccccccccccccccaaaggcucuuuucagagccaccagaauu

SEQ ID NO: 1107 - RNA, 841 nt, Artificial Sequence
  mRNA Design i-2 (A64-N5-C30-hSL-N5) comprising derived and/or modified sequence from Pf(3D7)__XP_001351122.1__HsALB_Pf-CSP(19-152) (opt5)
ggggcgcugccuacggagguggcagccaucuccuucucggcaucaagcuuaccaugaagugggugaccuucaucagccugcucuuucuguucuccucugccuacagccuuuuucaggaguaucaaugcuacggcuccucuagcaacacaagaguccugaaugaacucaacuaugacaaugcugggacgaaccuguacaaugagcuugaaaugaacuauuacggaaaacaggagaauugguauucccugaagaaaaacucucggagccucggcgaaaaugaugacgggaacaaugaggauaacgagaagcugcgcaaacccaagcacaagaaacugaagcagccugccgacggaaauccggaucccaacgcgaauccuaacguugaccccaacgcuaauccuaacguggaucccaaugccaacccuaauguggacccgaacgccaaucccaacgcuaauccuaacgccaaucccaacgcuaauccuaacgccaaucccaacgcgaacccgugaggacuagugcaucacauuuaaaagcaucucagccuaccaugagaauaagagaaagaaaaugaagaucaauagcuuauucaucucuuuuucuuuuucguugguguaaagccaacacccugucuaaaaaacauaaauuucuuuaaucauuuugccucuuuucucugugcuucaauuaauaaaaaauggaaagaaccuagaucuaaaaaaaaaaaaaaaaaaaaaaaaaaaaaaaaaaaaaaaaaaaaaaaaaaaaaaaaaaaaaaaaugcaucccccccccccccccccccccccccccccccaaaggcucuuuucagagccaccagaauu

SEQ ID NO: 1108 - RNA, 961 nt, Artificial Sequence
  mRNA Design i-2 (A64-N5-C30-hSL-N5) comprising derived and/or modified sequence from Pf(3D7)__XP_001351122.1__HsALB_Pf-CSP(19-192) (opt5)
ggggcgcugccuacggagguggcagccaucuccuucucggcaucaagcuuaccaugaagugggugaccuucaucagccugcucuuucuguucuccucugccuacagccuuuuucaggaguaucaaugcuacggcuccucuagcaacacaagaguccugaaugaacucaacuaugacaaugcugggacgaaccuguacaaugagcuugaaaugaacuauuacggaaaacaggagaauugguauucccugaagaaaaacucucggagccucggcgaaaaugaugacgggaacaaugaggauaacgagaagcugcgcaaacccaagcacaagaaacugaagcagccugccgacggaaauccggaucccaacgcgaauccuaacguugaccccaacgcuaauccuaacguggaucccaaugccaacccuaauguggacccgaacgccaaucccaacgcuaauccuaacgccaaucccaacgcuaauccuaacgccaaucccaacgcgaacccgaaugccaacccuaaugcuaaccccaaugccaacccuaaugcuaaccccaaugccaaccccaaugcgaacccuaaugccaacccgaaugcuaaccccaacgccaauccuaacgcuaaucccugaggacuagugcaucacauuuaaaagcaucucagccuaccaugagaauaagagaaagaaaaugaagaucaauagcuuauucaucucuuuuucuuuuucguugguguaaagccaacacccugucuaaaaaacauaaauuucuuuaaucauuuugccucuuuucucugugcuucaauuaauaaaaaauggaaagaaccuagaucuaaaaaaaaaaaaaaaaaaaaaaaaaaaaaaaaaaaaaaaaaaaaaaaaaaaaaaaaaaaaaaaaugcaucccccccccccccccccccccccccccccccaaaggcucuuuucagagccaccagaauu

SEQ ID NO: 1109 - RNA, 1201 nt, Artificial Sequence
  mRNA Design i-2 (A64-N5-C30-hSL-N5) comprising derived and/or modified sequence from Pf(3D7)__XP_001351122.1__HsALB_Pf-CSP(19-272) (opt5)
ggggcgcugccuacggagguggcagccaucuccuucucggcaucaagcuuaccaugaagugggugaccuucaucagccugcucuuucuguucuccucugccuacagccuuuuucaggaguaucaaugcuacggcuccucuagcaacacaagaguccugaaugaacucaacuaugacaaugcugggacgaaccuguacaaugagcuugaaaugaacuauuacggaaaacaggagaauugguauucccugaagaaaaacucucggagccucggcgaaaaugaugacgggaacaaugaggauaacgagaagcugcgcaaacccaagcacaagaaacugaagcagccugccgacggaaauccggaucccaacgcgaauccuaacguugaccccaacgcuaauccuaacguggaucccaaugccaacccuaauguggacccgaacgccaaucccaacgcuaauccuaacgccaaucccaacgcuaauccuaacgccaaucccaacgcgaacccgaaugccaacccuaaugcuaaccccaaugccaacccuaaugcuaaccccaaugccaaccccaaugcgaacccuaaugccaacccgaaugcuaaccccaacgccaauccuaacgcuaaucccaacgccaauccuaacgucgaucccaaugccaacccgaaugcuaacccuaaugcgaaccccaaugccaacccuaaugcuaaccccaacgccaauccuaacgccaaucccaacgcuaauccgaacgccaauccuaacgcgaaucccaacgcuaaucccaacgccaauccuaacgccaauccgaacgcuaaucccaacgccaacccuaaugcuaaccccaaugccaacccuaaugcgaaccccugaggacuagugcaucacauuuaaaagcaucucagccuaccaugagaauaagagaaagaaaaugaagaucaauagcuuauucaucucuuuuucuuuuucguugguguaaagccaacacccugucuaaaaaacauaaauuucuuuaaucauuuugccucuuuucucugugcuucaauuaauaaaaaauggaaagaaccuagaucuaaaaaaaaaaaaaaaaaaaaaaaaaaaaaaaaaaaaaaaaaaaaaaaaaaaaaaaaaaaaaaaaugcaucccccccccccccccccccccccccccccccaaaggcucuuuucagagccaccagaauu

SEQ ID NO: 1110 - RNA, 1363 nt, Artificial Sequence
  mRNA Design i-2 (A64-N5-C30-hSL-N5) comprising derived and/or modified sequence from Pf(3D7)__XP_001351122.1__HsALB_Pf-CSP(19-272)_L(AAY)_Pf-CSP(310-3 27)_L(AAY)_Pf-CSP(346-375) (opt5)
ggggcgcugccuacggagguggcagccaucuccuucucggcaucaagcuuaccaugaagugggugaccuucaucagccugcucuuucuguucuccucugccuacagccuuuuucaggaguaucaaugcuacggcuccucuagcaacacaagaguccugaaugaacucaacuaugacaaugcugggacgaaccuguacaaugagcuugaaaugaacuauuacggaaaacaggagaauugguauucccugaagaaaaacucucggagccucggcgaaaaugaugacgggaacaaugaggauaacgagaagcugcgcaaacccaagcacaagaaacugaagcagccugccgacggaaauccggaucccaacgcgaauccuaacguugaccccaacgcuaauccuaacguggaucccaaugccaacccuaauguggacccgaacgccaaucccaacgcuaauccuaacgccaaucccaacgcuaauccuaacgccaaucccaacgcgaacccgaaugccaacccuaaugcuaaccccaaugccaacccuaaugcuaaccccaaugccaaccccaaugcgaacccuaaugccaacccgaaugcuaaccccaacgccaauccuaacgcuaaucccaacgccaauccuaacgucgaucccaaugccaacccgaaugcuaacccuaaugcgaaccccaaugccaacccuaaugcuaaccccaacgccaauccuaacgccaaucccaacgcuaauccgaacgccaauccuaacgcgaaucccaacgcuaaucccaacgccaauccuaacgccaauccgaacgcuaaucccaacgccaacccuaaugcuaaccccaaugccaacccuaaugcgaaccccgccgcuuacgaaccuuccgacaaacauauuaaggaguaccucaauaaaauccagaacagccuggccgcuuauauuaagcccggcucugccaauaagccgaaagaugaacuugacuacgcgaacgauaucgagaagaaaauuuguaagauggagaaaugcuccugaggacuagugcaucacauuuaaaagcaucucagccuaccaugagaauaagagaaagaaaaugaagaucaauagcuuauucaucucuuuuucuuuuucguugguguaaagccaacacccugucuaaaaaacauaaauuucuuuaaucauuuugccucuuuucucugugcuucaauuaauaaaaaauggaaagaaccuagaucuaaaaaaaaaaaaaaaaaaaaaaaaaaaaaaaaaaaaaaaaaaaaaaaaaaaaaaaaaaaaaaaaugcaucccccccccccccccccccccccccccccccaaaggcucuuuucagagccaccagaauu

SEQ ID NO: 1111 - RNA, 1324 nt, Artificial Sequence
  mRNA Design i-2 (A64-N5-C30-hSL-N5) comprising derived and/or modified sequence from Pf(3D7)__XP_001351122.1__HsALB_Pf-CSP(19-272)_L(AAY)_Pf-CSP(346-3 65)_L(AAY)_P2 (opt5)
ggggcgcugccuacggagguggcagccaucuccuucucggcaucaagcuuaccaugaagugggugaccuucaucagccugcucuuucuguucuccucugccuacagccuuuuucaggaguaucaaugcuacggcuccucuagcaacacaagaguccugaaugaacucaacuaugacaaugcugggacgaaccuguacaaugagcuugaaaugaacuauuacggaaaacaggagaauugguauucccugaagaaaaacucucggagccucggcgaaaaugaugacgggaacaaugaggauaacgagaagcugcgcaaacccaagcacaagaaacugaagcagccugccgacggaaauccggaucccaacgcgaauccuaacguugaccccaacgcuaauccuaacguggaucccaaugccaacccuaauguggacccgaacgccaaucccaacgcuaauccuaacgccaaucccaacgcuaauccuaacgccaaucccaacgcgaacccgaaugccaacccuaaugcuaaccccaaugccaacccuaaugcuaaccccaaugccaaccccaaugcgaacccuaaugccaacccgaaugcuaaccccaacgccaauccuaacgcuaaucccaacgccaauccuaacgucgaucccaaugccaacccgaaugcuaacccuaaugcgaaccccaaugccaacccuaaugcuaaccccaacgccaauccuaacgccaaucccaacgcuaauccgaacgccaauccuaacgcgaaucccaacgcuaaucccaacgccaauccuaacgccaauccgaacgcuaaucccaacgccaacccuaaugcuaaccccaaugccaacccuaaugcgaaccccgccgcuuacauuaaaccuggcuccgccaauaagcccaaagacgaacucgauuacgcuaacgacaucgaggccgcguaucaguacauuaaggccaauagcaaguucaucgggauuaccgaacugugaggacuagugcaucacauuuaaaagcaucucagccuaccaugagaauaagagaaagaaaaugaagaucaauagcuuauucaucucuuuuucuuuuucguugguguaaagccaacacccugucuaaaaaacauaaauuucuuuaaucauuuugccucuuuucucugugcuucaauuaauaaaaaauggaaagaaccuagaucuaaaaaaaaaaaaaaaaaaaaaaaaaaaaaaaaaaaaaaaaaaaaaaaaaaaaaaaaaaaaaaaaugcaucccccccccccccccccccccccccccccccaaaggcucuuuucagagccaccagaauu

SEQ ID NO: 1112 - RNA, 1318 nt, Artificial Sequence
  mRNA Design i-2 (A64-N5-C30-hSL-N5) comprising derived and/or modified sequence from Pf(3D7)__XP_001351122.1__HsALB_Pf-CSP(19-272)_L(AAY)_Pf-CSP(346-3 65)_L(AAY)_PADRE (opt5)
ggggcgcugccuacggagguggcagccaucuccuucucggcaucaagcuuaccaugaagugggugaccuucaucagccugcucuuucuguucuccucugccuacagccuuuuucaggaguaucaaugcuacggcuccucuagcaacacaagaguccugaaugaacucaacuaugacaaugcugggacgaaccuguacaaugagcuugaaaugaacuauuacggaaaacaggagaauugguauucccugaagaaaaacucucggagccucggcgaaaaugaugacgggaacaaugaggauaacgagaagcugcgcaaacccaagcacaagaaacugaagcagccugccgacggaaauccggaucccaacgcgaauccuaacguugaccccaacgcuaauccuaacguggaucccaaugccaacccuaauguggacccgaacgccaaucccaacgcuaauccuaacgccaaucccaacgcuaauccuaacgccaaucccaacgcgaacccgaaugccaacccuaaugcuaaccccaaugccaacccuaaugcuaaccccaaugccaaccccaaugcgaacccuaaugccaacccgaaugcuaaccccaacgccaauccuaacgcuaaucccaacgccaauccuaacgucgaucccaaugccaacccgaaugcuaacccuaaugcgaaccccaaugccaacccuaaugcuaaccccaacgccaauccuaacgccaaucccaacgcuaauccgaacgccaauccuaacgcgaaucccaacgcuaaucccaacgccaauccuaacgccaauccgaacgcuaaucccaacgccaacccuaaugcuaaccccaaugccaacccuaaugcgaaccccgccgcuuacauuaaaccuggcuccgccaauaagcccaaagacgaacucgauuacgcuaacgacaucgaggccgcguaugccaaguucguggcugccuggacccugaaggcugccgccugaggacuagugcaucacauuuaaaagcaucucagccuaccaugagaauaagagaaagaaaaugaagaucaauagcuuauucaucucuuuuucuuuuucguugguguaaagccaacacccugucuaaaaaacauaaauuucuuuaaucauuuugccucuuuucucugugcuucaauuaauaaaaaauggaaagaaccuagaucuaaaaaaaaaaaaaaaaaaaaaaaaaaaaaaaaaaaaaaaaaaaaaaaaaaaaaaaaaaaaaaaaugcaucccccccccccccccccccccccccccccccaaaggcucuuuucagagccaccagaauu

SEQ ID NO: 1113 - RNA, 1375 nt, Artificial Sequence
  mRNA Design i-2 (A64-N5-C30-hSL-N5) comprising derived and/or modified sequence from Pf(3D7)__XP_001351122.1__HsALB_Pf-CSP(19-272)_L(G4S)_Pf-CSP(310-3 27)_L(G4S)_Pf-CSP(346-375) (opt5)
ggggcgcugccuacggagguggcagccaucuccuucucggcaucaagcuuaccaugaagugggugaccuucaucagccugcucuuucuguucuccucugccuacagccuuuuucaggaguaucaaugcuacggcuccucuagcaacacaagaguccugaaugaacucaacuaugacaaugcugggacgaaccuguacaaugagcuugaaaugaacuauuacggaaaacaggagaauugguauucccugaagaaaaacucucggagccucggcgaaaaugaugacgggaacaaugaggauaacgagaagcugcgcaaacccaagcacaagaaacugaagcagccugccgacggaaauccggaucccaacgcgaauccuaacguugaccccaacgcuaauccuaacguggaucccaaugccaacccuaauguggacccgaacgccaaucccaacgcuaauccuaacgccaaucccaacgcuaauccuaacgccaaucccaacgcgaacccgaaugccaacccuaaugcuaaccccaaugccaacccuaaugcuaaccccaaugccaaccccaaugcgaacccuaaugccaacccgaaugcuaaccccaacgccaauccuaacgcuaaucccaacgccaauccuaacgucgaucccaaugccaacccgaaugcuaacccuaaugcgaaccccaaugccaacccuaaugcuaaccccaacgccaauccuaacgccaaucccaacgcuaauccgaacgccaauccuaacgcgaaucccaacgcuaaucccaacgccaauccuaacgccaauccgaacgcuaaucccaacgccaacccuaaugcuaaccccaaugccaacccuaaugcgaaccccggcgggggaggcuccgaaccuagcgacaaacauauuaaggaguaccucaauaaaauccagaacucucugggcgggggaggcuccauuaagcccgggagcgccaauaagccgaaagaugaacuugacuacgcuaacgauaucgagaagaaaauuuguaagauggagaaaugcucuugaggacuagugcaucacauuuaaaagcaucucagccuaccaugagaauaagagaaagaaaaugaagaucaauagcuuauucaucucuuuuucuuuuucguugguguaaagccaacacccugucuaaaaaacauaaauuucuuuaaucauuuugccucuuuucucugugcuucaauuaauaaaaaauggaaagaaccuagaucuaaaaaaaaaaaaaaaaaaaaaaaaaaaaaaaaaaaaaaaaaaaaaaaaaaaaaaaaaaaaaaaaugcaucccccccccccccccccccccccccccccccaaaggcucuuuucagagccaccagaauu

SEQ ID NO: 1114 - RNA, 1360 nt, Artificial Sequence
  mRNA Design i-2 (A64-N5-C30-hSL-N5) comprising derived and/or modified sequence from Pf(3D7)__XP_001351122.1__HsALB_Pf-CSP(19-272)_L(G4S)_Pf-CSP(310-3 27)_Pf-CSP(346-375) (opt5)
ggggcgcugccuacggagguggcagccaucuccuucucggcaucaagcuuaccaugaagugggugaccuucaucagccugcucuuucuguucuccucugccuacagccuuuuucaggaguaucaaugcuacggcuccucuagcaacacaagaguccugaaugaacucaacuaugacaaugcugggacgaaccuguacaaugagcuugaaaugaacuauuacggaaaacaggagaauugguauucccugaagaaaaacucucggagccucggcgaaaaugaugacgggaacaaugaggauaacgagaagcugcgcaaacccaagcacaagaaacugaagcagccugccgacggaaauccggaucccaacgcgaauccuaacguugaccccaacgcuaauccuaacguggaucccaaugccaacccuaauguggacccgaacgccaaucccaacgcuaauccuaacgccaaucccaacgcuaauccuaacgccaaucccaacgcgaacccgaaugccaacccuaaugcuaaccccaaugccaacccuaaugcuaaccccaaugccaaccccaaugcgaacccuaaugccaacccgaaugcuaaccccaacgccaauccuaacgcuaaucccaacgccaauccuaacgucgaucccaaugccaacccgaaugcuaacccuaaugcgaaccccaaugccaacccuaaugcuaaccccaacgccaauccuaacgccaaucccaacgcuaauccgaacgccaauccuaacgcgaaucccaacgcuaaucccaacgccaauccuaacgccaauccgaacgcuaaucccaacgccaacccuaaugcuaaccccaaugccaacccuaaugcgaaccccggcgggggaggcuccgaaccuagcgacaaacauauuaaggaguaccucaauaaaauccagaacucucugauuaagcccggcuccgccaauaagccgaaagaugaacuugacuacgcuaacgauaucgagaagaaaauuuguaagauggagaaaugcagcugaggacuagugcaucacauuuaaaagcaucucagccuaccaugagaauaagagaaagaaaaugaagaucaauagcuuauucaucucuuuuucuuuuucguugguguaaagccaacacccugucuaaaaaacauaaauuucuuuaaucauuuugccucuuuucucugugcuucaauuaauaaaaaauggaaagaaccuagaucuaaaaaaaaaaaaaaaaaaaaaaaaaaaaaaaaaaaaaaaaaaaaaaaaaaaaaaaaaaaaaaaaugcaucccccccccccccccccccccccccccccccaaaggcucuuuucagagccaccagaauu

SEQ ID NO: 1115 - RNA, 1360 nt, Artificial Sequence
  mRNA Design i-2 (A64-N5-C30-hSL-N5) comprising derived and/or modified sequence from Pf(3D7)__XP_001351122.1__HsALB_Pf-CSP(19-325) (opt5)
ggggcgcugccuacggagguggcagccaucuccuucucggcaucaagcuuaccaugaagugggugaccuucaucagccugcucuuucuguucuccucugccuacagccuuuuucaggaguaucaaugcuacggcuccucuagcaacacaagaguccugaaugaacucaacuaugacaaugcugggacgaaccuguacaaugagcuugaaaugaacuauuacggaaaacaggagaauugguauucccugaagaaaaacucucggagccucggcgaaaaugaugacgggaacaaugaggauaacgagaagcugcgcaaacccaagcacaagaaacugaagcagccugccgacggaaauccggaucccaacgcgaauccuaacguugaccccaacgcuaauccuaacguggaucccaaugccaacccuaauguggacccgaacgccaaucccaacgcuaauccuaacgccaaucccaacgcuaauccuaacgccaaucccaacgcgaacccgaaugccaacccuaaugcuaaccccaaugccaacccuaaugcuaaccccaaugccaaccccaaugcgaacccuaaugccaacccgaaugcuaaccccaacgccaauccuaacgcuaaucccaacgccaauccuaacgucgaucccaaugccaacccgaaugcuaacccuaaugcgaaccccaaugccaacccuaaugcuaaccccaacgccaauccuaacgccaaucccaacgcuaauccgaacgccaauccuaacgcgaaucccaacgcuaaucccaacgccaauccuaacgccaauccgaacgcuaaucccaacgccaacccuaaugcuaaccccaaugccaacccuaaugcgaaccccaauaaaaacaaucagggcaacgggcaaggacauaauaugccuaacgaccccaauagaaacguggaugaaaaugccaacgcuaacuccgccguuaagaauaacaauaacgaggaaccgagcgacaaacacauuaaggaguaccucaauaagauccagaacugaggacuagugcaucacauuuaaaagcaucucagccuaccaugagaauaagagaaagaaaaugaagaucaauagcuuauucaucucuuuuucuuuuucguugguguaaagccaacacccugucuaaaaaacauaaauuucuuuaaucauuuugccucuuuucucugugcuucaauuaauaaaaaauggaaagaaccuagaucuaaaaaaaaaaaaaaaaaaaaaaaaaaaaaaaaaaaaaaaaaaaaaaaaaaaaaaaaaaaaaaaaugcaucccccccccccccccccccccccccccccccaaaggcucuuuucagagccaccagaauu

SEQ ID NO: 1116 - RNA, 1537 nt, Artificial Sequence
  mRNA Design i-2 (A64-N5-C30-hSL-N5) comprising derived and/or modified sequence from Pf(3D7)__XP_001351122.1__HsALB_Pf-CSP(19-384) (opt5)
ggggcgcugccuacggagguggcagccaucuccuucucggcaucaagcuuaccaugaagugggugaccuucaucagccugcucuuucuguucuccucugccuacagccuuuuucaggaguaucaaugcuacggcuccucuagcaacacaagagugcugaaugaacucaacuaugacaaugcugggacgaaccuguacaaugagcuugaaaugaacuauuacggaaaacaggagaauugguauucccugaagaaaaacucucggagccucggcgaaaaugaugacgggaacaaugaggauaacgagaagcugcgcaaacccaagcacaagaaacugaagcagccugccgacggaaauccggaucccaacgcgaauccuaacguugaccccaacgcuaauccuaacguggaucccaaugccaacccuaauguggacccgaacgccaaucccaacgcuaauccuaacgccaaucccaacgcuaauccuaacgccaaucccaacgcgaacccgaaugccaacccuaaugcuaaccccaaugccaacccuaaugcuaaccccaaugccaaccccaaugcgaacccuaaugccaacccgaaugcuaaccccaacgccaauccuaacgcuaaucccaacgccaauccuaacgucgaucccaaugccaacccgaaugcuaacccuaaugcgaaccccaaugccaacccuaaugcuaaccccaacgccaauccuaacgccaaucccaacgcuaauccgaacgccaauccuaacgcgaaucccaacgcuaaucccaacgccaauccuaacgccaauccgaacgcuaaucccaacgccaacccuaaugcuaaccccaaugccaacccuaaugcgaaccccaauaaaaacaaucagggcaacgggcaaggacauaauaugccuaacgaccccaauagaaacguggaugaaaaugccaacgcuaacuccgccguuaagaauaacaauaacgaggaaccgagcgacaaacacauuaaggaguaccucaauaagauccagaacucucuguccaccgaguggagcccuuguucugugacaugcggcaauggcauucagguccggaucaaacccggguccgcuaacaagccuaaagaugaacuugacuacgccaaugacauugagaagaaaaucuguaagauggaaaaaugcagcucuguguucaacguugucaauuccagcugaggacuagugcaucacauuuaaaagcaucucagccuaccaugagaauaagagaaagaaaaugaagaucaauagcuuauucaucucuuuuucuuuuucguugguguaaagccaacacccugucuaaaaaacauaaauuucuuuaaucauuuugccucuuuucucugugcuucaauuaauaaaaaauggaaagaaccuagaucuaaaaaaaaaaaaaaaaaaaaaaaaaaaaaaaaaaaaaaaaaaaaaaaaaaaaaaaaaaaaaaaaugcaucccccccccccccccccccccccccccccccaaaggcucuuuucagagccaccagaauu

SEQ ID NO: 1117 - RNA, 1675 nt, Artificial Sequence
  mRNA Design i-2 (A64-N5-C30-hSL-N5) comprising derived and/or modified sequence from Pf(3D7)__XP_001351122.1__HsALB_Pf-CSP(19-384)_TM domain HA (opt5)
ggggcgcugccuacggagguggcagccaucuccuucucggcaucaagcuuaccaugaagugggugaccuucaucagccugcucuuucuguucuccucugccuacagccuuuuucaggaguaucaaugcuacggcuccucuagcaacacaagaguccugaaugaacucaacuaugacaaugcugggacgaaccuguacaaugagcuugaaaugaacuauuacggaaaacaggagaauugguauucccugaagaaaaacucucggagccucggcgaaaaugaugacgggaacaaugaggauaacgagaagcugcgcaaacccaagcacaagaaacugaagcagccugccgacggaaauccggaucccaacgcgaauccuaacguugaccccaacgcuaauccuaacguggaucccaaugccaacccuaauguggacccgaacgccaaucccaacgcuaauccuaacgccaaucccaacgcuaauccuaacgccaaucccaacgcgaacccgaaugccaacccuaaugcuaaccccaaugccaacccuaaugcuaaccccaaugccaaccccaaugcgaacccuaaugccaacccgaaugcuaaccccaacgccaauccuaacgcuaaucccaacgccaauccuaacgucgaucccaaugccaacccgaaugcuaacccuaaugcgaaccccaaugccaacccuaaugcuaaccccaacgccaauccuaacgccaaucccaacgcuaauccgaacgccaauccuaacgcgaaucccaacgcuaaucccaacgccaauccuaacgccaauccgaacgcuaaucccaacgccaacccuaaugcuaaccccaaugccaacccuaaugcgaaccccaauaaaaacaaucagggcaacgggcaaggacauaauaugccuaacgaccccaauagaaacguggaugaaaaugccaacgcuaacuccgccguuaagaauaacaauaacgaggaaccgagcgacaaacacauuaaggaguaccucaauaagauccagaacucucuguccaccgaguggagcccuuguucugugacaugcggcaauggcauucagguccggaucaaacccggguccgcuaacaagccuaaagaugaacuugacuacgccaaugacauugagaagaaaaucuguaagauggaaaaaugcagcucuguguucaacguugucaauuccagcaagcuggaguccacccgcaucuaucagauucucgcgaucuacucuacaguggccagcucccuggugcuuguggucagccugggagcuauuucuuuuuggauguguuccaacggcagccuccaaugcagaaucuguauuugaggacuagugcaucacauuuaaaagcaucucagccuaccaugagaauaagagaaagaaaaugaagaucaauagcuuauucaucucuuuuucuuuuucguugguguaaagccaacacccugucuaaaaaacauaaauuucuuuaaucauuuugccucuuuucucugugcuucaauuaauaaaaaauggaaagaaccuagaucuaaaaaaaaaaaaaaaaaaaaaaaaaaaaaaaaaaaaaaaaaaaaaaaaaaaaaaaaaaaaaaaaugcaucccccccccccccccccccccccccccccccaaaggcucuuuucagagccaccagaauu

SEQ ID NO: 1118 - RNA, 1387 nt, Artificial Sequence
  mRNA Design i-2 (A64-N5-C30-hSL-N5) comprising derived and/or modified sequence from Pf(3D7)__XP_001351122.1__HsALB_Pf-CSP(82-397) (opt5)
ggggcgcugccuacggagguggcagccaucuccuucucggcaucaagcuuaccaugaagugggugaccuucaucagccugcucuuucuguucuccucugccuacagcgacaacgagaaacuuagaaagcccaaacacaagaaacugaagcagccugcugauggcaauccggaccccaacgccaauccuaacgucgaucccaaugcgaacccuaauguugaccccaacgcuaauccuaacguggauccgaaugccaaccccaaugccaacccuaaugcuaaccccaacgccaauccuaacgcuaaucccaacgccaauccgaacgcgaauccuaacgccaaucccaacgcuaauccuaacgccaaucccaacgcuaaucccaacgccaacccuaaugcgaacccgaaugccaaccccaaugcuaacccuaaugccaaccccaaugcuaacccuaauguggaccccaacgccaauccgaacgccaauccuaacgcuaaccccaaugcgaacccuaaugccaaccccaaugcuaacccuaaugccaaccccaaugccaacccgaaugcuaacccuaaugccaaccccaaugcgaaccccaacgcuaauccuaacgccaauccgaacgccaaucccaacgcuaauccuaacgccaaucccaacgcuaauccuaacgccaaucccaacaagaauaaccaagggaauggacagggccauaacaugccuaacgaucccaaucggaacgucgacgaaaaugcgaacgccaauuccgcugugaaaaacaauaacaaugaggaaccgucugauaagcacauuaaagaguaucucaacaagauccagaauagccuguccacagaauggucuccuugcagcguuacgugugggaacggcauucaggugcgcaucaaacccggauccgccaauaagccuaaggacgagcuugauuacgcuaacgacauugagaaaaagaucugcaaaauggaaaaguguagcucugucuuuaaugugguuaacuccagcaucgggcugauuauggugcucucuuuccuguuucugaacugaggacuagugcaucacauuuaaaagcaucucagccuaccaugagaauaagagaaagaaaaugaagaucaauagcuuauucaucucuuuuucuuuuucguugguguaaagccaacacccugucuaaaaaacauaaauuucuuuaaucauuuugccucuuuucucugugcuucaauuaauaaaaaauggaaagaaccuagaucuaaaaaaaaaaaaaaaaaaaaaaaaaaaaaaaaaaaaaaaaaaaaaaaaaaaaaaaaaaaaaaaaugcaucccccccccccccccccccccccccccccccaaaggcucuuuucagagccaccagaauu

SEQ ID NO: 1119 - RNA, 739 nt, Artificial Sequence
  mRNA Design i-2 (A64-N5-C30-hSL-N5) comprising derived and/or modified sequence from Pf(3D7)__XP_001351122.1__HsALB_Pf-CSP(93-192) (opt5)
ggggcgcugccuacggagguggcagccaucuccuucucggcaucaagcuuaccaugaagugggugaccuucaucagccugcucuuucuguucuccucugccuacagcaaacuuaagcagcccgcugacggcaacccugauccgaaugccaaccccaaugucgacccuaacgcgaaucccaacguugauccuaaugcuaaccccaauguggacccuaacgccaauccgaacgccaaucccaacgcuaauccuaacgccaaccccaaugcuaacccuaaugccaaccccaaugcgaacccgaaugccaacccuaaugcuaaccccaaugccaacccuaaugcuaaccccaaugccaaccccaacgcgaauccuaacgccaauccgaacgcuaaucccaacgccaauccuugaggacuagugcaucacauuuaaaagcaucucagccuaccaugagaauaagagaaagaaaaugaagaucaauagcuuauucaucucuuuuucuuuuucguugguguaaagccaacacccugucuaaaaaacauaaauuucuuuaaucauuuugccucuuuucucugugcuucaauuaauaaaaaauggaaagaaccuagaucuaaaaaaaaaaaaaaaaaaaaaaaaaaaaaaaaaaaaaaaaaaaaaaaaaaaaaaaaaaaaaaaaugcaucccccccccccccccccccccccccccccccaaaggcucuuuucagagccaccagaauu

SEQ ID NO: 1120 - RNA, 979 nt, Artificial Sequence
  mRNA Design i-2 (A64-N5-C30-hSL-N5) comprising derived and/or modified sequence from Pf(3D7)__XP_001351122.1__HsALB_Pf-CSP(93-272) (opt5)
ggggcgcugccuacggagguggcagccaucuccuucucggcaucaagcuuaccaugaagugggugaccuucaucagccugcucuuucuguucuccucugccuacagcaaacuuaagcagcccgcugacggcaacccugauccgaaugccaaccccaaugucgacccuaacgcgaaucccaacguugauccuaaugcuaaccccaauguggacccuaacgccaauccgaacgccaaucccaacgcuaauccuaacgccaaccccaaugcuaacccuaaugccaaccccaaugcgaacccgaaugccaacccuaaugcuaaccccaaugccaacccuaaugcuaaccccaaugccaaccccaacgcgaauccuaacgccaauccgaacgcuaaucccaacgccaauccuaacgcuaaucccaacguggauccuaaugccaaccccaaugccaacccgaaugcuaacccuaacgcgaaucccaacgccaauccuaacgcuaaucccaacgccaauccuaacgccaaucccaacgcuaauccgaacgccaauccuaacgcgaaucccaacgcuaaccccaaugccaacccuaaugccaacccgaaugcuaaccccaaugccaacccuaaugcuaaccccaaugccaacccuugaggacuagugcaucacauuuaaaagcaucucagccuaccaugagaauaagagaaagaaaaugaagaucaauagcuuauucaucucuuuuucuuuuucguugguguaaagccaacacccugucuaaaaaacauaaauuucuuuaaucauuuugccucuuuucucugugcuucaauuaauaaaaaauggaaagaaccuagaucuaaaaaaaaaaaaaaaaaaaaaaaaaaaaaaaaaaaaaaaaaaaaaaaaaaaaaaaaaaaaaaaaugcaucccccccccccccccccccccccccccccccaaaggcucuuuucagagccaccagaauu

SEQ ID NO: 1121 - RNA, 1354 nt, Artificial Sequence
  mRNA Design i-2 (A64-N5-C30-hSL-N5) comprising derived and/or modified sequence from Pf(3D7)__XP_001351122.1__HsALB_Pf-CSP(93-397) (opt5)
ggggcgcugccuacggagguggcagccaucuccuucucggcaucaagcuuaccaugaagugggugaccuucaucagccugcucuuucuguucuccucugccuacagcaaacuuaagcagcccgcugacggcaacccugauccgaaugccaaccccaaugucgacccuaacgcgaaucccaacguugauccuaaugcuaaccccaauguggacccuaacgccaauccgaacgccaaucccaacgcuaauccuaacgccaaccccaaugcuaacccuaaugccaaccccaaugcgaacccgaaugccaacccuaaugcuaaccccaaugccaacccuaaugcuaaccccaaugccaaccccaacgcgaauccuaacgccaauccgaacgcuaaucccaacgccaauccuaacgcuaaucccaacguggauccuaaugccaaccccaaugccaacccgaaugcuaacccuaacgcgaaucccaacgccaauccuaacgcuaaucccaacgccaauccuaacgccaaucccaacgcuaauccgaacgccaauccuaacgcgaaucccaacgcuaaccccaaugccaacccuaaugccaacccgaaugcuaaccccaaugccaacccuaaugcuaaccccaaugccaacccuaauaaaaacaaucaagggaacggacagggccacaauaugcccaacgacccuaacagaaaugucgaugagaacgcgaaugccaacuccgcugugaagaauaacaauaacgaggaacccucugacaaacauauuaaggaauaucugaauaagauccagaacagccucuccacagaguggucuccgugcagcguuacgugugggaauggcauucaggugcggaucaaaccuggauccgccaacaagcccaaagaugaacuggacuacgcuaaugauauugagaagaaaaucugcaagauggagaaguguagcucugucuuuaacgugguuaauuccagcaucgggcuuauuauggugcugucuuuccucuuucugaacugaggacuagugcaucacauuuaaaagcaucucagccuaccaugagaauaagagaaagaaaaugaagaucaauagcuuauucaucucuuuuucuuuuucguugguguaaagccaacacccugucuaaaaaacauaaauuucuuuaaucauuuugccucuuuucucugugcuucaauuaauaaaaaauggaaagaaccuagaucuaaaaaaaaaaaaaaaaaaaaaaaaaaaaaaaaaaaaaaaaaaaaaaaaaaaaaaaaaaaaaaaaugcaucccccccccccccccccccccccccccccccaaaggcucuuuucagagccaccagaauu

SEQ ID NO: 1122 - RNA, 724 nt, Artificial Sequence
  mRNA Design i-2 (A64-N5-C30-hSL-N5) comprising derived and/or modified sequence from Pf(3D7)__XP_001351122.1__HsALB_Pf-CSP(98-192) (opt5)
ggggcgcugccuacggagguggcagccaucuccuucucggcaucaagcuuaccaugaagugggugaccuucaucagccugcucuuucuguucuccucugccuacagcgcugacggcaaccccgauccuaaugccaacccgaaugucgaccccaacgcgaauccuaacguugaucccaaugcuaacccuaauguggaccccaacgccaauccuaacgccaauccgaacgcuaaucccaacgccaacccuaaugcuaaccccaaugccaacccuaaugcgaaccccaaugccaacccgaaugcuaacccuaaugccaaccccaaugcuaacccuaaugccaaccccaacgcgaaucccaacgccaauccuaacgcuaauccgaacgccaaucccugaggacuagugcaucacauuuaaaagcaucucagccuaccaugagaauaagagaaagaaaaugaagaucaauagcuuauucaucucuuuuucuuuuucguugguguaaagccaacacccugucuaaaaaacauaaauuucuuuaaucauuuugccucuuuucucugugcuucaauuaauaaaaaauggaaagaaccuagaucuaaaaaaaaaaaaaaaaaaaaaaaaaaaaaaaaaaaaaaaaaaaaaaaaaaaaaaaaaaaaaaaaugcaucccccccccccccccccccccccccccccccaaaggcucuuuucagagccaccagaauu

SEQ ID NO: 1123 - RNA, 964 nt, Artificial Sequence
  mRNA Design i-2 (A64-N5-C30-hSL-N5) comprising derived and/or modified sequence from Pf(3D7)__XP_001351122.1__HsALB_Pf-CSP(98-272) (opt5)
ggggcgcugccuacggagguggcagccaucuccuucucggcaucaagcuuaccaugaagugggugaccuucaucagccugcucuuucuguucuccucugccuacagcgcugacggcaaccccgauccuaaugccaacccgaaugucgaccccaacgcgaauccuaacguugaucccaaugcuaacccuaauguggaccccaacgccaauccuaacgccaauccgaacgcuaaucccaacgccaacccuaaugcuaaccccaaugccaacccuaaugcgaaccccaaugccaacccgaaugcuaacccuaaugccaaccccaaugcuaacccuaaugccaaccccaacgcgaaucccaacgccaauccuaacgcuaauccgaacgccaaucccaacgcuaauccuaacguggaucccaaugccaacccuaaugccaaccccaaugcuaacccgaacgcgaauccuaacgccaaucccaacgcuaauccuaacgccaaucccaacgccaauccuaacgcuaaucccaacgccaauccgaacgcgaauccuaacgcuaaccccaaugccaaccccaaugccaacccuaaugcuaacccgaaugccaaccccaaugcuaacccuaaugccaaccccugaggacuagugcaucacauuuaaaagcaucucagccuaccaugagaauaagagaaagaaaaugaagaucaauagcuuauucaucucuuuuucuuuuucguugguguaaagccaacacccugucuaaaaaacauaaauuucuuuaaucauuuugccucuuuucucugugcuucaauuaauaaaaaauggaaagaaccuagaucuaaaaaaaaaaaaaaaaaaaaaaaaaaaaaaaaaaaaaaaaaaaaaaaaaaaaaaaaaaaaaaaaugcaucccccccccccccccccccccccccccccccaaaggcucuuuucagagccaccagaauu

SEQ ID NO: 1124 - RNA, 1270 nt, Artificial Sequence
  mRNA Design i-2 (A64-N5-C30-hSL-N5) comprising derived and/or modified sequence from Pf(3D7)__XP_001351122.1__HsALB_Pf-CSP(98-374) (opt5)
ggggcgcugccuacggagguggcagccaucuccuucucggcaucaagcuuaccaugaagugggugaccuucaucagccugcucuuucuguucuccucugccuacagcgcugacggcaaccccgauccuaaugccaacccgaaugucgaccccaacgcgaauccuaacguugaucccaaugcuaacccuaauguggaccccaacgccaauccuaacgccaauccgaacgcuaaucccaacgccaacccuaaugcuaaccccaaugccaacccuaaugcgaaccccaaugccaacccgaaugcuaacccuaaugccaaccccaaugcuaacccuaaugccaaccccaacgcgaaucccaacgccaauccuaacgcuaauccgaacgccaaucccaacgcuaauccuaacguggaucccaaugccaacccuaaugccaaccccaaugcuaacccgaacgcgaauccuaacgccaaucccaacgcuaauccuaacgccaaucccaacgccaauccuaacgcuaaucccaacgccaauccgaacgcgaauccuaacgcuaaccccaaugccaaccccaaugccaacccuaaugcuaacccgaaugccaaccccaaugcuaacccuaaugccaaccccaauaaaaacaaucaggggaacggacaaggccacaauaugccuaacgaccccaacagaaaugucgaugagaacgcgaaugccaacuccgcugugaagaauaacaauaacgaggaaccuucugacaaacauauuaaggaauaucuuaauaaaauccagaacagccuguccacagaguggucucccugcagcguuacgugugggaauggcauucaggugcggaucaagccgggauccgccaacaagccuaaagaugaacucgacuacgcuaaugauauugagaagaaaaucugcaagauggagaaauguugaggacuagugcaucacauuuaaaagcaucucagccuaccaugagaauaagagaaagaaaaugaagaucaauagcuuauucaucucuuuuucuuuuucguugguguaaagccaacacccugucuaaaaaacauaaauuucuuuaaucauuuugccucuuuucucugugcuucaauuaauaaaaaauggaaagaaccuagaucuaaaaaaaaaaaaaaaaaaaaaaaaaaaaaaaaaaaaaaaaaaaaaaaaaaaaaaaaaaaaaaaaugcaucccccccccccccccccccccccccccccccaaaggcucuuuucagagccaccagaauu

SEQ ID NO: 1125 - RNA, 1339 nt, Artificial Sequence
  mRNA Design i-2 (A64-N5-C30-hSL-N5) comprising derived and/or modified sequence from Pf(3D7)__XP_001351122.1__HsALB_Pf-CSP(98-397) (opt5)
ggggcgcugccuacggagguggcagccaucuccuucucggcaucaagcuuaccaugaagugggugaccuucaucagccugcucuuucuguucuccucugccuacagcgcugacggcaaccccgauccuaaugccaacccgaaugucgaccccaacgcgaauccuaacguugaucccaaugcuaacccuaauguggaccccaacgccaauccuaacgccaauccgaacgcuaaucccaacgccaacccuaaugcuaaccccaaugccaacccuaaugcgaaccccaaugccaacccgaaugcuaacccuaaugccaaccccaaugcuaacccuaaugccaaccccaacgcgaaucccaacgccaauccuaacgcuaauccgaacgccaaucccaacgcuaauccuaacguggaucccaaugccaacccuaaugccaaccccaaugcuaacccgaacgcgaauccuaacgccaaucccaacgcuaauccuaacgccaaucccaacgccaauccuaacgcuaaucccaacgccaauccgaacgcgaauccuaacgcuaaccccaaugccaaccccaaugccaacccuaaugcuaacccgaaugccaaccccaaugcuaacccuaaugccaaccccaauaaaaacaaucaggggaacggacaaggccacaauaugccuaacgaccccaacagaaaugucgaugagaacgcgaaugccaacuccgcugugaagaauaacaauaacgaggaaccuucugacaaacauauuaaggaauaucuuaauaaaauccagaacagccuguccacagaguggucucccugcagcguuacgugugggaauggcauucaggugcggaucaagccgggauccgccaacaagccuaaagaugaacucgacuacgcuaaugauauugagaagaaaaucugcaagauggagaaauguagcucugucuuuaacgugguuaauuccagcaucgggcugauuauggugcuuucuuuccuguuucucaacugaggacuagugcaucacauuuaaaagcaucucagccuaccaugagaauaagagaaagaaaaugaagaucaauagcuuauucaucucuuuuucuuuuucguugguguaaagccaacacccugucuaaaaaacauaaauuucuuuaaucauuuugccucuuuucucugugcuucaauuaauaaaaaauggaaagaaccuagaucuaaaaaaaaaaaaaaaaaaaaaaaaaaaaaaaaaaaaaaaaaaaaaaaaaaaaaaaaaaaaaaaaugcaucccccccccccccccccccccccccccccccaaaggcucuuuucagagccaccagaauu

SEQ ID NO: 1126 - RNA, 1666 nt, Artificial Sequence
  mRNA Design i-2 (A64-N5-C30-hSL-N5) comprising derived and/or modified sequence from Pf(3D7)__XP_001351122.1__HsALB_Pf-CSP(199-377)_L(PVTN)_HBsAg (opt5)
ggggcgcugccuacggagguggcagccaucuccuucucggcaucaagcuuaccaugaagugggugaccuucaucagccugcucuuucuguucuccucugccuacagcgaccccaacgcuaauccuaacgccaauccgaacgcgaaucccaacgcuaauccuaacgccaaucccaacgccaauccuaacgcuaaucccaacgccaauccuaacgcuaacccgaaugccaaccccaaugcgaacccuaaugccaaccccaaugcuaacccuaaugccaaccccaaugcuaacccgaaugccaacccuaaugcgaaccccaacgccaauccuaacaaaaauaaccagggcaaugggcaaggacacaacaugcccaaugaucccaacagaaaugucgacgagaacgcuaaugccaacuccgcuguuaagaauaacaauaacgaggaaccuucugauaaacauauuaaggaauaucuuaacaaaauccagaauagccuguccacagaguggucuccgugcagcgugacguguggcaacgggauucaggugcggaucaagcccggauccgccaauaagccuaaagacgaacucgauuacgccaacgacauugagaagaaaaucugcaagauggagaaauguagcucuguccccgugaccaauauggaaaacaucacauccggcuuucuggggccucuucugguucuccaggcuggauucuuucugcugacccgcauucucacaaucccccaaagccuggauucuugguggaccucccuuaauuuccugggcggcagcccggugugccucgggcagaacucucaguccccuacaagcaaucacucccccaccucuuguccucccauuugcccuggauauagauggaugugucugcggcgcuuuaucauuuuccuuuuuauccugcuccugugccugauuuuccuccugguccuucuggacuaccagggcaugcuccccguguguccgcugaucccugggagcacgaccacaaacaccggacccugcaagacauguaccacgcccgcgcaaggcaauuccauguuuccuagcugcugcuguacaaagccgaccgaugggaacugcacauguauccccauuccuucuuccugggccuucgcuaaauaucuuugggagugggccagcguuagauuuucuuggcugagccuccuggugcccuucguccagugguucgugggacuguccccuaccguguggcucucugccaucuggaugaugugguacuggggccccagccuguauuccauugucagcccuuuuaucccccuucugccgauuuucuuuugccucuggguuuacaucugaggacuagugcaucacauuuaaaagcaucucagccuaccaugagaauaagagaaagaaaaugaagaucaauagcuuauucaucucuuuuucuuuuucguugguguaaagccaacacccugucuaaaaaacauaaauuucuuuaaucauuuugccucuuuucucugugcuucaauuaauaaaaaauggaaagaaccuagaucuaaaaaaaaaaaaaaaaaaaaaaaaaaaaaaaaaaaaaaaaaaaaaaaaaaaaaaaaaaaaaaaaugcaucccccccccccccccccccccccccccccccaaaggcucuuuucagagccaccagaauu

SEQ ID NO: 1127 - RNA, 1405 nt, Artificial Sequence
  mRNA Design i-2 (A64-N5-C30-hSL-N5) comprising derived and/or modified sequence from Pb(ANKA)__XP_022712148.1__Pb-CSP (opt5)
ggggcgcugccuacggagguggcagccaucuccuucucggcaucaagcuuaccaugaagaaaugcaccauccugguugucgccagccuccugcuuguuaacucccugcuccccggcuacgggcagaauaagucuauucaagcucagagaaaccugaaugagcuuuguuauaacgaaggaaaugacaacaaacuguaccacgugcucaauagcaagaacggcaaaaucuauaaucggaacacagugaaucgccugcuggccgaugcgccugaggggaagaagaacgaaaagaaaaaugagaaaauugaaagaaacaauaagcucaaacagccgcccccucccccuaaccccaacgacccuccgcccccuaaucccaacgauccucccccgccuaaucccaacgacccucccccucccaauccgaacgaucccccucccccuaaugcuaacgaucccccgccucccaaugccaacgacccugcucccccuaaugccaacgaccccgccccgccuaaugcuaacgaucccgcgcccccuaaugccaacgacccggcucccccuaacgccaaugaucccccucccccuaaccccaaugacccggccccucccaacgcuaaugauccucccccgccuaaccccaaugacccugccccuccccagggaaacaauaacccccaaccgcagccccggccucagccccagccucaaccccagccucagccgcagccccaaccucagccccagccucgcccccaaccgcagccucagcccggcgggaauaacaauaacaagaauaacaacaaugacgauuccuacauccccucugcggagaagauucuggaguucgucaaacagaucagagacagcaucacggaagaguggucccaaugcaacgugaccuguggaucuggcauucggguucgcaagagaaaaggcagcaauaagaaagccgaagaucuuacacuggaggacaucgauaccgagauuugcaagauggacaaauguuccagcaucuuuaacauugugucuaauucccucggguucgucauccugcuugugcugguguuuuucaacugaggacuagugcaucacauuuaaaagcaucucagccuaccaugagaauaagagaaagaaaaugaagaucaauagcuuauucaucucuuuuucuuuuucguugguguaaagccaacacccugucuaaaaaacauaaauuucuuuaaucauuuugccucuuuucucugugcuucaauuaauaaaaaauggaaagaaccuagaucuaaaaaaaaaaaaaaaaaaaaaaaaaaaaaaaaaaaaaaaaaaaaaaaaaaaaaaaaaaaaaaaaugcaucccccccccccccccccccccccccccccccaaaggcucuuuucagagccaccagaauu

SEQ ID NO: 1128 - RNA, 1570 nt, Artificial Sequence
  mRNA Design i-2 (A64-N5-C30-hSL-N5) comprising derived and/or modified sequence from Pb(ANKA)__XP_022712148.1__Pb-CSP_L(G4SG4)_TM domain HA (opt5)
ggggcgcugccuacggagguggcagccaucuccuucucggcaucaagcuuaccaugaagaaaugcaccauccugguggucgccagccuccugcuuguuaacucccugcuccccggcuacgggcagaauaagucuauucaagcucagagaaaccugaaugagcuuuguuauaacgaaggaaaugacaacaaacuguaccacgugcucaauagcaagaacggcaaaaucuauaaucggaacacagugaaucgccugcuggccgaugcgccugaggggaagaagaacgaaaagaaaaaugagaaaauugaaagaaacaauaagcucaaacagccgcccccucccccuaaccccaacgacccuccgcccccuaaucccaacgauccucccccgccuaaucccaacgacccucccccucccaauccgaacgaucccccucccccuaaugcuaacgaucccccgccucccaaugccaacgacccugcucccccuaaugccaacgaccccgccccgccuaaugcuaacgaucccgcgcccccuaaugccaacgacccggcucccccuaacgccaaugaucccccucccccuaaccccaaugacccggccccucccaacgcuaaugauccucccccgccuaaccccaaugacccugccccuccccagggaaacaauaacccccaaccgcagccccggccucagccccagccucaaccccagccucagccgcagccccaaccucagccccagccucgcccccaaccgcagccucagcccggcgggaauaacaauaacaagaauaacaacaaugacgauuccuacauccccucugcggagaagauucuggaguucgucaaacagaucagagacagcaucacggaagaguggucccaaugcaacgugaccuguggaucuggcauucggguucgcaagagaaaaggcagcaauaagaaagccgaagaucuuacacuggaggacaucgauaccgagauuugcaagauggacaaauguuccagcaucuuuaacauugugucuaauucccucggguucgucauccugcuugugcugguguuuuucaacggaggcgggggaagcggcgggggaggcaagcucgaaucuacacggauuuaucagauccuggcuaucuacuccaccguugccagcucucugguccucguggugucccugggcgcuauuagcuuuuggaugugcuccaaugggucucuucagugucgcaucugcauuugaggacuagugcaucacauuuaaaagcaucucagccuaccaugagaauaagagaaagaaaaugaagaucaauagcuuauucaucucuuuuucuuuuucguugguguaaagccaacacccugucuaaaaaacauaaauuucuuuaaucauuuugccucuuuucucugugcuucaauuaauaaaaaauggaaagaaccuagaucuaaaaaaaaaaaaaaaaaaaaaaaaaaaaaaaaaaaaaaaaaaaaaaaaaaaaaaaaaaaaaaaaugcaucccccccccccccccccccccccccccccccaaaggcucuuuucagagccaccagaauu

SEQ ID NO: 1129 - RNA, 1390 nt, Artificial Sequence
  mRNA Design i-2 (A64-N5-C30-hSL-N5) comprising derived and/or modified sequence from Pb(ANKA)__XP_022712148.1__HsALB_Pb-CSP(24-340) (opt5)
ggggcgcugccuacggagguggcagccaucuccuucucggcaucaagcuuaccaugaagugggugaccuucaucagccugcucuuucuguucuccucugccuacagccagaacaaauccauucaagcucagagaaaucuuaacgagcugugcuauaaugaaggcaacgacaauaagcucuaccacguccugaacucuaaaaaugggaagaucuauaaccggaauacaguuaaccgccuucuggccgaugcgcccgagggcaaaaagaaugaaaagaaaaacgagaagauugaaagaaauaacaaacucaagcagccuccgcccccucccaauccuaacgacccucccccgcccaacccuaaugaucccccucccccgaacccuaaugaucccccuccucccaaccccaaugacccgcccccucccaacgcuaaugacccucccccgccuaacgccaaugaucccgccccucccaacgcuaaugacccugcucccccgaacgccaaugauccugccccucccaacgcgaaugaccccgccccgcccaacgcuaacgauccucccccucccaauccuaacgaccccgccccgccuaaugcuaacgaucccccucccccgaauccuaacgaccccgccccuccccagggaaauaacaauccccaaccucagccgcggccccagccucagccccaaccucagccccagccucagccgcaaccccagccucagccccgcccucaaccccagccgcagccugggggaaacaauaacaauaaaaacaauaacaacgacgauagcuacauccccuccgcggagaagauucuggaguuugugaagcagaucagagacucuaucacggaagaguggagccaaugcaaugugaccugcggcuccgggauucggguccgcaaaagaaagggaagcaacaaaaaggccgaagaucugacacucgaggacaucgauaccgagauuuguaaaauggacaaguguucuuccaucuucaauauugugagcaacucucugggcuuuguuauccuucuggugcucgucuucuuuaauugaggacuagugcaucacauuuaaaagcaucucagccuaccaugagaauaagagaaagaaaaugaagaucaauagcuuauucaucucuuuuucuuuuucguugguguaaagccaacacccugucuaaaaaacauaaauuucuuuaaucauuuugccucuuuucucugugcuucaauuaauaaaaaauggaaagaaccuagaucuaaaaaaaaaaaaaaaaaaaaaaaaaaaaaaaaaaaaaaaaaaaaaaaaaaaaaaaaaaaaaaaaugcaucccccccccccccccccccccccccccccccaaaggcucuuuucagagccaccagaauu

SEQ ID NO: 1130 - RNA, 1408 nt, Artificial Sequence
  mRNA Design i-2 (A64-N5-C30-hSL-N5) comprising derived and/or modified sequence from Pb(ANKA)__XP_022712148.1__HsIns-iso1_Pb-CSP(24-340) (opt5)
ggggcgcugccuacggagguggcagccaucuccuucucggcaucaagcuuaccauggcccuguggaugagacuccugccccuucuggcucuccuggcccuuuggggcccugacccggcggcugcccagaacaagagcauccaagcccagcggaaucugaacgagcucugcuacaaugaagggaacgauaauaaacuguaucacgugcugaacuccaagaauggaaaaauuuacaaccgcaauaccgucaacagacuccuggcugacgcccccgagggcaagaaaaaugaaaagaagaacgagaaaaucgaacggaauaacaaacuuaagcagccucccccucccccuaauccgaacgaucccccucccccuaaccccaaugacccgccucccccuaaccccaaugaucccccuccgcccaacccuaaugaucccccucccccgaacgcuaaugacccucccccucccaacgccaaugacccugcgcccccgaacgccaaugauccugcuccucccaacgccaaugaccccgcuccgcccaacgccaaugauccugcgcccccuaacgccaacgaucccccucccccgaauccuaacgaccccgcuccucccaaugccaacgacccgccucccccuaaucccaacgaccccgcuccuccgcaggggaauaacaauccccaaccucagccccgcccucagccccagccucaaccgcagccccagccucagccccaaccucagccccagccgagaccucaaccccagccccagccuggaggcaacaauaacaauaagaacaauaacaacgaugacucuuauauucccagcgccgagaaaauccuggaguucguuaagcagauucgggauuccaucacagaagaguggucucaauguaaugugacgugcgggagcggaauccgcgugagaaagcggaaaggcuccaacaagaaagccgaagaccucacccuggaggauauugacacagagaucuguaagauggauaaaugcucuagcauuuuuaauaucgucuccaacagccuuggcuucgugauucugcucguucugguguuuuucaauugaggacuagugcaucacauuuaaaagcaucucagccuaccaugagaauaagagaaagaaaaugaagaucaauagcuuauucaucucuuuuucuuuuucguugguguaaagccaacacccugucuaaaaaacauaaauuucuuuaaucauuuugccucuuuucucugugcuucaauuaauaaaaaauggaaagaaccuagaucuaaaaaaaaaaaaaaaaaaaaaaaaaaaaaaaaaaaaaaaaaaaaaaaaaaaaaaaaaaaaaaaaugcaucccccccccccccccccccccccccccccccaaaggcucuuuucagagccaccagaauu

SEQ ID NO: 1131 - RNA, 1387 nt, Artificial Sequence
  mRNA Design i-2 (A64-N5-C30-hSL-N5) comprising derived and/or modified sequence from Pb(ANKA)__XP_022712148.1__HsSPARC_Pb-CSP(24-340) (opt5)
ggggcgcugccuacggagguggcagccaucuccuucucggcaucaagcuuaccaugagagccuggaucuucuuucugcucugccuggcuggccgggcccuugcgcagaacaagagcauucaagcucagcgcaaucugaacgagcucuguuacaaugaagggaacgacaauaaacuguaucacgugcuuaacuccaagaauggaaaaaucuacaacagaaauaccgucaaccggcugcucgccgaugcccccgagggcaagaaaaaugaaaagaagaacgagaaaauugaacgcaauaacaagcugaaacagccuccgcccccucccaauccuaacgacccucccccgcccaacccuaaugaucccccucccccgaacccuaaugaucccccuccucccaaccccaaugacccgcccccucccaacgcuaaugacccucccccgccuaacgccaaugaucccgcuccucccaacgccaaugacccugcgcccccgaacgccaaugauccugcuccucccaacgccaaugaccccgcuccgcccaacgccaacgauccucccccucccaauccuaacgaccccgcgccgccuaaugccaacgaucccccucccccgaauccuaacgaccccgcuccuccccaggggaauaacaauccccaaccucagccgagaccccagccucagccccaaccucagccccagccucagccgcaaccccagccucagccccggccucaaccccagccgcagccuggaggcaacaauaacaauaagaacaauaacaacgacgauucuuauauccccagcgccgagaaaauucuggaguucguuaagcagauccgcgacuccaucacagaagaguggucucaaugcaaugugacgugugggagcggaauuagagugcggaagcgcaaaggcuccaacaagaaagcugaagaucucacccuggaggacaucgauacagagauuugcaagauggacaaauguucuagcaucuuuaauauugucuccaacagccuuggcuucgugauccugcucguucugguguuuuucaauugaggacuagugcaucacauuuaaaagcaucucagccuaccaugagaauaagagaaagaaaaugaagaucaauagcuuauucaucucuuuuucuuuuucguugguguaaagccaacacccugucuaaaaaacauaaauuucuuuaaucauuuugccucuuuucucugugcuucaauuaauaaaaaauggaaagaaccuagaucuaaaaaaaaaaaaaaaaaaaaaaaaaaaaaaaaaaaaaaaaaaaaaaaaaaaaaaaaaaaaaaaaugcaucccccccccccccccccccccccccccccccaaaggcucuuuucagagccaccagaauu

SEQ ID NO: 1132 - RNA, 1390 nt, Artificial Sequence
  mRNA Design i-2 (A64-N5-C30-hSL-N5) comprising derived and/or modified sequence from Pb(ANKA)__XP_022712148.1__IgE_Pb-CSP(24-340) (opt5)
ggggcgcugccuacggagguggcagccaucuccuucucggcaucaagcuuaccauggacuggaccuggauccuguuccucguggccgcugccacaagaguccacagccagaacaaguccauucaagcgcagcggaaucugaacgagcuuugcuacaaugaaggcaacgauaauaaacuguaucauguucucaacucuaagaaugggaaaaucuacaaccgcaauacggugaacagacugcuugcugacgcccccgagggaaagaaaaaugaaaagaagaacgagaaaauugaacggaauaacaagcugaaacagccuccgcccccucccaauccuaacgaucccccuccgcccaacccuaaugacccgccucccccgaacccuaaugaucccccuccucccaaccccaaugacccgcccccucccaacgccaaugauccucccccgccuaacgcuaaugaccccgccccucccaacgcuaaugauccugccccucccaacgcgaaugaccccgccccucccaacgcuaaugaucccgccccgcccaacgcuaacgacccucccccucccaauccuaacgaucccgccccgccuaaugcgaacgaucccccucccccgaauccuaacgaccccgccccuccccagggcaauaacaauccccaaccucagccgcgcccccagccucagccccaaccucagccccagccucagccgcaaccccagccucagcccagaccucaaccccagccgcagccugggggaaacaauaacaauaagaacaauaacaacgacgacagcuauauccccuccgcugagaaaauucucgaguuugugaagcagauccgggauucuaucaccgaagaguggagccaauguaaugucacaugcggcuccgggauucgcgugagaaagcggaaaggaucuaacaagaaagccgaagaccugacccuggaggauaucgacacagagauuuguaagauggauaaaugcagcuccaucuucaauauuguuagcaacucucucggcuuugugauccugcuuguccugguguucuuuaauugaggacuagugcaucacauuuaaaagcaucucagccuaccaugagaauaagagaaagaaaaugaagaucaauagcuuauucaucucuuuuucuuuuucguugguguaaagccaacacccugucuaaaaaacauaaauuucuuuaaucauuuugccucuuuucucugugcuucaauuaauaaaaaauggaaagaaccuagaucuaaaaaaaaaaaaaaaaaaaaaaaaaaaaaaaaaaaaaaaaaaaaaaaaaaaaaaaaaaaaaaaaugcaucccccccccccccccccccccccccccccccaaaggcucuuuucagagccaccagaauu

SEQ ID NO: 1133 - RNA, 1576 nt, Artificial Sequence
  mRNA Design i-2 (A64-N5-C30-hSL-N5) comprising derived and/or modified sequence from Pf(3D7)__XP_001351122.1__Pf-CSP (opt6)
ggggcgcugccuacggagguggcagccaucuccuucucggcaucaagcuuaccaugaugagaaaacuugcaauacuaagcguaucuucauuccuauucguagaagcacuauuccaagaauaucaaugcuauggaucaagcuccaacacaagaguacuuaacgaacuaaauuacgacaaugcaggaacaaaccuauacaaugaacuugaaaugaauuacuacggcaaacaagaaaacugguacucccuaaaaaaaaacucaaggucauuaggagaaaacgacgacggaaacaacgaagacaacgaaaaacuacgaaaacccaaacacaaaaaauuaaaacaaccagcagacggaaaccccgacccaaacgcaaacccaaacgucgacccaaacgcaaacccgaacguagacccaaacgcgaacccaaacguagacccaaacgcaaacccaaacgcaaacccaaacgcaaacccaaacgcaaacccaaaugcaaacccaaacgcaaacccaaacgccaauccaaacgccaacccaaacgcaaacccaaacgcaaacccaaacgcaaacccaaacgcaaaccccaacgcaaacccaaacgcuaacccaaacgcaaacccuaaugcaaacccuaacgcaaacccaaacgucgacccgaacgcaaacccaaaugcaaacccaaacgcaaacccaaacgcaaaccccaacgccaacccaaaugcaaacccaaaugcaaauccaaacgcaaacccaaacgcaaacccuaacgcaaacccaaacgcaaaccccaacgcaaacccaaacgcaaacccaaacgccaacccaaacgcaaaccccaaugcaaacccaaacgcaaacccaaacgcaaacccaaacaaaaacaaucaaggcaacggacaaggacacaacaugcccaacgacccaaaccgaaacgucgacgaaaacgccaacgcaaacagcgcaguaaaaaacaacaacaacgaagaacccucagacaaacacauaaaagaauacuuaaacaaaauacaaaacucacuaucuacagaauggucacccuguagcguaaccugcggcaacggaauacaaguaagaauaaaaccaggcucagcaaacaaaccaaaagaugaacuagacuacgccaaugauauagaaaaaaaaauauguaaaauggaaaaauguagcucagucuucaacguagucaacucaucaauaggacuaauaaugguacucuccuuccucuuccuaaauuaaggacuagugcaucacauuuaaaagcaucucagccuaccaugagaauaagagaaagaaaaugaagaucaauagcuuauucaucucuuuuucuuuuucguugguguaaagccaacacccugucuaaaaaacauaaauuucuuuaaucauuuugccucuuuucucugugcuucaauuaauaaaaaauggaaagaaccuagaucuaaaaaaaaaaaaaaaaaaaaaaaaaaaaaaaaaaaaaaaaaaaaaaaaaaaaaaaaaaaaaaaaugcaucccccccccccccccccccccccccccccccaaaggcucuuuucagagccaccagaauu

SEQ ID NO: 1134 - RNA, 1507 nt, Artificial Sequence
  mRNA Design i-2 (A64-N5-C30-hSL-N5) comprising derived and/or modified sequence from Pf(3D7)__XP_001351122.1__Pf-CSP(1-374) (opt6)
ggggcgcugccuacggagguggcagccaucuccuucucggcaucaagcuuaccaugaugagaaaacuagcaauauuaagcguaagcucauuccuauucguugaagcauuauuccaagaauaccaaugcuacggcucaagcucaaacacaagaguauuaaacgaauuaaacuacgacaaugcaggaaccaaccucuacaacgaacuagaaaugaauuauuacggcaaacaagaaaacugguacucacucaaaaaaaacucacgaucccuaggagaaaacgaugacggaaacaaugaagauaacgaaaaauuaagaaaaccaaaacacaaaaaauuaaaacaaccugcagacggaaacccagacccaaacgcaaauccaaauguagacccaaacgcaaaccccaacguagacccaaaugcaaacccaaacguagacccaaacgcaaacccaaaugcaaacccaaacgcaaacccaaacgcaaacccaaacgcaaaccccaacgcaaacccaaacgcaaacccaaacgccaaccccaacgcaaacccaaacgcaaacccgaaugcaaacccaaacgcaaacccaaacgcaaacccaaacgcaaacccaaacgcaaacccaaacgcaaacccaaaugcaaacccaaacguggauccaaacgcaaauccaaacgcaaacccaaacgcaaacccaaacgcaaaccccaacgcaaauccaaacgcaaaccccaaugcaaauccaaacgcaaacccaaacgccaacccaaacgcaaacccgaacgccaauccaaacgcaaacccaaacgcaaacccaaacgcaaacccaaacgccaacccaaacgcaaacccaaacgcaaacccaaacgcaaaccccaacaaaaacaaccaaggaaacggacaaggacacaacaugccaaacgauccaaacagaaacgucgacgaaaacgccaacgcuaacagcgcaguaaaaaacaauaacaacgaagaaccaucagacaaacauauaaaagaauacuuaaacaaaauccaaaacucacuaucaacagaauggucccccuguuccguaacaugcggaaacggaauacaaguacgaaucaaaccaggaucagccaacaaaccgaaagacgaacuagacuaugccaacgauauagaaaaaaaaauaugcaaaauggaaaaaugcugaggacuagugcaucacauuuaaaagcaucucagccuaccaugagaauaagagaaagaaaaugaagaucaauagcuuauucaucucuuuuucuuuuucguugguguaaagccaacacccugucuaaaaaacauaaauuucuuuaaucauuuugccucuuuucucugugcuucaauuaauaaaaaauggaaagaaccuagaucuaaaaaaaaaaaaaaaaaaaaaaaaaaaaaaaaaaaaaaaaaaaaaaaaaaaaaaaaaaaaaaaaugcaucccccccccccccccccccccccccccccccaaaggcucuuuucagagccaccagaauu

SEQ ID NO: 1135 - RNA, 1360 nt, Artificial Sequence
  mRNA Design i-2 (A64-N5-C30-hSL-N5) comprising derived and/or modified sequence from Pf(3D7)__XP_001351122.1__Pf-CSP(1-325) (opt6)
ggggcgcugccuacggagguggcagccaucuccuucucggcaucaagcuuaccaugaugcgaaaauuagcaauacuaagcguaagcucauucuuauucguagaagcacucuuccaagaauaccaaugcuacggaucaagcucaaacacaagaguccuaaacgaauuaaacuaugacaacgcaggaacaaaccuauacaacgaacuagaaaugaacuacuacggaaaacaagaaaacugguacucacucaaaaaaaacagcagaagucuaggagaaaacgacgacggaaacaacgaagacaacgaaaaacuacgaaaaccaaaacacaaaaaacuaaaacaaccagcagacgggaacccagacccaaacgcaaacccaaacguagauccaaacgcaaacccaaauguagacccuaacgcaaacccaaauguagacccaaacgcaaacccuaacgcaaacccaaaugcaaacccaaacgcaaauccaaacgcaaacccaaacgcaaacccaaacgcgaacccaaacgcaaacccaaacgcaaacccaaaugcaaaccccaacgcaaauccaaaugcaaacccaaaugcaaauccaaacgcaaacccaaacgcaaacccaaaugcaaauccaaacgcaaauccaaacguggauccaaacgcaaacccaaacgcaaacccaaacgcaaacccaaacgcaaacccaaacgcaaacccaaacgcaaauccaaacgccaauccaaacgcaaauccaaaugcaaacccaaacgcaaacccaaacgcaaacccaaacgcaaacccaaacgcaaacccaaacgcaaacccaaacgcaaacccaaacgcaaacccaaacgcaaacccaaacgcaaacccaaacaaaaacaaccaaggaaacggacaaggacacaacaugccaaacgacccaaacagaaacguagacgaaaacgccaacgcaaauagcgcagucaaaaacaacaauaacgaagaaccaucggacaaacacauaaaagaauacuuaaacaaaauacaaaacugaggacuagugcaucacauuuaaaagcaucucagccuaccaugagaauaagagaaagaaaaugaagaucaauagcuuauucaucucuuuuucuuuuucguugguguaaagccaacacccugucuaaaaaacauaaauuucuuuaaucauuuugccucuuuucucugugcuucaauuaauaaaaaauggaaagaaccuagaucuaaaaaaaaaaaaaaaaaaaaaaaaaaaaaaaaaaaaaaaaaaaaaaaaaaaaaaaaaaaaaaaaugcaucccccccccccccccccccccccccccccccaaaggcucuuuucagagccaccagaauu

SEQ ID NO: 1136 - RNA, 1576 nt, Artificial Sequence
  mRNA Design i-2 (A64-N5-C30-hSL-N5) comprising derived and/or modified sequence from Pf(3D7)__XP_001351122.1__HsALB_Pf-CSP(19-397) (opt6)
ggggcgcugccuacggagguggcagccaucuccuucucggcaucaagcuuaccaugaaaugggucacauuuauuucacuacuauucuuauucucaagcgcauacucacuauuucaagaauaccaaugcuacggcucauccucaaauacacgaguacuaaaugaacucaacuacgacaacgcaggaaccaaucucuacaacgaauuagaaaugaacuacuacggcaaacaagaaaacugguauucacuaaaaaaaaacaguagaucacuaggagaaaaugacgacggaaacaaugaagacaacgaaaaacuaagaaaaccaaaacacaaaaaauuaaaacaaccagcagacggaaacccagacccaaacgcaaacccuaacguagaucccaaugccaacccaaauguagacccaaacgcaaaccccaacgucgauccaaacgcaaacccaaacgcaaacccaaacgcaaacccaaacgcaaacccaaacgcaaacccaaaugcaaaccccaacgcaaacccaaacgcuaacccaaacgcaaacccaaacgcaaacccaaacgcaaacccaaacgcaaacccaaacgccaacccaaacgccaacccaaacgcaaauccaaacgcaaacccaaaugccaauccaaacguugacccaaacgcaaacccaaacgcaaaccccaacgcaaacccaaacgcaaauccaaacgcgaaccccaacgcaaacccaaacgcaaacccaaaugcaaacccaaacgcuaacccaaaugcaaacccaaacgccaacccaaacgccaacccaaacgcaaaccccaacgcaaacccaaacgcaaacccaaacgccaauccaaacgcaaacccaaaugcaaacccaaacaaaaacaaccaaggaaacggacaaggacacaacaugccaaacgaccccaacagaaacguagaugaaaaugcaaaugcuaacucagccguaaaaaacaauaacaacgaagaaccaucagacaaacacauaaaagaauaccuaaauaaaauacaaaauuccuuaucaacagaaugguccccaugcucaguaacuugcgguaacggcauacaaguaagaauaaaaccaggaucagcaaacaaaccaaaagacgaauuagacuaugcaaacgacauagaaaaaaaaauauguaaaauggaaaaaugcagcucaguauucaacguaguaaauuccucaaucggacucaucaugguauuaucauuccuauuuuuaaauuaaggacuagugcaucacauuuaaaagcaucucagccuaccaugagaauaagagaaagaaaaugaagaucaauagcuuauucaucucuuuuucuuuuucguugguguaaagccaacacccugucuaaaaaacauaaauuucuuuaaucauuuugccucuuuucucugugcuucaauuaauaaaaaauggaaagaaccuagaucuaaaaaaaaaaaaaaaaaaaaaaaaaaaaaaaaaaaaaaaaaaaaaaaaaaaaaaaaaaaaaaaaugcaucccccccccccccccccccccccccccccccaaaggcucuuuucagagccaccagaauu

SEQ ID NO: 1137 - RNA, 1594 nt, Artificial Sequence
  mRNA Design i-2 (A64-N5-C30-hSL-N5) comprising derived and/or modified sequence from Pf(3D7)__XP_001351122.1__HsIns-iso1_Pf-CSP(19-397) (opt6)
ggggcgcugccuacggagguggcagccaucuccuucucggcaucaagcuuaccauggcacuauggaugagacuacuaccacuacuagcacuccuagccuuauggggacccgauccagccgcagcacucuuccaagaauaccaaugcuauggaucauccuccaacacaagaguccuaaacgaauuaaauuacgacaacgcuggaacaaaccuauacaaugaacuagaaaugaauuauuacggaaaacaagaaaauugguacucacuaaaaaaaaacucuagaagccuaggagaaaacgacgacggaaacaacgaagauaacgaaaaacuaagaaaaccaaaacacaaaaaauuaaaacaacccgcagacggcaacccagacccaaaugcaaauccaaacguagacccaaacgcaaauccaaacguagacccaaacgcaaacccaaauguagacccaaacgcaaauccaaacgcaaacccaaaugcaaacccaaaugcaaacccaaacgcaaauccaaacgcaaaucccaacgccaacccaaacgcaaacccaaacgcaaauccaaacgcaaacccaaacgcaaacccaaacgcaaacccaaacgcaaacccaaaugcaaacccaaaugccaauccaaacgccaacccaaacgcaaacccaaacguagacccaaacgcaaacccaaacgccaacccaaacgcaaaccccaaugcaaacccaaacgcaaacccaaacgcaaaccccaacgcaaauccaaacgcaaacccaaacgcaaauccaaacgcaaauccaaacgccaacccaaacgcaaacccaaacgcaaauccaaacgcaaaccccaacgcaaacccaaacgccaacccaaaugcaaacccaaacgcaaaucccaauaaaaacaaccaaggaaacggacaaggacacaacaugccaaacgauccaaacagaaacguagacgaaaacgcaaacgcaaacucagcagucaaaaacaauaacaacgaagaaccaucagacaaacacauaaaagaauaccuaaacaaaauacaaaacucacuauccacagaauggucaccaugcucaguaaccugcggaaacggaauacaaguaagaauaaaaccaggaucagccaacaaaccaaaagacgaacuagacuaugcuaaugacauagaaaaaaaaauaugcaaaauggaaaaaugcuccucaguauucaacgucguaaacucuucaauaggacuaauaaugguacuauccuucuuauuucuaaacuaaggacuagugcaucacauuuaaaagcaucucagccuaccaugagaauaagagaaagaaaaugaagaucaauagcuuauucaucucuuuuucuuuuucguugguguaaagccaacacccugucuaaaaaacauaaauuucuuuaaucauuuugccucuuuucucugugcuucaauuaauaaaaaauggaaagaaccuagaucuaaaaaaaaaaaaaaaaaaaaaaaaaaaaaaaaaaaaaaaaaaaaaaaaaaaaaaaaaaaaaaaaugcaucccccccccccccccccccccccccccccccaaaggcucuuuucagagccaccagaauu

SEQ ID NO: 1138 - RNA, 1573 nt, Artificial Sequence
  mRNA Design i-2 (A64-N5-C30-hSL-N5) comprising derived and/or modified sequence from Pf(3D7)__XP_001351122.1__HsSPARC_Pf-CSP(19-397) (opt6)
ggggcgcugccuacggagguggcagccaucuccuucucggcaucaagcuuaccaugcgcgcauggauauucuuccuccuaugucuagcaggucgagcacuugcacucuuccaagaauaccaauguuacggauccucaagcaacacacgaguacuaaacgaacuaaacuacgauaacgcaggaaccaacuuauacaacgaacuagaaaugaacuacuacggcaaacaagaaaacugguacucacucaaaaaaaacagcagaagccuaggagaaaaugacgacggaaacaacgaagauaacgaaaaauuacgaaaacccaaacacaaaaaauuaaaacaacccgcagauggaaauccagacccgaacgcaaacccaaacguagacccaaacgcaaacccaaacguugacccaaacgcaaacccaaacguagacccaaacgcaaacccuaacgccaacccaaacgcaaacccaaacgcaaacccaaaugcgaacccaaaugcaaacccaaacgccaacccaaaugcaaaccccaacgcaaauccaaacgcaaacccaaaugcaaacccaaacgcaaacccaaacgcaaacccaaacgcaaacccaaacgccaaccccaaugcaaacccaaacgcaaacccaaacgucgacccaaacgcaaacccaaacgcaaacccaaacgcaaauccaaacgcaaauccaaacgcaaacccuaacgcaaacccaaacgcaaacccaaaugcaaauccaaacgcaaacccaaacgcaaacccaaacgcaaauccaaacgcaaacccaaacgcaaacccaaacgcaaacccuaaugcaaacccaaaugcaaauccaaacgcaaacccaaaugcaaaccccaacaaaaacaaccaaggaaacggacaaggacacaauaugccaaacgacccaaacagaaacguagacgaaaacgcaaacgccaacagcgcaguaaaaaacaacaacaacgaagaaccaucagacaaacacauaaaagaauaccuaaacaaaauacaaaacucacuaucaacagaauggucucccugcuccguaacaugcggaaacggcauacaaguacgaauaaaaccuggaucagccaacaaaccaaaagacgaacuagacuaugcaaaugacauagaaaaaaaaauaugcaaaauggaaaaaugcaguucagucuucaacguagucaacagcucaauaggccuaauaaugguacucucauuccuauucuuaaacuaaggacuagugcaucacauuuaaaagcaucucagccuaccaugagaauaagagaaagaaaaugaagaucaauagcuuauucaucucuuuuucuuuuucguugguguaaagccaacacccugucuaaaaaacauaaauuucuuuaaucauuuugccucuuuucucugugcuucaauuaauaaaaaauggaaagaaccuagaucuaaaaaaaaaaaaaaaaaaaaaaaaaaaaaaaaaaaaaaaaaaaaaaaaaaaaaaaaaaaaaaaaugcaucccccccccccccccccccccccccccccccaaaggcucuuuucagagccaccagaauu

SEQ ID NO: 1139 - RNA, 1576 nt, Artificial Sequence
  mRNA Design i-2 (A64-N5-C30-hSL-N5) comprising derived and/or modified sequence from Pf(3D7)__XP_001351122.1__IgE_Pf-CSP(19-397) (opt6)
ggggcgcugccuacggagguggcagccaucuccuucucggcaucaagcuuaccauggauuggacauggauucucuuccucguagcagcagccacaagaguacacucuuuauuucaagaauaccaaugcuacggaucaagcucaaacacacgcguacuaaacgaacuaaacuacgacaacgcaggaacaaacuuauacaacgaacuagaaaugaacuauuauggcaaacaagaaaacugguacucacuaaaaaaaaacuccagaagcuuaggagaaaacgacgacggaaacaacgaagacaacgaaaaacuacgcaaaccuaaacacaaaaaacuaaaacaaccugcagacggaaacccagacccaaacgcgaacccaaacguagauccaaacgcaaacccaaacguagaucccaacgcaaacccgaacguagacccuaacgcaaauccaaacgcaaaccccaacgcaaacccgaacgcaaacccaaacgcaaacccaaacgcaaacccaaacgcaaacccaaacgcaaacccaaacgccaacccaaacgcaaauccaaacgcuaacccaaaugcaaacccuaacgcaaacccaaacgccaacccaaacgcaaacccaaacgcaaacccaaacgcaaaucccaauguagacccaaacgcaaacccaaacgcaaacccaaacgcuaacccaaaugcaaacccaaacgcaaacccaaacgcaaacccaaacgcuaaccccaacgcaaacccgaacgcaaacccaaaugcaaacccaaacgcaaacccaaaugcaaacccaaacgcaaacccaaacgcaaaccccaaugccaacccaaacgcaaauccaaaugccaauccaaacgcaaacccaaacaaaaacaaccaaggaaauggacaaggacauaacaugccaaacgaccccaaccgaaauguagacgaaaacgccaacgcaaauagugcagucaaaaacaauaacaaugaagaacccucagauaaacauauaaaagaauacuuaaacaaaauacaaaacucacuaucaaccgaguggucuccuugcucaguaacauguggaaacggaauacaaguacgaauaaaaccaggaucagcaaacaaaccgaaagacgaacuagacuacgccaacgacauagaaaagaaaauauguaaaauggagaaauguaguucaguauucaacgugguaaacagcucaauaggccuaauaaugguacucucuuuccuauuccuaaacuaaggacuagugcaucacauuuaaaagcaucucagccuaccaugagaauaagagaaagaaaaugaagaucaauagcuuauucaucucuuuuucuuuuucguugguguaaagccaacacccugucuaaaaaacauaaauuucuuuaaucauuuugccucuuuucucugugcuucaauuaauaaaaaauggaaagaaccuagaucuaaaaaaaaaaaaaaaaaaaaaaaaaaaaaaaaaaaaaaaaaaaaaaaaaaaaaaaaaaaaaaaaugcaucccccccccccccccccccccccccccccccaaaggcucuuuucagagccaccagaauu

SEQ ID NO: 1140 - RNA, 1741 nt, Artificial Sequence
  mRNA Design i-2 (A64-N5-C30-hSL-N5) comprising derived and/or modified sequence from Pf(3D7)__XP_001351122.1__Pf-CSP_L(G4SG4)_TM domain HA (opt6)
ggggcgcugccuacggagguggcagccaucuccuucucggcaucaagcuuaccaugaugcguaaacuagcaauacuaucugucaguucauucuuauucguagaagcacuauuccaagaauaccaauguuacggaucuucaucaaacacaagaguacucaacgaauuaaacuacgauaacgcuggaaccaauuuauacaacgaacuagaaaugaacuacuauggaaaacaagaaaacugguauucacuaaaaaaaaacagcagaaguuuaggagaaaaugacgacggaaacaaugaagacaaugaaaaauuacgaaaaccaaaacacaaaaaauuaaaacaacccgccgacggaaauccagacccaaacgcaaacccaaauguagacccaaacgcaaacccaaauguagaucccaacgcaaacccaaacguagaucccaaugcaaacccaaacgcaaacccaaaugcaaaccccaacgcaaacccaaaugcaaacccuaacgcaaacccgaacgcaaacccaaacgcaaaucccaaugcaaaccccaacgcaaauccaaaugcaaacccuaacgcaaauccgaacgcaaauccaaacgcaaacccaaacgcaaacccaaacgcaaacccaaacgcaaacccaaacgucgacccaaacgccaauccaaacgcaaaccccaaugcaaacccaaaugcaaacccaaacgcaaacccaaaugccaacccaaacgcaaacccaaacgcaaacccaaacgcaaacccaaacgcaaacccaaaugcaaacccaaaugcaaacccaaacgccaacccaaacgcaaacccaaacgcaaacccaaacgccaacccaaacgcaaacccuaacgcaaauccaaacaaaaacaaccaagggaacggacaaggacacaacaugccaaacgacccaaacagaaacguagacgaaaacgccaacgcaaacucagcugucaaaaacaauaacaacgaagaacccuccgauaaacacauaaaagaauaccuaaacaaaauccaaaacucccuuucuacagaauggucacccugcucaguaacaugcggcaacggcauacaaguuagaaucaaaccaggaucagcaaauaaaccaaaagacgaauuagacuaugccaacgacauagaaaaaaaaauauguaaaauggaaaaaugcucaucaguuuucaacguaguaaacagcucaaucggauuaauaaugguacuaucauucuuauuuuuaaacggaggaggaggcuccggcggagguggaaaacuagaaucaacuagaauauaccaaauauuagcaauauacucaacaguagcaucaucacucguauuaguaguaucgcuaggagcaauaaguuucuggaugugcucuaacggaagccuacaaugccgaauaugcauauaaggacuagugcaucacauuuaaaagcaucucagccuaccaugagaauaagagaaagaaaaugaagaucaauagcuuauucaucucuuuuucuuuuucguugguguaaagccaacacccugucuaaaaaacauaaauuucuuuaaucauuuugccucuuuucucugugcuucaauuaauaaaaaauggaaagaaccuagaucuaaaaaaaaaaaaaaaaaaaaaaaaaaaaaaaaaaaaaaaaaaaaaaaaaaaaaaaaaaaaaaaaugcaucccccccccccccccccccccccccccccccaaaggcucuuuucagagccaccagaauu

SEQ ID NO: 1141 - RNA, 1615 nt, Artificial Sequence
  mRNA Design i-2 (A64-N5-C30-hSL-N5) comprising derived and/or modified sequence from Pf(3D7)__XP_001351122.1__Pf-CSP(199-377)_L(PVTN)_HBsAg (opt6)
ggggcgcugccuacggagguggcagccaucuccuucucggcaucaagcuuaccauggacccaaacgccaaccccaacgcaaacccaaaugcaaacccaaacgcuaaccccaacgcaaacccaaacgcuaacccuaacgcaaauccaaacgcaaaucccaacgcaaauccaaacgcaaacccaaacgcaaacccaaaugccaacccaaacgcaaacccuaacgcaaaucccaacgcaaauccaaaugcaaaccccaaugcaaacccaaacgcaaauccaaacaaaaauaaucaaggaaauggacaaggacauaacaugccaaacgacccuaaccgaaacgucgacgaaaaugcaaacgcaaacuccgcaguaaaaaacaacaacaacgaagaaccuuccgacaaacacauaaaagaauaccuaaacaaaauacaaaacucucuauccacugaauggucaccaugcucaguaaccugcggaaauggcauacaaguaagaauaaaaccaggaucugcaaauaaaccuaaagacgaacuagauuacgcaaaugacauagaaaaaaaaauaugcaaaauggaaaaaugcucaucagucccaguaacaaacauggaaaacaucacaucaggauucuuaggaccacuacucguauuacaagcaggauucuuucuuuuaacaagaauauuaacaauaccacaaucccuagacucaugguggacaucauuaaacuuccuagguggaucaccagucugccucggacaaaacucacaaucaccaacaucaaaccacucaccaacauccugcccaccaauuuguccaggauacagauggaugugccuacgaagauucauaauauucuuauuuauauuacuacuaugucucauauuuuuacucguacuauuagacuaucagggcauguuacccguauguccacuaauaccaggcucaaccaccacaaacacagguccaugcaaaaccugcaccacaccagcacaaggaaacuccauguuucccucauguugcugcaccaaacccaccgauggaaacugcaccugcauaccaaucccaucuucaugggcauucgcaaaauaucuaugggaaugggcauccguaagauuuucauggcuaucacuauuaguaccauucguacaaugguucguaggauuaucaccaacaguaugguuaucagcaauauggaugaugugguacuggggaccaucacuauacucaauaguauccccuuucauaccauuacucccaauauuuuucugccuuuggguauacauauaaggacuagugcaucacauuuaaaagcaucucagccuaccaugagaauaagagaaagaaaaugaagaucaauagcuuauucaucucuuuuucuuuuucguugguguaaagccaacacccugucuaaaaaacauaaauuucuuuaaucauuuugccucuuuucucugugcuucaauuaauaaaaaauggaaagaaccuagaucuaaaaaaaaaaaaaaaaaaaaaaaaaaaaaaaaaaaaaaaaaaaaaaaaaaaaaaaaaaaaaaaaugcaucccccccccccccccccccccccccccccccaaaggcucuuuucagagccaccagaauu

SEQ ID NO: 1142 - RNA, 1657 nt, Artificial Sequence
  mRNA Design i-2 (A64-N5-C30-hSL-N5) comprising derived and/or modified sequence from Pf(3D7)__XP_001351122.1__Pf-CSP(199-387)_L(PVTN)_HBsAg (opt6)
ggggcgcugccuacggagguggcagccaucuccuucucggcaucaagcuuaccaugauggcaccagauccaaacgcaaacccaaacgcaaacccaaacgcaaauccaaaugcaaacccaaacgcaaaucccaaugcaaacccuaacgcaaacccaaacgccaacccaaaugccaacccaaacgcaaacccaaacgcaaauccaaacgcaaacccaaacgcuaacccaaaugcaaaccccaacgcaaauccaaacgcaaacccaaacgcaaauccaaacgcuaacccaaacaaaaauaaccaaggaaacggacaaggacacaauaugccaaaugacccaaauagaaacguagacgaaaacgcaaacgcaaauucagcagucaaaaacaauaacaacgaagaaccauccgauaaacacauaaaagaauacuuaaacaaaauccaaaacucacuaucaacugaauggucaccuuguucaguaacauguggcaacggaauacaaguaagaauaaaaccagguucagccaacaaaccuaaagacgaacuagacuacgcaaacgacauagaaaaaaaaaucugcaaaauggaaaaaugcucaucaguauuuaauguaguaaacucaucaauaggacuaggcccuguaacaaacauggaaaacauaaccucaggauucuuaggcccacuacuaguacuccaagcaggauucuuucuucuaacaagaauauuaaccauuccucaaucauuagacucaugguggacaucccuuaacuuucuaggaggaagccccguaugcuuaggacaaaacagccaauccccaacauccaaccacuccccaacaucaugccccccaauaugcccaggauacagauggaugugccuaagaagauucaucauauuccuauuuauucucuuacucugcuuaauauucuuacucguauuacucgacuaccaaggaauguuaccaguaugcccacuaauaccaggauccacaacaacaaacacgggaccaugcaaaacaugcacaacaccugcccaaggaaauuccauguucccaucaugcugcugcacaaaaccaaccgacggcaacugcacaugcauaccaauaccaucaagcugggccuucgcaaaauaccuaugggaaugggcaucagugagauucucauggcucucauuacuagucccauucguacaaugguuuguaggauuaucaccaacaguuuggcucagcgcaauauggaugaugugguacuggggccccucuuuauauucaauaguauccccauuuauaccacuacucccaauauucuucuguuuauggguauacauauaaggacuagugcaucacauuuaaaagcaucucagccuaccaugagaauaagagaaagaaaaugaagaucaauagcuuauucaucucuuuuucuuuuucguugguguaaagccaacacccugucuaaaaaacauaaauuucuuuaaucauuuugccucuuuucucugugcuucaauuaauaaaaaauggaaagaaccuagaucuaaaaaaaaaaaaaaaaaaaaaaaaaaaaaaaaaaaaaaaaaaaaaaaaaaaaaaaaaaaaaaaaugcaucccccccccccccccccccccccccccccccaaaggcucuuuucagagccaccagaauu

SEQ ID NO: 1143 - RNA, 841 nt, Artificial Sequence
  mRNA Design i-2 (A64-N5-C30-hSL-N5) comprising derived and/or modified sequence from Pf(3D7)__XP_001351122.1__HsALB_Pf-CSP(19-152) (opt6)
ggggcgcugccuacggagguggcagccaucuccuucucggcaucaagcuuaccaugaaauggguaacauucauaucacuacuauuccuauucuccagcgcauacucacuauuccaagaauaccaaugcuacggaucaagcucaaacacacgaguacuaaacgaacuaaacuacgacaacgcaggaaccaaccuauacaacgaacuagaaaugaacuacuacggaaaacaagaaaacugguacucacuaaaaaaaaacagcagaucacuaggagaaaacgacgacggaaacaacgaagacaacgaaaaacuaagaaaaccaaaacacaaaaaacuaaaacaacccgcagacggaaacccagacccaaacgcaaacccaaacguagacccaaaugcaaacccaaacguagacccaaacgcaaacccaaacguagacccaaacgcaaacccaaacgcaaacccaaacgcaaacccaaacgcaaacccaaacgcaaacccaaacgcaaacccauaaggacuagugcaucacauuuaaaagcaucucagccuaccaugagaauaagagaaagaaaaugaagaucaauagcuuauucaucucuuuuucuuuuucguugguguaaagccaacacccugucuaaaaaacauaaauuucuuuaaucauuuugccucuuuucucugugcuucaauuaauaaaaaauggaaagaaccuagaucuaaaaaaaaaaaaaaaaaaaaaaaaaaaaaaaaaaaaaaaaaaaaaaaaaaaaaaaaaaaaaaaaugcaucccccccccccccccccccccccccccccccaaaggcucuuuucagagccaccagaauu

SEQ ID NO: 1144 - RNA, 961 nt, Artificial Sequence
  mRNA Design i-2 (A64-N5-C30-hSL-N5) comprising derived and/or modified sequence from Pf(3D7)__XP_001351122.1__HsALB_Pf-CSP(19-192) (opt6)
ggggcgcugccuacggagguggcagccaucuccuucucggcaucaagcuuaccaugaaauggguaacauucaucucacuacuauucuuauucucaucagcauacucacuauuccaagaauaccaaugcuacggaucaucaucaaacacacgaguacucaacgaacuaaacuacgacaacgcaggaacaaaccuauacaacgaacuagaaaugaacuacuacggaaaacaagaaaacugguauucacuaaaaaaaaacucaagaucacuaggagaaaacgacgacggaaacaacgaagacaacgaaaaacuaagaaaaccaaaacacaaaaaacuaaaacaaccagcagacggaaacccagacccaaacgcaaacccaaacguagacccaaacgccaacccaaacguagacccaaacgcaaacccaaacguagacccaaacgcaaacccaaacgcaaacccaaacgcaaacccaaacgcaaacccaaacgcaaacccaaacgcaaacccaaacgcaaacccaaacgcaaacccaaacgcaaacccaaacgcaaacccaaacgcaaacccaaacgcaaauccaaacgcaaacccaaacgcaaacccaaacgcaaacccaaacgcaaaccccuaaggacuagugcaucacauuuaaaagcaucucagccuaccaugagaauaagagaaagaaaaugaagaucaauagcuuauucaucucuuuuucuuuuucguugguguaaagccaacacccugucuaaaaaacauaaauuucuuuaaucauuuugccucuuuucucugugcuucaauuaauaaaaaauggaaagaaccuagaucuaaaaaaaaaaaaaaaaaaaaaaaaaaaaaaaaaaaaaaaaaaaaaaaaaaaaaaaaaaaaaaaaugcaucccccccccccccccccccccccccccccccaaaggcucuuuucagagccaccagaauu

SEQ ID NO: 1145 - RNA, 1201 nt, Artificial Sequence
  mRNA Design i-2 (A64-N5-C30-hSL-N5) comprising derived and/or modified sequence from Pf(3D7)__XP_001351122.1__HsALB_Pf-CSP(19-272) (opt6)
ggggcgcugccuacggagguggcagccaucuccuucucggcaucaagcuuaccaugaaauggguaacauucauaucacuacuauuccuauucucaagcgcauauucacuauuccaagaauaccaaugcuacggaucaagcucaaacacaagaguacuuaacgaacuaaacuacgacaacgcaggaacaaaccuauacaacgaacuugaaaugaacuacuacggaaaacaagaaaacugguacucacuaaaaaaaaauagcagaagcuuaggagaaaacgacgacggaaacaacgaagacaacgaaaaauuaagaaaaccuaaacacaaaaaacuaaaacaacccgcagacggaaacccagacccuaacgccaacccaaauguagacccaaacgcaaacccaaacguagacccaaacgcaaaccccaacguagacccaaacgcaaacccaaacgcaaacccaaacgcaaacccaaacgcaaaccccaacgcaaacccaaacgcaaacccaaacgcaaacccaaacgcaaacccaaacgcaaacccaaacgcaaacccaaacgcaaacccaaacgcaaacccaaacgcgaacccaaacgcaaacccaaacgcaaacccaaacgcaaacccaaacgcaaacccaaacguagacccaaaugcaaaccccaacgcaaacccaaacgcaaacccaaaugcaaaccccaacgcaaacccaaacgcaaacccaaacgcaaacccaaacgcaaacccaaaugcaaacccaaacgcaaacccaaacgccaacccaaacgcaaacccaaacgcaaacccaaacgcaaacccaaacgcaaacccgaacgcaaacccaaacgcaaacccaaacgcaaacccauaaggacuagugcaucacauuuaaaagcaucucagccuaccaugagaauaagagaaagaaaaugaagaucaauagcuuauucaucucuuuuucuuuuucguugguguaaagccaacacccugucuaaaaaacauaaauuucuuuaaucauuuugccucuuuucucugugcuucaauuaauaaaaaauggaaagaaccuagaucuaaaaaaaaaaaaaaaaaaaaaaaaaaaaaaaaaaaaaaaaaaaaaaaaaaaaaaaaaaaaaaaaugcaucccccccccccccccccccccccccccccccaaaggcucuuuucagagccaccagaauu

SEQ ID NO: 1146 - RNA, 1363 nt, Artificial Sequence
  mRNA Design i-2 (A64-N5-C30-hSL-N5) comprising derived and/or modified sequence from Pf(3D7)__XP_001351122.1__HsALB_Pf-CSP(19-272)_L(AAY)_Pf-CSP(310-3 27)_L(AAY)_Pf-CSP(346-375) (opt6)
ggggcgcugccuacggagguggcagccaucuccuucucggcaucaagcuuaccaugaaauggguaacauuuauaucacuccuauuccuuuuuucgucagcauacucacuauuccaagaauaucaaugcuacggaucaagcuccaacacaagaguacuaaacgaacuaaacuacgacaacgcaggaacaaaccuauacaacgaacuagaaaugaacuacuacggaaaacaagaaaacugguacucacuaaaaaaaaacagccgaagcuuaggagaaaaugacgacggaaacaacgaagacaacgaaaaauuacgcaaacccaaacacaaaaaacugaaacaaccagcagacggaaacccagacccaaacgcaaacccaaacguagacccaaacgcaaacccaaacguagacccaaacgcaaacccaaacguagacccaaacgcaaacccaaacgcgaacccaaacgccaacccaaacgcaaacccaaacgcaaacccaaacgcaaacccaaacgcaaacccaaacgcaaacccaaacgccaacccgaacgcaaacccaaacgcaaacccaaacgcaaauccaaacgcaaacccaaacgcaaacccaaacgccaacccaaacgcaaacccaaacgcaaacccaaauguggacccaaacgcaaacccaaacgcaaacccaaacgcaaacccaaaugcaaacccaaacgcaaacccaaacgcaaacccaaacgcaaacccaaacgcaaacccaaaugcaaacccaaacgcaaauccaaacgcaaacccaaacgcaaacccaaacgcaaacccaaacgcaaacccuaacgcaaacccaaacgcaaacccaaacgccaaccccaaugcaaacccagcagcauacgaaccaucagacaaacacauaaaagaauaccuaaacaaaauacaaaacucacucgcagcauauauaaagccaggaagcgccaacaaaccaaaagacgaacuagauuacgcaaacgacauagaaaaaaaaaucuguaaaauggaaaaaugcucauaaggacuagugcaucacauuuaaaagcaucucagccuaccaugagaauaagagaaagaaaaugaagaucaauagcuuauucaucucuuuuucuuuuucguugguguaaagccaacacccugucuaaaaaacauaaauuucuuuaaucauuuugccucuuuucucugugcuucaauuaauaaaaaauggaaagaaccuagaucuaaaaaaaaaaaaaaaaaaaaaaaaaaaaaaaaaaaaaaaaaaaaaaaaaaaaaaaaaaaaaaaaugcaucccccccccccccccccccccccccccccccaaaggcucuuuucagagccaccagaauu

SEQ ID NO: 1147 - RNA, 1324 nt, Artificial Sequence
  mRNA Design i-2 (A64-N5-C30-hSL-N5) comprising derived and/or modified sequence from Pf(3D7)__XP_001351122.1__HsALB_Pf-CSP(19-272)_L(AAY)_Pf-CSP(346-3 65)_L(AAY)_P2 (opt6)
ggggcgcugccuacggagguggcagccaucuccuucucggcaucaagcuuaccaugaaauggguaacauucauaucacuauuauuccuuuucucaucagcuuacucacuauuccaagaauaccaaugcuacggaucauccucaaacacaagaguacuaaacgaacuaaacuacgacaacgccggaaccaaccuauacaacgaacucgaaaugaacuacuacggaaaacaagaaaacugguacucacuaaaaaaaaacagccgaucccuaggagaaaacgacgacggaaauaacgaagacaaugaaaaauuaagaaaaccaaaacacaaaaaacuaaaacaaccagcagacggaaacccagacccaaacgcaaacccaaacguagauccaaacgcaaacccaaacguagacccaaacgcaaacccaaacguagacccaaacgcuaacccaaacgcaaacccaaacgcaaacccaaacgcaaacccaaacgcaaacccaaacgcaaacccgaacgcaaaccccaacgcaaacccaaacgcaaacccaaacgcaaaccccaacgcaaacccaaacgcaaacccgaacgcaaacccaaacgcaaacccaaacgcaaacccaaacgcaaacccaaacgcaaacccaaacguagacccaaacgccaacccaaacgcaaacccaaacgcaaacccaaacgcaaacccaaacgcaaacccaaacgcaaacccaaacgcaaacccaaacgcaaacccaaacgcaaacccaaacgcaaaccccaacgcaaacccaaaugcaaacccaaacgcaaacccaaaugcaaaccccaacgcaaacccaaaugccaauccaaacgcaaacccaaacgcaaacccagccgcauacauaaaaccaggauccgcaaacaaaccaaaagacgaacuagacuacgcaaacgacauagaagcagcauaccaauauauaaaagccaacuccaaauucauagguauaacagaacucuaaggacuagugcaucacauuuaaaagcaucucagccuaccaugagaauaagagaaagaaaaugaagaucaauagcuuauucaucucuuuuucuuuuucguugguguaaagccaacacccugucuaaaaaacauaaauuucuuuaaucauuuugccucuuuucucugugcuucaauuaauaaaaaauggaaagaaccuagaucuaaaaaaaaaaaaaaaaaaaaaaaaaaaaaaaaaaaaaaaaaaaaaaaaaaaaaaaaaaaaaaaaugcaucccccccccccccccccccccccccccccccaaaggcucuuuucagagccaccagaauu

SEQ ID NO: 1148 - RNA, 1318 nt, Artificial Sequence
  mRNA Design i-2 (A64-N5-C30-hSL-N5) comprising derived and/or modified sequence from Pf(3D7)__XP_001351122.1__HsALB_Pf-CSP(19-272)_L(AAY)_Pf-CSP(346-3 65)_L(AAY)_PADRE (opt6)
ggggcgcugccuacggagguggcagccaucuccuucucggcaucaagcuuaccaugaaauggguaaccuucauaucacuacuauucuuauucucaucagcauacucacucuuccaagaauaccaaugcuacggcucaagcucaaacacaagaguacuaaacgaauuaaacuaugacaacgccggaacaaaccuauacaaugaauuagaaaugaacuacuacggcaaacaagaaaacugguacucacucaaaaaaaacuccagaaguuuaggagaaaaugacgacggaaacaaugaagacaaugaaaaauuacgaaaaccaaaacacaaaaaacuaaaacaacccgccgacggaaaccccgacccgaacgcaaacccaaacguagacccaaacgcaaacccaaacguagacccaaaugcaaacccaaacguagacccaaacgcaaacccaaacgcaaacccaaacgcaaauccaaacgcaaacccaaaugcaaacccaaaugcaaauccaaacgcaaaccccaacgcaaacccaaacgcaaacccaaaugcaaauccaaacgccaacccaaaugcaaacccaaacgcaaauccaaacgcaaacccaaacgcaaauccaaacgcaaacccaaaugcaaacccaaacguagauccaaacgcaaacccaaacgccaacccaaacgcaaacccgaacgcaaacccaaacgcaaacccaaacgccaacccaaacgccaacccaaacgccaacccaaacgcaaacccaaacgcaaacccaaacgcaaacccaaacgcaaacccaaaugcaaacccuaacgcaaacccaaacgcaaacccaaacgcaaacccaaacgccaacccaaacgcaaauccagcagcauacauaaaaccaggaucagcaaacaaaccaaaagaugaacuagacuacgcaaaugacaucgaagcagccuacgcuaaauucguagcagccuggacacuaaaagcagcagccuaaggacuagugcaucacauuuaaaagcaucucagccuaccaugagaauaagagaaagaaaaugaagaucaauagcuuauucaucucuuuuucuuuuucguugguguaaagccaacacccugucuaaaaaacauaaauuucuuuaaucauuuugccucuuuucucugugcuucaauuaauaaaaaauggaaagaaccuagaucuaaaaaaaaaaaaaaaaaaaaaaaaaaaaaaaaaaaaaaaaaaaaaaaaaaaaaaaaaaaaaaaaugcaucccccccccccccccccccccccccccccccaaaggcucuuuucagagccaccagaauu

SEQ ID NO: 1149 - RNA, 1375 nt, Artificial Sequence
  mRNA Design i-2 (A64-N5-C30-hSL-N5) comprising derived and/or modified sequence from Pf(3D7)__XP_001351122.1__HsALB_Pf-CSP(19-272)_L(G4S)_Pf-CSP(310-3 27)_L(G4S)_Pf-CSP(346-375) (opt6)
ggggcgcugccuacggagguggcagccaucuccuucucggcaucaagcuuaccaugaaauggguaaccuucaucucacuacuauuccuauucucaagcgcauacucacucuuucaagaauaccaaugcuacggcucaagcucaaacacacgaguacuaaacgaacuaaacuacgacaacgcaggaacaaaccuauauaacgaacucgaaaugaacuacuacggcaaacaagaaaauugguacucacuaaaaaaaaacagcagaagcuuaggagaaaacgacgacggaaacaacgaagauaacgaaaaacuaagaaaaccaaaacacaaaaaacuaaaacaacccgcagacggaaacccagacccaaacgcaaauccaaauguagacccgaacgcaaacccaaacguagacccaaaugcgaacccaaacgucgacccaaacgcaaacccaaaugcaaacccaaaugcgaacccaaacgcaaacccaaacgcaaauccaaacgcaaauccaaaugcaaacccaaacgcgaauccaaacgcaaacccaaacgcaaacccaaacgcaaacccaaacgcaaacccaaacgcaaacccaaacgcaaacccgaacgcuaacccaaacgcaaacccaaacgcaaacccaaacguagauccaaacgcgaacccaaacgcaaacccaaaugcaaacccaaacgcaaacccaaacgcaaacccaaacgcaaacccaaacgcaaacccaaacgcaaacccaaacgcgaacccaaacgcaaauccaaaugcaaacccaaacgcaaacccaaacgcaaacccaaacgcaaacccaaaugcaaacccaaacgcaaacccaaaugcaaacccaaacgcaaacccaggaggaggaggaucagaacccucagacaaacacauaaaagaauaccuaaacaaaauacaaaacucacuaggaggaggaggaucgaucaaaccaggaagcgcaaacaaaccaaaagacgaacucgacuacgcaaacgauauagaaaaaaaaauaugcaaaauggaaaaaugcucguaaggacuagugcaucacauuuaaaagcaucucagccuaccaugagaauaagagaaagaaaaugaagaucaauagcuuauucaucucuuuuucuuuuucguugguguaaagccaacacccugucuaaaaaacauaaauuucuuuaaucauuuugccucuuuucucugugcuucaauuaauaaaaaauggaaagaaccuagaucuaaaaaaaaaaaaaaaaaaaaaaaaaaaaaaaaaaaaaaaaaaaaaaaaaaaaaaaaaaaaaaaaugcaucccccccccccccccccccccccccccccccaaaggcucuuuucagagccaccagaauu

SEQ ID NO: 1150 - RNA, 1360 nt, Artificial Sequence
  mRNA Design i-2 (A64-N5-C30-hSL-N5) comprising derived and/or modified sequence from Pf(3D7)__XP_001351122.1__HsALB_Pf-CSP(19-272)_L(G4S)_Pf-CSP(310-3 27)_Pf-CSP(346-375) (opt6)
ggggcgcugccuacggagguggcagccaucuccuucucggcaucaagcuuaccaugaaauggguaacauucauaucacuccuauuccuauucuccucagcauacucccucuuccaagaauaccaaugcuacggcucaagcucaaacacacgaguacuaaacgaacuaaauuacgacaacgccggaacaaaccuauauaaugaacuagaaaugaauuacuacggaaaacaagaaaacugguacucacuuaaaaaaaacucaagaucauuaggagaaaacgacgacggcaacaacgaagacaacgaaaaacuaagaaaaccaaaacacaaaaaacuaaaacaacccgcagacggaaauccagauccaaacgcaaacccaaacguagacccaaacgcaaacccaaacguagacccaaacgcaaacccaaacgucgacccaaacgccaacccaaacgcaaacccaaacgcaaacccaaacgcaaacccaaacgccaacccaaacgcaaacccaaacgcaaacccaaacgcaaacccaaacgcaaacccaaacgcaaacccaaacgcaaacccgaacgcaaacccaaacgcaaauccuaacgcaaacccaaacgcaaacccaaacgcaaauccgaacgcaaacccaaacguagacccaaacgcaaacccaaacgcaaacccaaacgcaaacccaaacgcaaacccaaacgcaaacccuaacgcaaacccaaaugcaaacccaaacgcgaacccaaaugcaaacccaaaugcaaacccaaacgcaaacccaaacgcaaacccaaacgcaaauccaaacgcaaauccaaacgcaaacccaaacgcaaacccaaacgcaaacccaaacgccaacccaggaggagguggaagcgaaccauccgacaaacacauaaaagaauaccuaaacaaaauacaaaacucacuaauaaaacccggcucagcaaacaaaccaaaagacgaacuagacuacgccaacgacauagaaaaaaaaauauguaaaauggaaaaaugcucauaaggacuagugcaucacauuuaaaagcaucucagccuaccaugagaauaagagaaagaaaaugaagaucaauagcuuauucaucucuuuuucuuuuucguugguguaaagccaacacccugucuaaaaaacauaaauuucuuuaaucauuuugccucuuuucucugugcuucaauuaauaaaaaauggaaagaaccuagaucuaaaaaaaaaaaaaaaaaaaaaaaaaaaaaaaaaaaaaaaaaaaaaaaaaaaaaaaaaaaaaaaaugcaucccccccccccccccccccccccccccccccaaaggcucuuuucagagccaccagaauu

SEQ ID NO: 1151 - RNA, 1360 nt, Artificial Sequence
  mRNA Design i-2 (A64-N5-C30-hSL-N5) comprising derived and/or modified sequence from Pf(3D7)__XP_001351122.1__HsALB_Pf-CSP(19-325) (opt6)
ggggcgcugccuacggagguggcagccaucuccuucucggcaucaagcuuaccaugaaauggguaacauucauaucacuccuauuccuauucucaagcgcauacucauuauuccaagaauaccaaugcuacggaucaucaucuaacacaagaguacucaacgaacuaaacuacgacaacgcaggaacuaaucucuacaacgaacuagaaaugaacuacuacggaaaacaagaaaacugguauucacuaaaaaaaaacagccgaucauuaggagaaaacgacgacggcaacaacgaagacaacgaaaaacuacgaaaaccaaaacacaaaaaauuaaaacagccagccgacggaaacccagacccaaacgcaaacccaaacguagacccaaacgcaaacccaaacguagacccaaacgcaaacccaaacguagacccaaacgcaaacccaaacgcaaacccaaacgcaaauccaaacgcaaacccaaacgccaacccaaacgcaaacccaaacgcaaaccccaacgcaaacccaaacgcaaacccaaacgcaaacccaaaugccaacccaaacgcaaacccaaacgcaaacccaaacgcaaacccaaacgcaaacccaaaugcaaacccaaacgcaaacccaaacguagacccaaacgcaaacccaaaugcaaacccaaacgcaaaccccaacgcaaacccaaacgcaaacccaaacgcaaacccaaacgcaaacccaaacgccaacccaaacgcaaacccaaacgcaaacccaaacgcaaacccaaacgcaaacccaaacgcaaauccaaacgcaaacccaaacgcaaacccaaacgcaaacccaaacgcaaacccaaacgcaaacccaaauaaaaacaaucaaggaaacggacaaggacacaacaugccaaacgauccaaaucgcaacguagacgaaaacgcaaacgcaaacagcgcagucaaaaacaacaacaacgaagaaccaucagacaaacacauaaaagaauaccuaaauaaaauacaaaacuagggacuagugcaucacauuuaaaagcaucucagccuaccaugagaauaagagaaagaaaaugaagaucaauagcuuauucaucucuuuuucuuuuucguugguguaaagccaacacccugucuaaaaaacauaaauuucuuuaaucauuuugccucuuuucucugugcuucaauuaauaaaaaauggaaagaaccuagaucuaaaaaaaaaaaaaaaaaaaaaaaaaaaaaaaaaaaaaaaaaaaaaaaaaaaaaaaaaaaaaaaaugcaucccccccccccccccccccccccccccccccaaaggcucuuuucagagccaccagaauu

SEQ ID NO: 1152 - RNA, 1537 nt, Artificial Sequence
  mRNA Design i-2 (A64-N5-C30-hSL-N5) comprising derived and/or modified sequence from Pf(3D7)__XP_001351122.1__HsALB_Pf-CSP(19-384) (opt6)
ggggcgcugccuacggagguggcagccaucuccuucucggcaucaagcuuaccaugaaauggguaaccuuuauaucacucuuauuccuauuuucaucagcauacucacucuuccaagaauaucaaugcuacggaucaucaucaaacacaagaguccucaaugaauuaaacuaugacaaugcaggaaccaaccuauacaacgaauuagaaaugaacuacuacggcaaacaagaaaacugguacucacucaaaaaaaacucaagauccuuaggagaaaaugaugacggaaacaacgaagacaacgaaaaacuccgaaaaccaaaacacaaaaaacuaaaacaacccgccgacggaaacccagaccccaacgcaaacccaaauguagaccccaacgcaaacccaaacguagacccaaacgcaaacccaaacguagacccaaacgcaaauccaaacgccaacccaaacgcaaacccaaacgccaacccaaacgcaaacccaaacgcaaacccaaacgcaaacccaaacgcaaacccaaaugcaaacccaaaugcaaacccaaacgcaaacccaaacgcaaacccaaacgcaaacccaaacgcaaacccaaaugcaaacccaaacgcaaacccaaacgcaaacccaaacguagacccaaaugcaaacccaaacgcaaacccaaacgcaaauccaaaugcaaauccaaacgcaaauccaaacgcaaacccaaacgcaaacccaaacgcaaacccaaacgcaaauccaaaugcaaacccaaacgcaaacccaaacgcaaacccaaacgcuaacccaaacgccaauccaaacgcaaacccaaacgcaaacccuaaugcaaacccaaacgccaacccaaauaaaaauaaccaaggaaacggacaaggacacaacaugccaaacgacccaaacagaaacgucgaugaaaacgcaaacgcaaauuccgcagucaaaaacaacaacaacgaagaaccaucagacaaacacauaaaagaauaccucaacaaaauacaaaacucccuaucaacagaauggucacccugcuccguuacaugcgguaacggcauacaaguaagaauaaaaccaggaucagcuaacaaacccaaagacgaacuagacuacgccaacgacauagaaaaaaaaauaugcaaaauggaaaaaugcuccucaguauucaacguaguaaacucaucauaaggacuagugcaucacauuuaaaagcaucucagccuaccaugagaauaagagaaagaaaaugaagaucaauagcuuauucaucucuuuuucuuuuucguugguguaaagccaacacccugucuaaaaaacauaaauuucuuuaaucauuuugccucuuuucucugugcuucaauuaauaaaaaauggaaagaaccuagaucuaaaaaaaaaaaaaaaaaaaaaaaaaaaaaaaaaaaaaaaaaaaaaaaaaaaaaaaaaaaaaaaaugcaucccccccccccccccccccccccccccccccaaaggcucuuuucagagccaccagaauu

SEQ ID NO: 1153 - RNA, 1675 nt, Artificial Sequence
  mRNA Design i-2 (A64-N5-C30-hSL-N5) comprising derived and/or modified sequence from Pf(3D7)__XP_001351122.1__HsALB_Pf-CSP(19-384)_TM domain HA (opt6)
ggggcgcugccuacggagguggcagccaucuccuucucggcaucaagcuuaccaugaaauggguaacauuuauaucacuacuuuuccuauucucaucagcauacucacucuuccaagaauaucaaugcuauggauccucaucaaacacaagaguacucaacgaauuaaacuacgauaaugccggaacaaaccuauauaacgaacuagaaaugaacuacuacggaaaacaagaaaauugguacucauuaaaaaaaaacuccagaucccuuggagaaaacgacgauggaaacaacgaagauaacgaaaaauuaagaaaaccaaaacacaaaaaauugaaacaaccagcagacgguaacccagacccaaacgccaacccaaacguagacccaaacgcgaauccaaacgucgacccaaacgcaaaucccaacguagacccaaaugcaaauccaaaugccaauccaaacgcaaacccaaacgcaaacccaaaugcaaacccaaacgccaacccaaacgcaaauccaaacgcaaacccaaacgcaaacccaaacgccaacccaaacgccaaccccaaugcaaacccaaaugcaaacccaaacgcaaacccaaacgcaaauccaaacgcaaacccaaacgccaacccaaacguagacccaaacgcaaauccaaacgcaaacccaaacgccaauccaaacgcaaacccaaacgccaacccaaaugcaaaucccaacgcaaacccaaacgcaaauccaaaugcaaaccccaacgcaaauccaaacgcaaacccaaacgcaaauccaaacgcaaauccaaaugcaaacccaaacgcaaacccuaaugcaaacccaaacgcaaacccaaacgccaacccaaacaaaaacaaccaaggaaacggacaaggucacaauaugccaaaugacccaaaccgaaacguagacgaaaacgcaaaugccaauagcgcaguaaaaaacaauaacaacgaagaaccuucagauaaacacauaaaagaauaccuaaacaaaauacaaaacucccuaucaacagaauggucaccuuguucagucacauguggaaacggaauacaaguaagaauaaaaccaggaucagcaaacaaaccaaaagacgaacuagauuacgcaaacgauauagaaaaaaaaauauguaaaauggaaaaaugcuccucagucuucaacguagucaacaguuccaaacuagaaucaaccagaaucuaccaaauacuagcaauauauuccacaguagcaagcucacucguauuaguagucucccuaggagcaauaucauucuggaugugcucaaacggaagcuuacaaugccgaauauguauauaaggacuagugcaucacauuuaaaagcaucucagccuaccaugagaauaagagaaagaaaaugaagaucaauagcuuauucaucucuuuuucuuuuucguugguguaaagccaacacccugucuaaaaaacauaaauuucuuuaaucauuuugccucuuuucucugugcuucaauuaauaaaaaauggaaagaaccuagaucuaaaaaaaaaaaaaaaaaaaaaaaaaaaaaaaaaaaaaaaaaaaaaaaaaaaaaaaaaaaaaaaaugcaucccccccccccccccccccccccccccccccaaaggcucuuuucagagccaccagaauu

SEQ ID NO: 1154 - RNA, 1387 nt, Artificial Sequence
  mRNA Design i-2 (A64-N5-C30-hSL-N5) comprising derived and/or modified sequence from Pf(3D7)__XP_001351122.1__HsALB_Pf-CSP(82-397) (opt6)
ggggcgcugccuacggagguggcagccaucuccuucucggcaucaagcuuaccaugaaauggguaacauucauaucacuacuauuccucuucaguucagccuauagcgauaacgaaaaacuaagaaaaccaaaacacaaaaaacucaaacaaccagcagacggaaacccagacccaaacgcaaacccaaacguagacccaaacgcaaacccaaacguagacccaaacgcaaauccaaacguagacccaaaugcaaaccccaacgcaaacccaaacgcaaacccaaacgcaaacccaaacgcaaacccaaaugcgaacccaaaugcaaauccaaacgcaaacccaaacgcaaacccaaacgcaaacccaaacgcuaacccaaacgcaaacccaaacgcaaacccaaaugcaaacccaaacgcaaacccaaacgcaaaccccaacgcaaacccaaacguagacccaaacgcaaacccaaacgcaaacccaaacgcaaacccaaacgccaacccaaaugccaacccaaacgcaaacccaaaugcaaaccccaacgcaaacccaaacgccaacccaaacgcaaacccaaacgcaaacccaaacgcaaaccccaaugcaaacccaaacgcaaacccaaaugcaaauccaaacgcaaacccaaacgcaaacccaaacgcaaacccaaacaaaaacaaccaaggaaacggacaaggacacaacaugccaaacgacccaaaucgaaacgucgaugaaaacgccaacgcaaacucagcaguaaaaaacaacaacaacgaagaaccaucugacaaacacauaaaagaauaccuaaacaaaauacaaaacucauuauccaccgaauggucaccauguucaguaacaugcggcaacggaauacaagucagaauaaaaccaggcucagcaaauaaaccaaaagacgaacuagacuacgcaaacgacauagaaaaaaaaauaugcaaaauggaaaaauguucaucagucuucaacguaguaaacucaucaauaggacucauaaugguacuaucauuccuauucuuaaacuaaggacuagugcaucacauuuaaaagcaucucagccuaccaugagaauaagagaaagaaaaugaagaucaauagcuuauucaucucuuuuucuuuuucguugguguaaagccaacacccugucuaaaaaacauaaauuucuuuaaucauuuugccucuuuucucugugcuucaauuaauaaaaaauggaaagaaccuagaucuaaaaaaaaaaaaaaaaaaaaaaaaaaaaaaaaaaaaaaaaaaaaaaaaaaaaaaaaaaaaaaaaugcaucccccccccccccccccccccccccccccccaaaggcucuuuucagagccaccagaauu

SEQ ID NO: 1155 - RNA, 739 nt, Artificial Sequence
  mRNA Design i-2 (A64-N5-C30-hSL-N5) comprising derived and/or modified sequence from Pf(3D7)__XP_001351122.1__HsALB_Pf-CSP(93-192) (opt6)
ggggcgcugccuacggagguggcagccaucuccuucucggcaucaagcuuaccaugaaauggguaacauucaucucacuacuauuccuauucucaagcgcauacucaaaacuaaaacaaccagcagacggaaacccagacccaaacgcaaacccaaacguagacccaaacgcaaacccaaacguagacccaaacgcaaacccaaacguagacccaaacgcaaacccaaacgcaaacccaaacgcaaacccaaacgcaaacccaaacgcaaacccaaacgcaaacccaaacgcaaacccaaacgcaaacccaaacgcaaacccaaacgcaaacccaaacgcaaacccaaacgcaaacccaaacgcaaacccaaacgcaaacccaaacgcaaacccaaacgcaaacccauaaggacuagugcaucacauuuaaaagcaucucagccuaccaugagaauaagagaaagaaaaugaagaucaauagcuuauucaucucuuuuucuuuuucguugguguaaagccaacacccugucuaaaaaacauaaauuucuuuaaucauuuugccucuuuucucugugcuucaauuaauaaaaaauggaaagaaccuagaucuaaaaaaaaaaaaaaaaaaaaaaaaaaaaaaaaaaaaaaaaaaaaaaaaaaaaaaaaaaaaaaaaugcaucccccccccccccccccccccccccccccccaaaggcucuuuucagagccaccagaauu

SEQ ID NO: 1156 - RNA, 979 nt, Artificial Sequence
  mRNA Design i-2 (A64-N5-C30-hSL-N5) comprising derived and/or modified sequence from Pf(3D7)__XP_001351122.1__HsALB_Pf-CSP(93-272) (opt6)
ggggcgcugccuacggagguggcagccaucuccuucucggcaucaagcuuaccaugaaaugggucacauucauaucacuccuauuccuauucucaagcgcauacucaaaacuaaaacaaccagcagacggaaacccagacccaaacgcaaacccaaacguagacccaaacgcaaacccaaacguagacccaaacgcaaacccaaacguagacccaaacgcaaacccaaacgcaaacccaaacgccaacccaaacgcaaacccaaacgcaaacccaaacgcaaacccaaacgcaaacccaaacgcaaacccaaacgcaaacccaaacgcaaacccaaacgcaaacccaaacgcaaacccaaacgcaaauccaaacgcaaacccaaacgccaacccaaacgcaaacccaaacgcaaacccaaacguagacccaaacgcaaacccaaacgcaaacccaaacgcaaacccaaacgcaaacccaaacgcaaacccaaacgcaaacccaaacgcaaacccaaacgcaaacccaaacgcaaauccaaacgcaaacccaaacgcaaacccaaacgcaaacccaaacgcaaacccaaacgcaaacccaaacgcaaacccaaacgcaaacccaaacgcaaacccaaacgcaaacccauaaggacuagugcaucacauuuaaaagcaucucagccuaccaugagaauaagagaaagaaaaugaagaucaauagcuuauucaucucuuuuucuuuuucguugguguaaagccaacacccugucuaaaaaacauaaauuucuuuaaucauuuugccucuuuucucugugcuucaauuaauaaaaaauggaaagaaccuagaucuaaaaaaaaaaaaaaaaaaaaaaaaaaaaaaaaaaaaaaaaaaaaaaaaaaaaaaaaaaaaaaaaugcaucccccccccccccccccccccccccccccccaaaggcucuuuucagagccaccagaauu

SEQ ID NO: 1157 - RNA, 1354 nt, Artificial Sequence
  mRNA Design i-2 (A64-N5-C30-hSL-N5) comprising derived and/or modified sequence from Pf(3D7)__XP_001351122.1__HsALB_Pf-CSP(93-397) (opt6)
ggggcgcugccuacggagguggcagccaucuccuucucggcaucaagcuuaccaugaaauggguaacauucauaucacuccuauuccuauucucaucagcauacucaaaacuaaaacaacccgcagacggaaacccagacccaaacgccaacccaaacguagacccaaacgcaaacccgaacguagacccaaacgcaaaccccaacguagacccaaacgcaaacccaaaugcaaacccaaacgcaaacccaaacgcaaacccaaacgcaaacccaaacgcaaacccaaacgcaaacccaaacgcaaacccaaacgcaaacccaaacgcgaaucccaacgcaaauccaaacgcaaacccaaacgcaaauccaaacgcaaacccgaacgcaaacccaaacgcaaacccaaacgcaaacccaaacguagauccaaacgcaaauccaaacgcaaacccaaacgcaaauccaaacgcaaacccaaacgcaaacccaaacgcaaaccccaacgcaaacccaaacgcaaacccaaacgcaaacccaaacgcaaauccaaacgccaacccaaacgcaaacccaaacgcaaacccaaacgcgaacccaaacgcgaacccaaacgcaaacccaaacgcaaacccaaacgcaaacccaaacaaaaacaaccaagggaacggacaaggacacaacaugccaaacgauccaaacagaaacguagacgaaaacgcaaacgcaaacucagcaguaaaaaacaacaacaacgaagaaccaucagacaaacacauaaaagaauaccuaaacaaaauacaaaacucacucucaacagaauggucaccaugcaguguaacaugcggaaauggaauacaaguacguauaaaaccaggaucagcaaacaaaccaaaagacgaauuagacuacgccaacgauauagaaaaaaaaauaugcaaaauggaaaaaugcagcucagucuucaacguagucaacagcucaauaggacuaauaaugguccucucauucuuauuucuaaacugaggacuagugcaucacauuuaaaagcaucucagccuaccaugagaauaagagaaagaaaaugaagaucaauagcuuauucaucucuuuuucuuuuucguugguguaaagccaacacccugucuaaaaaacauaaauuucuuuaaucauuuugccucuuuucucugugcuucaauuaauaaaaaauggaaagaaccuagaucuaaaaaaaaaaaaaaaaaaaaaaaaaaaaaaaaaaaaaaaaaaaaaaaaaaaaaaaaaaaaaaaaugcaucccccccccccccccccccccccccccccccaaaggcucuuuucagagccaccagaauu

SEQ ID NO: 1158 - RNA, 724 nt, Artificial Sequence
  mRNA Design i-2 (A64-N5-C30-hSL-N5) comprising derived and/or modified sequence from Pf(3D7)__XP_001351122.1__HsALB_Pf-CSP(98-192) (opt6)
ggggcgcugccuacggagguggcagccaucuccuucucggcaucaagcuuaccaugaaauggguaacauucauaagccuacuauuccuauucagcucagcauacagcgcagacggaaacccagacccaaacgcaaacccaaacguagacccaaacgcaaacccaaacguagacccaaacgcaaacccaaacguagacccaaacgcaaacccaaacgcaaacccaaacgcaaacccaaacgcaaacccaaacgcaaacccaaacgcaaacccaaacgcaaacccaaacgcaaacccaaacgcaaacccaaacgcaaacccaaacgcaaacccaaacgcaaacccaaacgcaaacccaaacgcaaacccaaacgcaaacccaaacgcaaacccauaaggacuagugcaucacauuuaaaagcaucucagccuaccaugagaauaagagaaagaaaaugaagaucaauagcuuauucaucucuuuuucuuuuucguugguguaaagccaacacccugucuaaaaaacauaaauuucuuuaaucauuuugccucuuuucucugugcuucaauuaauaaaaaauggaaagaaccuagaucuaaaaaaaaaaaaaaaaaaaaaaaaaaaaaaaaaaaaaaaaaaaaaaaaaaaaaaaaaaaaaaaaugcaucccccccccccccccccccccccccccccccaaaggcucuuuucagagccaccagaauu

SEQ ID NO: 1159 - RNA, 964 nt, Artificial Sequence
  mRNA Design i-2 (A64-N5-C30-hSL-N5) comprising derived and/or modified sequence from Pf(3D7)__XP_001351122.1__HsALB_Pf-CSP(98-272) (opt6)
ggggcgcugccuacggagguggcagccaucuccuucucggcaucaagcuuaccaugaaauggguaacauucauaucacuacuauuccuauucagcucagccuacagcgcagacggaaacccagacccaaacgcaaacccaaacguagacccaaacgcaaacccaaacgucgacccaaacgcaaacccaaacguagacccaaacgcaaacccaaacgcaaacccaaacgcaaacccaaacgcaaacccaaacgcaaacccaaacgcaaacccaaacgcaaacccaaacgcaaacccaaacgcaaacccaaacgcaaacccaaacgcaaacccaaacgcaaacccaaacgcaaacccaaacgcaaacccaaacgcaaacccaaacgcaaacccaaacgcaaacccaaacguagacccaaaugcaaacccaaacgcaaacccaaacgcaaacccaaacgcaaacccaaacgcaaacccaaacgcaaacccaaacgcaaacccaaacgcaaacccaaacgcaaacccaaacgcaaacccaaacgcaaacccaaacgcgaacccaaacgcaaacccaaacgcaaacccaaacgcaaacccaaacgcaaacccaaaugcaaacccaaacgcaaacccauaaggacuagugcaucacauuuaaaagcaucucagccuaccaugagaauaagagaaagaaaaugaagaucaauagcuuauucaucucuuuuucuuuuucguugguguaaagccaacacccugucuaaaaaacauaaauuucuuuaaucauuuugccucuuuucucugugcuucaauuaauaaaaaauggaaagaaccuagaucuaaaaaaaaaaaaaaaaaaaaaaaaaaaaaaaaaaaaaaaaaaaaaaaaaaaaaaaaaaaaaaaaugcaucccccccccccccccccccccccccccccccaaaggcucuuuucagagccaccagaauu

SEQ ID NO: 1160 - RNA, 1270 nt, Artificial Sequence
  mRNA Design i-2 (A64-N5-C30-hSL-N5) comprising derived and/or modified sequence from Pf(3D7)__XP_001351122.1__HsALB_Pf-CSP(98-374) (opt6)
ggggcgcugccuacggagguggcagccaucuccuucucggcaucaagcuuaccaugaaaugggucacauucauaucccuacuauuccuauucucaucagcauauucagcagauggaaacccagacccaaacgccaacccaaacguagacccaaacgcaaacccaaacguagacccaaacgcaaacccaaacguagacccaaacgcaaacccaaacgcaaacccaaacgcaaacccaaacgcaaacccaaacgcaaacccaaacgcaaacccaaacgcaaacccaaacgcaaacccaaacgcaaacccaaacgcaaacccaaacgcaaacccaaaugcaaauccaaacgcaaauccaaacgcaaacccaaacgccaacccaaacgcaaauccaaacgcaaacccaaacguagacccgaacgcaaacccgaacgcaaacccaaacgcaaacccaaaugcaaacccaaacgcaaacccaaacgccaacccaaacgcaaacccaaacgcaaacccaaaugcaaacccaaacgcaaacccaaacgccaacccaaacgcaaacccaaacgcaaacccaaacgcaaacccaaacgcaaacccaaaugcaaacccaaacgcaaacccaaacgcaaacccaaacaaaaacaaccaaggaaauggacaaggccacaacaugccaaacgacccaaacagaaacguagacgaaaacgcaaacgcaaacuccgcagucaaaaacaacaacaacgaagaaccauccgacaaacacauaaaagaauaccucaauaaaauacaaaacucacuaucaacagaaugguccccaugcucaguaacaugcggaaacggaauacaaguaagaauaaaaccaggauccgcaaacaaaccaaaagacgaacuagacuacgcaaacgauauagaaaaaaaaauaugcaaaauggaaaaaugcuaaggacuagugcaucacauuuaaaagcaucucagccuaccaugagaauaagagaaagaaaaugaagaucaauagcuuauucaucucuuuuucuuuuucguugguguaaagccaacacccugucuaaaaaacauaaauuucuuuaaucauuuugccucuuuucucugugcuucaauuaauaaaaaauggaaagaaccuagaucuaaaaaaaaaaaaaaaaaaaaaaaaaaaaaaaaaaaaaaaaaaaaaaaaaaaaaaaaaaaaaaaaugcaucccccccccccccccccccccccccccccccaaaggcucuuuucagagccaccagaauu

SEQ ID NO: 1161 - RNA, 1339 nt, Artificial Sequence
  mRNA Design i-2 (A64-N5-C30-hSL-N5) comprising derived and/or modified sequence from Pf(3D7)__XP_001351122.1__HsALB_Pf-CSP(98-397) (opt6)
ggggcgcugccuacggagguggcagccaucuccuucucggcaucaagcuuaccaugaaauggguaaccuucauaucauuacuauuccuuuucagcucggcauacucagcagacggcaacccagacccaaacgcaaacccaaacgucgacccaaaugcgaacccaaacguagacccaaacgcaaacccaaacguagauccaaacgcaaacccaaacgcaaacccaaacgcaaacccaaacgcaaacccaaacgccaacccaaaugcaaacccaaacgcaaaccccaacgcaaacccaaacgcaaacccaaacgcaaacccaaacgcaaaucccaacgcaaauccaaacgcaaacccaaaugcaaacccaaacgccaacccaaacgcaaacccaaacgcaaaccccaaugucgacccaaacgcaaacccaaacgcaaacccaaacgcaaacccaaacgcaaauccaaacgcaaaccccaacgcaaacccaaacgcaaacccaaacgcaaacccaaacgcaaacccaaacgcaaacccaaacgcaaacccaaacgcaaacccaaacgcaaacccaaacgcaaacccaaacgcaaauccaaacgcaaacccaaacgcaaacccaaacgcaaacccaaacaaaaacaaccaaggaaauggacaaggacacaacaugccaaaugaccccaacagaaacgucgacgaaaacgccaacgcaaacagcgcaguaaaaaacaacaacaaugaagaaccaucagacaaacacauaaaagaauaccuaaacaaaauucaaaacucacuaucaaccgaaugguccccaugcucaguaacaugcggaaacgguauacaaguacgaauaaaaccaggaucagcaaacaaaccaaaagacgaacuagacuacgcaaacgacauagaaaaaaaaauaugcaaaauggaaaaaugcucaucaguuuuuaacguagucaauagcucaaucggacucauaaugguacuaucauuucucuuccuaaauuaaggacuagugcaucacauuuaaaagcaucucagccuaccaugagaauaagagaaagaaaaugaagaucaauagcuuauucaucucuuuuucuuuuucguugguguaaagccaacacccugucuaaaaaacauaaauuucuuuaaucauuuugccucuuuucucugugcuucaauuaauaaaaaauggaaagaaccuagaucuaaaaaaaaaaaaaaaaaaaaaaaaaaaaaaaaaaaaaaaaaaaaaaaaaaaaaaaaaaaaaaaaugcaucccccccccccccccccccccccccccccccaaaggcucuuuucagagccaccagaauu

SEQ ID NO: 1162 - RNA, 1666 nt, Artificial Sequence
  mRNA Design i-2 (A64-N5-C30-hSL-N5) comprising derived and/or modified sequence from Pf(3D7)__XP_001351122.1__HsALB_Pf-CSP(199-377)_L(PVTN)_HBsAg (opt6)
ggggcgcugccuacggagguggcagccaucuccuucucggcaucaagcuuaccaugaaauggguaacauuuauauccuuacuauuucucuucuccucagcuuacucugacccaaacgcaaaucccaacgcaaacccaaaugcaaacccaaacgcaaauccaaacgcaaacccaaaugcuaaucccaacgcaaacccaaacgcaaaccccaaugccaacccaaacgcuaacccaaacgcaaacccaaacgccaacccaaaugcaaacccaaacgcaaacccaaacgcaaauccaaaugcaaacccaaacgcaaauccaaacgcaaacccaaacaaaaacaaccaaggaaacggacaaggccauaauaugccuaaugaccccaacagaaacguagacgaaaaugcuaacgccaacucagcaguaaaaaacaacaauaacgaagaaccaucagauaaacacauaaaagaauacuuaaacaaaauacaaaauucauuaucaacagaauggucaccaugcucagucaccugcggaaacgguauacaaguacgcauaaaaccaggcucagcaaauaaaccaaaagacgaacuagauuacgcuaacgacauagaaaaaaaaauaugcaaaauggaaaaaugcucaucaguaccaguaacaaauauggaaaacauaacaucaggauuccuaggcccacucuuaguacuacaagcaggauuuuuucuucuaacaagaaucuuaacuauaccccaaucacucgacucaugguggaccucacuaaauuuccucggaggaucuccaguaugccucggacaaaauucacaaucaccaacauccaaucacucacccaccuccugcccaccaaucugcccaggauacagauggaugugcuuacgaagauucauaauauuccuauucauacuacuucuaugcuuaauauuccuucucguccuacucgacuaucaaggaaugcucccuguaugcccacucauaccaggauccacaacaacuaacacaggacccuguaaaacaugcacaacacccgcccaaggaaauucaauguuccccucuugcugcugcacaaaaccaacagacggaaauugcacaugcauuccaauuccaucaucuugggcauuugcaaaauacuuaugggaaugggcaucaguccgauucucgugguuaucuuuacuaguaccauucguucaaugguuuguaggacuuucaccuacaguaugguuaucugcaauauggaugaugugguacuggggaccaucauuauacucaaucguaucaccauuuauaccacuacuacccauauuuuucugccuauggguauacauauaaggacuagugcaucacauuuaaaagcaucucagccuaccaugagaauaagagaaagaaaaugaagaucaauagcuuauucaucucuuuuucuuuuucguugguguaaagccaacacccugucuaaaaaacauaaauuucuuuaaucauuuugccucuuuucucugugcuucaauuaauaaaaaauggaaagaaccuagaucuaaaaaaaaaaaaaaaaaaaaaaaaaaaaaaaaaaaaaaaaaaaaaaaaaaaaaaaaaaaaaaaaugcaucccccccccccccccccccccccccccccccaaaggcucuuuucagagccaccagaauu

SEQ ID NO: 1163 - RNA, 1405 nt, Artificial Sequence
  mRNA Design i-2 (A64-N5-C30-hSL-N5) comprising derived and/or modified sequence from Pb(ANKA)__XP_022712148.1__Pb-CSP (opt6)
ggggcgcugccuacggagguggcagccaucuccuucucggcaucaagcuuaccaugaaaaaaugcacaaucuuaguaguagcaucacuccuacuagucaacucucuccuaccaggauacggccaaaacaaauccauacaagcccaacgcaaccuaaacgaauuaugcuauaacgaaggcaacgacaacaaauuauaccauguauuaaacucaaaaaacggaaaaauauacaacagaaacacaguaaacagacuacucgcagacgcacccgaaggaaaaaaaaaugaaaaaaaaaacgaaaaaauagaacgcaacaacaaacuuaaacaaccaccaccacccccaaaccccaacgacccaccacccccaaaccccaacgauccaccccccccaaaccccaacgacccaccacccccaaacccaaacgaccccccaccaccaaaugcaaacgacccaccaccaccaaacgcaaacgacccagcaccacccaacgccaacgaccccgcaccaccaaacgcaaacgauccagcucccccaaacgcaaacgauccagcaccaccaaacgccaacgacccaccaccaccaaacccaaacgacccagcaccaccaaacgcaaaugacccaccaccccccaacccaaacgaccccgccccaccacaagguaacaacaacccacaaccacaaccacgcccacaaccacaaccacaaccacaaccacaaccccaaccacaaccacaaccacaaccacgcccacaaccccaaccucaaccaggaggcaauaacaacaacaaaaacaauaauaacgaugacuccuacauaccaucugccgaaaaaauccucgaauucguaaaacaaauaagagacucaauaacagaagaauggucacaauguaacguaacaugcggaucaggcauacgaguaagaaaacgcaaaggaucaaacaaaaaagcagaagaccuaacacucgaagacauugacacagaaaucugcaaaauggacaaaugcucaucaauauucaacauagucucaaacucauuaggauucguaauccuacuaguacucguauucuucaacuaaggacuagugcaucacauuuaaaagcaucucagccuaccaugagaauaagagaaagaaaaugaagaucaauagcuuauucaucucuuuuucuuuuucguugguguaaagccaacacccugucuaaaaaacauaaauuucuuuaaucauuuugccucuuuucucugugcuucaauuaauaaaaaauggaaagaaccuagaucuaaaaaaaaaaaaaaaaaaaaaaaaaaaaaaaaaaaaaaaaaaaaaaaaaaaaaaaaaaaaaaaaugcaucccccccccccccccccccccccccccccccaaaggcucuuuucagagccaccagaauu

SEQ ID NO: 1164 - RNA, 1570 nt, Artificial Sequence
  mRNA Design i-2 (A64-N5-C30-hSL-N5) comprising derived and/or modified sequence from Pb(ANKA)__XP_022712148.1__Pb-CSP_L(G4SG4)_TM domain HA (opt6)
ggggcgcugccuacggagguggcagccaucuccuucucggcaucaagcuuaccaugaaaaaaugcaccauacuagucguagccucacuacuacuagucaauucauuauuaccaggauacggccaaaauaaauccauacaagcacaaagaaaucucaaugaauuaugcuacaacgaaggaaacgacaauaaacuauaccacguauuaaacucaaaaaauggaaaaauauacaaccgaaacaccguaaaccguuuauuagcagacgcaccagaaggaaaaaaaaacgaaaaaaaaaacgaaaaaauugaaagaaacaauaaacucaaacaaccaccucccccacccaacccaaacgacccacccccacccaacccaaacgacccaccacccccaaaccccaacgauccccccccacccaauccaaacgauccaccaccaccaaacgcaaacgacccaccaccaccaaacgcaaacgacccagcaccaccaaacgcaaacgaccccgcaccaccaaacgcaaacgauccagcaccacccaacgcaaacgacccagcacccccaaacgccaacgaccccccaccaccaaacccaaacgaccccgcaccuccaaacgcaaacgacccaccaccaccaaacccuaacgacccagcccccccacaaggaaacaacaauccucaaccacaaccacgcccucaaccacaaccccaaccucaaccacaaccacaaccacaaccccaaccacaaccacgaccacaaccucaaccucaaccaggaggcaacaacaacaacaaaaacaacaacaacgacgacucauacauaccaucagcagaaaaaauacuagaauucgucaaacaaauaagagacucuauaacugaagaauggucccaaugcaauguaacuugcggaucaggcaucagagucagaaaacgcaaaggauccaacaaaaaagccgaagaccuaacccucgaagauauagacacagaaaucugcaaaauggacaaaugcucaucaauuuucaauauagucucaaauucacuaggauucgucaucuuacuaguacuaguauucuuuaauggaggaggaggaucaggaggaggaggaaaacuagaaucaacccgaauauaccaaauacuagcaauauacucaaccguagcaucaucacucguacuagugguauccuuaggagcaauaagcuuuuggaugugcuccaacggcucucuacaaugucgaauaugcauaugaggacuagugcaucacauuuaaaagcaucucagccuaccaugagaauaagagaaagaaaaugaagaucaauagcuuauucaucucuuuuucuuuuucguugguguaaagccaacacccugucuaaaaaacauaaauuucuuuaaucauuuugccucuuuucucugugcuucaauuaauaaaaaauggaaagaaccuagaucuaaaaaaaaaaaaaaaaaaaaaaaaaaaaaaaaaaaaaaaaaaaaaaaaaaaaaaaaaaaaaaaaugcaucccccccccccccccccccccccccccccccaaaggcucuuuucagagccaccagaauu

SEQ ID NO: 1165 - RNA, 1390 nt, Artificial Sequence
  mRNA Design i-2 (A64-N5-C30-hSL-N5) comprising derived and/or modified sequence from Pb(ANKA)__XP_022712148.1__HsALB_Pb-CSP(24-340) (opt6)
ggggcgcugccuacggagguggcagccaucuccuucucggcaucaagcuuaccaugaaaugggucacauucauaucacuccuauuccuauucucaucagcauacucacaaaacaaaucaauccaagcccaacgaaaccuaaacgaacuaugcuacaacgaaggaaacgauaacaaacuauaccacguacuaaacucaaaaaacggaaaaauauacaaucgaaacacaguaaacagacucuuagcagacgcaccagaaggaaaaaaaaacgaaaaaaaaaacgaaaaaaucgaaagaaacaacaaacucaaacaaccaccaccaccaccaaacccaaacgauccaccaccccccaacccaaacgacccacccccacccaacccaaacgaccccccaccaccaaacccaaacgaccccccaccaccaaacgcaaacgauccaccaccccccaacgcaaacgauccagcaccacccaacgccaacgacccagcaccacccaaugcaaacgacccagcacccccaaacgcaaacgacccagcacccccaaacgccaacgacccaccaccaccaaacccaaaugacccagcaccaccaaacgccaacgauccaccacccccaaacccaaacgacccugcaccuccccaaggaaacaacaacccacaaccacaaccaagaccacaaccucaaccacaaccacaaccacaaccacaaccacaaccacaaccccaaccaagaccacaaccacaaccccaaccaggaggcaacaacaauaacaaaaauaacaacaacgacgacucauacaucccauccgcagaaaaaauauuagaauuuguaaaacaaauaagagacucaauaacagaagaauggucccaaugcaacguaacaugcgguucaggaauccguguacgaaaacgcaaaggcucaaacaaaaaagcagaagaccucacacucgaagacauugacacagaaauaugcaaaauggacaaaugcuccucaaucuucaacauugucucaaacucauuaggauucguaaucuuacucguacucguauucuucaacuaaggacuagugcaucacauuuaaaagcaucucagccuaccaugagaauaagagaaagaaaaugaagaucaauagcuuauucaucucuuuuucuuuuucguugguguaaagccaacacccugucuaaaaaacauaaauuucuuuaaucauuuugccucuuuucucugugcuucaauuaauaaaaaauggaaagaaccuagaucuaaaaaaaaaaaaaaaaaaaaaaaaaaaaaaaaaaaaaaaaaaaaaaaaaaaaaaaaaaaaaaaaugcaucccccccccccccccccccccccccccccccaaaggcucuuuucagagccaccagaauu

SEQ ID NO: 1166 - RNA, 1408 nt, Artificial Sequence
  mRNA Design i-2 (A64-N5-C30-hSL-N5) comprising derived and/or modified sequence from Pb(ANKA)__XP_022712148.1__HsIns-iso1_Pb-CSP(24-340) (opt6)
ggggcgcugccuacggagguggcagccaucuccuucucggcaucaagcuuaccauggcacuauggaugagacuacuaccacuauuagcacuacucgcacuauggggacccgacccagcagcagcacaaaacaaaucaauacaagcccaaagaaaccuaaaugaacuaugcuacaacgaaggaaacgacaacaaauuauaccacguacuaaacuccaaaaacggaaaaauuuacaacagaaacaccguaaaccgacuacuagcagacgcaccagaaggaaaaaaaaacgaaaaaaaaaacgaaaaaauagaaagaaacaauaaacuaaaacaaccaccacccccaccaaaccccaacgacccaccaccaccaaacccaaacgacccuccaccaccaaaccccaacgaccccccucccccaaacccaaacgaccccccaccaccaaacgcaaaugaccccccccccccaaaugcaaacgaccccgcaccaccaaacgcaaacgacccagccccaccaaacgccaacgauccugcaccaccaaaugcaaacgacccagcccccccaaacgcaaaugacccaccaccaccaaacccaaacgacccugcaccaccaaaugcuaacgaccccccaccaccaaauccaaacgaccccgcccccccacaaggaaacaauaacccacaaccccaacccagaccacaaccacaaccucaaccacaaccccaaccacaaccccaaccacaaccacaaccacgcccacaaccacaaccacaaccaggaggaaacaacaauaauaaaaacaacaauaacgacgacucauacauucccuccgcagaaaaaauacucgaauucguaaaacaaauaagagacucuauaacagaagaauggucccaaugcaacgucacaugcggauccggaauaagagucagaaaaagaaaaggaucaaacaaaaaagcagaagaccucacacuagaagacauagauacagaaauaugcaaaauggacaaauguucaucaauauuuaacauaguaucaaacucuuuaggauucgucauauuacucguacuaguauucuucaacuaaggacuagugcaucacauuuaaaagcaucucagccuaccaugagaauaagagaaagaaaaugaagaucaauagcuuauucaucucuuuuucuuuuucguugguguaaagccaacacccugucuaaaaaacauaaauuucuuuaaucauuuugccucuuuucucugugcuucaauuaauaaaaaauggaaagaaccuagaucuaaaaaaaaaaaaaaaaaaaaaaaaaaaaaaaaaaaaaaaaaaaaaaaaaaaaaaaaaaaaaaaaugcaucccccccccccccccccccccccccccccccaaaggcucuuuucagagccaccagaauu

SEQ ID NO: 1167 - RNA, 1387 nt, Artificial Sequence
  mRNA Design i-2 (A64-N5-C30-hSL-N5) comprising derived and/or modified sequence from Pb(ANKA)__XP_022712148.1__HsSPARC_Pb-CSP(24-340) (opt6)
ggggcgcugccuacggagguggcagccaucuccuucucggcaucaagcuuaccaugcgagcauggauauucuucuuacuuugucucgcaggacgcgcccuagcacaaaacaaaucaauacaagcacaaagaaaccucaacgaacuaugcuacaacgaaggaaacgacaacaaacuauaccacgucuuaaacucaaaaaacggaaaaauauacaauagaaacacaguaaaccgacuauuagcagacgcacccgaaggaaaaaaaaacgaaaaaaaaaaugaaaaaaucgaaagaaacaacaaacucaaacaaccacccccacccccaaacccuaacgacccaccaccaccaaaccccaacgauccaccaccaccaaacccaaacgacccaccaccccccaacccaaacgacccacccccacccaacgccaacgauccaccacccccaaaugcaaacgacccagccccaccaaacgcaaacgauccagcuccaccaaacgcaaacgaccccgccccaccaaacgccaacgacccagcuccaccaaacgcaaaugauccaccaccacccaacccaaacgacccugcacccccaaacgcaaacgacccaccaccaccaaacccaaacgacccagcacccccacaaggcaacaauaacccacaaccacaacccagaccacaaccccaaccgcaaccccaaccacaaccacaaccacaaccacaaccacaaccaagaccacaaccacaaccucaaccuggcggaaacaauaacaauaaaaacaacaacaacgacgacucauauauaccaucagccgaaaaaauucuagaauucguaaaacaaaucagagacucaauaacagaagaauggucacaaugcaacguaacauguggauccggaauaagaguaagaaaaagaaaaggaucaaacaaaaaagcagaagaucuaacacuagaagauauagacacagaaauaugcaaaauggacaaaugcucaucaauauucaacauagucuccaacucacucggauucguaauccuacucguacucguauucuucaacuaaggacuagugcaucacauuuaaaagcaucucagccuaccaugagaauaagagaaagaaaaugaagaucaauagcuuauucaucucuuuuucuuuuucguugguguaaagccaacacccugucuaaaaaacauaaauuucuuuaaucauuuugccucuuuucucugugcuucaauuaauaaaaaauggaaagaaccuagaucuaaaaaaaaaaaaaaaaaaaaaaaaaaaaaaaaaaaaaaaaaaaaaaaaaaaaaaaaaaaaaaaaugcaucccccccccccccccccccccccccccccccaaaggcucuuuucagagccaccagaauu

SEQ ID NO: 1168 - RNA, 1390 nt, Artificial Sequence
  mRNA Design i-2 (A64-N5-C30-hSL-N5) comprising derived and/or modified sequence from Pb(ANKA)__XP_022712148.1__IgE_Pb-CSP(24-340) (opt6)
ggggcgcugccuacggagguggcagccaucuccuucucggcaucaagcuuaccauggacuggacguggauauuauuuuuagucgccgcagccaccagaguacacucucaaaacaaaucaauacaagcccaaagaaaucuaaacgaauuaugcuacaacgaaggaaacgacaacaaacuauaccacguccucaacucuaaaaauggaaaaauauacaacagaaacaccguaaacagacuacuagcagacgcaccagaaggaaaaaaaaaugaaaaaaaaaacgaaaaaauagaaagaaauaacaaacucaaacaaccaccaccaccucccaacccaaacgacccaccacccccaaacccaaaugacccaccaccaccaaacccaaacgacccaccacccccaaacccaaaugacccaccaccaccaaacgcaaacgacccaccaccaccaaacgcaaacgacccagccccaccaaacgcaaacgacccagcaccaccaaacgcaaacgacccagcaccacccaaugccaaugacccagcaccaccaaacgcaaacgaccccccaccaccaaacccuaaugaccccgcaccaccaaacgcaaacgaccccccaccaccuaaccccaacgaccccgccccaccacaaggaaacaacaacccacaaccacaaccacguccacaaccacaaccacaaccccaaccacaaccccaaccacaaccacaaccacaaccccgaccacaaccacaaccacaacccggagguaacaacaacaauaaaaacaacaauaacgacgacuccuacauacccuccgcagaaaaaauacuagaauucguaaaacaaauaagagacucaauaacugaagaauggucacaauguaacguaacaugcgguucaggaauaagagucagaaaaagaaaaggaucaaacaaaaaagcagaagauuuaacacuagaagacauagacaccgaaauaugcaaaauggacaaaugcagcuccaucuucaacauaguaucaaacucacuaggauuuguaauacuacucguacuaguauucuucaauuaaggacuagugcaucacauuuaaaagcaucucagccuaccaugagaauaagagaaagaaaaugaagaucaauagcuuauucaucucuuuuucuuuuucguugguguaaagccaacacccugucuaaaaaacauaaauuucuuuaaucauuuugccucuuuucucugugcuucaauuaauaaaaaauggaaagaaccuagaucuaaaaaaaaaaaaaaaaaaaaaaaaaaaaaaaaaaaaaaaaaaaaaaaaaaaaaaaaaaaaaaaaugcaucccccccccccccccccccccccccccccccaaaggcucuuuucagagccaccagaauu

SEQ ID NO: 1169 - RNA, 1576 nt, Artificial Sequence
  mRNA Design i-2 (A64-N5-C30-hSL-N5) comprising derived and/or modified sequence from Pf(3D7)__XP_001351122.1__Pf-CSP (opt11)
ggggcgcugccuacggagguggcagccaucuccuucucggcaucaagcuuaccaugaugcgaaagcuugcgauccucagcgucuccucauuccuauucguagaagcacuauuccaagaauaccaaugcuacggcucauccucaaacacacgcguacucaacgaacucaacuacgacaacgcaggaacaaaccucuacaacgaacuagagaugaacuacuacggcaaacaagaaaacugguacucucucaaaaaaaacucacgaagccucggcgagaacgacgacggaaacaacgaagacaacgaaaaacuccgcaaaccaaaacacaaaaaacucaaacaacccgccgacggaaacccagacccaaacgcaaacccaaacguagacccaaacgccaaccccaacguagaccccaacgccaacccuaacgucgaccccaaugcaaaccccaacgcgaacccaaacgcaaaccccaacgcaaaccccaacgcaaacccaaacgccaaccccaacgcaaacccaaacgcaaacccuaacgccaacccaaacgccaacccaaacgccaacccaaacgcaaacccgaacgccaaccccaacgccaacccaaacgcaaacccaaacgcaaaccccaacgccaaccccaacguagaccccaacgcaaaccccaacgcaaacccaaacgccaaccccaacgccaaccccaacgccaaccccaacgccaaccccaaugccaacccaaacgcgaaccccaacgcaaacccgaacgcaaacccaaacgcgaacccaaacgcgaacccaaacgccaaccccaacgccaaccccaacgcaaacccaaacgcgaacccaaacgcaaaccccaacgccaacccaaacaaaaacaaccaaggaaacggacaaggccacaacaugccaaacgaccccaaccgcaacguagacgaaaacgccaacgccaacuccgcugucaagaacaacaacaacgaagaaccauccgacaaacacauaaaagaauaccuaaacaaaauccaaaacucccucucaaccgaauggucccccugcuccgucacaugcggaaacggcauccaaguccgaaucaaaccaggcuccgccaacaaacccaaagacgaacuggacuacgccaacgacaucgaaaaaaaaaucugcaaaauggaaaaaugcucauccgucuucaacguggucaacuccuccaucggacuaauaaugguccucuccuuccuauuccuaaacuaaggacuagugcaucacauuuaaaagcaucucagccuaccaugagaauaagagaaagaaaaugaagaucaauagcuuauucaucucuuuuucuuuuucguugguguaaagccaacacccugucuaaaaaacauaaauuucuuuaaucauuuugccucuuuucucugugcuucaauuaauaaaaaauggaaagaaccuagaucuaaaaaaaaaaaaaaaaaaaaaaaaaaaaaaaaaaaaaaaaaaaaaaaaaaaaaaaaaaaaaaaaugcaucccccccccccccccccccccccccccccccaaaggcucuuuucagagccaccagaauu

SEQ ID NO: 1170 - RNA, 1507 nt, Artificial Sequence
  mRNA Design i-2 (A64-N5-C30-hSL-N5) comprising derived and/or modified sequence from Pf(3D7)__XP_001351122.1__Pf-CSP(1-374) (opt11)
ggggcgcugccuacggagguggcagccaucuccuucucggcaucaagcuuaccaugaugcgcaaacucgcaauccucuccgucucaucguuccuauucguagaagcacucuuccaagaauaccaaugcuacggcucaagcuccaacacaagaguacucaacgaacucaacuacgacaaugccggaacaaaccuauacaacgagcuagaaaugaacuacuacggcaaacaagaaaacugguacucgcuaaaaaaaaacagcagaagccuaggugaaaacgacgacggaaacaacgaagacaacgaaaaacugcgcaaaccaaaacacaaaaaacuaaaacaacccgcagacggcaacccagacccaaacgcaaacccaaacguagaccccaacgccaacccaaacguagacccaaacgccaacccaaacguagacccaaacgcaaacccgaacgcaaacccaaacgcaaacccaaacgcaaacccaaacgcaaacccaaacgccaaccccaacgcaaauccaaacgcaaaccccaacgcaaaccccaacgccaacccaaacgcaaaccccaacgcgaacccaaacgccaaccccaacgccaacccaaacgcaaacccaaacgcaaacccaaacgccaaccccaacgucgacccaaacgccaacccaaacgcaaaccccaacgccaaccccaacgcaaacccaaacgccaacccgaacgcaaacccgaacgcaaacccaaacgcaaaccccaacgcaaaccccaacgcaaacccaaacgcaaaccccaacgccaaccccaacgccaaccccaacgcaaacccaaacgcaaacccgaacgcaaaccccaacgcaaaccccaacgccaaucccaacaaaaacaaccaaggcaacggacaaggacacaacaugccaaacgaccccaaccgcaacgucgacgaaaacgccaacgccaacuccgcggucaaaaacaacaacaacgaagagcccucagacaaacacauaaaagaauaccuaaacaaaauccaaaacucccucucgacagaauggucccccugcagcgucaccugcggaaacggcauacaaguacgaauaaaacccggcucagccaacaaaccaaaagacgaacuagacuacgccaacgacauagaaaaaaaaauaugcaaaauggaaaaaugcugaggacuagugcaucacauuuaaaagcaucucagccuaccaugagaauaagagaaagaaaaugaagaucaauagcuuauucaucucuuuuucuuuuucguugguguaaagccaacacccugucuaaaaaacauaaauuucuuuaaucauuuugccucuuuucucugugcuucaauuaauaaaaaauggaaagaaccuagaucuaaaaaaaaaaaaaaaaaaaaaaaaaaaaaaaaaaaaaaaaaaaaaaaaaaaaaaaaaaaaaaaaugcaucccccccccccccccccccccccccccccccaaaggcucuuuucagagccaccagaauu

SEQ ID NO: 1171 - RNA, 1360 nt, Artificial Sequence
  mRNA Design i-2 (A64-N5-C30-hSL-N5) comprising derived and/or modified sequence from Pf(3D7)__XP_001351122.1__Pf-CSP(1-325) (opt11)
ggggcgcugccuacggagguggcagccaucuccuucucggcaucaagcuuaccaugaugcgcaaacucgcaauccuaucaguaagcucauuccuguucguagaagcacuauuccaagaauaccaaugcuacggcucauccucaaacacaagaguacuaaacgaacuaaacuacgacaacgccggaaccaaccuauacaacgaacucgaaaugaacuacuacggcaaacaagaaaacugguacucacuaaagaaaaacagcagaagccucggcgaaaacgacgacggcaacaacgaagacaacgagaaacugagaaaaccaaaacacaagaaacuaaaacaacccgcggacgggaacccagacccaaaugcaaacccaaacgucgacccaaacgcaaacccaaacguagacccaaacgcaaaccccaacguagaccccaacgcaaacccaaacgcaaacccaaacgcaaacccaaacgcaaacccaaacgcaaaccccaacgcaaacccaaacgcaaacccaaacgcaaaccccaacgccaacccaaacgccaaccccaacgcaaacccaaacgcaaacccaaacgcaaaccccaacgccaacccgaacgcaaacccaaacgcaaacccaaacgcaaaccccaacguagacccaaacgcaaacccaaacgccaaccccaacgcaaacccaaacgcaaacccgaacgcaaaccccaacgcaaaccccaacgcaaacccaaacgcaaaccccaacgcaaauccaaacgcaaacccaaacgcaaacccaaacgccaacccaaacgcaaaucccaacgcaaacccaaacgcaaaccccaacgcaaacccaaacgcaaacccaaacgcaaacccaaacaaaaacaaccaaggaaacggccaaggacacaacaugccaaacgacccaaaccgaaacguagacgaaaacgccaacgccaacagcgcagucaaaaacaacaauaaugaagaacccuccgacaaacacauaaaagaauaccuaaacaaaauccaaaacugaggacuagugcaucacauuuaaaagcaucucagccuaccaugagaauaagagaaagaaaaugaagaucaauagcuuauucaucucuuuuucuuuuucguugguguaaagccaacacccugucuaaaaaacauaaauuucuuuaaucauuuugccucuuuucucugugcuucaauuaauaaaaaauggaaagaaccuagaucuaaaaaaaaaaaaaaaaaaaaaaaaaaaaaaaaaaaaaaaaaaaaaaaaaaaaaaaaaaaaaaaaugcaucccccccccccccccccccccccccccccccaaaggcucuuuucagagccaccagaauu

SEQ ID NO: 1172 - RNA, 1576 nt, Artificial Sequence
  mRNA Design i-2 (A64-N5-C30-hSL-N5) comprising derived and/or modified sequence from Pf(3D7)__XP_001351122.1__HsALB_Pf-CSP(19-397) (opt11)
ggggcgcugccuacggagguggcagccaucuccuucucggcaucaagcuuaccaugaaaugggucaccuucauaucccuccuauuccucuucucaucagccuacucccucuuccaggaauaccaaugcuacggaucguccucaaacacuagaguacucaaugaauuaaacuacgacaacgccggcaccaaccucuacaacgaacucgaaaugaacuacuacggaaaacaagaaaacugguacucacucaaaaaaaacucucgaucccucggcgaaaacgacgacggcaacaacgaagacaacgagaaacuacgcaaaccaaaacacaaaaaauuaaaacaacccgccgacggcaaccccgaccccaacgccaaccccaacguagaccccaacgcgaaccccaacgucgacccaaacgccaaccccaacguggaccccaacgccaacccaaacgccaaccccaacgccaacccaaacgcaaaccccaacgccaacccaaacgccaaccccaacgcaaacccaaacgcgaacccaaacgcaaacccaaacgccaacccaaacgcaaacccaaacgcgaacccaaacgccaacccaaacgccaaccccaacgcaaacccaaacgccaacccaaacgccaacccaaacguagacccaaacgcgaaccccaacgcuaacccaaacgcaaacccaaacgccaacccaaacgccaacccuaacgcaaacccaaacgccaaccccaacgccaaccccaacgccaaccccaacgcaaacccaaacgccaacccaaacgccaaccccaacgccaacccaaacgcaaacccaaacgcaaacccaaacgcaaaccccaacgccaacccaaacgccaacccaaacaaaaauaaccaaggcaaugggcaaggccacaacaugccaaacgaccccaaccgcaaugucgacgaaaacgccaacgccaacucugcaguaaaaaacaauaacaacgaagaacccucagacaaacacaucaaagaauaccucaacaagauccaaaauucccucuccacagaauggucccccugcagcguaaccugcggcaacggcauccaaguccgcaucaaacccggcuccgccaacaaaccgaaagacgaacuagacuacgccaacgacauagaaaaaaaaaucugcaaaauggaaaaaugcagcuccgucuucaacgucgucaacagcuccaucggccucaucaugguccucuccuuccuguuccucaacuaaggacuagugcaucacauuuaaaagcaucucagccuaccaugagaauaagagaaagaaaaugaagaucaauagcuuauucaucucuuuuucuuuuucguugguguaaagccaacacccugucuaaaaaacauaaauuucuuuaaucauuuugccucuuuucucugugcuucaauuaauaaaaaauggaaagaaccuagaucuaaaaaaaaaaaaaaaaaaaaaaaaaaaaaaaaaaaaaaaaaaaaaaaaaaaaaaaaaaaaaaaaugcaucccccccccccccccccccccccccccccccaaaggcucuuuucagagccaccagaauu

SEQ ID NO: 1173 - RNA, 1594 nt, Artificial Sequence
  mRNA Design i-2 (A64-N5-C30-hSL-N5) comprising derived and/or modified sequence from Pf(3D7)__XP_001351122.1__HsIns-iso1_Pf-CSP(19-397) (opt11)
ggggcgcugccuacggagguggcagccaucuccuucucggcaucaagcuuaccauggcacucuggaugagacuccucccccuccucgcacuccucgcccuauggggcccagacccagcggcagcccucuuccaagaauaccaaugcuacggcucauccuccaacacccgaguccucaaugaacuaaacuacgacaacgccggcaccaaccuauacaacgaacuagaaaugaacuacuacggcaaacaagaaaacugguacucccucaaaaaaaauucacgcucccuaggugagaacgacgacggaaacaacgaagacaacgaaaaacuccgaaaacccaaacacaaaaaacuaaaacaaccagcagacggcaaccccgaccccaacgcaaaccccaacguagacccaaacgcgaaccccaacgucgauccaaacgccaacccaaacguugaccccaacgcgaaccccaacgcaaacccaaacgcaaacccuaacgcgaaccccaacgcaaaccccaacgccaaccccaacgccaaccccaacgccaacccaaacgcaaaccccaacgccaaccccaacgcaaacccaaacgcaaacccgaacgcaaaccccaacgccaacccaaacgcaaacccaaacgccaacccaaacgcaaaccccaacguagacccaaacgccaaucccaacgcgaaccccaacgcaaacccaaacgcgaacccaaacgccaacccaaacgcaaacccgaacgccaacccaaacgccaaccccaacgcaaaccccaacgcaaacccaaacgccaacccaaacgcaaacccaaacgcaaaccccaacgccaaccccaacgcaaacccaaaugccaaccccaacgccaaccccaacgcaaacccaaacaaaaacaaccaaggaaacggccaaggccacaacaugccgaacgaccccaaccgaaacgucgacgaaaacgcaaacgccaacucagcggucaaaaacaacaacaacgaagaacccucagacaaacacaucaaagaauaccuaaacaagauccagaacucucucucaacagaauggucccccugcuccguaacaugcggcaacggcauccaaguacgaaucaaaccgggaucagccaauaaacccaaagacgaacucgacuacgccaacgacaucgaaaaaaaaauaugcaaaauggaaaaaugcagcucagucuucaacguagucaacagcuccauaggccucaucaugguacucuccuuccuguuccuaaacuaaggacuagugcaucacauuuaaaagcaucucagccuaccaugagaauaagagaaagaaaaugaagaucaauagcuuauucaucucuuuuucuuuuucguugguguaaagccaacacccugucuaaaaaacauaaauuucuuuaaucauuuugccucuuuucucugugcuucaauuaauaaaaaauggaaagaaccuagaucuaaaaaaaaaaaaaaaaaaaaaaaaaaaaaaaaaaaaaaaaaaaaaaaaaaaaaaaaaaaaaaaaugcaucccccccccccccccccccccccccccccccaaaggcucuuuucagagccaccagaauu

SEQ ID NO: 1174 - RNA, 1573 nt, Artificial Sequence
  mRNA Design i-2 (A64-N5-C30-hSL-N5) comprising derived and/or modified sequence from Pf(3D7)__XP_001351122.1__HsSPARC_Pf-CSP(19-397) (opt11)
ggggcgcugccuacggagguggcagccaucuccuucucggcaucaagcuuaccaugcgcgccuggauauucuuccuccuaugccuagcaggacgcgcccucgcacucuuccaagaauaccaaugcuacggcucauccucaaacacccgcguacuuaacgaacuaaacuacgacaacgccggaaccaaccuauacaacgaacucgaaaugaacuacuacgguaaacaagaaaacugguacucccucaaaaaaaacagccgaagccuaggagaaaacgacgacggaaacaacgaagacaacgaaaaacugcgcaaacccaaacacaaaaaacucaaacaacccgcagacgggaacccagacccaaacgcaaacccaaacguggacccaaacgccaacccuaacguagaccccaacgcaaaccccaacgucgacccuaaugcaaacccaaacgccaaccccaacgcgaacccaaacgcaaaccccaacgcuaacccgaacgccaaccccaacgccaacccgaacgcaaacccaaacgcaaacccaaacgcgaacccaaacgcaaacccaaacgccaaccccaacgcgaacccaaacgccaauccaaacgccaacccaaacgcaaacccaaacgccaaccccaacguagacccaaacgccaacccaaacgcgaacccaaacgcaaaccccaacgcaaacccaaacgcaaacccaaacgccaacccuaacgcaaacccaaacgccaaccccaacgccaacccaaacgcaaacccaaacgccaacccaaacgccaaccccaacgcaaacccgaacgcaaaccccaacgcaaacccaaacgcaaacccaaacgcgaacccgaacgccaacccaaauaagaacaaccaaggaaacggacaaggccacaacaugccaaacgaccccaaccgcaacgucgacgaaaacgcaaaugccaacuccgcagucaaaaacaacaauaacgaagaacccucggacaaacacaucaaagaauaccucaacaagauccaaaacucacucuccaccgaauggucacccugcagcguaacuugcggcaacggcauccaaguccgcauaaaaccaggcuccgcaaacaaacccaaagacgaacucgacuaugccaacgacaucgaaaaaaaaauaugcaaaauggaaaaaugcagcucagucuucaacguagucaacagcucuaucggacuaauaaugguacucuccuuccuauucuuaaacuaaggacuagugcaucacauuuaaaagcaucucagccuaccaugagaauaagagaaagaaaaugaagaucaauagcuuauucaucucuuuuucuuuuucguugguguaaagccaacacccugucuaaaaaacauaaauuucuuuaaucauuuugccucuuuucucugugcuucaauuaauaaaaaauggaaagaaccuagaucuaaaaaaaaaaaaaaaaaaaaaaaaaaaaaaaaaaaaaaaaaaaaaaaaaaaaaaaaaaaaaaaaugcaucccccccccccccccccccccccccccccccaaaggcucuuuucagagccaccagaauu

SEQ ID NO: 1175 - RNA, 1576 nt, Artificial Sequence
  mRNA Design i-2 (A64-N5-C30-hSL-N5) comprising derived and/or modified sequence from Pf(3D7)__XP_001351122.1__IgE_Pf-CSP(19-397) (opt11)
ggggcgcugccuacggagguggcagccaucuccuucucggcaucaagcuuaccauggacuggacauggauccucuuccucgucgccgcggccacacgcguacacucacucuuccaagaauaucaaugcuacggcucaagcucgaacacgcgcguacucaacgaacuaaacuacgacaacgccggcaccaaccuauacaacgaacucgaaaugaacuacuacggcaaacaagaaaacugguacucacuuaagaaaaauucacgaucccucggagaaaacgacgaugggaacaacgaagacaacgaaaaacuacgcaaacccaaacacaagaaacuuaaacaacccgcagacggcaacccagacccaaacgcaaaccccaacguagaccccaacgcaaacccaaacguagacccaaacgccaacccaaacguagacccaaacgcgaacccaaacgccaacccaaacgccaaccccaacgcaaacccaaacgcaaauccaaacgcaaacccaaaugcaaacccgaacgccaauccaaacgcaaaccccaacgcaaacccaaacgcaaaccccaaugccaacccaaacgcaaaccccaacgcaaaccccaacgcaaaccccaacgcaaacccaaacgcgaacccaaacguagaccccaacgccaaccccaacgccaacccaaacgcaaacccaaacgccaacccaaacgccaaccccaacgcaaaccccaacgcaaacccgaacgcaaacccaaacgcaaacccaaacgcaaacccgaacgcaaacccuaacgcgaaccccaacgccaaccccaacgcaaacccaaacgcaaacccaaacgccaacccaaacgcaaacccaaacgcaaacccaaacaaaaacaaccaaggaaacgggcaaggacauaacaugccgaacgaccccaaccgcaacguagacgaaaacgccaacgccaacagcgcagucaaaaacaacaacaacgaagaacccuccgacaaacacaucaaagaauaccuaaacaaaauccagaacucacuauccaccgaauggucccccugcagcgugaccugcggcaacggcauacaaguccgcauaaaaccaggcuccgccaacaaacccaaagacgaacuagacuacgccaacgacauagaaaagaaaauaugcaaaauggaaaaaugcagcucagucuucaauguagucaacuccuccaucggacucauaaugguccuaucauuccucuuccuaaacuaaggacuagugcaucacauuuaaaagcaucucagccuaccaugagaauaagagaaagaaaaugaagaucaauagcuuauucaucucuuuuucuuuuucguugguguaaagccaacacccugucuaaaaaacauaaauuucuuuaaucauuuugccucuuuucucugugcuucaauuaauaaaaaauggaaagaaccuagaucuaaaaaaaaaaaaaaaaaaaaaaaaaaaaaaaaaaaaaaaaaaaaaaaaaaaaaaaaaaaaaaaaugcaucccccccccccccccccccccccccccccccaaaggcucuuuucagagccaccagaauu

SEQ ID NO: 1176 - RNA, 1741 nt, Artificial Sequence
  mRNA Design i-2 (A64-N5-C30-hSL-N5) comprising derived and/or modified sequence from Pf(3D7)__XP_001351122.1__Pf-CSP_L(G4SG4)_TM domain HA (opt11)
ggggcgcugccuacggagguggcagccaucuccuucucggcaucaagcuuaccaugaugcgcaaacucgccauccucagcgucagcucguuccucuucgucgaagcacuauuccaagaauaccaguguuacggcucauccucaaacacacgcgugcucaacgaacuaaacuacgacaacgccggcaccaaccucuacaacgaacuagaaaugaacuauuacggcaagcaagaaaacugguacucacucaaaaaaaacagccgaagccuaggcgagaacgacgacgggaacaacgaagacaacgaaaaacuacgcaaacccaagcacaaaaaacugaaacaaccagccgacggaaauccagaccccaacgcaaacccgaacguagaccccaacgcgaaccccaacguggacccgaacgcaaacccgaacguagacccaaacgcaaacccaaacgcgaacccaaacgcaaacccaaacgcuaacccaaacgcaaaccccaacgccaaccccaacgcgaacccaaacgcaaacccaaacgcaaacccaaacgcaaacccgaacgcaaacccaaacgccaacccaaacgcgaacccaaacgccaacccaaacgcaaacccaaacgcaaacccaaacgcaaacccaaacguagacccgaacgccaacccgaaugcaaacccaaacgcaaacccgaacgcaaacccaaacgcgaacccgaacgccaacccaaacgcaaacccgaacgcaaaccccaacgccaacccaaacgcaaaccccaacgcaaaccccaacgcaaacccgaacgcaaacccaaacgcaaacccaaacgccaaccccaacgccaaccccaacgcaaacccgaacgccaacccaaacaaaaacaaccaaggcaacgggcaaggacacaacaugccaaacgaccccaaccgaaacgucgacgaaaacgccaacgccaacuccgcagucaaaaacaacaacaacgaagaacccucagacaaacacauaaaagaauaccucaacaaaauccaaaacucacucucaaccgaguggucacccugcagugugaccuguggcaacggaauacaaguacgcauaaaacccggaucagccaacaaaccgaaagacgaacuagacuacgccaacgacauagaaaaaaaaauaugcaaaauggagaaaugcagcucugucuucaacgucgucaacagcucaaucggacucauaaugguccucuccuuccuauuccucaacggcggagggggcucaggcggcggaggaaaauuagaauccaccagaaucuaucagauucucgccauauacagcacagucgcaagcucgcuuguccuugucguaucacuaggcgcaaucucauucuggaugugcuccaacggaagccugcaaugccgcauuugcauauaaggacuagugcaucacauuuaaaagcaucucagccuaccaugagaauaagagaaagaaaaugaagaucaauagcuuauucaucucuuuuucuuuuucguugguguaaagccaacacccugucuaaaaaacauaaauuucuuuaaucauuuugccucuuuucucugugcuucaauuaauaaaaaauggaaagaaccuagaucuaaaaaaaaaaaaaaaaaaaaaaaaaaaaaaaaaaaaaaaaaaaaaaaaaaaaaaaaaaaaaaaaugcaucccccccccccccccccccccccccccccccaaaggcucuuuucagagccaccagaauu

SEQ ID NO: 1177 - RNA, 1615 nt, Artificial Sequence
  mRNA Design i-2 (A64-N5-C30-hSL-N5) comprising derived and/or modified sequence from Pf(3D7)__XP_001351122.1__Pf-CSP(199-377)_L(PVTN)_HBsAg (opt11)
ggggcgcugccuacggagguggcagccaucuccuucucggcaucaagcuuaccauggaccccaacgccaaccccaacgccaaccccaacgccaaucccaacgcuaaccccaacgccaaccccaacgcaaaccccaacgccaacccaaacgccaaccccaacgcaaaccccaacgccaaucccaaugccaaccccaacgccaaccccaacgcgaaccccaacgccaaccccaacgcaaacccaaacgccaaccccaacgccaaccccaacgccaaccccaacaaaaacaaccaaggcaacggccaaggccacaacaugcccaacgaccccaaccgcaacguagacgagaacgccaacgccaacagcgcugucaaaaacaacaacaacgaggaacccuccgacaaacacaucaaagaauaccuuaacaaaauccaaaacucucucuccaccgaguggucccccugcucagucacaugcggcaacggcauacaaguucguaucaaacccggcucagcaaacaaacccaaagacgaacucgacuacgcaaacgacauagaaaagaaaaucugcaaaauggaaaaauguucauccguccccgucaccaacauggaaaacaucacuuccggauuccucgguccccuacucguacuccaagccggcuucuuccuccucacccgcauccucaccaucccccaaucacuugacuccugguggaccucccucaacuuccucggcggcucccccgucugccuaggccaaaacagccaaucccccacuagcaaccacucccccacauccugcccacccaucugccccggauaucgauggaugugccuucgccgauucauaaucuuccucuucauccuccuacucugccucaucuuccuccucguccuucuagauuaccaaggcaugcuccccgucugcccccuuauccccggcuccaccaccacaaacaccggccccugcaaaaccugcacaacccccgcccaaggcaauagcauguuccccuccugcugcugcacuaaaccaacagacggcaacuguaccugcaucccaaucccaucaucaugggccuucgccaaauaccucugggaaugggcaucuguacgauucuccuggcucucccuucucguacccuucguccagugguucgucggccucucccccaccguauggcuauccgccaucuggaugaugugguacuggggccccucccuauacuccaucgucuccccauucauaccacuccuacccaucuucuucugccucugggucuacaucugaggacuagugcaucacauuuaaaagcaucucagccuaccaugagaauaagagaaagaaaaugaagaucaauagcuuauucaucucuuuuucuuuuucguugguguaaagccaacacccugucuaaaaaacauaaauuucuuuaaucauuuugccucuuuucucugugcuucaauuaauaaaaaauggaaagaaccuagaucuaaaaaaaaaaaaaaaaaaaaaaaaaaaaaaaaaaaaaaaaaaaaaaaaaaaaaaaaaaaaaaaaugcaucccccccccccccccccccccccccccccccaaaggcucuuuucagagccaccagaauu

SEQ ID NO: 1178 - RNA, 1657 nt, Artificial Sequence
  mRNA Design i-2 (A64-N5-C30-hSL-N5) comprising derived and/or modified sequence from Pf(3D7)__XP_001351122.1__Pf-CSP(199-387)_L(PVTN)_HBsAg (opt11)
ggggcgcugccuacggagguggcagccaucuccuucucggcaucaagcuuaccaugauggcccccgaccccaacgcaaauccaaacgcaaaccccaacgccaacccuaacgcaaaccccaacgccaacccaaacgccaaucccaacgccaacccuaacgccaaccccaacgcaaaccccaacgccaaccccaacgccaacccuaacgcaaaccccaacgccaacccaaacgcaaaccccaacgccaaccccaacgccaaccccaacgcaaacccaaacgcaaaccccaacaaaaacaaccaaggaaacggacaaggccacaacaugccuaacgaccccaaucgcaacgucgacgaaaacgcaaacgccaacuccgccgucaaaaacaacaacaacgaagaacccucugacaaacacaucaaagaauaccucaacaagauccaaaacucccuauccaccgaauggucccccugcuccgucacuugcgguaauggcauccaaguccgcauaaaaccaggauccgcaaacaaacccaaagacgaacuagacuacgccaacgacauagaaaagaaaaucugcaaaauggaaaaaugcuccucagucuucaaugucguaaacuccuccauuggccuaggccccgucaccaacauggaaaacauuaccuccggauuccucgguccucuccucguccuccaagccggauucuuucuccucacacgaauccucacuaucccucaaucccuggacucaugguggaccucccucaacuuccugggcggcucccccgucugccucggccaaaacagccaauccccaaccuccaaucacucccccacaagcugcccucccauaugccccggcuaccgcuggaugugccuccgucgcuucaucauauuccucuucauacuucuccucugccucaucuuccuccuuguccugcuagacuaccaaggcaugcuccccgucugcccacucauccccgguuccaccacaacaaacaccggccccugcaaaacaugcaccacacccgcccaagguaacuccauguuccccuccugcugcugcaccaaaccaaccgacggcaacugcacuugcauucccauccccucauccugggccuucgccaaauaccucugggaaugggcauccguccguuucucauggcuaucucuccuaguaccauucguacaaugguucguuggccucucccccaccguauggcucuccgccauauggaugaugugguacuggggcccuucacuuuacuccaucgucucacccuucaucccacuccuacccaucuucuucugccuuuggguauacaucuaaggacuagugcaucacauuuaaaagcaucucagccuaccaugagaauaagagaaagaaaaugaagaucaauagcuuauucaucucuuuuucuuuuucguugguguaaagccaacacccugucuaaaaaacauaaauuucuuuaaucauuuugccucuuuucucugugcuucaauuaauaaaaaauggaaagaaccuagaucuaaaaaaaaaaaaaaaaaaaaaaaaaaaaaaaaaaaaaaaaaaaaaaaaaaaaaaaaaaaaaaaaugcaucccccccccccccccccccccccccccccccaaaggcucuuuucagagccaccagaauu

SEQ ID NO: 1179 - RNA, 841 nt, Artificial Sequence
  mRNA Design i-2 (A64-N5-C30-hSL-N5) comprising derived and/or modified sequence from Pf(3D7)__XP_001351122.1__HsALB_Pf-CSP(19-152) (opt11)
ggggcgcugccuacggagguggcagccaucuccuucucggcaucaagcuuaccaugaaaugggucaccuucaucucccuccucuuccucuucuccagcgcauacucccucuuccaagaauaccaaugcuacggcuccuccuccaacacccgcguccucaacgaacucaacuacgacaacgccggcaccaaccucuacaacgaacucgaaaugaacuacuacggcaaacaagaaaacugguacucccucaaaaaaaacucccgcucccuaggcgaaaacgacgacggaaacaacgaagacaacgaaaaacuccgcaaacccaaacacaaaaaacucaaacaacccgccgacggaaaccccgaccccaacgccaacccaaacgucgaccccaacgccaaccccaacgucgaccccaacgccaaccccaacgucgaccccaacgccaaccccaacgcaaacccaaacgcaaacccaaacgccaaccccaacgccaaccccaacgccaaccccuaaggacuagugcaucacauuuaaaagcaucucagccuaccaugagaauaagagaaagaaaaugaagaucaauagcuuauucaucucuuuuucuuuuucguugguguaaagccaacacccugucuaaaaaacauaaauuucuuuaaucauuuugccucuuuucucugugcuucaauuaauaaaaaauggaaagaaccuagaucuaaaaaaaaaaaaaaaaaaaaaaaaaaaaaaaaaaaaaaaaaaaaaaaaaaaaaaaaaaaaaaaaugcaucccccccccccccccccccccccccccccccaaaggcucuuuucagagccaccagaauu

SEQ ID NO: 1180 - RNA, 961 nt, Artificial Sequence
  mRNA Design i-2 (A64-N5-C30-hSL-N5) comprising derived and/or modified sequence from Pf(3D7)__XP_001351122.1__HsALB_Pf-CSP(19-192) (opt11)
ggggcgcugccuacggagguggcagccaucuccuucucggcaucaagcuuaccaugaaauggguaaccuucauaucccuccucuuccuauucucgagcgccuacucccucuuccaagaauaccaaugcuacggcucauccuccaacacccgcguccucaacgaacucaacuacgacaacgccggcaccaaccucuacaacgaacuagagaugaacuacuacggcaaacaagaaaacugguacucacucaaaaaaaacucccgaucccuaggagaaaacgacgacggcaacaacgaagacaacgaaaaacuacgaaaacccaaacacaaaaaacucaaacaacccgccgacggcaaccccgaccccaacgccaaccccaacgucgaccccaacgccaacccaaacguagaccccaacgccaaccccaacgucgacccaaacgccaaccccaacgccaaccccaacgccaacccaaacgcaaacccaaacgcaaacccaaacgccaacccaaacgccaaccccaacgccaaccccaacgcaaaccccaacgcaaaccccaacgccaacccaaacgcaaaccccaacgccaacccaaacgccaacccaaacgccaaccccaacgcaaaccccuaaggacuagugcaucacauuuaaaagcaucucagccuaccaugagaauaagagaaagaaaaugaagaucaauagcuuauucaucucuuuuucuuuuucguugguguaaagccaacacccugucuaaaaaacauaaauuucuuuaaucauuuugccucuuuucucugugcuucaauuaauaaaaaauggaaagaaccuagaucuaaaaaaaaaaaaaaaaaaaaaaaaaaaaaaaaaaaaaaaaaaaaaaaaaaaaaaaaaaaaaaaaugcaucccccccccccccccccccccccccccccccaaaggcucuuuucagagccaccagaauu

SEQ ID NO: 1181 - RNA, 1201 nt, Artificial Sequence
  mRNA Design i-2 (A64-N5-C30-hSL-N5) comprising derived and/or modified sequence from Pf(3D7)__XP_001351122.1__HsALB_Pf-CSP(19-272) (opt11)
ggggcgcugccuacggagguggcagccaucuccuucucggcaucaagcuuaccaugaaauggguaaccuucaucucccuccucuuccuauucucaucagcauacucacucuuccaagaauaccaaugcuacggcucgagcucaaacacacgcguacucaacgaacugaacuacgacaacgccggaaccaaccucuacaaugaacucgaaaugaacuacuacggcaaacaagagaacugguacucacucaaaaaaaacagcagaagccucggagaaaacgacgacggaaacaacgaagacaacgaaaaacuccgcaaacccaagcacaaaaaacuaaaacaacccgcagacggaaaccccgaccccaacgcaaacccgaacgucgacccaaacgccaacccaaacguagaccccaacgcgaacccaaacguagacccaaacgccaacccaaacgcaaaccccaacgccaaccccaacgcaaacccaaacgccaacccaaacgcaaaccccaaugcaaaccccaacgcaaacccaaacgccaaccccaacgcaaacccaaacgcaaacccaaacgcaaacccaaacgcaaacccaaacgcgaacccaaacgcaaacccaaacgcaaacccgaacgcaaacccaaacguagacccaaacgcaaaccccaacgccaacccaaacgcaaacccaaacgcaaacccaaacgcaaacccaaacgcgaacccaaacgccaacccaaacgcaaacccaaacgcaaacccaaacgcaaacccaaacgcaaacccaaacgcaaacccaaacgcaaacccgaacgcgaacccaaacgcaaacccaaacgcgaacccgaacgcaaaccccaacgcaaacccauaaggacuagugcaucacauuuaaaagcaucucagccuaccaugagaauaagagaaagaaaaugaagaucaauagcuuauucaucucuuuuucuuuuucguugguguaaagccaacacccugucuaaaaaacauaaauuucuuuaaucauuuugccucuuuucucugugcuucaauuaauaaaaaauggaaagaaccuagaucuaaaaaaaaaaaaaaaaaaaaaaaaaaaaaaaaaaaaaaaaaaaaaaaaaaaaaaaaaaaaaaaaugcaucccccccccccccccccccccccccccccccaaaggcucuuuucagagccaccagaauu

SEQ ID NO: 1182 - RNA, 1363 nt, Artificial Sequence
  mRNA Design i-2 (A64-N5-C30-hSL-N5) comprising derived and/or modified sequence from Pf(3D7)__XP_001351122.1__HsALB_Pf-CSP(19-272)_L(AAY)_Pf-CSP(310-3 27)_L(AAY)_Pf-CSP(346-375) (opt11)
ggggcgcugccuacggagguggcagccaucuccuucucggcaucaagcuuaccaugaaaugggucaccuucaucucacuccuauuccuauucuccuccgcauacucacucuuccaagaauaccagugcuacggaucaagcuccaacacacgcguacuaaacgaacugaacuacgacaacgccggaaccaaccucuacaacgaacucgaaaugaauuacuacggcaaacaagagaacugguacucacucaaaaaaaacagcagaucccuaggcgaaaacgacgacggaaacaacgaagacaacgaaaaacuacgcaaacccaaacacaaaaaacuaaaacaacccgcagacggaaacccagauccaaacgcaaacccaaacguagacccaaacgccaacccaaacguagacccaaacgcaaacccaaacguagaccccaacgcaaacccaaacgcaaacccgaacgccaacccaaacgcaaaccccaacgccaacccaaacgcaaacccaaacgcaaacccaaacgcaaacccaaacgccaaccccaacgcgaacccaaacgcaaacccuaacgccaacccaaacgcaaacccaaacgcaaacccgaacgcaaacccaaacgcaaacccaaacgcaaacccgaacguagacccaaacgcaaacccaaacgcaaacccaaacgcaaacccaaacgccaacccaaacgccaacccaaacgcaaaccccaacgcaaaccccaacgcgaacccaaacgccaaccccaacgcaaacccaaacgccaacccaaacgccaacccgaacgcaaacccaaacgccaacccaaacgccaacccgaacgcaaacccaaacgccaacccaaacgccaacccagccgcguacgaacccucagauaaacacauaaaagaauaccucaacaaaauccaaaacucacuagcagccuacaucaaaccaggauccgccaacaaacccaaggacgaacucgacuacgcaaacgacaucgaaaaaaaaaucugcaaaauggaaaaaugcucaugaggacuagugcaucacauuuaaaagcaucucagccuaccaugagaauaagagaaagaaaaugaagaucaauagcuuauucaucucuuuuucuuuuucguugguguaaagccaacacccugucuaaaaaacauaaauuucuuuaaucauuuugccucuuuucucugugcuucaauuaauaaaaaauggaaagaaccuagaucuaaaaaaaaaaaaaaaaaaaaaaaaaaaaaaaaaaaaaaaaaaaaaaaaaaaaaaaaaaaaaaaaugcaucccccccccccccccccccccccccccccccaaaggcucuuuucagagccaccagaauu

SEQ ID NO: 1183 - RNA, 1324 nt, Artificial Sequence
  mRNA Design i-2 (A64-N5-C30-hSL-N5) comprising derived and/or modified sequence from Pf(3D7)__XP_001351122.1__HsALB_Pf-CSP(19-272)_L(AAY)_Pf-CSP(346-3 65)_L(AAY)_P2 (opt11)
ggggcgcugccuacggagguggcagccaucuccuucucggcaucaagcuuaccaugaaaugggucaccuucaucucacuccuauuccuauucucgagcgcauacucacucuuccaagaauaccaaugcuauggcuccagcucaaacacacgcguccuaaacgaacucaacuacgacaacgccggaacaaaccucuacaacgaacucgaaaugaacuacuacggcaaacaagaaaacugguacucgcucaaaaaaaacucccgaagucuaggcgaaaacgacgacggaaacaacgaagacaacgaaaaacuacgcaaacccaaacacaaaaaacuaaaacaacccgcagacggaaaccccgacccaaacgcaaaccccaacguagacccaaacgcaaaccccaacguagacccaaacgcaaacccgaacguagacccaaacgccaacccaaacgccaaccccaacgcaaacccaaacgccaaccccaacgcaaacccaaacgcaaacccaaacgcaaacccaaacgcaaacccaaacgccaaccccaacgccaacccaaacgccaaccccaacgcgaaccccaacgcgaacccaaacgccaacccaaacgcaaaccccaacgcaaacccaaacgcaaacccaaacgucgacccaaacgcaaacccaaacgcaaacccgaacgcaaacccaaacgcaaaccccaacgccaacccaaacgcgaacccaaacgccaacccaaacgccaacccaaacgcaaacccaaacgccaacccaaacgcaaacccaaacgcaaaccccaacgcaaaccccaacgcaaacccaaacgccaaccccaacgcaaaccccaacgcaaacccaaacgccaacccagccgcauacauaaaacccggcuccgccaacaaaccaaaagacgaacuagacuacgccaacgacauagaagcagccuaccaauacaucaaagccaacagcaaauucauaggaauaaccgagcuauaaggacuagugcaucacauuuaaaagcaucucagccuaccaugagaauaagagaaagaaaaugaagaucaauagcuuauucaucucuuuuucuuuuucguugguguaaagccaacacccugucuaaaaaacauaaauuucuuuaaucauuuugccucuuuucucugugcuucaauuaauaaaaaauggaaagaaccuagaucuaaaaaaaaaaaaaaaaaaaaaaaaaaaaaaaaaaaaaaaaaaaaaaaaaaaaaaaaaaaaaaaaugcaucccccccccccccccccccccccccccccccaaaggcucuuuucagagccaccagaauu

SEQ ID NO: 1184 - RNA, 1318 nt, Artificial Sequence
  mRNA Design i-2 (A64-N5-C30-hSL-N5) comprising derived and/or modified sequence from Pf(3D7)__XP_001351122.1__HsALB_Pf-CSP(19-272)_L(AAY)_Pf-CSP(346-3 65)_L(AAY)_PADRE (opt11)
ggggcgcugccuacggagguggcagccaucuccuucucggcaucaagcuuaccaugaaauggguaaccuucaucucgcuacuguuccucuucucauccgcauacucccucuuccaagaauaccaaugcuacggcucauccucaaacacacgaguacuaaacgaacucaacuacgacaacgccggaaccaaccuauacaacgaacucgaaaugaacuacuacggcaaacaagaaaacugguacucacucaaaaaaaacucccgaucccucggcgaaaacgacgacggaaacaacgaagacaacgaaaaacugagaaaacccaaacacaaaaaacuaaaacaaccagccgacggcaacccagaccccaacgcaaaccccaacguagacccaaacgccaaccccaacguagacccaaacgcaaacccaaacguagaccccaacgccaacccaaacgccaacccaaacgccaaccccaacgcaaacccaaacgcaaacccaaacgcaaacccaaacgccaacccaaacgcaaacccaaacgccaacccgaacgcaaaccccaacgcaaacccaaacgcaaaccccaacgccaacccaaacgcaaacccaaacgcaaaccccaacgcaaacccaaaugcgaacccaaacguggacccgaacgcaaaccccaacgccaacccaaacgcaaaccccaacgccaaccccaacgccaaccccaacgcaaaccccaacgccaaccccaacgccaacccaaacgccaacccaaacgcgaacccaaacgcaaaccccaacgcaaacccaaacgcaaacccaaacgcaaacccaaacgcaaaccccaacgcaaacccaaacgcaaacccaaacgcaaaccccgcagccuacauuaaaccaggcuccgccaacaaacccaaagacgaacucgacuacgccaacgacauagaagcagccuacgccaaauucguagccgcauggacacucaaagccgcagccuaaggacuagugcaucacauuuaaaagcaucucagccuaccaugagaauaagagaaagaaaaugaagaucaauagcuuauucaucucuuuuucuuuuucguugguguaaagccaacacccugucuaaaaaacauaaauuucuuuaaucauuuugccucuuuucucugugcuucaauuaauaaaaaauggaaagaaccuagaucuaaaaaaaaaaaaaaaaaaaaaaaaaaaaaaaaaaaaaaaaaaaaaaaaaaaaaaaaaaaaaaaaugcaucccccccccccccccccccccccccccccccaaaggcucuuuucagagccaccagaauu

SEQ ID NO: 1185 - RNA, 1375 nt, Artificial Sequence
  mRNA Design i-2 (A64-N5-C30-hSL-N5) comprising derived and/or modified sequence from Pf(3D7)__XP_001351122.1__HsALB_Pf-CSP(19-272)_L(G4S)_Pf-CSP(310-3 27)_L(G4S)_Pf-CSP(346-375) (opt11)
ggggcgcugccuacggagguggcagccaucuccuucucggcaucaagcuuaccaugaaaugggucaccuucaucucccuacuauuccucuucucaucagccuacucacucuuccaagaguaccaaugcuacggcucaagcucaaacacacgcguacucaacgaacuaaacuacgacaacgcaggcaccaaccucuacaacgaacucgagaugaacuacuacggcaaacaagaaaacugguacucacucaaaaaaaacucccgcagccucggcgaaaacgacgacggcaacaacgaagauaacgagaaacuacgcaaacccaaacacaaaaaacuaaaacaacccgccgacggaaacccagacccaaacgccaacccaaacguagacccaaacgcaaacccaaacguagacccaaacgccaaccccaacguagacccaaacgccaacccaaacgccaacccaaacgcaaacccaaacgcaaacccaaacgcgaacccaaacgcaaaccccaacgccaacccaaacgcaaacccaaacgccaaccccaacgcaaacccaaacgcaaaccccaacgcaaacccaaacgccaaccccaacgcaaaccccaacgcaaacccaaacgcaaacccaaacgcaaacccaaacgucgacccaaacgcaaaccccaacgcaaacccaaacgcaaacccaaacgccaacccaaacgcaaacccaaacgccaacccaaacgcaaaccccaacgcaaaccccaacgccaacccaaacgcaaaccccaacgcgaacccaaacgcaaacccaaacgcaaacccaaacgcaaaccccaacgcaaaccccaacgcaaacccaaacgcaaacccaaacgcaaacccaggcggcggcggaagcgaacccucggacaaacacauaaaagaauaccucaacaaaauccaaaacucccucggaggcggaggcuccaucaaacccggaagcgcaaacaaacccaaagacgaacucgacuacgcaaacgacaucgagaaaaaaauaugcaaaauggaaaaaugcucauaaggacuagugcaucacauuuaaaagcaucucagccuaccaugagaauaagagaaagaaaaugaagaucaauagcuuauucaucucuuuuucuuuuucguugguguaaagccaacacccugucuaaaaaacauaaauuucuuuaaucauuuugccucuuuucucugugcuucaauuaauaaaaaauggaaagaaccuagaucuaaaaaaaaaaaaaaaaaaaaaaaaaaaaaaaaaaaaaaaaaaaaaaaaaaaaaaaaaaaaaaaaugcaucccccccccccccccccccccccccccccccaaaggcucuuuucagagccaccagaauu

SEQ ID NO: 1186 - RNA, 1360 nt, Artificial Sequence
  mRNA Design i-2 (A64-N5-C30-hSL-N5) comprising derived and/or modified sequence from Pf(3D7)__XP_001351122.1__HsALB_Pf-CSP(19-272)_L(G4S)_Pf-CSP(310-3 27)_Pf-CSP(346-375) (opt11)
ggggcgcugccuacggagguggcagccaucuccuucucggcaucaagcuuaccaugaaauggguaaccuucaucucacuccuauuccucuucuccuccgcauacucgcucuuccaagaauaccaaugcuacggcucaagcucaaacacccgcguccucaacgaacucaacuacgacaacgccgguaccaaccuauacaacgaacucgaaaugaacuacuacggcaaacaagaaaacugguacucacucaaaaaaaacuccaggucccuaggagaaaacgacgauggcaacaacgaagacaacgaaaaacuccgaaagccaaaacacaaaaaacuaaaacagcccgcagacggcaacccagacccaaacgcaaacccaaacguagacccaaacgcgaaccccaacguagacccaaacgcaaacccaaacguagacccaaacgcaaaccccaacgcaaacccaaacgcaaaccccaacgcaaaccccaacgcaaacccaaacgcaaacccaaacgcaaacccaaacgcaaacccaaacgcaaaccccaacgccaaccccaacgcaaacccaaacgcaaacccaaacgcaaacccaaacgcaaacccaaacgcaaaccccaacgccaacccaaacgcaaacccaaacguagacccaaacgcaaacccaaacgcaaacccaaacgcaaaccccaacgccaacccaaacgcaaacccaaacgcaaacccaaacgcaaacccaaacgcaaauccaaacgcuaacccaaacgcaaacccgaacgcaaaccccaaugcaaaccccaacgcaaacccaaacgccaacccaaacgcaaacccaaacgcgaacccaaacgcaaacccaaacgcaaacccaggcggaggcggauccgaacccuccgacaaacacauaaaagaauaccuaaacaaaauccaaaacucucucauaaaacccggaucagccaacaaaccaaaagacgaacuagacuacgccaaugacauagaaaaaaaaauaugcaagauggaaaaaugcagcuaaggacuagugcaucacauuuaaaagcaucucagccuaccaugagaauaagagaaagaaaaugaagaucaauagcuuauucaucucuuuuucuuuuucguugguguaaagccaacacccugucuaaaaaacauaaauuucuuuaaucauuuugccucuuuucucugugcuucaauuaauaaaaaauggaaagaaccuagaucuaaaaaaaaaaaaaaaaaaaaaaaaaaaaaaaaaaaaaaaaaaaaaaaaaaaaaaaaaaaaaaaaugcaucccccccccccccccccccccccccccccccaaaggcucuuuucagagccaccagaauu

SEQ ID NO: 1187 - RNA, 1360 nt, Artificial Sequence
  mRNA Design i-2 (A64-N5-C30-hSL-N5) comprising derived and/or modified sequence from Pf(3D7)__XP_001351122.1__HsALB_Pf-CSP(19-325) (opt11)
ggggcgcugccuacggagguggcagccaucuccuucucggcaucaagcuuaccaugaaauggguaaccuucaucucacuccuguuccuauucucauccgcauacucacucuuccaagaauaccaaugcuacggcucgucuucaaacacccgcguacucaacgaacucaacuacgacaacgccggaaccaaccucuacaacgaacucgaaaugaacuacuacggcaaacaagaaaacugguacucacucaaaaaaaacagccgaagccuaggcgaaaacgacgacggaaacaaugaagacaacgaaaaacuccgcaaacccaaacacaaaaaacucaaacaaccagcagacggaaaccccgacccgaacgcaaacccaaacguagacccaaacgcaaacccaaacguagacccaaacgcgaacccaaacguagaccccaacgcaaacccaaacgcaaacccaaacgcaaacccaaacgccaaccccaacgccaacccaaacgccaacccaaacgcaaacccgaacgcgaacccaaacgcaaaccccaacgcaaacccaaacgcaaacccaaacgcgaacccaaacgccaacccaaacgccaacccaaacgcaaacccaaacgccaacccaaacgcaaaccccaacguggaccccaacgcaaacccaaacgcaaacccaaacgccaaccccaacgcaaacccaaacgcaaacccuaacgcaaacccaaacgcaaaccccaacgcgaacccaaacgcaaacccaaacgcaaacccaaacgcaaaccccaacgcaaacccaaacgccaacccaaacgccaacccaaacgcgaauccaaacgcaaaccccaacgcaaacccaaacgcaaacccgaacaaaaacaaccaagggaacggacaaggacacaacaugccaaacgaccccaaccgcaacgucgacgaaaacgccaacgccaacuccgcaguaaaaaacaacaacaacgaagaacccuccgacaaacacauaaaagaauaccucaacaagauacaaaacuagggacuagugcaucacauuuaaaagcaucucagccuaccaugagaauaagagaaagaaaaugaagaucaauagcuuauucaucucuuuuucuuuuucguugguguaaagccaacacccugucuaaaaaacauaaauuucuuuaaucauuuugccucuuuucucugugcuucaauuaauaaaaaauggaaagaaccuagaucuaaaaaaaaaaaaaaaaaaaaaaaaaaaaaaaaaaaaaaaaaaaaaaaaaaaaaaaaaaaaaaaaugcaucccccccccccccccccccccccccccccccaaaggcucuuuucagagccaccagaauu

SEQ ID NO: 1188 - RNA, 1537 nt, Artificial Sequence
  mRNA Design i-2 (A64-N5-C30-hSL-N5) comprising derived and/or modified sequence from Pf(3D7)__XP_001351122.1__HsALB_Pf-CSP(19-384) (opt11)
ggggcgcugccuacggagguggcagccaucuccuucucggcaucaagcuuaccaugaaauggguaaccuucaucucacuacucuuccuauucucaagcgcguacucacucuuccaagaauaccaaugcuacggcucgagcucaaacacccgcguucucaacgaacuaaacuacgacaacgccggaaccaaccuauacaacgaacuugaaaugaacuacuacggcaaacaagaaaacugguacucgcucaaaaaaaacuccaggagccuaggcgaaaacgacgacggaaacaacgaagacaacgagaaacuaagaaaacccaaacacaaaaaacucaaacagcccgcggacggaaaccccgacccaaacgcaaaccccaacguagacccgaacgccaacccaaacguagacccaaacgcaaacccaaacguagaccccaacgcaaacccgaacgccaacccaaacgcaaacccaaaugcgaaccccaacgcgaacccaaacgcaaacccgaacgcaaaccccaacgccaacccaaacgcaaacccaaacgcaaaccccaacgcaaacccaaacgcgaacccaaacgcaaacccaaacgcgaacccgaacgcaaacccaaacgcaaacccgaacgcaaacccaaacguagacccaaacgccaacccaaacgcaaacccaaacgcaaaccccaacgcaaacccaaacgcaaacccgaacgcaaacccaaacgcaaacccaaacgcgaacccaaacgcaaaccccaacgcaaacccaaacgcaaacccuaacgcaaacccgaacgcaaacccaaacgccaacccaaacgcgaaccccaacgcaaacccaaacgccaacccaaacgccaacccgaacaaaaacaaccaaggaaacggacaaggacacaacaugccaaacgaccccaaccgaaacgucgacgaaaacgcaaacgccaacagugccgucaaaaacaacaacaaugaagaacccucagacaaacacauaaaagaauaccuaaacaaaauccagaacucgcucucaaccgaauggucacccugcagcgucaccugcggcaacggaauacaaguacgcaucaaaccaggcucggccaacaaaccaaaagacgaauuagacuacgcaaacgacaucgaaaaaaaaauaugcaaaauggaaaaaugcagcucagucuucaacguagucaauagcucauaaggacuagugcaucacauuuaaaagcaucucagccuaccaugagaauaagagaaagaaaaugaagaucaauagcuuauucaucucuuuuucuuuuucguugguguaaagccaacacccugucuaaaaaacauaaauuucuuuaaucauuuugccucuuuucucugugcuucaauuaauaaaaaauggaaagaaccuagaucuaaaaaaaaaaaaaaaaaaaaaaaaaaaaaaaaaaaaaaaaaaaaaaaaaaaaaaaaaaaaaaaaugcaucccccccccccccccccccccccccccccccaaaggcucuuuucagagccaccagaauu

SEQ ID NO: 1189 - RNA, 1675 nt, Artificial Sequence
  mRNA Design i-2 (A64-N5-C30-hSL-N5) comprising derived and/or modified sequence from Pf(3D7)__XP_001351122.1__HsALB_Pf-CSP(19-384)_TM domain HA (opt11)
ggggcgcugccuacggagguggcagccaucuccuucucggcaucaagcuuaccaugaagugggucaccuucaucucccuccuauuccucuucucuagcgcguacucacucuuccaagaauaccaaugcuacggauccagcucaaacacacgcguccucaaugaacugaacuacgauaacgccggaaccaaccucuacaacgaacucgaaaugaacuacuacggcaaacaagaaaacugguacucacuaaagaaaaauagcaggucccucggcgaaaacgacgacgggaacaacgaagauaacgaaaaacuacgcaaacccaagcacaagaaacuaaaacagccagcagacggaaacccagaccccaacgccaacccaaacgucgaccccaacgcaaacccaaacguagauccgaacgcaaacccaaacgucgauccaaacgcaaacccaaacgcaaacccaaacgcuaaccccaacgccaacccaaacgcaaacccgaacgcaaaccccaacgcgaacccgaacgcaaacccaaacgcaaacccaaacgccaacccaaacgcaaacccaaacgcaaacccaaacgccaacccaaacgcaaaccccaacgcgaaccccaacgcaaaccccaacgcaaacccaaacgucgacccaaacgcaaaccccaacgcaaaccccaacgcaaaccccaaugcaaacccaaacgcgaaccccaacgcaaacccaaacgcgaacccaaaugcaaaccccaacgccaaccccaacgccaacccgaacgcaaacccaaacgccaacccaaacgccaacccaaacgcaaaucccaacgccaacccaaacgcgaacccgaacgcaaacccaaacgcaaacccgaacaaaaacaaccaaggaaacggucaaggacacaacaugccaaacgaccccaaccgcaacgucgacgaaaacgccaaugccaacagcgccgucaaaaacaacaacaacgaagaacccucagacaaacacaucaaagaguaccuaaacaagauccaaaacucccucuccaccgaauggucccccugcagcguaaccugcggaaacggcauccaaguccgcauaaaaccaggcucagccaacaaaccaaaagaugaacucgacuacgcaaacgacauagaaaagaaaaucugcaaaauggaaaaaugcagcuccguauucaacgugguuaacuccucaaaacuagaauccacccgcaucuaccaaauacucgcaauauacagcacaguagccagcucacucguccuagucgucucccucggagccaucagcuucuggaugugcuccaacggaaguuuacaaugucgcauaugcauauaaggacuagugcaucacauuuaaaagcaucucagccuaccaugagaauaagagaaagaaaaugaagaucaauagcuuauucaucucuuuuucuuuuucguugguguaaagccaacacccugucuaaaaaacauaaauuucuuuaaucauuuugccucuuuucucugugcuucaauuaauaaaaaauggaaagaaccuagaucuaaaaaaaaaaaaaaaaaaaaaaaaaaaaaaaaaaaaaaaaaaaaaaaaaaaaaaaaaaaaaaaaugcaucccccccccccccccccccccccccccccccaaaggcucuuuucagagccaccagaauu

SEQ ID NO: 1190 - RNA, 1387 nt, Artificial Sequence
  mRNA Design i-2 (A64-N5-C30-hSL-N5) comprising derived and/or modified sequence from Pf(3D7)__XP_001351122.1__HsALB_Pf-CSP(82-397) (opt11)
ggggcgcugccuacggagguggcagccaucuccuucucggcaucaagcuuaccaugaaaugggucaccuucaucucacuccuguuccucuucucauccgccuacagcgacaacgaaaaacugcgcaaacccaaacacaagaaacucaaacaaccagccgacggcaaccccgaccccaacgccaacccaaacguagaccccaacgccaaccccaacguagacccaaacgccaacccaaacguggaccccaacgcaaacccaaacgccaacccaaacgccaauccaaacgccaacccaaacgcaaacccaaacgcaaaccccaacgccaacccuaacgccaaccccaacgcaaacccaaacgccaaccccaacgccaaccccaacgcaaaccccaacgcaaacccuaacgccaaccccaacgccaaccccaacgcaaacccaaacgccaaccccaacguagacccaaacgccaaccccaacgcaaaccccaacgccaacccaaacgcaaacccaaacgccaaccccaacgccaaccccaacgcaaacccaaacgcaaacccaaaugcaaaccccaacgccaaccccaacgccaaccccaacgcaaaccccaacgcaaaccccaacgcaaacccgaacgccaacccaaacgccaacccaaacgccaaccccaacgcaaaccccaacaaaaacaaccaaggcaacggacaaggacacaacaugcccaacgaccccaaccgcaacgucgacgaaaacgccaacgccaacuccgccgucaaaaacaacaacaacgaagaacccuccgacaaacacaucaaagaauaccucaacaaaauccaaaacucccucucaaccgaauggucacccugcuccguaaccugcggcaacggcauccaaguccgcaucaaacccggcucagccaacaaacccaaagacgaacucgacuacgccaaugacaucgaaaagaaaauaugcaaaauggaaaaaugcuccuccgucuucaacgucgucaacuccuccaucggccucaucaugguccucucguuccuauuccuaaacuaaggacuagugcaucacauuuaaaagcaucucagccuaccaugagaauaagagaaagaaaaugaagaucaauagcuuauucaucucuuuuucuuuuucguugguguaaagccaacacccugucuaaaaaacauaaauuucuuuaaucauuuugccucuuuucucugugcuucaauuaauaaaaaauggaaagaaccuagaucuaaaaaaaaaaaaaaaaaaaaaaaaaaaaaaaaaaaaaaaaaaaaaaaaaaaaaaaaaaaaaaaaugcaucccccccccccccccccccccccccccccccaaaggcucuuuucagagccaccagaauu

SEQ ID NO: 1191 - RNA, 739 nt, Artificial Sequence
  mRNA Design i-2 (A64-N5-C30-hSL-N5) comprising derived and/or modified sequence from Pf(3D7)__XP_001351122.1__HsALB_Pf-CSP(93-192) (opt11)
ggggcgcugccuacggagguggcagccaucuccuucucggcaucaagcuuaccaugaaauggguaaccuucaucucacuccuauuccuauucucaagcgcauacucaaaacuaaaacaacccgcagacggaaacccagacccaaacgcaaacccaaacguagacccaaacgcaaacccaaacguagacccaaacgcaaacccaaacguagacccaaacgcaaacccaaacgcaaacccaaacgcaaacccaaacgcaaacccaaacgcaaaccccaacgcaaacccaaacgcaaacccaaacgcaaacccaaacgcaaacccaaacgcaaacccaaacgcaaacccaaacgcaaacccaaacgcaaacccaaacgcaaacccaaacgccaacccaaacgcaaacccauaaggacuagugcaucacauuuaaaagcaucucagccuaccaugagaauaagagaaagaaaaugaagaucaauagcuuauucaucucuuuuucuuuuucguugguguaaagccaacacccugucuaaaaaacauaaauuucuuuaaucauuuugccucuuuucucugugcuucaauuaauaaaaaauggaaagaaccuagaucuaaaaaaaaaaaaaaaaaaaaaaaaaaaaaaaaaaaaaaaaaaaaaaaaaaaaaaaaaaaaaaaaugcaucccccccccccccccccccccccccccccccaaaggcucuuuucagagccaccagaauu

SEQ ID NO: 1192 - RNA, 979 nt, Artificial Sequence
  mRNA Design i-2 (A64-N5-C30-hSL-N5) comprising derived and/or modified sequence from Pf(3D7)__XP_001351122.1__HsALB_Pf-CSP(93-272) (opt11)
ggggcgcugccuacggagguggcagccaucuccuucucggcaucaagcuuaccaugaaaugggucaccuucaucucacuccuauuccuauucucauccgcauacucaaaacuaaaacaacccgccgacggaaacccagacccaaacgcaaacccaaacguagacccaaacgcaaacccaaacguagacccaaacgcaaacccaaacguagacccaaacgcaaacccaaacgccaacccaaacgcaaauccaaacgcaaacccaaacgcaaacccaaacgcaaacccaaacgcaaacccaaacgccaacccaaacgccaacccaaacgcaaacccaaacgcaaacccaaacgcaaacccaaacgcaaacccaaacgcaaacccaaacgccaaccccaacgcaaacccaaacgcaaaccccaacguagacccaaacgcaaacccaaacgccaaccccaacgcaaaccccaacgccaaccccaacgccaacccaaacgccaacccaaacgcaaacccaaacgcaaacccaaacgcaaacccaaacgcaaacccaaacgcaaacccaaacgcaaacccaaacgcaaacccaaacgcaaacccaaacgccaacccaaacgcaaacccaaacgcaaacccgaacgcaaacccauaaggacuagugcaucacauuuaaaagcaucucagccuaccaugagaauaagagaaagaaaaugaagaucaauagcuuauucaucucuuuuucuuuuucguugguguaaagccaacacccugucuaaaaaacauaaauuucuuuaaucauuuugccucuuuucucugugcuucaauuaauaaaaaauggaaagaaccuagaucuaaaaaaaaaaaaaaaaaaaaaaaaaaaaaaaaaaaaaaaaaaaaaaaaaaaaaaaaaaaaaaaaugcaucccccccccccccccccccccccccccccccaaaggcucuuuucagagccaccagaauu

SEQ ID NO: 1193 - RNA, 1354 nt, Artificial Sequence
  mRNA Design i-2 (A64-N5-C30-hSL-N5) comprising derived and/or modified sequence from Pf(3D7)__XP_001351122.1__HsALB_Pf-CSP(93-397) (opt11)
ggggcgcugccuacggagguggcagccaucuccuucucggcaucaagcuuaccaugaaaugggucacauucaucucacuccuauuccuauucucaagcgccuacuccaaacucaaacaacccgccgacggcaacccagacccaaacgccaaccccaacgucgacccaaacgccaacccaaacgucgacccaaacgcaaacccaaacgucgaccccaacgccaaccccaacgccaaccccaacgccaacccaaacgccaaucccaacgccaaccccaacgccaacccaaacgcaaaccccaacgccaauccaaacgccaaccccaacgcaaaccccaacgccaaccccaacgcaaacccaaacgcaaacccaaacgcaaaccccaacgccaaccccaacgcaaaccccaacgccaaccccaacgucgaccccaacgccaacccaaacgccaacccaaacgccaaccccaacgccaaccccaacgcaaacccaaacgcgaaccccaacgcaaaccccaacgccaacccgaacgccaacccgaacgcaaacccaaacgccaaccccaacgcaaaccccaacgcaaacccaaacgcgaaccccaacgccaacccaaacgccaacccaaacgcgaacccaaacgccaaccccaacaaaaacaaccaagggaacggacaaggccacaacaugcccaacgaccccaaccgcaacgucgacgaaaacgccaacgccaacuccgccgucaaaaacaacaacaacgaagaacccuccgacaaacacauaaaagaauaccuaaacaaaauccaaaacucacucucuacugaauggucccccugcucagucaccugcggcaacggcauacaaguccgcauaaaacccggcucggccaacaaaccaaaagacgaacuagacuacgcaaacgacaucgaaaaaaaaauaugcaaaauggaaaaaugcuccucagucuucaacguaguaaacuccuccaucggccucauaaugguccucuccuuccuauuccucaacuaaggacuagugcaucacauuuaaaagcaucucagccuaccaugagaauaagagaaagaaaaugaagaucaauagcuuauucaucucuuuuucuuuuucguugguguaaagccaacacccugucuaaaaaacauaaauuucuuuaaucauuuugccucuuuucucugugcuucaauuaauaaaaaauggaaagaaccuagaucuaaaaaaaaaaaaaaaaaaaaaaaaaaaaaaaaaaaaaaaaaaaaaaaaaaaaaaaaaaaaaaaaugcaucccccccccccccccccccccccccccccccaaaggcucuuuucagagccaccagaauu

SEQ ID NO: 1194 - RNA, 724 nt, Artificial Sequence
  mRNA Design i-2 (A64-N5-C30-hSL-N5) comprising derived and/or modified sequence from Pf(3D7)__XP_001351122.1__HsALB_Pf-CSP(98-192) (opt11)
ggggcgcugccuacggagguggcagccaucuccuucucggcaucaagcuuaccaugaaaugggucacauucauaagccuacucuuccucuucagcucagccuacuccgcagacggaaacccagacccaaacgcaaacccaaacguagacccaaacgcaaacccaaacguagacccaaacgcaaacccaaacguagacccaaacgcaaacccaaacgcaaacccaaacgcaaacccaaacgcaaacccaaacgcaaacccaaacgcaaacccaaacgcaaacccaaacgcaaacccaaacgcaaacccaaacgcaaaccccaacgcaaacccaaacgcaaacccaaacgcaaacccaaacgcaaacccaaacgcaaacccaaacgcaaacccauaaggacuagugcaucacauuuaaaagcaucucagccuaccaugagaauaagagaaagaaaaugaagaucaauagcuuauucaucucuuuuucuuuuucguugguguaaagccaacacccugucuaaaaaacauaaauuucuuuaaucauuuugccucuuuucucugugcuucaauuaauaaaaaauggaaagaaccuagaucuaaaaaaaaaaaaaaaaaaaaaaaaaaaaaaaaaaaaaaaaaaaaaaaaaaaaaaaaaaaaaaaaugcaucccccccccccccccccccccccccccccccaaaggcucuuuucagagccaccagaauu

SEQ ID NO: 1195 - RNA, 964 nt, Artificial Sequence
  mRNA Design i-2 (A64-N5-C30-hSL-N5) comprising derived and/or modified sequence from Pf(3D7)__XP_001351122.1__HsALB_Pf-CSP(98-272) (opt11)
ggggcgcugccuacggagguggcagccaucuccuucucggcaucaagcuuaccaugaaauggguaaccuucauaagccuacucuuccuauucucaucagccuacagcgcagacggaaacccagaccccaacgcaaacccaaacguagacccaaacgcaaacccaaacguagaccccaacgcaaacccaaacguagacccaaacgccaacccaaacgcaaacccaaacgcaaacccaaacgccaacccaaacgcaaacccaaacgccaacccaaacgcaaacccaaacgcaaacccaaacgcaaacccaaacgcaaacccaaacgcaaacccaaacgcaaacccaaacgccaacccaaacgcaaacccaaacgcaaacccaaacgcaaacccaaacgccaaccccaacguagacccaaacgccaaccccaacgcaaacccaaacgcaaacccaaacgcaaacccaaacgcaaacccaaacgcaaacccaaacgcaaacccaaacgcaaacccaaacgcaaacccgaacgccaacccaaacgcaaacccaaacgcaaacccaaacgcaaacccaaacgcaaacccaaacgcaaaccccaacgcaaacccaaacgcaaacccaaacgcaaacccauaaggacuagugcaucacauuuaaaagcaucucagccuaccaugagaauaagagaaagaaaaugaagaucaauagcuuauucaucucuuuuucuuuuucguugguguaaagccaacacccugucuaaaaaacauaaauuucuuuaaucauuuugccucuuuucucugugcuucaauuaauaaaaaauggaaagaaccuagaucuaaaaaaaaaaaaaaaaaaaaaaaaaaaaaaaaaaaaaaaaaaaaaaaaaaaaaaaaaaaaaaaaugcaucccccccccccccccccccccccccccccccaaaggcucuuuucagagccaccagaauu

SEQ ID NO: 1196 - RNA, 1270 nt, Artificial Sequence
  mRNA Design i-2 (A64-N5-C30-hSL-N5) comprising derived and/or modified sequence from Pf(3D7)__XP_001351122.1__HsALB_Pf-CSP(98-374) (opt11)
ggggcgcugccuacggagguggcagccaucuccuucucggcaucaagcuuaccaugaaauggguaaccuucauaucccuacucuuccuuuucuccucggccuacuccgcagacggaaacccagacccaaacgcaaaccccaacguagacccaaacgcaaacccaaauguagacccaaacgcaaacccaaacguggacccaaacgcgaaccccaacgcaaaccccaacgcaaacccaaacgccaacccaaacgcaaacccaaacgccaacccaaacgcaaaccccaacgccaaccccaacgccaacccaaacgcaaacccaaacgcaaaccccaacgcaaacccaaacgccaacccaaacgccaacccaaacgccaaccccaacgcaaacccaaacgccaacccaaacguagacccaaacgcaaacccaaacgcaaacccaaacgcaaaccccaacgcaaaccccaacgcaaacccaaacgcaaacccaaacgcaaacccaaacgcaaacccaaacgccaacccaaacgcgaaccccaacgccaacccaaacgcaaacccaaacgccaacccaaacgccaacccaaacgcaaaccccaacgcaaacccaaacgcaaacccaaacgccaacccgaacaaaaacaaccaaggcaacggccaaggacacaacaugccaaacgaccccaaccgcaacguagacgaaaacgccaacgcaaacuccgcagucaaaaacaacaacaacgaagaacccuccgacaaacacauaaaagaauaccuaaacaaaauccaaaacucgcucucaaccgaauggucccccugcuccgucaccugcggcaacggcauccaaguacgcaucaaaccaggcucagcaaacaaaccaaaagacgaacucgacuacgccaacgacauagaaaaaaaaauaugcaaaauggagaaaugcuaaggacuagugcaucacauuuaaaagcaucucagccuaccaugagaauaagagaaagaaaaugaagaucaauagcuuauucaucucuuuuucuuuuucguugguguaaagccaacacccugucuaaaaaacauaaauuucuuuaaucauuuugccucuuuucucugugcuucaauuaauaaaaaauggaaagaaccuagaucuaaaaaaaaaaaaaaaaaaaaaaaaaaaaaaaaaaaaaaaaaaaaaaaaaaaaaaaaaaaaaaaaugcaucccccccccccccccccccccccccccccccaaaggcucuuuucagagccaccagaauu

SEQ ID NO: 1197 - RNA, 1339 nt, Artificial Sequence
  mRNA Design i-2 (A64-N5-C30-hSL-N5) comprising derived and/or modified sequence from Pf(3D7)__XP_001351122.1__HsALB_Pf-CSP(98-397) (opt11)
ggggcgcugccuacggagguggcagccaucuccuucucggcaucaagcuuaccaugaaauggguaaccuucaucagccuacuauuccuauucagcuccgccuacagcgccgacggaaacccagacccaaacgccaaccccaacgucgacccaaacgccaaccccaacguagacccaaacgccaaccccaacgucgaccccaacgccaaccccaacgccaacccaaacgccaacccuaacgccaacccaaacgccaacccgaacgccaaccccaacgcgaacccaaacgccaacccaaacgcaaaccccaacgccaaccccaacgccaaccccaacgcaaaccccaacgcaaacccaaacgccaacccaaacgccaaccccaacgccaaccccaaugcaaacccaaacgucgaccccaacgccaacccaaacgccaaccccaacgccaaccccaacgccaaccccaacgcaaaccccaacgccaaccccaacgcgaaccccaacgccaaccccaacgccaacccaaacgccaaccccaacgccaaccccaacgccaaccccaacgcuaaccccaacgcaaacccaaacgccaacccaaacgccaacccaaacgccaaccccaacgccaacccaaacaaaaacaaccaaggcaacggacaaggacacaacaugccaaacgaccccaaccgcaacgucgacgaaaaugccaacgccaacuccgccgucaaaaacaacaacaacgaagaacccuccgacaaacacaucaaagaauaccuaaacaaaauacaaaacucucucucaaccgaauggucccccugcuccgucacaugcggcaacggcauccaaguccgcaucaaaccaggaucagccaauaaacccaaagacgaacucgacuacgccaacgacauagaaaaaaaaaucugcaaaauggaaaaaugcagcucagucuucaacgucgucaacuccucaaucggacuuauaaugguccuauccuuccucuuccuuaacuaaggacuagugcaucacauuuaaaagcaucucagccuaccaugagaauaagagaaagaaaaugaagaucaauagcuuauucaucucuuuuucuuuuucguugguguaaagccaacacccugucuaaaaaacauaaauuucuuuaaucauuuugccucuuuucucugugcuucaauuaauaaaaaauggaaagaaccuagaucuaaaaaaaaaaaaaaaaaaaaaaaaaaaaaaaaaaaaaaaaaaaaaaaaaaaaaaaaaaaaaaaaugcaucccccccccccccccccccccccccccccccaaaggcucuuuucagagccaccagaauu

SEQ ID NO: 1198 - RNA, 1666 nt, Artificial Sequence
  mRNA Design i-2 (A64-N5-C30-hSL-N5) comprising derived and/or modified sequence from Pf(3D7)__XP_001351122.1__HsALB_Pf-CSP(199-377)_L(PVTN)_HBsAg (opt11)
ggggcgcugccuacggagguggcagccaucuccuucucggcaucaagcuuaccaugaaaugggucacauucaucucgcuccucuuccuauucuccuccgccuacuccgacccuaacgccaaucccaacgccaaccccaacgccaaccccaacgccaaccccaacgccaaccccaaugcaaacccaaacgcaaaccccaacgccaaccccaacgcaaacccaaaugcaaaccccaacgcaaaccccaacgccaaccccaaugccaaccccaacgcuaaccccaacgccaauccaaacgccaaccccaacgcaaaccccaacgccaacccuaacaaaaauaaccaaggcaacggccaaggacacaacaugcccaacgaccccaaccgaaaugucgacgaaaacgcuaacgcuaacagcgccgucaaaaacaacaacaacgaagaacccuccgacaaacacauuaaagaauaccucaacaaaauccaaaacucccucuccaccgaauggucccccugcucuguaacuugcggcaacggcauccaaguccgcauaaaacccggaucagcaaacaaacccaaagacgaacucgacuacgcaaacgacauugagaagaaaaucugcaaaauggaaaaaugcucaucaguacccgucacuaacauggaaaacaucaccuccggcuuccucggcccccuccuaguccuacaagccgguuucuuccuucuuacacgcauccuaaccaucccacaaucccuagacuccugguggacaucuuuaaacuuccuuggaggauccccugucugccucggccaaaacucccaauccccaaccucuaaccacucucccacauccugcccucccauaugccccgguuaccgcuggaugugccuccgccgcuucaucaucuuccucuucauacuccucuuaugccucaucuuccuccucguacuacucgacuaccaagguaugcuacccguaugcccucucauccccggcuccaccacaaccaacaccggccccugcaaaacaugcaccacccccgcacagggcaauuccauguuccccuccugcuguugcaccaaacccacagacggcaacuguaccugcauccccauccccuccucuugggcauuugccaaauaccucugggaaugggccuccguccgauucucuuggcuuucacuccucguucccuucguacaaugguucgucggccuaucacccaccgucuggcucuccgccaucuggaugaugugguacuggggcccuucacuuuacuccauagucagccccuucauaccacuccuccccaucuucuucugccuauggguauacaucuaaggacuagugcaucacauuuaaaagcaucucagccuaccaugagaauaagagaaagaaaaugaagaucaauagcuuauucaucucuuuuucuuuuucguugguguaaagccaacacccugucuaaaaaacauaaauuucuuuaaucauuuugccucuuuucucugugcuucaauuaauaaaaaauggaaagaaccuagaucuaaaaaaaaaaaaaaaaaaaaaaaaaaaaaaaaaaaaaaaaaaaaaaaaaaaaaaaaaaaaaaaaugcaucccccccccccccccccccccccccccccccaaaggcucuuuucagagccaccagaauu

SEQ ID NO: 1199 - RNA, 1405 nt, Artificial Sequence
  mRNA Design i-2 (A64-N5-C30-hSL-N5) comprising derived and/or modified sequence from Pb(ANKA)__XP_022712148.1__Pb-CSP (opt11)
ggggcgcugccuacggagguggcagccaucuccuucucggcaucaagcuuaccaugaaaaaaugcaccauccucgucguagccucccuccuccuagucaacucccuccuccccggauacgggcaaaacaaaucaauucaagcccaacgcaaccucaacgaacucugcuacaacgaaggcaacgacaacaaacuauaccacguacucaacuccaaaaacgguaaaaucuacaaccgcaacacugucaaccgccuacucgccgacgcccccgaaggcaaaaaaaacgaaaaaaaaaacgaaaaaaucgaacgcaacaacaaacucaaacaacccccacccccaccaaaccccaacgacccccccccccccaaucccaaugaccccccaccccccaaccccaacgaccccccccccccaaaccccaacgacccccccccccccaacgccaacgauccaccuccucccaacgcaaacgacccagcaccuccaaacgccaacgaccccgcccccccaaacgcaaacgacccagcccccccaaacgcaaacgaccccgccccccccaacgccaacgacccacccccccccaaccccaacgacccagccccccccaaugccaacgacccccccccucccaaccccaacgaccccgcccccccacaaggaaacaacaacccacaaccccaaccacgaccccaaccccaaccccaaccccaaccacaaccacaaccccaaccccaaccacaaccccgaccacaaccccaaccccaacccggcggcaacaacaacaacaaaaacaacaacaacgacgacuccuacaucccauccgccgaaaaaauccucgaauucgucaaacaaauacgcgacuccauaaccgaagaauggucccaaugcaacgugaccugcggcucaggcauccgaguccgcaaacgcaaaggaucuaacaaaaaagccgaagaccucacccuagaagacaucgacaccgaaaucugcaaaauggacaaaugcuccuccauauucaacaucgucucaaacucacucggcuuugucauccuccucguacucgucuucuucaacuaaggacuagugcaucacauuuaaaagcaucucagccuaccaugagaauaagagaaagaaaaugaagaucaauagcuuauucaucucuuuuucuuuuucguugguguaaagccaacacccugucuaaaaaacauaaauuucuuuaaucauuuugccucuuuucucugugcuucaauuaauaaaaaauggaaagaaccuagaucuaaaaaaaaaaaaaaaaaaaaaaaaaaaaaaaaaaaaaaaaaaaaaaaaaaaaaaaaaaaaaaaaugcaucccccccccccccccccccccccccccccccaaaggcucuuuucagagccaccagaauu

SEQ ID NO: 1200 - RNA, 1570 nt, Artificial Sequence
  mRNA Design i-2 (A64-N5-C30-hSL-N5) comprising derived and/or modified sequence from Pb(ANKA)__XP_022712148.1__Pb-CSP_L(G4SG4)_TM domain HA (opt11)
ggggcgcugccuacggagguggcagccaucuccuucucggcaucaagcuuaccaugaaaaaaugcacaauccuugucguagccucccuacuacucguaaacucacuccuacccggauacggccaaaacaaaucuauccaagcccaacguaaccuuaaugaacuaugcuacaacgaaggcaacgacaacaaacuuuaccacguccugaacuccaaaaacggcaaaaucuacaaccggaacaccguaaaucgccugcucgcugacgcaccagaaggaaaaaaaaacgaaaaaaaaaacgaaaaaauagagcguaacaacaagcucaaacaaccgcccccccccccaaaccccaacgaccccccccccccuaaccccaacgacccaccgccacccaacccaaacgacccccccccaccaaaccccaacgacccaccaccaccgaacgccaacgacccaccuccccccaacgccaacgacccugcaccccccaacgccaacgaucccgccccccccaacgccaacgacccagcacccccaaacgccaacgauccagcuccccccaacgccaacgaccccccaccccccaaccccaacgacccagcccccccaaacgcuaacgacccccccccccccaacccaaacgacccagcccccccccaaggcaacaacaacccucaaccccaaccccgcccgcaaccccaaccccaaccacaaccacaaccucaaccacaaccacaaccccaaccccgcccacaaccacaaccccaaccaggcggcaacaacaacaacaaaaacaacaacaacgacgacuccuacauccccucagcagaaaaaauccucgaguucgucaaacaaauccgcgacucuaucacagaagaauggucccaaugcaacguaaccugcggcucaggcauccgcguccgaaaacgaaaaggcucaaacaaaaaagccgaagaccucacacucgaagacaucgacaccgaaauaugcaaaauggacaaaugcuccuccauauucaacaucgucucaaacucucucgguuucgucaucuuacucguccucguauucuucaacggcggcggaggcuccggcggaggaggcaaacuagaauccaccagaaucuaccaaauccucgccauauacucuaccgucgccagcucccuuguccucguggucucccucggagcaaucuccuucuggaugugcucuaacggcucacuccaaugccguaucugcauuuaaggacuagugcaucacauuuaaaagcaucucagccuaccaugagaauaagagaaagaaaaugaagaucaauagcuuauucaucucuuuuucuuuuucguugguguaaagccaacacccugucuaaaaaacauaaauuucuuuaaucauuuugccucuuuucucugugcuucaauuaauaaaaaauggaaagaaccuagaucuaaaaaaaaaaaaaaaaaaaaaaaaaaaaaaaaaaaaaaaaaaaaaaaaaaaaaaaaaaaaaaaaugcaucccccccccccccccccccccccccccccccaaaggcucuuuucagagccaccagaauu

SEQ ID NO: 1201 - RNA, 1390 nt, Artificial Sequence
  mRNA Design i-2 (A64-N5-C30-hSL-N5) comprising derived and/or modified sequence from Pb(ANKA)__XP_022712148.1__HsALB_Pb-CSP(24-340) (opt11)
ggggcgcugccuacggagguggcagccaucuccuucucggcaucaagcuuaccaugaaaugggucaccuucaucucccuacuauuccucuuuucauccgcuuacucacaaaacaaauccauccaagcccaacgcaaccucaaugaacuaugcuacaacgaaggcaacgacaacaaacucuaccacguccucaacucaaaaaacggaaaaauauacaaccgcaacaccguaaaccgccuacuagccgacgcccccgaaggcaaaaaaaacgaaaaaaaaaacgaaaaaaucgaacgcaacaacaaacuaaaacaacccccccccccccccaaccccaacgacccccccccccccaaccccaacgaccccccacccccaaacccaaacgaccccccuccccccaacccaaacgaccccccaccccccaacgcaaacgacccccccccacccaacgccaacgaccccgccccccccaacgccaacgaucccgccccccccaacgccaacgaccccgccccccccaacgccaacgacccagccccccccaacgcaaacgacccccccccccccaaccccaacgaccccgcaccccccaacgccaacgacccacccccacccaaccccaacgaccccgcacccccacaaggaaacaacaacccccaaccccaaccccgaccccaaccccaaccccaaccccaaccccaaccgcaaccccagccacaaccacaaccccgcccucaaccucaaccccaacccggaggaaacaacaacaacaaaaauaacaacaacgaugacuccuacauccccuccgcagaaaaaauacucgaauucguaaaacaaauccgcgacucaaucaccgaagaauggucccaaugcaacguaaccugcggcuccggcauccgcguccgcaaacgcaaaggcuccaacaagaaagccgaagaccucacacuggaagacauagacaccgaaauaugcaaaauggauaaaugcuccuccaucuucaacaucgucuccaacucucucggcuucguaauacuucucguucucguauucuucaacuaaggacuagugcaucacauuuaaaagcaucucagccuaccaugagaauaagagaaagaaaaugaagaucaauagcuuauucaucucuuuuucuuuuucguugguguaaagccaacacccugucuaaaaaacauaaauuucuuuaaucauuuugccucuuuucucugugcuucaauuaauaaaaaauggaaagaaccuagaucuaaaaaaaaaaaaaaaaaaaaaaaaaaaaaaaaaaaaaaaaaaaaaaaaaaaaaaaaaaaaaaaaugcaucccccccccccccccccccccccccccccccaaaggcucuuuucagagccaccagaauu

SEQ ID NO: 1202 - RNA, 1408 nt, Artificial Sequence
  mRNA Design i-2 (A64-N5-C30-hSL-N5) comprising derived and/or modified sequence from Pb(ANKA)__XP_022712148.1__HsIns-iso1_Pb-CSP(24-340) (opt11)
ggggcgcugccuacggagguggcagccaucuccuucucggcaucaagcuuaccauggcccucuggaugcgacuacucccccuccucgcacuccuagcccucuggggccccgaccccgccgccgcacaaaacaaauccauccaagcccaacgcaaccucaaugaacucugcuacaacgaaggcaacgacaacaaacucuaccacguccucaacucaaaaaacggaaaaaucuacaaccgaaacaccgucaaccgccuccuugccgacgccccagaaggcaaaaaaaacgagaaaaaaaaugaaaaaaucgaacgcaacaacaaacucaaacaaccccccccccccccgaacccuaacgacccccccccccccaaccccaaugaccccccacccccaaacccgaacgaccccccaccccccaaccccaacgaccccccucccccuaacgcaaacgacccuccaccccccaacgccaacgaccccgccccaccaaacgccaaugaccccgccccaccaaacgcaaacgauccagcccccccaaacgcaaacgaccccgcaccacccaacgcaaacgacccccccccccccaaccccaacgaccccgcccccccaaacgccaacgaccccccaccacccaaccccaacgaccccgcacccccacaaggcaacaacaacccacaaccacaaccccgcccccaaccccaaccacaaccccaaccccaaccccaaccacaaccacaaccacaaccccgcccccaaccccaaccccaacccggcggcaacaacaacaacaaaaacaacaauaacgacgacucuuacauccccucagccgaaaaaauacucgaauucgucaaacaaauccgcgacuccaucaccgaagaauggucacaaugcaacgucaccugcggaucaggcauccgaguacgcaaacgcaaaggcuccaacaaaaaagccgaagaccucacccucgaagacaucgacaccgaaauuugcaaaauggacaagugcuccuccauauucaacaucguuucaaacucauuaggauucgucauccuccucguccucgucuucuucaacuaaggacuagugcaucacauuuaaaagcaucucagccuaccaugagaauaagagaaagaaaaugaagaucaauagcuuauucaucucuuuuucuuuuucguugguguaaagccaacacccugucuaaaaaacauaaauuucuuuaaucauuuugccucuuuucucugugcuucaauuaauaaaaaauggaaagaaccuagaucuaaaaaaaaaaaaaaaaaaaaaaaaaaaaaaaaaaaaaaaaaaaaaaaaaaaaaaaaaaaaaaaaugcaucccccccccccccccccccccccccccccccaaaggcucuuuucagagccaccagaauu

SEQ ID NO: 1203 - RNA, 1387 nt, Artificial Sequence
  mRNA Design i-2 (A64-N5-C30-hSL-N5) comprising derived and/or modified sequence from Pb(ANKA)__XP_022712148.1__HsSPARC_Pb-CSP(24-340) (opt11)
ggggcgcugccuacggagguggcagccaucuccuucucggcaucaagcuuaccaugcgcgccuggaucuucuuccuccucugccuugccggccgcgcacuagcccaaaacaaaucuauccaagcccaacgcaaccucaacgaacucugcuacaacgaaggaaacgacaacaaacucuaccauguacucaacuccaaaaacggaaaaaucuacaaccgcaacaccguaaaccgccuacucgcugacgccccugaaggcaaaaaaaacgaaaaaaaaaacgaaaaaaucgaacgcaacaacaaacucaaacaaccuccccccccccccaacccaaacgacccccccccucccaacccaaacgaccccccacccccaaaccccaacgacccccccccccccaacccaaacgacccccccccccccaacgccaacgacccccccccccccaacgccaacgaccccgccccaccaaacgcaaacgauccagcaccccccaacgccaacgaccccgcaccccccaacgcaaacgaccccgccccccccaacgccaacgaccccccgccaccuaacccaaacgacccagcaccccccaacgccaacgaucccccaccccccaaccccaacgacccagcccccccccaaggaaacaacaacccacaaccccaaccccgcccucaaccacaaccacaaccccaaccucaaccccaaccucaaccccaaccccaaccacgaccacaaccccaaccacaaccuggcggcaacaacaacaacaaaaacaacaacaacgacgacucauacaucccauccgcagaaaaaauacucgaauucguaaaacaaaucagagacuccauaacagaagaauggucccaaugcaacgucacuugcggcucaggcauacgcguccgcaaacgcaagggcuccaacaaaaaagccgaagaccuaacacucgaagacaucgacacagaaaucugcaaaauggacaaaugcucaucaaucuucaacaucguauccaacucacucggcuucguaauccuccucguccucgucuucuucaacuaaggacuagugcaucacauuuaaaagcaucucagccuaccaugagaauaagagaaagaaaaugaagaucaauagcuuauucaucucuuuuucuuuuucguugguguaaagccaacacccugucuaaaaaacauaaauuucuuuaaucauuuugccucuuuucucugugcuucaauuaauaaaaaauggaaagaaccuagaucuaaaaaaaaaaaaaaaaaaaaaaaaaaaaaaaaaaaaaaaaaaaaaaaaaaaaaaaaaaaaaaaaugcaucccccccccccccccccccccccccccccccaaaggcucuuuucagagccaccagaauu

SEQ ID NO: 1204 - RNA, 1390 nt, Artificial Sequence
  mRNA Design i-2 (A64-N5-C30-hSL-N5) comprising derived and/or modified sequence from Pb(ANKA)__XP_022712148.1__IgE_Pb-CSP(24-340) (opt11)
ggggcgcugccuacggagguggcagccaucuccuucucggcaucaagcuuaccauggacuggaccuggauccuuuuccuaguagccgccgcaacccgcguccacucacaaaacaaauccauccaagcacagcguaaccucaacgaacucuguuacaacgagggcaacgacaacaaacuauaccacguccugaacuccaaaaacggcaaaaucuacaaccgcaacaccguaaaccgucuccucgccgacgccccagaaggcaaaaaaaaugaaaaaaaaaacgaaaaaaucgaacgaaacaacaaacuaaaacaacccccccccccccccaaccccaacgacccccccccccccaaccccaacgauccccccccccccaaccccaacgacccccccccccccaaucccaacgacccccccccccccaacgcaaacgaccccccccccccuaaugccaacgacccagcaccccccaacgccaacgaccccgccccccccaacgcaaacgaccccgccccccccaacgccaacgaccccgccccaccuaacgcaaacgacccacccccccccaaccccaacgaccccgccccccccaacgcuaacgacccccccccccccaacccaaacgacccagcacccccacaaggcaacaacaacccacaaccccaaccccgcccccaaccucaaccacaaccccaaccacaaccccaaccccaaccccaaccccaaccccgcccacaaccccaaccucaacccggcggcaacaacaacaacaaaaacaacaacaacgacgacuccuacauaccauccgccgaaaaaauccucgaauucgucaaacaaauccgcgacucaaucaccgaagaauggucacaaugcaacgucaccugcggcuccgguauccgcguaagaaaacgcaaaggaucaaacaaaaaagccgaagaccucacccucgaagacauagacaccgaaaucugcaaaauggacaaauguucauccaucuuuaacaucgucuccaacucacucggauucguaauacuacuaguccuaguauucuucaacuaaggacuagugcaucacauuuaaaagcaucucagccuaccaugagaauaagagaaagaaaaugaagaucaauagcuuauucaucucuuuuucuuuuucguugguguaaagccaacacccugucuaaaaaacauaaauuucuuuaaucauuuugccucuuuucucugugcuucaauuaauaaaaaauggaaagaaccuagaucuaaaaaaaaaaaaaaaaaaaaaaaaaaaaaaaaaaaaaaaaaaaaaaaaaaaaaaaaaaaaaaaaugcaucccccccccccccccccccccccccccccccaaaggcucuuuucagagccaccagaauu

SEQ ID NO: 1205 - RNA, 1580 nt, Artificial Sequence
  mRNA Design i-2 (A64-N5-C30-hSL-N5) comprising derived and/or modified sequence from Pf(3D7)__XP_001351122.1__Pf-CSP (wt)
aggagaggcgcugccuacggagguggcagccaucuccuucucggcaucaagcuuaccaugaugagaaaauuagcuauuuuaucuguuucuuccuuuuuauuuguugaggccuuauuccaggaauaccagugcuauggaaguucgucaaacacaaggguucuaaaugaauuaaauuaugauaaugcaggcacuaauuuauauaaugaauuagaaaugaauuauuaugggaaacaggaaaauugguauagucuuaaaaaaaauaguagaucacuuggagaaaaugaugauggaaauaacgaagacaacgagaaauuaaggaaaccaaaacauaaaaaauuaaagcaaccagcggaugguaauccugauccaaaugcaaacccaaauguagaucccaaugccaacccaaauguagauccaaaugcaaacccaaauguagauccaaaugcaaacccaaaugcaaacccaaaugcaaacccaaaugcaaacccaaaugcaaacccaaaugcaaacccaaaugcaaacccaaaugcaaacccaaaugcaaacccaaaugcaaacccaaaugcaaacccaaaugcaaacccaaaugcaaacccaaaugcaaaccccaaugcaaauccuaaugcaaacccaaaugcaaacccaaacguagauccuaaugcaaauccaaaugcaaacccaaacgcaaaccccaaugcaaauccuaaugcaaaccccaaugcaaauccuaaugcaaauccuaaugccaauccaaaugcaaauccaaaugcaaacccaaacgcaaaccccaaugcaaauccuaaugccaauccaaaugcaaauccaaaugcaaacccaaaugcaaacccaaaugcaaaccccaaugcaaauccuaauaaaaacaaucaagguaauggacaaggucacaauaugccaaaugacccaaaccgaaauguagaugaaaaugcuaaugccaacagugcuguaaaaaauaauaauaacgaagaaccaagugauaagcacauaaaagaauauuuaaacaaaauacaaaauucucuuucaacugaaugguccccauguaguguaacuuguggaaaugguauucaaguuagaauaaagccuggcucugcuaauaaaccuaaagacgaauuagauuaugcaaaugauauugaaaaaaaaauuuguaaaauggaaaaauguuccaguguguuuaaugucguaaauaguucaauaggauuaauaaugguauuauccuucuuguuccuuaauuagggacuagugcaucacauuuaaaagcaucucagccuaccaugagaauaagagaaagaaaaugaagaucaauagcuuauucaucucuuuuucuuuuucguugguguaaagccaacacccugucuaaaaaacauaaauuucuuuaaucauuuugccucuuuucucugugcuucaauuaauaaaaaauggaaagaaccuagaucuaaaaaaaaaaaaaaaaaaaaaaaaaaaaaaaaaaaaaaaaaaaaaaaaaaaaaaaaaaaaaaaaugcaucccccccccccccccccccccccccccccccaaaggcucuuuucagagccaccagaauu

SEQ ID NO: 1206 - RNA, 1511 nt, Artificial Sequence
  mRNA Design i-2 (A64-N5-C30-hSL-N5) comprising derived and/or modified sequence from Pf(3D7)__XP_001351122.1__Pf-CSP(1-374) (wt)
aggagaggcgcugccuacggagguggcagccaucuccuucucggcaucaagcuuaccaugaugagaaaauuagcuauuuuaucuguuucuuccuuuuuauuuguugaggccuuauuccaggaauaccagugcuauggaaguucgucaaacacaaggguucuaaaugaauuaaauuaugauaaugcaggcacuaauuuauauaaugaauuagaaaugaauuauuaugggaaacaggaaaauugguauagucuuaaaaaaaauaguagaucacuuggagaaaaugaugauggaaauaacgaagacaacgagaaauuaaggaaaccaaaacauaaaaaauuaaagcaaccagcggaugguaauccugauccaaaugcaaacccaaauguagaucccaaugccaacccaaauguagauccaaaugcaaacccaaauguagauccaaaugcaaacccaaaugcaaacccaaaugcaaacccaaaugcaaacccaaaugcaaacccaaaugcaaacccaaaugcaaacccaaaugcaaacccaaaugcaaacccaaaugcaaacccaaaugcaaacccaaaugcaaacccaaaugcaaacccaaaugcaaaccccaaugcaaauccuaaugcaaacccaaaugcaaacccaaacguagauccuaaugcaaauccaaaugcaaacccaaacgcaaaccccaaugcaaauccuaaugcaaaccccaaugcaaauccuaaugcaaauccuaaugccaauccaaaugcaaauccaaaugcaaacccaaacgcaaaccccaaugcaaauccuaaugccaauccaaaugcaaauccaaaugcaaacccaaaugcaaacccaaaugcaaaccccaaugcaaauccuaauaaaaacaaucaagguaauggacaaggucacaauaugccaaaugacccaaaccgaaauguagaugaaaaugcuaaugccaacagugcuguaaaaaauaauaauaacgaagaaccaagugauaagcacauaaaagaauauuuaaacaaaauacaaaauucucuuucaacugaaugguccccauguaguguaacuuguggaaaugguauucaaguuagaauaaagccuggcucugcuaauaaaccuaaagacgaauuagauuaugcaaaugauauugaaaaaaaaauuuguaaaauggaaaaauguugaggacuagugcaucacauuuaaaagcaucucagccuaccaugagaauaagagaaagaaaaugaagaucaauagcuuauucaucucuuuuucuuuuucguugguguaaagccaacacccugucuaaaaaacauaaauuucuuuaaucauuuugccucuuuucucugugcuucaauuaauaaaaaauggaaagaaccuagaucuaaaaaaaaaaaaaaaaaaaaaaaaaaaaaaaaaaaaaaaaaaaaaaaaaaaaaaaaaaaaaaaaugcaucccccccccccccccccccccccccccccccaaaggcucuuuucagagccaccagaauu

SEQ ID NO: 1207 - RNA, 1364 nt, Artificial Sequence
  mRNA Design i-2 (A64-N5-C30-hSL-N5) comprising derived and/or modified sequence from Pf(3D7)__XP_001351122.1__Pf-CSP(1-325) (wt)
aggagaggcgcugccuacggagguggcagccaucuccuucucggcaucaagcuuaccaugaugagaaaauuagcuauuuuaucuguuucuuccuuuuuauuuguugaggccuuauuccaggaauaccagugcuauggaaguucgucaaacacaaggguucuaaaugaauuaaauuaugauaaugcaggcacuaauuuauauaaugaauuagaaaugaauuauuaugggaaacaggaaaauugguauagucuuaaaaaaaauaguagaucacuuggagaaaaugaugauggaaauaacgaagacaacgagaaauuaaggaaaccaaaacauaaaaaauuaaagcaaccagcggaugguaauccugauccaaaugcaaacccaaauguagaucccaaugccaacccaaauguagauccaaaugcaaacccaaauguagauccaaaugcaaacccaaaugcaaacccaaaugcaaacccaaaugcaaacccaaaugcaaacccaaaugcaaacccaaaugcaaacccaaaugcaaacccaaaugcaaacccaaaugcaaacccaaaugcaaacccaaaugcaaacccaaaugcaaacccaaaugcaaaccccaaugcaaauccuaaugcaaacccaaaugcaaacccaaacguagauccuaaugcaaauccaaaugcaaacccaaacgcaaaccccaaugcaaauccuaaugcaaaccccaaugcaaauccuaaugcaaauccuaaugccaauccaaaugcaaauccaaaugcaaacccaaacgcaaaccccaaugcaaauccuaaugccaauccaaaugcaaauccaaaugcaaacccaaaugcaaacccaaaugcaaaccccaaugcaaauccuaauaaaaacaaucaagguaauggacaaggucacaauaugccaaaugacccaaaccgaaauguagaugaaaaugcuaaugccaacagugcuguaaaaaauaauaauaacgaagaaccaagugauaagcacauaaaagaauauuuaaacaaaauacaaaauugaggacuagugcaucacauuuaaaagcaucucagccuaccaugagaauaagagaaagaaaaugaagaucaauagcuuauucaucucuuuuucuuuuucguugguguaaagccaacacccugucuaaaaaacauaaauuucuuuaaucauuuugccucuuuucucugugcuucaauuaauaaaaaauggaaagaaccuagaucuaaaaaaaaaaaaaaaaaaaaaaaaaaaaaaaaaaaaaaaaaaaaaaaaaaaaaaaaaaaaaaaaugcaucccccccccccccccccccccccccccccccaaaggcucuuuucagagccaccagaauu

SEQ ID NO: 1208 - RNA, 1409 nt, Artificial Sequence
  mRNA Design i-2 (A64-N5-C30-hSL-N5) comprising derived and/or modified sequence from Pb(ANKA)__XP_022712148.1__Pb-CSP (wt)
aggagaggcgcugccuacggagguggcagccaucuccuucucggcaucaagcuuaccaugaagaaguguaccauuuuaguuguagcgucacuuuuauuaguuaauucucuacuuccaggauauggacaaaauaaaagcauccaagcccaaaggaacuuaaacgagcuauguuacaaugaaggaaaugauaauaaauuguaucacgugcuuaacucuaagaauggaaaaauauacaaucgaaauacagucaacagauuacuugccgaugcucccgaaggaaaaaaaaaugagaaaaaaaacgaaaaaauagagcguaauaauaaauugaaacaaccaccaccaccaccaaacccaaaugacccaccaccaccaaacccaaaugacccaccaccaccaaacccaaaugacccaccaccaccaaacccaaaugacccaccaccaccaaacgcaaaugacccaccaccaccaaacgcaaaugacccagcaccaccaaacgcaaaugacccagcaccaccaaacgcaaaugacccagcaccaccaaacgcaaaugacccagcaccaccaaacgcaaaugacccaccaccaccaaacccaaaugacccagcaccaccaaacgcaaaugacccaccaccaccaaacccaaaugacccagcaccaccacaaggaaauaacaauccacaaccacagccacggccgcagccacaaccacagccacagccacaaccacagccacagccacaaccacagccacgaccacagccacaaccacagccaggugguaauaacaauaacaaaaauaauaauaaugacgauucuuauaucccaagcgcggaaaaaauacuagaauuuguuaaacagaucagggauaguaucacagaggaauggucucaauguaacguaacaugugguucugguauaagaguuagaaaacgaaaagguucaaauaagaaagcagaagauuugaccuuagaagauauugauacugaaauuuguaaaauggauaaauguucaaguauauuuaauauuguaagcaauucauuaggauuuguaauauuauuaguauuaguauucuuuaauuaaggacuagugcaucacauuuaaaagcaucucagccuaccaugagaauaagagaaagaaaaugaagaucaauagcuuauucaucucuuuuucuuuuucguugguguaaagccaacacccugucuaaaaaacauaaauuucuuuaaucauuuugccucuuuucucugugcuucaauuaauaaaaaauggaaagaaccuagaucuaaaaaaaaaaaaaaaaaaaaaaaaaaaaaaaaaaaaaaaaaaaaaaaaaaaaaaaaaaaaaaaaugcaucccccccccccccccccccccccccccccccaaaggcucuuuucagagccaccagaauu

SEQ ID NO: 1209 - RNA, 1580 nt, Artificial Sequence
  mRNA Design i-2 (A64-N5-C30-hSL-N5) comprising derived and/or modified sequence from Pf(3D7)__XP_001351122.1__Pf-CSP (opt1)
aggagaggcgcugccuacggagguggcagccaucuccuucucggcaucaagcuuaccaugaugcgcaagcuggccauccucagcguguccagcuuccuguucgucgaggcccuguuccaggaguaccagugcuacggcuccagcuccaacacccgggugcucaacgagcugaacuacgacaacgcggggaccaaccuguacaacgagcucgagaugaacuacuacggcaagcaggagaacugguacagccugaagaagaacucccgcagccugggggagaacgacgacggcaacaacgaggacaacgagaagcuccggaagcccaagcacaagaagcugaagcagccggccgacgggaaccccgaccccaacgccaaccccaacguggacccgaacgccaaccccaacgucgaccccaacgccaaccccaacguggacccgaacgcgaaccccaacgccaaccccaacgccaaccccaacgccaacccgaacgcgaaccccaacgccaaccccaacgccaaccccaacgccaacccgaacgccaaccccaacgcgaaccccaacgccaaccccaacgccaacccgaacgccaaccccaacgccaaccccaacgcgaaccccaacgccaacccgaacgccaaccccaacguggaccccaacgccaaccccaacgccaacccgaacgcgaaccccaacgccaaccccaacgccaacccgaacgccaaccccaacgccaaccccaacgcgaaccccaacgccaacccgaacgccaaccccaacgccaaccccaacgcgaaccccaacgccaacccgaacgccaaccccaacgccaaccccaacgccaaccccaacgcgaacccgaacgccaaccccaacaagaacaaccagggcaacggccaggggcacaacaugcccaacgaccccaaccgcaacgucgacgagaacgccaacgccaacuccgccgugaagaacaacaacaacgaggagccgagcgacaagcacaucaaggaguaccugaacaagauccagaacucccucagcacggaguggucccccugcagcgugaccugcggcaacgggauccagguccggaucaagcccggcuccgcgaacaagcccaaggacgagcuggacuacgccaacgacaucgagaagaagaucugcaagauggagaagugcagcuccguguucaacguggucaacagcuccaucgggcugaucauggugcucagcuuccuguuccugaacugaggacuagugcaucacauuuaaaagcaucucagccuaccaugagaauaagagaaagaaaaugaagaucaauagcuuauucaucucuuuuucuuuuucguugguguaaagccaacacccugucuaaaaaacauaaauuucuuuaaucauuuugccucuuuucucugugcuucaauuaauaaaaaauggaaagaaccuagaucuaaaaaaaaaaaaaaaaaaaaaaaaaaaaaaaaaaaaaaaaaaaaaaaaaaaaaaaaaaaaaaaaugcaucccccccccccccccccccccccccccccccaaaggcucuuuucagagccaccagaauu

SEQ ID NO: 1210 - RNA, 1511 nt, Artificial Sequence
  mRNA Design i-2 (A64-N5-C30-hSL-N5) comprising derived and/or modified sequence from Pf(3D7)__XP_001351122.1__Pf-CSP(1-374) (opt1)
aggagaggcgcugccuacggagguggcagccaucuccuucucggcaucaagcuuaccaugaugcgcaagcuggccauccucagcguguccagcuuccuguucgucgaggcccuguuccaggaguaccagugcuacggcuccagcuccaacacccgggugcucaacgagcugaacuacgacaacgcggggaccaaccuguacaacgagcucgagaugaacuacuacggcaagcaggagaacugguacagccugaagaagaacucccgcagccugggggagaacgacgacggcaacaacgaggacaacgagaagcuccggaagcccaagcacaagaagcugaagcagccggccgacgggaaccccgaccccaacgccaaccccaacguggacccgaacgccaaccccaacgucgaccccaacgccaaccccaacguggacccgaacgcgaaccccaacgccaaccccaacgccaaccccaacgccaacccgaacgcgaaccccaacgccaaccccaacgccaaccccaacgccaacccgaacgccaaccccaacgcgaaccccaacgccaaccccaacgccaacccgaacgccaaccccaacgccaaccccaacgcgaaccccaacgccaacccgaacgccaaccccaacguggaccccaacgccaaccccaacgccaacccgaacgcgaaccccaacgccaaccccaacgccaacccgaacgccaaccccaacgccaaccccaacgcgaaccccaacgccaacccgaacgccaaccccaacgccaaccccaacgcgaaccccaacgccaacccgaacgccaaccccaacgccaaccccaacgccaaccccaacgcgaacccgaacgccaaccccaacaagaacaaccagggcaacggccaggggcacaacaugcccaacgaccccaaccgcaacgucgacgagaacgccaacgccaacuccgccgugaagaacaacaacaacgaggagccgagcgacaagcacaucaaggaguaccugaacaagauccagaacucccucagcacggaguggucccccugcagcgugaccugcggcaacgggauccagguccggaucaagcccggcuccgcgaacaagcccaaggacgagcuggacuacgccaacgacaucgagaagaagaucugcaagauggagaagugcugaggacuagugcaucacauuuaaaagcaucucagccuaccaugagaauaagagaaagaaaaugaagaucaauagcuuauucaucucuuuuucuuuuucguugguguaaagccaacacccugucuaaaaaacauaaauuucuuuaaucauuuugccucuuuucucugugcuucaauuaauaaaaaauggaaagaaccuagaucuaaaaaaaaaaaaaaaaaaaaaaaaaaaaaaaaaaaaaaaaaaaaaaaaaaaaaaaaaaaaaaaaugcaucccccccccccccccccccccccccccccccaaaggcucuuuucagagccaccagaauu

SEQ ID NO: 1211 - RNA, 1364 nt, Artificial Sequence
  mRNA Design i-2 (A64-N5-C30-hSL-N5) comprising derived and/or modified sequence from Pf(3D7)__XP_001351122.1__Pf-CSP(1-325) (opt1)
aggagaggcgcugccuacggagguggcagccaucuccuucucggcaucaagcuuaccaugaugcgcaagcuggccauccucagcguguccagcuuccuguucgucgaggcccuguuccaggaguaccagugcuacggcuccagcuccaacacccgggugcucaacgagcugaacuacgacaacgcggggaccaaccuguacaacgagcucgagaugaacuacuacggcaagcaggagaacugguacagccugaagaagaacucccgcagccugggggagaacgacgacggcaacaacgaggacaacgagaagcuccggaagcccaagcacaagaagcugaagcagccggccgacgggaaccccgaccccaacgccaaccccaacguggacccgaacgccaaccccaacgucgaccccaacgccaaccccaacguggacccgaacgcgaaccccaacgccaaccccaacgccaaccccaacgccaacccgaacgcgaaccccaacgccaaccccaacgccaaccccaacgccaacccgaacgccaaccccaacgcgaaccccaacgccaaccccaacgccaacccgaacgccaaccccaacgccaaccccaacgcgaaccccaacgccaacccgaacgccaaccccaacguggaccccaacgccaaccccaacgccaacccgaacgcgaaccccaacgccaaccccaacgccaacccgaacgccaaccccaacgccaaccccaacgcgaaccccaacgccaacccgaacgccaaccccaacgccaaccccaacgcgaaccccaacgccaacccgaacgccaaccccaacgccaaccccaacgccaaccccaacgcgaacccgaacgccaaccccaacaagaacaaccagggcaacggccaggggcacaacaugcccaacgaccccaaccgcaacgucgacgagaacgccaacgccaacuccgccgugaagaacaacaacaacgaggagccgagcgacaagcacaucaaggaguaccugaacaagauccagaacugaggacuagugcaucacauuuaaaagcaucucagccuaccaugagaauaagagaaagaaaaugaagaucaauagcuuauucaucucuuuuucuuuuucguugguguaaagccaacacccugucuaaaaaacauaaauuucuuuaaucauuuugccucuuuucucugugcuucaauuaauaaaaaauggaaagaaccuagaucuaaaaaaaaaaaaaaaaaaaaaaaaaaaaaaaaaaaaaaaaaaaaaaaaaaaaaaaaaaaaaaaaugcaucccccccccccccccccccccccccccccccaaaggcucuuuucagagccaccagaauu

SEQ ID NO: 1212 - RNA, 1580 nt, Artificial Sequence
  mRNA Design i-2 (A64-N5-C30-hSL-N5) comprising derived and/or modified sequence from Pf(3D7)__XP_001351122.1__HsALB_Pf-CSP(19-397) (opt1)
aggagaggcgcugccuacggagguggcagccaucuccuucucggcaucaagcuuaccaugaagugggugaccuucaucagccugcucuuccuguucuccagcgccuacucccuguuccaggaguaccagugcuacggcuccagcuccaacacccgggugcucaacgagcugaacuacgacaacgcggggaccaaccuguacaacgagcucgagaugaacuacuacggcaagcaggagaacugguacagccugaagaagaacucccgcagccugggggagaacgacgacggcaacaacgaggacaacgagaagcuccggaagcccaagcacaagaagcugaagcagccggccgacgggaaccccgaccccaacgccaaccccaacguggacccgaacgccaaccccaacgucgaccccaacgccaaccccaacguggacccgaacgcgaaccccaacgccaaccccaacgccaaccccaacgccaacccgaacgcgaaccccaacgccaaccccaacgccaaccccaacgccaacccgaacgccaaccccaacgcgaaccccaacgccaaccccaacgccaacccgaacgccaaccccaacgccaaccccaacgcgaaccccaacgccaacccgaacgccaaccccaacguggaccccaacgccaaccccaacgccaacccgaacgcgaaccccaacgccaaccccaacgccaacccgaacgccaaccccaacgccaaccccaacgcgaaccccaacgccaacccgaacgccaaccccaacgccaaccccaacgcgaaccccaacgccaacccgaacgccaaccccaacgccaaccccaacgccaaccccaacgcgaacccgaacgccaaccccaacaagaacaaccagggcaacggccaggggcacaacaugcccaacgaccccaaccgcaacgucgacgagaacgccaacgccaacuccgccgugaagaacaacaacaacgaggagccgagcgacaagcacaucaaggaguaccugaacaagauccagaacucccucagcacggaguggucccccugcagcgugaccugcggcaacgggauccagguccggaucaagcccggcuccgcgaacaagcccaaggacgagcuggacuacgccaacgacaucgagaagaagaucugcaagauggagaagugcagcuccguguucaacguggucaacagcuccaucgggcugaucauggugcucagcuuccuguuccugaacugaggacuagugcaucacauuuaaaagcaucucagccuaccaugagaauaagagaaagaaaaugaagaucaauagcuuauucaucucuuuuucuuuuucguugguguaaagccaacacccugucuaaaaaacauaaauuucuuuaaucauuuugccucuuuucucugugcuucaauuaauaaaaaauggaaagaaccuagaucuaaaaaaaaaaaaaaaaaaaaaaaaaaaaaaaaaaaaaaaaaaaaaaaaaaaaaaaaaaaaaaaaugcaucccccccccccccccccccccccccccccccaaaggcucuuuucagagccaccagaauu

SEQ ID NO: 1213 - RNA, 1598 nt, Artificial Sequence
  mRNA Design i-2 (A64-N5-C30-hSL-N5) comprising derived and/or modified sequence from Pf(3D7)__XP_001351122.1__HsIns-iso1_Pf-CSP(19-397) (opt1)
aggagaggcgcugccuacggagguggcagccaucuccuucucggcaucaagcuuaccauggcccuguggaugcgccuccugccccugcucgcccugcuggcgcucuggggcccggaccccgccgccgcccuguuccaggaguaccagugcuacggcuccagcuccaacacccgggugcucaacgagcugaacuacgacaacgcggggaccaaccuguacaacgagcucgagaugaacuacuacggcaagcaggagaacugguacagccugaagaagaacucccgcagccugggggagaacgacgacggcaacaacgaggacaacgagaagcuccggaagcccaagcacaagaagcugaagcagccggccgacgggaaccccgaccccaacgccaaccccaacguggacccgaacgccaaccccaacgucgaccccaacgccaaccccaacguggacccgaacgcgaaccccaacgccaaccccaacgccaaccccaacgccaacccgaacgcgaaccccaacgccaaccccaacgccaaccccaacgccaacccgaacgccaaccccaacgcgaaccccaacgccaaccccaacgccaacccgaacgccaaccccaacgccaaccccaacgcgaaccccaacgccaacccgaacgccaaccccaacguggaccccaacgccaaccccaacgccaacccgaacgcgaaccccaacgccaaccccaacgccaacccgaacgccaaccccaacgccaaccccaacgcgaaccccaacgccaacccgaacgccaaccccaacgccaaccccaacgcgaaccccaacgccaacccgaacgccaaccccaacgccaaccccaacgccaaccccaacgcgaacccgaacgccaaccccaacaagaacaaccagggcaacggccaggggcacaacaugcccaacgaccccaaccgcaacgucgacgagaacgccaacgccaacuccgccgugaagaacaacaacaacgaggagccgagcgacaagcacaucaaggaguaccugaacaagauccagaacucccucagcacggaguggucccccugcagcgugaccugcggcaacgggauccagguccggaucaagcccggcuccgcgaacaagcccaaggacgagcuggacuacgccaacgacaucgagaagaagaucugcaagauggagaagugcagcuccguguucaacguggucaacagcuccaucgggcugaucauggugcucagcuuccuguuccugaacugaggacuagugcaucacauuuaaaagcaucucagccuaccaugagaauaagagaaagaaaaugaagaucaauagcuuauucaucucuuuuucuuuuucguugguguaaagccaacacccugucuaaaaaacauaaauuucuuuaaucauuuugccucuuuucucugugcuucaauuaauaaaaaauggaaagaaccuagaucuaaaaaaaaaaaaaaaaaaaaaaaaaaaaaaaaaaaaaaaaaaaaaaaaaaaaaaaaaaaaaaaaugcaucccccccccccccccccccccccccccccccaaaggcucuuuucagagccaccagaauu

SEQ ID NO: 1214 - RNA, 1577 nt, Artificial Sequence
  mRNA Design i-2 (A64-N5-C30-hSL-N5) comprising derived and/or modified sequence from Pf(3D7)__XP_001351122.1__HsSPARC_Pf-CSP(19-397) (opt1)
aggagaggcgcugccuacggagguggcagccaucuccuucucggcaucaagcuuaccaugcgcgccuggaucuucuuccugcucugccuggccggccgggcccuggcccuguuccaggaguaccagugcuacggcuccagcuccaacacccgggugcucaacgagcugaacuacgacaacgcggggaccaaccuguacaacgagcucgagaugaacuacuacggcaagcaggagaacugguacagccugaagaagaacucccgcagccugggggagaacgacgacggcaacaacgaggacaacgagaagcuccggaagcccaagcacaagaagcugaagcagccggccgacgggaaccccgaccccaacgccaaccccaacguggacccgaacgccaaccccaacgucgaccccaacgccaaccccaacguggacccgaacgcgaaccccaacgccaaccccaacgccaaccccaacgccaacccgaacgcgaaccccaacgccaaccccaacgccaaccccaacgccaacccgaacgccaaccccaacgcgaaccccaacgccaaccccaacgccaacccgaacgccaaccccaacgccaaccccaacgcgaaccccaacgccaacccgaacgccaaccccaacguggaccccaacgccaaccccaacgccaacccgaacgcgaaccccaacgccaaccccaacgccaacccgaacgccaaccccaacgccaaccccaacgcgaaccccaacgccaacccgaacgccaaccccaacgccaaccccaacgcgaaccccaacgccaacccgaacgccaaccccaacgccaaccccaacgccaaccccaacgcgaacccgaacgccaaccccaacaagaacaaccagggcaacggccaggggcacaacaugcccaacgaccccaaccgcaacgucgacgagaacgccaacgccaacuccgccgugaagaacaacaacaacgaggagccgagcgacaagcacaucaaggaguaccugaacaagauccagaacucccucagcacggaguggucccccugcagcgugaccugcggcaacgggauccagguccggaucaagcccggcuccgcgaacaagcccaaggacgagcuggacuacgccaacgacaucgagaagaagaucugcaagauggagaagugcagcuccguguucaacguggucaacagcuccaucgggcugaucauggugcucagcuuccuguuccugaacugaggacuagugcaucacauuuaaaagcaucucagccuaccaugagaauaagagaaagaaaaugaagaucaauagcuuauucaucucuuuuucuuuuucguugguguaaagccaacacccugucuaaaaaacauaaauuucuuuaaucauuuugccucuuuucucugugcuucaauuaauaaaaaauggaaagaaccuagaucuaaaaaaaaaaaaaaaaaaaaaaaaaaaaaaaaaaaaaaaaaaaaaaaaaaaaaaaaaaaaaaaaugcaucccccccccccccccccccccccccccccccaaaggcucuuuucagagccaccagaauu

SEQ ID NO: 1215 - RNA, 1580 nt, Artificial Sequence
  mRNA Design i-2 (A64-N5-C30-hSL-N5) comprising derived and/or modified sequence from Pf(3D7)__XP_001351122.1__IgE_Pf-CSP(19-397) (opt1)
aggagaggcgcugccuacggagguggcagccaucuccuucucggcaucaagcuuaccauggacuggaccuggauccuguuccucguggccgccgcgacccgcguccacagccuguuccaggaguaccagugcuacggcuccagcuccaacacccgggugcucaacgagcugaacuacgacaacgcggggaccaaccuguacaacgagcucgagaugaacuacuacggcaagcaggagaacugguacagccugaagaagaacucccgcagccugggggagaacgacgacggcaacaacgaggacaacgagaagcuccggaagcccaagcacaagaagcugaagcagccggccgacgggaaccccgaccccaacgccaaccccaacguggacccgaacgccaaccccaacgucgaccccaacgccaaccccaacguggacccgaacgcgaaccccaacgccaaccccaacgccaaccccaacgccaacccgaacgcgaaccccaacgccaaccccaacgccaaccccaacgccaacccgaacgccaaccccaacgcgaaccccaacgccaaccccaacgccaacccgaacgccaaccccaacgccaaccccaacgcgaaccccaacgccaacccgaacgccaaccccaacguggaccccaacgccaaccccaacgccaacccgaacgcgaaccccaacgccaaccccaacgccaacccgaacgccaaccccaacgccaaccccaacgcgaaccccaacgccaacccgaacgccaaccccaacgccaaccccaacgcgaaccccaacgccaacccgaacgccaaccccaacgccaaccccaacgccaaccccaacgcgaacccgaacgccaaccccaacaagaacaaccagggcaacggccaggggcacaacaugcccaacgaccccaaccgcaacgucgacgagaacgccaacgccaacuccgccgugaagaacaacaacaacgaggagccgagcgacaagcacaucaaggaguaccugaacaagauccagaacucccucagcacggaguggucccccugcagcgugaccugcggcaacgggauccagguccggaucaagcccggcuccgcgaacaagcccaaggacgagcuggacuacgccaacgacaucgagaagaagaucugcaagauggagaagugcagcuccguguucaacguggucaacagcuccaucgggcugaucauggugcucagcuuccuguuccugaacugaggacuagugcaucacauuuaaaagcaucucagccuaccaugagaauaagagaaagaaaaugaagaucaauagcuuauucaucucuuuuucuuuuucguugguguaaagccaacacccugucuaaaaaacauaaauuucuuuaaucauuuugccucuuuucucugugcuucaauuaauaaaaaauggaaagaaccuagaucuaaaaaaaaaaaaaaaaaaaaaaaaaaaaaaaaaaaaaaaaaaaaaaaaaaaaaaaaaaaaaaaaugcaucccccccccccccccccccccccccccccccaaaggcucuuuucagagccaccagaauu

SEQ ID NO: 1216 - RNA, 1745 nt, Artificial Sequence
  mRNA Design i-2 (A64-N5-C30-hSL-N5) comprising derived and/or modified sequence from Pf(3D7)__XP_001351122.1__Pf-CSP_L(G4SG4)_TM domain HA (opt1)
aggagaggcgcugccuacggagguggcagccaucuccuucucggcaucaagcuuaccaugaugcgcaagcuggccauccucagcguguccagcuuccuguucgucgaggcccuguuccaggaguaccagugcuacggcuccagcuccaacacccgggugcucaacgagcugaacuacgacaacgcggggaccaaccuguacaacgagcucgagaugaacuacuacggcaagcaggagaacugguacagccugaagaagaacucccgcagccugggggagaacgacgacggcaacaacgaggacaacgagaagcuccggaagcccaagcacaagaagcugaagcagccggccgacgggaaccccgaccccaacgccaaccccaacguggacccgaacgccaaccccaacgucgaccccaacgccaaccccaacguggacccgaacgcgaaccccaacgccaaccccaacgccaaccccaacgccaacccgaacgcgaaccccaacgccaaccccaacgccaaccccaacgccaacccgaacgccaaccccaacgcgaaccccaacgccaaccccaacgccaacccgaacgccaaccccaacgccaaccccaacgcgaaccccaacgccaacccgaacgccaaccccaacguggaccccaacgccaaccccaacgccaacccgaacgcgaaccccaacgccaaccccaacgccaacccgaacgccaaccccaacgccaaccccaacgcgaaccccaacgccaacccgaacgccaaccccaacgccaaccccaacgcgaaccccaacgccaacccgaacgccaaccccaacgccaaccccaacgccaaccccaacgcgaacccgaacgccaaccccaacaagaacaaccagggcaacggccaggggcacaacaugcccaacgaccccaaccgcaacgucgacgagaacgccaacgccaacuccgccgugaagaacaacaacaacgaggagccgagcgacaagcacaucaaggaguaccugaacaagauccagaacucccucagcacggaguggucccccugcagcgugaccugcggcaacgggauccagguccggaucaagcccggcuccgcgaacaagcccaaggacgagcuggacuacgccaacgacaucgagaagaagaucugcaagauggagaagugcagcuccguguucaacguggucaacagcuccaucgggcugaucauggugcucagcuuccuguuccugaacggcgggggcgggagcggcgggggcggcaagcucgaguccacgcggaucuaccagauccuggcgaucuacagcaccgucgccagcucccuggugcucguggucagccugggggccaucuccuucuggaugugcagcaacggcucccugcagugccgcaucugcaucugaggacuagugcaucacauuuaaaagcaucucagccuaccaugagaauaagagaaagaaaaugaagaucaauagcuuauucaucucuuuuucuuuuucguugguguaaagccaacacccugucuaaaaaacauaaauuucuuuaaucauuuugccucuuuucucugugcuucaauuaauaaaaaauggaaagaaccuagaucuaaaaaaaaaaaaaaaaaaaaaaaaaaaaaaaaaaaaaaaaaaaaaaaaaaaaaaaaaaaaaaaaugcaucccccccccccccccccccccccccccccccaaaggcucuuuucagagccaccagaauu

SEQ ID NO: 1217 - RNA, 1619 nt, Artificial Sequence
  mRNA Design i-2 (A64-N5-C30-hSL-N5) comprising derived and/or modified sequence from Pf(3D7)__XP_001351122.1__Pf-CSP(199-377)_L(PVTN)_HBsAg (opt1)
aggagaggcgcugccuacggagguggcagccaucuccuucucggcaucaagcuuaccauggaccccaacgccaaccccaacgccaacccgaacgcgaaccccaacgccaaccccaacgccaacccgaacgccaaccccaacgccaaccccaacgcgaaccccaacgccaacccgaacgccaaccccaacgccaaccccaacgcgaaccccaacgccaacccgaacgccaaccccaacgccaaccccaacgccaaccccaacgcgaacccgaacgccaaccccaacaagaacaaccagggcaacggccaggggcacaacaugcccaacgaccccaaccgcaacgucgacgagaacgccaacgccaacuccgccgugaagaacaacaacaacgaggagccgagcgacaagcacaucaaggaguaccugaacaagauccagaacucccucagcacggaguggucccccugcagcgugaccugcggcaacgggauccagguccggaucaagcccggcuccgcgaacaagcccaaggacgagcuggacuacgccaacgacaucgagaagaagaucugcaagauggagaagugcagcuccgugccggugacgaacauggagaacaucaccagcggcuuccuggggccccuccuggugcugcaggccggcuucuuccuccugacccgcauccugaccaucccgcagucccucgacagcugguggaccucccugaacuuccucgggggcagccccgucugccuggggcagaacucccagagccccaccuccaaccacagccccaccuccugcccgcccaucugccccggcuaccgguggaugugccugcgccgguucaucaucuuccuguucauccuccugcugugccucaucuuccugcuggugcuccuggacuaccagggcaugcugcccgugugcccgcucauccccgggagcacgaccaccaacaccggccccugcaagacgugcaccacccccgcccaggggaacuccauguucccgagcugcugcugcaccaagcccacggacggcaacugcacgugcauccccauccccuccagcugggcguucgccaaguaccugugggagugggccuccguccgcuucagcuggcugucccuccuggugccguucgugcagugguucgucgggcugagccccaccguguggcucuccgccaucuggaugaugugguacuggggccccagccuguacagcaucgugucccccuucaucccgcugcuccccaucuucuucugccugugggucuacaucugaggacuagugcaucacauuuaaaagcaucucagccuaccaugagaauaagagaaagaaaaugaagaucaauagcuuauucaucucuuuuucuuuuucguugguguaaagccaacacccugucuaaaaaacauaaauuucuuuaaucauuuugccucuuuucucugugcuucaauuaauaaaaaauggaaagaaccuagaucuaaaaaaaaaaaaaaaaaaaaaaaaaaaaaaaaaaaaaaaaaaaaaaaaaaaaaaaaaaaaaaaaugcaucccccccccccccccccccccccccccccccaaaggcucuuuucagagccaccagaauu

SEQ ID NO: 1218 - RNA, 1661 nt, Artificial Sequence
  mRNA Design i-2 (A64-N5-C30-hSL-N5) comprising derived and/or modified sequence from Pf(3D7)__XP_001351122.1__Pf-CSP(199-387)_L(PVTN)_HBsAg (opt1)
aggagaggcgcugccuacggagguggcagccaucuccuucucggcaucaagcuuaccaugauggccccggaccccaacgccaaccccaacgccaacccgaacgcgaaccccaacgccaaccccaacgccaacccgaacgccaaccccaacgccaaccccaacgcgaaccccaacgccaacccgaacgccaaccccaacgccaaccccaacgcgaaccccaacgccaacccgaacgccaaccccaacgccaaccccaacgccaaccccaacgcgaacccgaacgccaaccccaacaagaacaaccagggcaacggccaggggcacaacaugcccaacgaccccaaccgcaacgucgacgagaacgccaacgccaacuccgccgugaagaacaacaacaacgaggagccgagcgacaagcacaucaaggaguaccugaacaagauccagaacucccucagcacggaguggucccccugcagcgugaccugcggcaacgggauccagguccggaucaagcccggcuccgcgaacaagcccaaggacgagcuggacuacgccaacgacaucgagaagaagaucugcaagauggagaagugcagcuccguguucaacguggucaacagcuccaucgggcuggggccggugacgaacauggagaacaucaccagcggcuuccuggggccccuccuggugcugcaggccggcuucuuccuccugacccgcauccugaccaucccgcagucccucgacagcugguggaccucccugaacuuccucgggggcagccccgucugccuggggcagaacucccagagccccaccuccaaccacagccccaccuccugcccgcccaucugccccggcuaccgguggaugugccugcgccgguucaucaucuuccuguucauccuccugcugugccucaucuuccugcuggugcuccuggacuaccagggcaugcugcccgugugcccgcucauccccgggagcacgaccaccaacaccggccccugcaagacgugcaccacccccgcccaggggaacuccauguucccgagcugcugcugcaccaagcccacggacggcaacugcacgugcauccccauccccuccagcugggcguucgccaaguaccugugggagugggccuccguccgcuucagcuggcugucccuccuggugccguucgugcagugguucgucgggcugagccccaccguguggcucuccgccaucuggaugaugugguacuggggccccagccuguacagcaucgugucccccuucaucccgcugcuccccaucuucuucugccugugggucuacaucugaggacuagugcaucacauuuaaaagcaucucagccuaccaugagaauaagagaaagaaaaugaagaucaauagcuuauucaucucuuuuucuuuuucguugguguaaagccaacacccugucuaaaaaacauaaauuucuuuaaucauuuugccucuuuucucugugcuucaauuaauaaaaaauggaaagaaccuagaucuaaaaaaaaaaaaaaaaaaaaaaaaaaaaaaaaaaaaaaaaaaaaaaaaaaaaaaaaaaaaaaaaugcaucccccccccccccccccccccccccccccccaaaggcucuuuucagagccaccagaauu

SEQ ID NO: 1219 - RNA, 845 nt, Artificial Sequence
  mRNA Design i-2 (A64-N5-C30-hSL-N5) comprising derived and/or modified sequence from Pf(3D7)__XP_001351122.1__HsALB_Pf-CSP(19-152) (opt1)
aggagaggcgcugccuacggagguggcagccaucuccuucucggcaucaagcuuaccaugaagugggugaccuucaucagccugcucuuccuguucuccagcgccuacucccuguuccaggaguaccagugcuacggcuccagcuccaacacccgggugcucaacgagcugaacuacgacaacgcggggaccaaccuguacaacgagcucgagaugaacuacuacggcaagcaggagaacugguacagccugaagaagaacucccgcagccugggggagaacgacgacggcaacaacgaggacaacgagaagcuccggaagcccaagcacaagaagcugaagcagccggccgacgggaaccccgaccccaacgccaaccccaacguggacccgaacgccaaccccaacgucgaccccaacgccaaccccaacguggacccgaacgcgaaccccaacgccaaccccaacgccaaccccaacgccaacccgaacgcgaaccccaacgccaaccccugaggacuagugcaucacauuuaaaagcaucucagccuaccaugagaauaagagaaagaaaaugaagaucaauagcuuauucaucucuuuuucuuuuucguugguguaaagccaacacccugucuaaaaaacauaaauuucuuuaaucauuuugccucuuuucucugugcuucaauuaauaaaaaauggaaagaaccuagaucuaaaaaaaaaaaaaaaaaaaaaaaaaaaaaaaaaaaaaaaaaaaaaaaaaaaaaaaaaaaaaaaaugcaucccccccccccccccccccccccccccccccaaaggcucuuuucagagccaccagaauu

SEQ ID NO: 1220 - RNA, 965 nt, Artificial Sequence
  mRNA Design i-2 (A64-N5-C30-hSL-N5) comprising derived and/or modified sequence from Pf(3D7)__XP_001351122.1__HsALB_Pf-CSP(19-192) (opt1)
aggagaggcgcugccuacggagguggcagccaucuccuucucggcaucaagcuuaccaugaagugggugaccuucaucagccugcucuuccuguucuccagcgccuacucccuguuccaggaguaccagugcuacggcuccagcuccaacacccgggugcucaacgagcugaacuacgacaacgcggggaccaaccuguacaacgagcucgagaugaacuacuacggcaagcaggagaacugguacagccugaagaagaacucccgcagccugggggagaacgacgacggcaacaacgaggacaacgagaagcuccggaagcccaagcacaagaagcugaagcagccggccgacgggaaccccgaccccaacgccaaccccaacguggacccgaacgccaaccccaacgucgaccccaacgccaaccccaacguggacccgaacgcgaaccccaacgccaaccccaacgccaaccccaacgccaacccgaacgcgaaccccaacgccaaccccaacgccaaccccaacgccaacccgaacgccaaccccaacgcgaaccccaacgccaaccccaacgccaacccgaacgccaaccccaacgccaaccccaacgcgaaccccaacgccaacccgugaggacuagugcaucacauuuaaaagcaucucagccuaccaugagaauaagagaaagaaaaugaagaucaauagcuuauucaucucuuuuucuuuuucguugguguaaagccaacacccugucuaaaaaacauaaauuucuuuaaucauuuugccucuuuucucugugcuucaauuaauaaaaaauggaaagaaccuagaucuaaaaaaaaaaaaaaaaaaaaaaaaaaaaaaaaaaaaaaaaaaaaaaaaaaaaaaaaaaaaaaaaugcaucccccccccccccccccccccccccccccccaaaggcucuuuucagagccaccagaauu

SEQ ID NO: 1221 - RNA, 1205 nt, Artificial Sequence
  mRNA Design i-2 (A64-N5-C30-hSL-N5) comprising derived and/or modified sequence from Pf(3D7)__XP_001351122.1__HsALB_Pf-CSP(19-272) (opt1)
aggagaggcgcugccuacggagguggcagccaucuccuucucggcaucaagcuuaccaugaagugggugaccuucaucagccugcucuuccuguucuccagcgccuacucccuguuccaggaguaccagugcuacggcuccagcuccaacacccgggugcucaacgagcugaacuacgacaacgcggggaccaaccuguacaacgagcucgagaugaacuacuacggcaagcaggagaacugguacagccugaagaagaacucccgcagccugggggagaacgacgacggcaacaacgaggacaacgagaagcuccggaagcccaagcacaagaagcugaagcagccggccgacgggaaccccgaccccaacgccaaccccaacguggacccgaacgccaaccccaacgucgaccccaacgccaaccccaacguggacccgaacgcgaaccccaacgccaaccccaacgccaaccccaacgccaacccgaacgcgaaccccaacgccaaccccaacgccaaccccaacgccaacccgaacgccaaccccaacgcgaaccccaacgccaaccccaacgccaacccgaacgccaaccccaacgccaaccccaacgcgaaccccaacgccaacccgaacgccaaccccaacguggaccccaacgccaaccccaacgccaacccgaacgcgaaccccaacgccaaccccaacgccaacccgaacgccaaccccaacgccaaccccaacgcgaaccccaacgccaacccgaacgccaaccccaacgccaaccccaacgcgaaccccaacgccaacccgaacgccaaccccaacgccaaccccaacgccaaccccaacgcgaacccgaacgccaaccccugaggacuagugcaucacauuuaaaagcaucucagccuaccaugagaauaagagaaagaaaaugaagaucaauagcuuauucaucucuuuuucuuuuucguugguguaaagccaacacccugucuaaaaaacauaaauuucuuuaaucauuuugccucuuuucucugugcuucaauuaauaaaaaauggaaagaaccuagaucuaaaaaaaaaaaaaaaaaaaaaaaaaaaaaaaaaaaaaaaaaaaaaaaaaaaaaaaaaaaaaaaaugcaucccccccccccccccccccccccccccccccaaaggcucuuuucagagccaccagaauu

SEQ ID NO: 1222 - RNA, 1367 nt, Artificial Sequence
  mRNA Design i-2 (A64-N5-C30-hSL-N5) comprising derived and/or modified sequence from Pf(3D7)__XP_001351122.1__HsALB_Pf-CSP(19-272)_L(AAY)_Pf-CSP(310-3 27)_L(AAY)_Pf-CSP(346-375) (opt1)
aggagaggcgcugccuacggagguggcagccaucuccuucucggcaucaagcuuaccaugaagugggugaccuucaucagccugcucuuccuguucuccagcgccuacucccuguuccaggaguaccagugcuacggcuccagcuccaacacccgggugcucaacgagcugaacuacgacaacgcggggaccaaccuguacaacgagcucgagaugaacuacuacggcaagcaggagaacugguacagccugaagaagaacucccgcagccugggggagaacgacgacggcaacaacgaggacaacgagaagcuccggaagcccaagcacaagaagcugaagcagccggccgacgggaaccccgaccccaacgccaaccccaacguggacccgaacgccaaccccaacgucgaccccaacgccaaccccaacguggacccgaacgcgaaccccaacgccaaccccaacgccaaccccaacgccaacccgaacgcgaaccccaacgccaaccccaacgccaaccccaacgccaacccgaacgccaaccccaacgcgaaccccaacgccaaccccaacgccaacccgaacgccaaccccaacgccaaccccaacgcgaaccccaacgccaacccgaacgccaaccccaacguggaccccaacgccaaccccaacgccaacccgaacgcgaaccccaacgccaaccccaacgccaacccgaacgccaaccccaacgccaaccccaacgcgaaccccaacgccaacccgaacgccaaccccaacgccaaccccaacgcgaaccccaacgccaacccgaacgccaaccccaacgccaaccccaacgccaaccccaacgcgaacccgaacgccaaccccgccgcguaugagccgagcgacaagcacaucaaggaguaccugaacaagauccagaacucccucgcggccuacaucaagcccggcuccgcgaacaagcccaaggacgagcuggacuacgccaacgacaucgagaagaagaucugcaagauggagaagugcagcugaggacuagugcaucacauuuaaaagcaucucagccuaccaugagaauaagagaaagaaaaugaagaucaauagcuuauucaucucuuuuucuuuuucguugguguaaagccaacacccugucuaaaaaacauaaauuucuuuaaucauuuugccucuuuucucugugcuucaauuaauaaaaaauggaaagaaccuagaucuaaaaaaaaaaaaaaaaaaaaaaaaaaaaaaaaaaaaaaaaaaaaaaaaaaaaaaaaaaaaaaaaugcaucccccccccccccccccccccccccccccccaaaggcucuuuucagagccaccagaauu

SEQ ID NO: 1223 - RNA, 1328 nt, Artificial Sequence
  mRNA Design i-2 (A64-N5-C30-hSL-N5) comprising derived and/or modified sequence from Pf(3D7)__XP_001351122.1__HsALB_Pf-CSP(19-272)_L(AAY)_Pf-CSP(346-3 65)_L(AAY)_P2 (opt1)
aggagaggcgcugccuacggagguggcagccaucuccuucucggcaucaagcuuaccaugaagugggugaccuucaucagccugcucuuccuguucuccagcgccuacucccuguuccaggaguaccagugcuacggcuccagcuccaacacccgggugcucaacgagcugaacuacgacaacgcggggaccaaccuguacaacgagcucgagaugaacuacuacggcaagcaggagaacugguacagccugaagaagaacucccgcagccugggggagaacgacgacggcaacaacgaggacaacgagaagcuccggaagcccaagcacaagaagcugaagcagccggccgacgggaaccccgaccccaacgccaaccccaacguggacccgaacgccaaccccaacgucgaccccaacgccaaccccaacguggacccgaacgcgaaccccaacgccaaccccaacgccaaccccaacgccaacccgaacgcgaaccccaacgccaaccccaacgccaaccccaacgccaacccgaacgccaaccccaacgcgaaccccaacgccaaccccaacgccaacccgaacgccaaccccaacgccaaccccaacgcgaaccccaacgccaacccgaacgccaaccccaacguggaccccaacgccaaccccaacgccaacccgaacgcgaaccccaacgccaaccccaacgccaacccgaacgccaaccccaacgccaaccccaacgcgaaccccaacgccaacccgaacgccaaccccaacgccaaccccaacgcgaaccccaacgccaacccgaacgccaaccccaacgccaaccccaacgccaaccccaacgcgaacccgaacgccaaccccgccgcguauaucaagcccggcuccgcgaacaagcccaaggacgagcuggacuacgccaacgacaucgaggcggccuaccaguacaucaaggccaacagcaaguucaucggcaucaccgagcugugaggacuagugcaucacauuuaaaagcaucucagccuaccaugagaauaagagaaagaaaaugaagaucaauagcuuauucaucucuuuuucuuuuucguugguguaaagccaacacccugucuaaaaaacauaaauuucuuuaaucauuuugccucuuuucucugugcuucaauuaauaaaaaauggaaagaaccuagaucuaaaaaaaaaaaaaaaaaaaaaaaaaaaaaaaaaaaaaaaaaaaaaaaaaaaaaaaaaaaaaaaaugcaucccccccccccccccccccccccccccccccaaaggcucuuuucagagccaccagaauu

SEQ ID NO: 1224 - RNA, 1322 nt, Artificial Sequence
  mRNA Design i-2 (A64-N5-C30-hSL-N5) comprising derived and/or modified sequence from Pf(3D7)__XP_001351122.1__HsALB_Pf-CSP(19-272)_L(AAY)_Pf-CSP(346-3 65)_L(AAY)_PADRE (opt1)
aggagaggcgcugccuacggagguggcagccaucuccuucucggcaucaagcuuaccaugaagugggugaccuucaucagccugcucuuccuguucuccagcgccuacucccuguuccaggaguaccagugcuacggcuccagcuccaacacccgggugcucaacgagcugaacuacgacaacgcggggaccaaccuguacaacgagcucgagaugaacuacuacggcaagcaggagaacugguacagccugaagaagaacucccgcagccugggggagaacgacgacggcaacaacgaggacaacgagaagcuccggaagcccaagcacaagaagcugaagcagccggccgacgggaaccccgaccccaacgccaaccccaacguggacccgaacgccaaccccaacgucgaccccaacgccaaccccaacguggacccgaacgcgaaccccaacgccaaccccaacgccaaccccaacgccaacccgaacgcgaaccccaacgccaaccccaacgccaaccccaacgccaacccgaacgccaaccccaacgcgaaccccaacgccaaccccaacgccaacccgaacgccaaccccaacgccaaccccaacgcgaaccccaacgccaacccgaacgccaaccccaacguggaccccaacgccaaccccaacgccaacccgaacgcgaaccccaacgccaaccccaacgccaacccgaacgccaaccccaacgccaaccccaacgcgaaccccaacgccaacccgaacgccaaccccaacgccaaccccaacgcgaaccccaacgccaacccgaacgccaaccccaacgccaaccccaacgccaaccccaacgcgaacccgaacgccaaccccgccgcguauaucaagcccggcuccgcgaacaagcccaaggacgagcuggacuacgccaacgacaucgaggcggccuacgccaaguucguggccgccuggacccugaaggcggccgccugaggacuagugcaucacauuuaaaagcaucucagccuaccaugagaauaagagaaagaaaaugaagaucaauagcuuauucaucucuuuuucuuuuucguugguguaaagccaacacccugucuaaaaaacauaaauuucuuuaaucauuuugccucuuuucucugugcuucaauuaauaaaaaauggaaagaaccuagaucuaaaaaaaaaaaaaaaaaaaaaaaaaaaaaaaaaaaaaaaaaaaaaaaaaaaaaaaaaaaaaaaaugcaucccccccccccccccccccccccccccccccaaaggcucuuuucagagccaccagaauu

SEQ ID NO: 1225 - RNA, 1379 nt, Artificial Sequence
  mRNA Design i-2 (A64-N5-C30-hSL-N5) comprising derived and/or modified sequence from Pf(3D7)__XP_001351122.1__HsALB_Pf-CSP(19-272)_L(G4S)_Pf-CSP(310-3 27)_L(G4S)_Pf-CSP(346-375) (opt1)
aggagaggcgcugccuacggagguggcagccaucuccuucucggcaucaagcuuaccaugaagugggugaccuucaucagccugcucuuccuguucuccagcgccuacucccuguuccaggaguaccagugcuacggcuccagcuccaacacccgggugcucaacgagcugaacuacgacaacgcggggaccaaccuguacaacgagcucgagaugaacuacuacggcaagcaggagaacugguacagccugaagaagaacucccgcagccugggggagaacgacgacggcaacaacgaggacaacgagaagcuccggaagcccaagcacaagaagcugaagcagccggccgacgggaaccccgaccccaacgccaaccccaacguggacccgaacgccaaccccaacgucgaccccaacgccaaccccaacguggacccgaacgcgaaccccaacgccaaccccaacgccaaccccaacgccaacccgaacgcgaaccccaacgccaaccccaacgccaaccccaacgccaacccgaacgccaaccccaacgcgaaccccaacgccaaccccaacgccaacccgaacgccaaccccaacgccaaccccaacgcgaaccccaacgccaacccgaacgccaaccccaacguggaccccaacgccaaccccaacgccaacccgaacgcgaaccccaacgccaaccccaacgccaacccgaacgccaaccccaacgccaaccccaacgcgaaccccaacgccaacccgaacgccaaccccaacgccaaccccaacgcgaaccccaacgccaacccgaacgccaaccccaacgccaaccccaacgccaaccccaacgcgaacccgaacgccaaccccggaggcggaggaucugagccgagcgacaagcacaucaaggaguaccugaacaagauccagaacucccucggcggagguggaaguaucaagcccggcuccgcgaacaagcccaaggacgagcuggacuacgccaacgacaucgagaagaagaucugcaagauggagaagugcagcugaggacuagugcaucacauuuaaaagcaucucagccuaccaugagaauaagagaaagaaaaugaagaucaauagcuuauucaucucuuuuucuuuuucguugguguaaagccaacacccugucuaaaaaacauaaauuucuuuaaucauuuugccucuuuucucugugcuucaauuaauaaaaaauggaaagaaccuagaucuaaaaaaaaaaaaaaaaaaaaaaaaaaaaaaaaaaaaaaaaaaaaaaaaaaaaaaaaaaaaaaaaugcaucccccccccccccccccccccccccccccccaaaggcucuuuucagagccaccagaauu

SEQ ID NO: 1226 - RNA, 1364 nt, Artificial Sequence
  mRNA Design i-2 (A64-N5-C30-hSL-N5) comprising derived and/or modified sequence from Pf(3D7)__XP_001351122.1__HsALB_Pf-CSP(19-272)_L(G4S)_Pf-CSP(310-3 27)_Pf-CSP(346-375) (opt1)
aggagaggcgcugccuacggagguggcagccaucuccuucucggcaucaagcuuaccaugaagugggugaccuucaucagccugcucuuccuguucuccagcgccuacucccuguuccaggaguaccagugcuacggcuccagcuccaacacccgggugcucaacgagcugaacuacgacaacgcggggaccaaccuguacaacgagcucgagaugaacuacuacggcaagcaggagaacugguacagccugaagaagaacucccgcagccugggggagaacgacgacggcaacaacgaggacaacgagaagcuccggaagcccaagcacaagaagcugaagcagccggccgacgggaaccccgaccccaacgccaaccccaacguggacccgaacgccaaccccaacgucgaccccaacgccaaccccaacguggacccgaacgcgaaccccaacgccaaccccaacgccaaccccaacgccaacccgaacgcgaaccccaacgccaaccccaacgccaaccccaacgccaacccgaacgccaaccccaacgcgaaccccaacgccaaccccaacgccaacccgaacgccaaccccaacgccaaccccaacgcgaaccccaacgccaacccgaacgccaaccccaacguggaccccaacgccaaccccaacgccaacccgaacgcgaaccccaacgccaaccccaacgccaacccgaacgccaaccccaacgccaaccccaacgcgaaccccaacgccaacccgaacgccaaccccaacgccaaccccaacgcgaaccccaacgccaacccgaacgccaaccccaacgccaaccccaacgccaaccccaacgcgaacccgaacgccaaccccggaggcggaggaucugagccgagcgacaagcacaucaaggaguaccugaacaagauccagaacucccucaucaagcccggcuccgcgaacaagcccaaggacgagcuggacuacgccaacgacaucgagaagaagaucugcaagauggagaagugcagcugaggacuagugcaucacauuuaaaagcaucucagccuaccaugagaauaagagaaagaaaaugaagaucaauagcuuauucaucucuuuuucuuuuucguugguguaaagccaacacccugucuaaaaaacauaaauuucuuuaaucauuuugccucuuuucucugugcuucaauuaauaaaaaauggaaagaaccuagaucuaaaaaaaaaaaaaaaaaaaaaaaaaaaaaaaaaaaaaaaaaaaaaaaaaaaaaaaaaaaaaaaaugcaucccccccccccccccccccccccccccccccaaaggcucuuuucagagccaccagaauu

SEQ ID NO: 1227 - RNA, 1364 nt, Artificial Sequence
  mRNA Design i-2 (A64-N5-C30-hSL-N5) comprising derived and/or modified sequence from Pf(3D7)__XP_001351122.1__HsALB_Pf-CSP(19-325) (opt1)
aggagaggcgcugccuacggagguggcagccaucuccuucucggcaucaagcuuaccaugaagugggugaccuucaucagccugcucuuccuguucuccagcgccuacucccuguuccaggaguaccagugcuacggcuccagcuccaacacccgggugcucaacgagcugaacuacgacaacgcggggaccaaccuguacaacgagcucgagaugaacuacuacggcaagcaggagaacugguacagccugaagaagaacucccgcagccugggggagaacgacgacggcaacaacgaggacaacgagaagcuccggaagcccaagcacaagaagcugaagcagccggccgacgggaaccccgaccccaacgccaaccccaacguggacccgaacgccaaccccaacgucgaccccaacgccaaccccaacguggacccgaacgcgaaccccaacgccaaccccaacgccaaccccaacgccaacccgaacgcgaaccccaacgccaaccccaacgccaaccccaacgccaacccgaacgccaaccccaacgcgaaccccaacgccaaccccaacgccaacccgaacgccaaccccaacgccaaccccaacgcgaaccccaacgccaacccgaacgccaaccccaacguggaccccaacgccaaccccaacgccaacccgaacgcgaaccccaacgccaaccccaacgccaacccgaacgccaaccccaacgccaaccccaacgcgaaccccaacgccaacccgaacgccaaccccaacgccaaccccaacgcgaaccccaacgccaacccgaacgccaaccccaacgccaaccccaacgccaaccccaacgcgaacccgaacgccaaccccaacaagaacaaccagggcaacggccaggggcacaacaugcccaacgaccccaaccgcaacgucgacgagaacgccaacgccaacuccgccgugaagaacaacaacaacgaggagccgagcgacaagcacaucaaggaguaccugaacaagauccagaacugaggacuagugcaucacauuuaaaagcaucucagccuaccaugagaauaagagaaagaaaaugaagaucaauagcuuauucaucucuuuuucuuuuucguugguguaaagccaacacccugucuaaaaaacauaaauuucuuuaaucauuuugccucuuuucucugugcuucaauuaauaaaaaauggaaagaaccuagaucuaaaaaaaaaaaaaaaaaaaaaaaaaaaaaaaaaaaaaaaaaaaaaaaaaaaaaaaaaaaaaaaaugcaucccccccccccccccccccccccccccccccaaaggcucuuuucagagccaccagaauu

SEQ ID NO: 1228 - RNA, 1541 nt, Artificial Sequence
  mRNA Design i-2 (A64-N5-C30-hSL-N5) comprising derived and/or modified sequence from Pf(3D7)__XP_001351122.1__HsALB_Pf-CSP(19-384) (opt1)
aggagaggcgcugccuacggagguggcagccaucuccuucucggcaucaagcuuaccaugaagugggugaccuucaucagccugcucuuccuguucuccagcgccuacucccuguuccaggaguaccagugcuacggcuccagcuccaacacccgggugcucaacgagcugaacuacgacaacgcggggaccaaccuguacaacgagcucgagaugaacuacuacggcaagcaggagaacugguacagccugaagaagaacucccgcagccugggggagaacgacgacggcaacaacgaggacaacgagaagcuccggaagcccaagcacaagaagcugaagcagccggccgacgggaaccccgaccccaacgccaaccccaacguggacccgaacgccaaccccaacgucgaccccaacgccaaccccaacguggacccgaacgcgaaccccaacgccaaccccaacgccaaccccaacgccaacccgaacgcgaaccccaacgccaaccccaacgccaaccccaacgccaacccgaacgccaaccccaacgcgaaccccaacgccaaccccaacgccaacccgaacgccaaccccaacgccaaccccaacgcgaaccccaacgccaacccgaacgccaaccccaacguggaccccaacgccaaccccaacgccaacccgaacgcgaaccccaacgccaaccccaacgccaacccgaacgccaaccccaacgccaaccccaacgcgaaccccaacgccaacccgaacgccaaccccaacgccaaccccaacgcgaaccccaacgccaacccgaacgccaaccccaacgccaaccccaacgccaaccccaacgcgaacccgaacgccaaccccaacaagaacaaccagggcaacggccaggggcacaacaugcccaacgaccccaaccgcaacgucgacgagaacgccaacgccaacuccgccgugaagaacaacaacaacgaggagccgagcgacaagcacaucaaggaguaccugaacaagauccagaacucccucagcacggaguggucccccugcagcgugaccugcggcaacgggauccagguccggaucaagcccggcuccgcgaacaagcccaaggacgagcuggacuacgccaacgacaucgagaagaagaucugcaagauggagaagugcagcuccguguucaacguggucaacagcuccugaggacuagugcaucacauuuaaaagcaucucagccuaccaugagaauaagagaaagaaaaugaagaucaauagcuuauucaucucuuuuucuuuuucguugguguaaagccaacacccugucuaaaaaacauaaauuucuuuaaucauuuugccucuuuucucugugcuucaauuaauaaaaaauggaaagaaccuagaucuaaaaaaaaaaaaaaaaaaaaaaaaaaaaaaaaaaaaaaaaaaaaaaaaaaaaaaaaaaaaaaaaugcaucccccccccccccccccccccccccccccccaaaggcucuuuucagagccaccagaauu

SEQ ID NO: 1229 - RNA, 1679 nt, Artificial Sequence
  mRNA Design i-2 (A64-N5-C30-hSL-N5) comprising derived and/or modified sequence from Pf(3D7)__XP_001351122.1__HsALB_Pf-CSP(19-384)_TM domain HA (opt1)
aggagaggcgcugccuacggagguggcagccaucuccuucucggcaucaagcuuaccaugaagugggugaccuucaucagccugcucuuccuguucuccagcgccuacucccuguuccaggaguaccagugcuacggcuccagcuccaacacccgggugcucaacgagcugaacuacgacaacgcggggaccaaccuguacaacgagcucgagaugaacuacuacggcaagcaggagaacugguacagccugaagaagaacucccgcagccugggggagaacgacgacggcaacaacgaggacaacgagaagcuccggaagcccaagcacaagaagcugaagcagccggccgacgggaaccccgaccccaacgccaaccccaacguggacccgaacgccaaccccaacgucgaccccaacgccaaccccaacguggacccgaacgcgaaccccaacgccaaccccaacgccaaccccaacgccaacccgaacgcgaaccccaacgccaaccccaacgccaaccccaacgccaacccgaacgccaaccccaacgcgaaccccaacgccaaccccaacgccaacccgaacgccaaccccaacgccaaccccaacgcgaaccccaacgccaacccgaacgccaaccccaacguggaccccaacgccaaccccaacgccaacccgaacgcgaaccccaacgccaaccccaacgccaacccgaacgccaaccccaacgccaaccccaacgcgaaccccaacgccaacccgaacgccaaccccaacgccaaccccaacgcgaaccccaacgccaacccgaacgccaaccccaacgccaaccccaacgccaaccccaacgcgaacccgaacgccaaccccaacaagaacaaccagggcaacggccaggggcacaacaugcccaacgaccccaaccgcaacgucgacgagaacgccaacgccaacuccgccgugaagaacaacaacaacgaggagccgagcgacaagcacaucaaggaguaccugaacaagauccagaacucccucagcacggaguggucccccugcagcgugaccugcggcaacgggauccagguccggaucaagcccggcuccgcgaacaagcccaaggacgagcuggacuacgccaacgacaucgagaagaagaucugcaagauggagaagugcagcuccguguucaacguggucaacagcuccaagcucgaguccacgcggaucuaccagauccuggcgaucuacagcaccgucgccagcucccuggugcucguggucagccugggggccaucuccuucuggaugugcagcaacggcucccugcagugccgcaucugcaucugaggacuagugcaucacauuuaaaagcaucucagccuaccaugagaauaagagaaagaaaaugaagaucaauagcuuauucaucucuuuuucuuuuucguugguguaaagccaacacccugucuaaaaaacauaaauuucuuuaaucauuuugccucuuuucucugugcuucaauuaauaaaaaauggaaagaaccuagaucuaaaaaaaaaaaaaaaaaaaaaaaaaaaaaaaaaaaaaaaaaaaaaaaaaaaaaaaaaaaaaaaaugcaucccccccccccccccccccccccccccccccaaaggcucuuuucagagccaccagaauu

SEQ ID NO: 1230 - RNA, 1391 nt, Artificial Sequence
  mRNA Design i-2 (A64-N5-C30-hSL-N5) comprising derived and/or modified sequence from Pf(3D7)__XP_001351122.1__HsALB_Pf-CSP(82-397) (opt1)
aggagaggcgcugccuacggagguggcagccaucuccuucucggcaucaagcuuaccaugaagugggugaccuucaucagccugcucuuccuguucuccagcgccuacuccgacaacgagaagcuccggaagcccaagcacaagaagcugaagcagccggccgacgggaaccccgaccccaacgccaaccccaacguggacccgaacgccaaccccaacgucgaccccaacgccaaccccaacguggacccgaacgcgaaccccaacgccaaccccaacgccaaccccaacgccaacccgaacgcgaaccccaacgccaaccccaacgccaaccccaacgccaacccgaacgccaaccccaacgcgaaccccaacgccaaccccaacgccaacccgaacgccaaccccaacgccaaccccaacgcgaaccccaacgccaacccgaacgccaaccccaacguggaccccaacgccaaccccaacgccaacccgaacgcgaaccccaacgccaaccccaacgccaacccgaacgccaaccccaacgccaaccccaacgcgaaccccaacgccaacccgaacgccaaccccaacgccaaccccaacgcgaaccccaacgccaacccgaacgccaaccccaacgccaaccccaacgccaaccccaacgcgaacccgaacgccaaccccaacaagaacaaccagggcaacggccaggggcacaacaugcccaacgaccccaaccgcaacgucgacgagaacgccaacgccaacuccgccgugaagaacaacaacaacgaggagccgagcgacaagcacaucaaggaguaccugaacaagauccagaacucccucagcacggaguggucccccugcagcgugaccugcggcaacgggauccagguccggaucaagcccggcuccgcgaacaagcccaaggacgagcuggacuacgccaacgacaucgagaagaagaucugcaagauggagaagugcagcuccguguucaacguggucaacagcuccaucgggcugaucauggugcucagcuuccuguuccugaacugaggacuagugcaucacauuuaaaagcaucucagccuaccaugagaauaagagaaagaaaaugaagaucaauagcuuauucaucucuuuuucuuuuucguugguguaaagccaacacccugucuaaaaaacauaaauuucuuuaaucauuuugccucuuuucucugugcuucaauuaauaaaaaauggaaagaaccuagaucuaaaaaaaaaaaaaaaaaaaaaaaaaaaaaaaaaaaaaaaaaaaaaaaaaaaaaaaaaaaaaaaaugcaucccccccccccccccccccccccccccccccaaaggcucuuuucagagccaccagaauu

SEQ ID NO: 1231 - RNA, 743 nt, Artificial Sequence
  mRNA Design i-2 (A64-N5-C30-hSL-N5) comprising derived and/or modified sequence from Pf(3D7)__XP_001351122.1__HsALB_Pf-CSP(93-192) (opt1)
aggagaggcgcugccuacggagguggcagccaucuccuucucggcaucaagcuuaccaugaagugggugaccuucaucagccugcucuuccuguucuccagcgccuacuccaagcugaagcagccggccgacgggaaccccgaccccaacgccaaccccaacguggacccgaacgccaaccccaacgucgaccccaacgccaaccccaacguggacccgaacgcgaaccccaacgccaaccccaacgccaaccccaacgccaacccgaacgcgaaccccaacgccaaccccaacgccaaccccaacgccaacccgaacgccaaccccaacgcgaaccccaacgccaaccccaacgccaacccgaacgccaaccccaacgccaaccccaacgcgaaccccaacgccaacccgugaggacuagugcaucacauuuaaaagcaucucagccuaccaugagaauaagagaaagaaaaugaagaucaauagcuuauucaucucuuuuucuuuuucguugguguaaagccaacacccugucuaaaaaacauaaauuucuuuaaucauuuugccucuuuucucugugcuucaauuaauaaaaaauggaaagaaccuagaucuaaaaaaaaaaaaaaaaaaaaaaaaaaaaaaaaaaaaaaaaaaaaaaaaaaaaaaaaaaaaaaaaugcaucccccccccccccccccccccccccccccccaaaggcucuuuucagagccaccagaauu

SEQ ID NO: 1232 - RNA, 983 nt, Artificial Sequence
  mRNA Design i-2 (A64-N5-C30-hSL-N5) comprising derived and/or modified sequence from Pf(3D7)__XP_001351122.1__HsALB_Pf-CSP(93-272) (opt1)
aggagaggcgcugccuacggagguggcagccaucuccuucucggcaucaagcuuaccaugaagugggugaccuucaucagccugcucuuccuguucuccagcgccuacuccaagcugaagcagccggccgacgggaaccccgaccccaacgccaaccccaacguggacccgaacgccaaccccaacgucgaccccaacgccaaccccaacguggacccgaacgcgaaccccaacgccaaccccaacgccaaccccaacgccaacccgaacgcgaaccccaacgccaaccccaacgccaaccccaacgccaacccgaacgccaaccccaacgcgaaccccaacgccaaccccaacgccaacccgaacgccaaccccaacgccaaccccaacgcgaaccccaacgccaacccgaacgccaaccccaacguggaccccaacgccaaccccaacgccaacccgaacgcgaaccccaacgccaaccccaacgccaacccgaacgccaaccccaacgccaaccccaacgcgaaccccaacgccaacccgaacgccaaccccaacgccaaccccaacgcgaaccccaacgccaacccgaacgccaaccccaacgccaaccccaacgccaaccccaacgcgaacccgaacgccaaccccugaggacuagugcaucacauuuaaaagcaucucagccuaccaugagaauaagagaaagaaaaugaagaucaauagcuuauucaucucuuuuucuuuuucguugguguaaagccaacacccugucuaaaaaacauaaauuucuuuaaucauuuugccucuuuucucugugcuucaauuaauaaaaaauggaaagaaccuagaucuaaaaaaaaaaaaaaaaaaaaaaaaaaaaaaaaaaaaaaaaaaaaaaaaaaaaaaaaaaaaaaaaugcaucccccccccccccccccccccccccccccccaaaggcucuuuucagagccaccagaauu

SEQ ID NO: 1233 - RNA, 1358 nt, Artificial Sequence
  mRNA Design i-2 (A64-N5-C30-hSL-N5) comprising derived and/or modified sequence from Pf(3D7)__XP_001351122.1__HsALB_Pf-CSP(93-397) (opt1)
aggagaggcgcugccuacggagguggcagccaucuccuucucggcaucaagcuuaccaugaagugggugaccuucaucagccugcucuuccuguucuccagcgccuacuccaagcugaagcagccggccgacgggaaccccgaccccaacgccaaccccaacguggacccgaacgccaaccccaacgucgaccccaacgccaaccccaacguggacccgaacgcgaaccccaacgccaaccccaacgccaaccccaacgccaacccgaacgcgaaccccaacgccaaccccaacgccaaccccaacgccaacccgaacgccaaccccaacgcgaaccccaacgccaaccccaacgccaacccgaacgccaaccccaacgccaaccccaacgcgaaccccaacgccaacccgaacgccaaccccaacguggaccccaacgccaaccccaacgccaacccgaacgcgaaccccaacgccaaccccaacgccaacccgaacgccaaccccaacgccaaccccaacgcgaaccccaacgccaacccgaacgccaaccccaacgccaaccccaacgcgaaccccaacgccaacccgaacgccaaccccaacgccaaccccaacgccaaccccaacgcgaacccgaacgccaaccccaacaagaacaaccagggcaacggccaggggcacaacaugcccaacgaccccaaccgcaacgucgacgagaacgccaacgccaacuccgccgugaagaacaacaacaacgaggagccgagcgacaagcacaucaaggaguaccugaacaagauccagaacucccucagcacggaguggucccccugcagcgugaccugcggcaacgggauccagguccggaucaagcccggcuccgcgaacaagcccaaggacgagcuggacuacgccaacgacaucgagaagaagaucugcaagauggagaagugcagcuccguguucaacguggucaacagcuccaucgggcugaucauggugcucagcuuccuguuccugaacugaggacuagugcaucacauuuaaaagcaucucagccuaccaugagaauaagagaaagaaaaugaagaucaauagcuuauucaucucuuuuucuuuuucguugguguaaagccaacacccugucuaaaaaacauaaauuucuuuaaucauuuugccucuuuucucugugcuucaauuaauaaaaaauggaaagaaccuagaucuaaaaaaaaaaaaaaaaaaaaaaaaaaaaaaaaaaaaaaaaaaaaaaaaaaaaaaaaaaaaaaaaugcaucccccccccccccccccccccccccccccccaaaggcucuuuucagagccaccagaauu

SEQ ID NO: 1234 - RNA, 728 nt, Artificial Sequence
  mRNA Design i-2 (A64-N5-C30-hSL-N5) comprising derived and/or modified sequence from Pf(3D7)__XP_001351122.1__HsALB_Pf-CSP(98-192) (opt1)
aggagaggcgcugccuacggagguggcagccaucuccuucucggcaucaagcuuaccaugaagugggugaccuucaucagccugcucuuccuguucuccagcgccuacuccgccgacgggaaccccgaccccaacgccaaccccaacguggacccgaacgccaaccccaacgucgaccccaacgccaaccccaacguggacccgaacgcgaaccccaacgccaaccccaacgccaaccccaacgccaacccgaacgcgaaccccaacgccaaccccaacgccaaccccaacgccaacccgaacgccaaccccaacgcgaaccccaacgccaaccccaacgccaacccgaacgccaaccccaacgccaaccccaacgcgaaccccaacgccaacccgugaggacuagugcaucacauuuaaaagcaucucagccuaccaugagaauaagagaaagaaaaugaagaucaauagcuuauucaucucuuuuucuuuuucguugguguaaagccaacacccugucuaaaaaacauaaauuucuuuaaucauuuugccucuuuucucugugcuucaauuaauaaaaaauggaaagaaccuagaucuaaaaaaaaaaaaaaaaaaaaaaaaaaaaaaaaaaaaaaaaaaaaaaaaaaaaaaaaaaaaaaaaugcaucccccccccccccccccccccccccccccccaaaggcucuuuucagagccaccagaauu

SEQ ID NO: 1235 - RNA, 968 nt, Artificial Sequence
  mRNA Design i-2 (A64-N5-C30-hSL-N5) comprising derived and/or modified sequence from Pf(3D7)__XP_001351122.1__HsALB_Pf-CSP(98-272) (opt1)
aggagaggcgcugccuacggagguggcagccaucuccuucucggcaucaagcuuaccaugaagugggugaccuucaucagccugcucuuccuguucuccagcgccuacuccgccgacgggaaccccgaccccaacgccaaccccaacguggacccgaacgccaaccccaacgucgaccccaacgccaaccccaacguggacccgaacgcgaaccccaacgccaaccccaacgccaaccccaacgccaacccgaacgcgaaccccaacgccaaccccaacgccaaccccaacgccaacccgaacgccaaccccaacgcgaaccccaacgccaaccccaacgccaacccgaacgccaaccccaacgccaaccccaacgcgaaccccaacgccaacccgaacgccaaccccaacguggaccccaacgccaaccccaacgccaacccgaacgcgaaccccaacgccaaccccaacgccaacccgaacgccaaccccaacgccaaccccaacgcgaaccccaacgccaacccgaacgccaaccccaacgccaaccccaacgcgaaccccaacgccaacccgaacgccaaccccaacgccaaccccaacgccaaccccaacgcgaacccgaacgccaaccccugaggacuagugcaucacauuuaaaagcaucucagccuaccaugagaauaagagaaagaaaaugaagaucaauagcuuauucaucucuuuuucuuuuucguugguguaaagccaacacccugucuaaaaaacauaaauuucuuuaaucauuuugccucuuuucucugugcuucaauuaauaaaaaauggaaagaaccuagaucuaaaaaaaaaaaaaaaaaaaaaaaaaaaaaaaaaaaaaaaaaaaaaaaaaaaaaaaaaaaaaaaaugcaucccccccccccccccccccccccccccccccaaaggcucuuuucagagccaccagaauu

SEQ ID NO: 1236 - RNA, 1274 nt, Artificial Sequence
  mRNA Design i-2 (A64-N5-C30-hSL-N5) comprising derived and/or modified sequence from Pf(3D7)__XP_001351122.1__HsALB_Pf-CSP(98-374) (opt1)
aggagaggcgcugccuacggagguggcagccaucuccuucucggcaucaagcuuaccaugaagugggugaccuucaucagccugcucuuccuguucuccagcgccuacuccgccgacgggaaccccgaccccaacgccaaccccaacguggacccgaacgccaaccccaacgucgaccccaacgccaaccccaacguggacccgaacgcgaaccccaacgccaaccccaacgccaaccccaacgccaacccgaacgcgaaccccaacgccaaccccaacgccaaccccaacgccaacccgaacgccaaccccaacgcgaaccccaacgccaaccccaacgccaacccgaacgccaaccccaacgccaaccccaacgcgaaccccaacgccaacccgaacgccaaccccaacguggaccccaacgccaaccccaacgccaacccgaacgcgaaccccaacgccaaccccaacgccaacccgaacgccaaccccaacgccaaccccaacgcgaaccccaacgccaacccgaacgccaaccccaacgccaaccccaacgcgaaccccaacgccaacccgaacgccaaccccaacgccaaccccaacgccaaccccaacgcgaacccgaacgccaaccccaacaagaacaaccagggcaacggccaggggcacaacaugcccaacgaccccaaccgcaacgucgacgagaacgccaacgccaacuccgccgugaagaacaacaacaacgaggagccgagcgacaagcacaucaaggaguaccugaacaagauccagaacucccucagcacggaguggucccccugcagcgugaccugcggcaacgggauccagguccggaucaagcccggcuccgcgaacaagcccaaggacgagcuggacuacgccaacgacaucgagaagaagaucugcaagauggagaagugcugaggacuagugcaucacauuuaaaagcaucucagccuaccaugagaauaagagaaagaaaaugaagaucaauagcuuauucaucucuuuuucuuuuucguugguguaaagccaacacccugucuaaaaaacauaaauuucuuuaaucauuuugccucuuuucucugugcuucaauuaauaaaaaauggaaagaaccuagaucuaaaaaaaaaaaaaaaaaaaaaaaaaaaaaaaaaaaaaaaaaaaaaaaaaaaaaaaaaaaaaaaaugcaucccccccccccccccccccccccccccccccaaaggcucuuuucagagccaccagaauu

SEQ ID NO: 1237 - RNA, 1343 nt, Artificial Sequence
  mRNA Design i-2 (A64-N5-C30-hSL-N5) comprising derived and/or modified sequence from Pf(3D7)__XP_001351122.1__HsALB_Pf-CSP(98-397) (opt1)
aggagaggcgcugccuacggagguggcagccaucuccuucucggcaucaagcuuaccaugaagugggugaccuucaucagccugcucuuccuguucuccagcgccuacuccgccgacgggaaccccgaccccaacgccaaccccaacguggacccgaacgccaaccccaacgucgaccccaacgccaaccccaacguggacccgaacgcgaaccccaacgccaaccccaacgccaaccccaacgccaacccgaacgcgaaccccaacgccaaccccaacgccaaccccaacgccaacccgaacgccaaccccaacgcgaaccccaacgccaaccccaacgccaacccgaacgccaaccccaacgccaaccccaacgcgaaccccaacgccaacccgaacgccaaccccaacguggaccccaacgccaaccccaacgccaacccgaacgcgaaccccaacgccaaccccaacgccaacccgaacgccaaccccaacgccaaccccaacgcgaaccccaacgccaacccgaacgccaaccccaacgccaaccccaacgcgaaccccaacgccaacccgaacgccaaccccaacgccaaccccaacgccaaccccaacgcgaacccgaacgccaaccccaacaagaacaaccagggcaacggccaggggcacaacaugcccaacgaccccaaccgcaacgucgacgagaacgccaacgccaacuccgccgugaagaacaacaacaacgaggagccgagcgacaagcacaucaaggaguaccugaacaagauccagaacucccucagcacggaguggucccccugcagcgugaccugcggcaacgggauccagguccggaucaagcccggcuccgcgaacaagcccaaggacgagcuggacuacgccaacgacaucgagaagaagaucugcaagauggagaagugcagcuccguguucaacguggucaacagcuccaucgggcugaucauggugcucagcuuccuguuccugaacugaggacuagugcaucacauuuaaaagcaucucagccuaccaugagaauaagagaaagaaaaugaagaucaauagcuuauucaucucuuuuucuuuuucguugguguaaagccaacacccugucuaaaaaacauaaauuucuuuaaucauuuugccucuuuucucugugcuucaauuaauaaaaaauggaaagaaccuagaucuaaaaaaaaaaaaaaaaaaaaaaaaaaaaaaaaaaaaaaaaaaaaaaaaaaaaaaaaaaaaaaaaugcaucccccccccccccccccccccccccccccccaaaggcucuuuucagagccaccagaauu

SEQ ID NO: 1238 - RNA, 1670 nt, Artificial Sequence
  mRNA Design i-2 (A64-N5-C30-hSL-N5) comprising derived and/or modified sequence from Pf(3D7)__XP_001351122.1__HsALB_Pf-CSP(199-377)_L(PVTN)_HBsAg (opt1)
aggagaggcgcugccuacggagguggcagccaucuccuucucggcaucaagcuuaccaugaaguggguaaccuuuauuucccuucuuuuucucuuuagcucggcuuauuccgaccccaacgccaaccccaacgccaacccgaacgcgaaccccaacgccaaccccaacgccaacccgaacgccaaccccaacgccaaccccaacgcgaaccccaacgccaacccgaacgccaaccccaacgccaaccccaacgcgaaccccaacgccaacccgaacgccaaccccaacgccaaccccaacgccaaccccaacgcgaacccgaacgccaaccccaacaagaacaaccagggcaacggccaggggcacaacaugcccaacgaccccaaccgcaacgucgacgagaacgccaacgccaacuccgccgugaagaacaacaacaacgaggagccgagcgacaagcacaucaaggaguaccugaacaagauccagaacucccucagcacggaguggucccccugcagcgugaccugcggcaacgggauccagguccggaucaagcccggcuccgcgaacaagcccaaggacgagcuggacuacgccaacgacaucgagaagaagaucugcaagauggagaagugcagcuccgugccggugacgaacauggagaacaucaccagcggcuuccuggggccccuccuggugcugcaggccggcuucuuccuccugacccgcauccugaccaucccgcagucccucgacagcugguggaccucccugaacuuccucgggggcagccccgucugccuggggcagaacucccagagccccaccuccaaccacagccccaccuccugcccgcccaucugccccggcuaccgguggaugugccugcgccgguucaucaucuuccuguucauccuccugcugugccucaucuuccugcuggugcuccuggacuaccagggcaugcugcccgugugcccgcucauccccgggagcacgaccaccaacaccggccccugcaagacgugcaccacccccgcccaggggaacuccauguucccgagcugcugcugcaccaagcccacggacggcaacugcacgugcauccccauccccuccagcugggcguucgccaaguaccugugggagugggccuccguccgcuucagcuggcugucccuccuggugccguucgugcagugguucgucgggcugagccccaccguguggcucuccgccaucuggaugaugugguacuggggccccagccuguacagcaucgugucccccuucaucccgcugcuccccaucuucuucugccugugggucuacaucugaggacuagugcaucacauuuaaaagcaucucagccuaccaugagaauaagagaaagaaaaugaagaucaauagcuuauucaucucuuuuucuuuuucguugguguaaagccaacacccugucuaaaaaacauaaauuucuuuaaucauuuugccucuuuucucugugcuucaauuaauaaaaaauggaaagaaccuagaucuaaaaaaaaaaaaaaaaaaaaaaaaaaaaaaaaaaaaaaaaaaaaaaaaaaaaaaaaaaaaaaaaugcaucccccccccccccccccccccccccccccccaaaggcucuuuucagagccaccagaauu

SEQ ID NO: 1239 - RNA, 1409 nt, Artificial Sequence
  mRNA Design i-2 (A64-N5-C30-hSL-N5) comprising derived and/or modified sequence from Pb(ANKA)__XP_022712148.1__Pb-CSP (opt1)
aggagaggcgcugccuacggagguggcagccaucuccuucucggcaucaagcuuaccaugaagaagugcaccauccugguggucgccagccuccugcuggugaacucccuccugcccggcuacgggcagaacaagagcauccaggcccagcgcaaccugaacgagcucugcuacaacgagggcaacgacaacaagcuguaccacgugcugaacuccaagaacgggaagaucuacaaccggaacaccgucaaccgccuccuggcggacgccccggagggcaagaagaacgagaagaagaacgagaagaucgagcggaacaacaagcugaagcagccgcccccgccgcccaaccccaacgacccgccgccgcccaaccccaacgacccgcccccgcccaacccgaacgacccgcccccgccgaaccccaacgacccgcccccgcccaacgccaacgacccgcccccgcccaacgccaacgaccccgccccgcccaacgcgaacgaccccgccccgccgaacgccaacgaccccgccccgcccaacgcgaacgacccggccccgcccaacgccaacgacccgccgccgcccaaccccaacgacccggccccgcccaacgccaacgacccgccgcccccgaaccccaacgacccggcgccgccccaggggaacaacaacccgcagccccagccccgcccccagccgcagccccagccccagccccagccgcagccccagccccagccccagccgcggccccagccccagccccagccgggcggcaacaacaacaacaagaacaacaacaacgacgacagcuacauccccuccgccgagaagauccucgaguucgugaagcagauccgcgacagcaucacggaggaguggucccagugcaacgugaccugcgggagcggcauccggguccgcaagcggaagggguccaacaagaaggccgaggaccugacccuggaggacaucgacaccgagaucugcaagauggacaagugcagcuccaucuucaacaucgugagcaacucccucggcuucgugauccugcugguccucguguucuucaacugaggacuagugcaucacauuuaaaagcaucucagccuaccaugagaauaagagaaagaaaaugaagaucaauagcuuauucaucucuuuuucuuuuucguugguguaaagccaacacccugucuaaaaaacauaaauuucuuuaaucauuuugccucuuuucucugugcuucaauuaauaaaaaauggaaagaaccuagaucuaaaaaaaaaaaaaaaaaaaaaaaaaaaaaaaaaaaaaaaaaaaaaaaaaaaaaaaaaaaaaaaaugcaucccccccccccccccccccccccccccccccaaaggcucuuuucagagccaccagaauu

SEQ ID NO: 1240 - RNA, 1574 nt, Artificial Sequence
  mRNA Design i-2 (A64-N5-C30-hSL-N5) comprising derived and/or modified sequence from Pb(ANKA)__XP_022712148.1__Pb-CSP_L(G4SG4)_TM domain HA (opt1)
aggagaggcgcugccuacggagguggcagccaucuccuucucggcaucaagcuuaccaugaagaagugcaccauccugguggucgccagccuccugcuggugaacucccuccugcccggcuacgggcagaacaagagcauccaggcccagcgcaaccugaacgagcucugcuacaacgagggcaacgacaacaagcuguaccacgugcugaacuccaagaacgggaagaucuacaaccggaacaccgucaaccgccuccuggcggacgccccggagggcaagaagaacgagaagaagaacgagaagaucgagcggaacaacaagcugaagcagccgcccccgccgcccaaccccaacgacccgccgccgcccaaccccaacgacccgcccccgcccaacccgaacgacccgcccccgccgaaccccaacgacccgcccccgcccaacgccaacgacccgcccccgcccaacgccaacgaccccgccccgcccaacgcgaacgaccccgccccgccgaacgccaacgaccccgccccgcccaacgcgaacgacccggccccgcccaacgccaacgacccgccgccgcccaaccccaacgacccggccccgcccaacgccaacgacccgccgcccccgaaccccaacgacccggcgccgccccaggggaacaacaacccgcagccccagccccgcccccagccgcagccccagccccagccccagccgcagccccagccccagccccagccgcggccccagccccagccccagccgggcggcaacaacaacaacaagaacaacaacaacgacgacagcuacauccccuccgccgagaagauccucgaguucgugaagcagauccgcgacagcaucacggaggaguggucccagugcaacgugaccugcgggagcggcauccggguccgcaagcggaagggguccaacaagaaggccgaggaccugacccuggaggacaucgacaccgagaucugcaagauggacaagugcagcuccaucuucaacaucgugagcaacucccucggcuucgugauccugcugguccucguguucuucaacggcgggggcgggagcggcgggggcggcaagcucgaguccacgcggaucuaccagauccuggcgaucuacagcaccgucgccagcucccuggugcucguggucagccugggggccaucuccuucuggaugugcagcaacggcucccugcagugccgcaucugcaucugaggacuagugcaucacauuuaaaagcaucucagccuaccaugagaauaagagaaagaaaaugaagaucaauagcuuauucaucucuuuuucuuuuucguugguguaaagccaacacccugucuaaaaaacauaaauuucuuuaaucauuuugccucuuuucucugugcuucaauuaauaaaaaauggaaagaaccuagaucuaaaaaaaaaaaaaaaaaaaaaaaaaaaaaaaaaaaaaaaaaaaaaaaaaaaaaaaaaaaaaaaaugcaucccccccccccccccccccccccccccccccaaaggcucuuuucagagccaccagaauu

SEQ ID NO: 1241 - RNA, 1394 nt, Artificial Sequence
  mRNA Design i-2 (A64-N5-C30-hSL-N5) comprising derived and/or modified sequence from Pb(ANKA)__XP_022712148.1__HsALB_Pb-CSP(24-340) (opt1)
aggagaggcgcugccuacggagguggcagccaucuccuucucggcaucaagcuuaccaugaagugggugaccuucaucagccugcucuuccuguucuccagcgccuacucccagaacaagagcauccaggcccagcgcaaccugaacgagcucugcuacaacgagggcaacgacaacaagcuguaccacgugcugaacuccaagaacgggaagaucuacaaccggaacaccgucaaccgccuccuggcggacgccccggagggcaagaagaacgagaagaagaacgagaagaucgagcggaacaacaagcugaagcagccgcccccgccgcccaaccccaacgacccgccgccgcccaaccccaacgacccgcccccgcccaacccgaacgacccgcccccgccgaaccccaacgacccgcccccgcccaacgccaacgacccgcccccgcccaacgccaacgaccccgccccgcccaacgcgaacgaccccgccccgccgaacgccaacgaccccgccccgcccaacgcgaacgacccggccccgcccaacgccaacgacccgccgccgcccaaccccaacgacccggccccgcccaacgccaacgacccgccgcccccgaaccccaacgacccggcgccgccccaggggaacaacaacccgcagccccagccccgcccccagccgcagccccagccccagccccagccgcagccccagccccagccccagccgcggccccagccccagccccagccgggcggcaacaacaacaacaagaacaacaacaacgacgacagcuacauccccuccgccgagaagauccucgaguucgugaagcagauccgcgacagcaucacggaggaguggucccagugcaacgugaccugcgggagcggcauccggguccgcaagcggaagggguccaacaagaaggccgaggaccugacccuggaggacaucgacaccgagaucugcaagauggacaagugcagcuccaucuucaacaucgugagcaacucccucggcuucgugauccugcugguccucguguucuucaacugaggacuagugcaucacauuuaaaagcaucucagccuaccaugagaauaagagaaagaaaaugaagaucaauagcuuauucaucucuuuuucuuuuucguugguguaaagccaacacccugucuaaaaaacauaaauuucuuuaaucauuuugccucuuuucucugugcuucaauuaauaaaaaauggaaagaaccuagaucuaaaaaaaaaaaaaaaaaaaaaaaaaaaaaaaaaaaaaaaaaaaaaaaaaaaaaaaaaaaaaaaaugcaucccccccccccccccccccccccccccccccaaaggcucuuuucagagccaccagaauu

SEQ ID NO: 1242 - RNA, 1412 nt, Artificial Sequence
  mRNA Design i-2 (A64-N5-C30-hSL-N5) comprising derived and/or modified sequence from Pb(ANKA)__XP_022712148.1__HsIns-iso1_Pb-CSP(24-340) (opt1)
aggagaggcgcugccuacggagguggcagccaucuccuucucggcaucaagcuuaccauggcccuguggaugcgccuccugccccugcucgcccugcuggcgcucuggggcccggaccccgccgccgcccagaacaagagcauccaggcccagcgcaaccugaacgagcucugcuacaacgagggcaacgacaacaagcuguaccacgugcugaacuccaagaacgggaagaucuacaaccggaacaccgucaaccgccuccuggcggacgccccggagggcaagaagaacgagaagaagaacgagaagaucgagcggaacaacaagcugaagcagccgcccccgccgcccaaccccaacgacccgccgccgcccaaccccaacgacccgcccccgcccaacccgaacgacccgcccccgccgaaccccaacgacccgcccccgcccaacgccaacgacccgcccccgcccaacgccaacgaccccgccccgcccaacgcgaacgaccccgccccgccgaacgccaacgaccccgccccgcccaacgcgaacgacccggccccgcccaacgccaacgacccgccgccgcccaaccccaacgacccggccccgcccaacgccaacgacccgccgcccccgaaccccaacgacccggcgccgccccaggggaacaacaacccgcagccccagccccgcccccagccgcagccccagccccagccccagccgcagccccagccccagccccagccgcggccccagccccagccccagccgggcggcaacaacaacaacaagaacaacaacaacgacgacagcuacauccccuccgccgagaagauccucgaguucgugaagcagauccgcgacagcaucacggaggaguggucccagugcaacgugaccugcgggagcggcauccggguccgcaagcggaagggguccaacaagaaggccgaggaccugacccuggaggacaucgacaccgagaucugcaagauggacaagugcagcuccaucuucaacaucgugagcaacucccucggcuucgugauccugcugguccucguguucuucaacugaggacuagugcaucacauuuaaaagcaucucagccuaccaugagaauaagagaaagaaaaugaagaucaauagcuuauucaucucuuuuucuuuuucguugguguaaagccaacacccugucuaaaaaacauaaauuucuuuaaucauuuugccucuuuucucugugcuucaauuaauaaaaaauggaaagaaccuagaucuaaaaaaaaaaaaaaaaaaaaaaaaaaaaaaaaaaaaaaaaaaaaaaaaaaaaaaaaaaaaaaaaugcaucccccccccccccccccccccccccccccccaaaggcucuuuucagagccaccagaauu

SEQ ID NO: 1243 - RNA, 1391 nt, Artificial Sequence
  mRNA Design i-2 (A64-N5-C30-hSL-N5) comprising derived and/or modified sequence from Pb(ANKA)__XP_022712148.1__HsSPARC_Pb-CSP(24-340) (opt1)
aggagaggcgcugccuacggagguggcagccaucuccuucucggcaucaagcuuaccaugcgcgccuggaucuucuuccugcucugccuggccggccgggcccuggcccagaacaagagcauccaggcccagcgcaaccugaacgagcucugcuacaacgagggcaacgacaacaagcuguaccacgugcugaacuccaagaacgggaagaucuacaaccggaacaccgucaaccgccuccuggcggacgccccggagggcaagaagaacgagaagaagaacgagaagaucgagcggaacaacaagcugaagcagccgcccccgccgcccaaccccaacgacccgccgccgcccaaccccaacgacccgcccccgcccaacccgaacgacccgcccccgccgaaccccaacgacccgcccccgcccaacgccaacgacccgcccccgcccaacgccaacgaccccgccccgcccaacgcgaacgaccccgccccgccgaacgccaacgaccccgccccgcccaacgcgaacgacccggccccgcccaacgccaacgacccgccgccgcccaaccccaacgacccggccccgcccaacgccaacgacccgccgcccccgaaccccaacgacccggcgccgccccaggggaacaacaacccgcagccccagccccgcccccagccgcagccccagccccagccccagccgcagccccagccccagccccagccgcggccccagccccagccccagccgggcggcaacaacaacaacaagaacaacaacaacgacgacagcuacauccccuccgccgagaagauccucgaguucgugaagcagauccgcgacagcaucacggaggaguggucccagugcaacgugaccugcgggagcggcauccggguccgcaagcggaagggguccaacaagaaggccgaggaccugacccuggaggacaucgacaccgagaucugcaagauggacaagugcagcuccaucuucaacaucgugagcaacucccucggcuucgugauccugcugguccucguguucuucaacugaggacuagugcaucacauuuaaaagcaucucagccuaccaugagaauaagagaaagaaaaugaagaucaauagcuuauucaucucuuuuucuuuuucguugguguaaagccaacacccugucuaaaaaacauaaauuucuuuaaucauuuugccucuuuucucugugcuucaauuaauaaaaaauggaaagaaccuagaucuaaaaaaaaaaaaaaaaaaaaaaaaaaaaaaaaaaaaaaaaaaaaaaaaaaaaaaaaaaaaaaaaugcaucccccccccccccccccccccccccccccccaaaggcucuuuucagagccaccagaauu

SEQ ID NO: 1244 - RNA, 1394 nt, Artificial Sequence
  mRNA Design i-2 (A64-N5-C30-hSL-N5) comprising derived and/or modified sequence from Pb(ANKA)__XP_022712148.1__IgE_Pb-CSP(24-340) (opt1)
aggagaggcgcugccuacggagguggcagccaucuccuucucggcaucaagcuuaccauggacuggaccuggauccuguuccucguggccgccgcgacccgcguccacagccagaacaagagcauccaggcccagcgcaaccugaacgagcucugcuacaacgagggcaacgacaacaagcuguaccacgugcugaacuccaagaacgggaagaucuacaaccggaacaccgucaaccgccuccuggcggacgccccggagggcaagaagaacgagaagaagaacgagaagaucgagcggaacaacaagcugaagcagccgcccccgccgcccaaccccaacgacccgccgccgcccaaccccaacgacccgcccccgcccaacccgaacgacccgcccccgccgaaccccaacgacccgcccccgcccaacgccaacgacccgcccccgcccaacgccaacgaccccgccccgcccaacgcgaacgaccccgccccgccgaacgccaacgaccccgccccgcccaacgcgaacgacccggccccgcccaacgccaacgacccgccgccgcccaaccccaacgacccggccccgcccaacgccaacgacccgccgcccccgaaccccaacgacccggcgccgccccaggggaacaacaacccgcagccccagccccgcccccagccgcagccccagccccagccccagccgcagccccagccccagccccagccgcggccccagccccagccccagccgggcggcaacaacaacaacaagaacaacaacaacgacgacagcuacauccccuccgccgagaagauccucgaguucgugaagcagauccgcgacagcaucacggaggaguggucccagugcaacgugaccugcgggagcggcauccggguccgcaagcggaagggguccaacaagaaggccgaggaccugacccuggaggacaucgacaccgagaucugcaagauggacaagugcagcuccaucuucaacaucgugagcaacucccucggcuucgugauccugcugguccucguguucuucaacugaggacuagugcaucacauuuaaaagcaucucagccuaccaugagaauaagagaaagaaaaugaagaucaauagcuuauucaucucuuuuucuuuuucguugguguaaagccaacacccugucuaaaaaacauaaauuucuuuaaucauuuugccucuuuucucugugcuucaauuaauaaaaaauggaaagaaccuagaucuaaaaaaaaaaaaaaaaaaaaaaaaaaaaaaaaaaaaaaaaaaaaaaaaaaaaaaaaaaaaaaaaugcaucccccccccccccccccccccccccccccccaaaggcucuuuucagagccaccagaauu

SEQ ID NO: 1245 - RNA, 1580 nt, Artificial Sequence; identical to SEQ ID NO: 1209
  mRNA Design i-2 (A64-N5-C30-hSL-N5) comprising derived and/or modified sequence from Pf(3D7)__XP_001351122.1__Pf-CSP (opt1)

SEQ ID NO: 1246 - RNA, 1511 nt, Artificial Sequence; identical to SEQ ID NO: 1210
  mRNA Design i-2 (A64-N5-C30-hSL-N5) comprising derived and/or modified sequence from Pf(3D7)__XP_001351122.1__Pf-CSP(1-374) (opt1)

SEQ ID NO: 1247 - RNA, 1364 nt, Artificial Sequence; identical to SEQ ID NO: 1211
  mRNA Design i-2 (A64-N5-C30-hSL-N5) comprising derived and/or modified sequence from Pf(3D7)__XP_001351122.1__Pf-CSP(1-325) (opt1)

SEQ ID NO: 1248 - RNA, 1580 nt, Artificial Sequence
  mRNA Design i-2 (A64-N5-C30-hSL-N5) comprising derived and/or modified sequence from Pf(3D7)__XP_001351122.1__HsALB_Pf-CSP(19-397) (opt1)
aggagaggcgcugccuacggagguggcagccaucuccuucucggcaucaagcuuaccaugaagugggugaccuucaucagccuccuguuccuguucuccagcgccuacucccuguuccaggaguaccagugcuacggcagcuccagcaacacccgcguccucaacgagcugaacuacgacaacgccgggacgaaccuguacaacgagcucgagaugaacuacuacggcaagcaggagaacugguacucccugaagaagaacagccggucccugggggagaacgacgacggcaacaacgaggacaacgagaagcuccgcaagcccaagcacaagaagcugaagcagccggcggacgggaaccccgaccccaacgccaaccccaacguggacccgaacgccaaccccaacguggaccccaacgccaaccccaacgucgacccgaacgccaaccccaacgcgaaccccaacgccaaccccaacgccaacccgaacgccaaccccaacgcgaaccccaacgccaaccccaacgccaacccgaacgccaaccccaacgccaaccccaacgcgaaccccaacgccaacccgaacgccaaccccaacgccaaccccaacgccaaccccaacgcgaacccgaacgccaaccccaacguggaccccaacgccaaccccaacgccaacccgaacgccaaccccaacgcgaaccccaacgccaacccgaacgccaaccccaacgccaaccccaacgccaaccccaacgcgaacccgaacgccaaccccaacgccaaccccaacgccaaccccaacgcgaacccgaacgccaaccccaacgccaaccccaacgccaaccccaacgccaacccgaacgcgaaccccaacaagaacaaccagggcaacggccaggggcacaacaugcccaacgaccccaaccggaacguggacgagaacgccaacgccaacagcgccgucaagaacaacaacaacgaggagccguccgacaagcacaucaaggaguaccugaacaagauccagaacagccucuccaccgaguggagccccugcuccgugaccugcggcaacgggauccaggugcgcaucaagcccggcagcgccaacaagcccaaggacgagcuggacuacgcgaacgacaucgagaagaagaucugcaagauggagaagugcuccagcgucuucaacguggugaacuccagcaucgggcugaucaugguccucagcuuccuguuccugaacugaggacuagugcaucacauuuaaaagcaucucagccuaccaugagaauaagagaaagaaaaugaagaucaauagcuuauucaucucuuuuucuuuuucguugguguaaagccaacacccugucuaaaaaacauaaauuucuuuaaucauuuugccucuuuucucugugcuucaauuaauaaaaaauggaaagaaccuagaucuaaaaaaaaaaaaaaaaaaaaaaaaaaaaaaaaaaaaaaaaaaaaaaaaaaaaaaaaaaaaaaaaugcaucccccccccccccccccccccccccccccccaaaggcucuuuucagagccaccagaauu

SEQ ID NO: 1249 - RNA, 1598 nt, Artificial Sequence
  mRNA Design i-2 (A64-N5-C30-hSL-N5) comprising derived and/or modified sequence from Pf(3D7)__XP_001351122.1__HsIns-iso1_Pf-CSP(19-397) (opt1)
aggagaggcgcugccuacggagguggcagccaucuccuucucggcaucaagcuuaccauggcccuguggaugcgccuccugccccugcucgcccugcuggcgcucuggggcccggaccccgccgccgcccuguuccaggaguaccagugcuacgggagcuccagcaacacccgggugcugaacgagcucaacuacgacaacgccggcaccaaccuguacaacgagcuggagaugaacuacuacgggaagcaggagaacugguacucccucaagaagaacagccgcucccugggcgagaacgacgacgggaacaacgaggacaacgagaagcugcggaagcccaagcacaagaagcucaagcagcccgcggacggcaacccggaccccaacgccaaccccaacgucgaccccaacgccaacccgaacguggaccccaacgccaaccccaacguggaccccaacgcgaacccgaacgccaaccccaacgccaaccccaacgccaaccccaacgccaacccgaacgcgaaccccaacgccaaccccaacgccaaccccaacgccaacccgaacgccaaccccaacgcgaaccccaacgccaaccccaacgccaacccgaacgccaaccccaacgccaaccccaacgcgaaccccaacgccaacccgaacgucgaccccaacgccaaccccaacgccaacccgaacgccaaccccaacgcgaaccccaacgccaaccccaacgccaacccgaacgccaaccccaacgcgaaccccaacgccaaccccaacgccaacccgaacgccaaccccaacgccaaccccaacgcgaaccccaacgccaacccgaacgccaaccccaacgccaaccccaacgccaaccccaacgcgaacccgaacaagaacaaccagggcaacgggcagggccacaacaugcccaacgaccccaaccgcaacguggacgagaacgccaacgccaacagcgccgugaagaacaacaacaacgaggagcccuccgacaagcacaucaaggaguaccugaacaagauccagaacagccuguccacggaguggagcccgugcuccgugaccugcgggaacggcauccagguccggaucaagcccgggagcgccaacaagcccaaggacgagcucgacuacgcgaacgacaucgagaagaagaucugcaagauggagaagugcuccagcguguucaacgucgugaacuccagcaucggccugaucauggugcuguccuuccucuuccugaacugaggacuagugcaucacauuuaaaagcaucucagccuaccaugagaauaagagaaagaaaaugaagaucaauagcuuauucaucucuuuuucuuuuucguugguguaaagccaacacccugucuaaaaaacauaaauuucuuuaaucauuuugccucuuuucucugugcuucaauuaauaaaaaauggaaagaaccuagaucuaaaaaaaaaaaaaaaaaaaaaaaaaaaaaaaaaaaaaaaaaaaaaaaaaaaaaaaaaaaaaaaaugcaucccccccccccccccccccccccccccccccaaaggcucuuuucagagccaccagaauu

SEQ ID NO: 1250 - RNA, 1577 nt, Artificial Sequence
  mRNA Design i-2 (A64-N5-C30-hSL-N5) comprising derived and/or modified sequence from Pf(3D7)__XP_001351122.1__HsSPARC_Pf-CSP(19-397) (opt1)
aggagaggcgcugccuacggagguggcagccaucuccuucucggcaucaagcuuaccaugcgcgccuggaucuucuuccugcucugccuggccggccgggcgcuggcccucuuccaggaguaccagugcuacgggagcuccagcaacacccgcgugcugaacgagcugaacuacgacaacgccggcaccaaccucuacaacgagcuggagaugaacuacuacgggaagcaggagaacugguacucccugaagaagaacagccggucccucggcgagaacgacgacgggaacaacgaggacaacgagaagcugcgcaagcccaagcacaagaagcugaagcagccggccgacggcaaccccgaccccaacgccaaccccaacgucgacccgaacgcgaaccccaacguggaccccaacgccaaccccaacguggacccgaacgccaaccccaacgccaaccccaacgcgaaccccaacgccaacccgaacgccaaccccaacgccaaccccaacgccaaccccaacgcgaacccgaacgccaaccccaacgccaaccccaacgccaaccccaacgccaacccgaacgcgaaccccaacgccaaccccaacgccaaccccaacgccaacccgaacgccaaccccaacgucgaccccaacgcgaaccccaacgccaacccgaacgccaaccccaacgccaaccccaacgccaacccgaacgcgaaccccaacgccaaccccaacgccaaccccaacgccaacccgaacgcgaaccccaacgccaaccccaacgccaaccccaacgccaacccgaacgccaaccccaacgcgaaccccaacgccaaccccaacgccaacccgaacgccaaccccaacaagaacaaccagggcaacgggcagggccacaacaugcccaacgaccccaaccggaacguggacgagaacgccaacgcgaacagcgccgugaagaacaacaacaacgaggagccguccgacaagcacaucaaggaguaccucaacaagauccagaacagccuguccacggaguggagccccugcuccgugaccugcgggaacggcauccagguccgcaucaagcccgggagcgccaacaagcccaaggacgagcuggacuacgccaacgacaucgagaagaagaucugcaagauggagaagugcuccagcguguucaacgucgugaacuccagcaucggccucaucauggugcuguccuuccuguuccucaacugaggacuagugcaucacauuuaaaagcaucucagccuaccaugagaauaagagaaagaaaaugaagaucaauagcuuauucaucucuuuuucuuuuucguugguguaaagccaacacccugucuaaaaaacauaaauuucuuuaaucauuuugccucuuuucucugugcuucaauuaauaaaaaauggaaagaaccuagaucuaaaaaaaaaaaaaaaaaaaaaaaaaaaaaaaaaaaaaaaaaaaaaaaaaaaaaaaaaaaaaaaaugcaucccccccccccccccccccccccccccccccaaaggcucuuuucagagccaccagaauu

SEQ ID NO: 1251 - RNA, 1580 nt, Artificial Sequence
  mRNA Design i-2 (A64-N5-C30-hSL-N5) comprising derived and/or modified sequence from Pf(3D7)__XP_001351122.1__IgE_Pf-CSP(19-397) (opt1)
aggagaggcgcugccuacggagguggcagccaucuccuucucggcaucaagcuuaccauggacuggaccuggauccuguuccucguggccgccgcgacccgcguccacagccuguuccaggaguaccagugcuacggcuccagcuccaacacgcgggugcugaacgagcucaacuacgacaacgccgggaccaaccuguacaacgagcuggagaugaacuacuacggcaagcaggagaacugguacagccucaagaagaacucccgcagccugggggagaacgacgacggcaacaacgaggacaacgagaagcugcggaagcccaagcacaagaagcucaagcagccggccgacgggaaccccgaccccaacgccaaccccaacguggacccgaacgccaaccccaacgucgaccccaacgcgaaccccaacguggacccgaacgccaaccccaacgccaaccccaacgccaaccccaacgcgaacccgaacgccaaccccaacgccaaccccaacgccaaccccaacgccaacccgaacgcgaaccccaacgccaaccccaacgccaaccccaacgccaacccgaacgccaaccccaacgcgaaccccaacgccaaccccaacgccaacccgaacgccaaccccaacguggaccccaacgccaaccccaacgcgaacccgaacgccaaccccaacgccaaccccaacgccaacccgaacgccaaccccaacgcgaaccccaacgccaaccccaacgccaacccgaacgccaaccccaacgcgaaccccaacgccaaccccaacgccaacccgaacgccaaccccaacgccaaccccaacgcgaaccccaacgccaacccgaacgccaaccccaacaagaacaaccagggcaacggccaggggcacaacaugcccaacgaccccaaccgcaacgucgacgagaacgccaacgccaacuccgcggugaagaacaacaacaacgaggagccgagcgacaagcacaucaaggaguaccugaacaagauccagaacucccugagcaccgaguggucccccugcagcgugaccugcggcaacgggauccagguccggaucaagcccggcuccgccaacaagcccaaggacgagcucgacuacgccaacgacaucgagaagaagaucugcaagauggagaagugcagcuccguguucaacguggucaacagcuccaucgggcugaucauggugcugagcuuccucuuccugaacugaggacuagugcaucacauuuaaaagcaucucagccuaccaugagaauaagagaaagaaaaugaagaucaauagcuuauucaucucuuuuucuuuuucguugguguaaagccaacacccugucuaaaaaacauaaauuucuuuaaucauuuugccucuuuucucugugcuucaauuaauaaaaaauggaaagaaccuagaucuaaaaaaaaaaaaaaaaaaaaaaaaaaaaaaaaaaaaaaaaaaaaaaaaaaaaaaaaaaaaaaaaugcaucccccccccccccccccccccccccccccccaaaggcucuuuucagagccaccagaauu

SEQ ID NO: 1252 - RNA, 1745 nt, Artificial Sequence
  mRNA Design i-2 (A64-N5-C30-hSL-N5) comprising derived and/or modified sequence from Pf(3D7)__XP_001351122.1__Pf-CSP_L(G4SG4)_TM domain HA (opt1)
aggagaggcgcugccuacggagguggcagccaucuccuucucggcaucaagcuuaccaugaugcgcaagcuggccauccucagcguguccagcuuccuguucgucgaggcccuguuccaggaguaccagugcuacggcuccagcuccaacacccgggugcucaacgagcugaacuacgacaacgcggggaccaaccuguacaacgagcucgagaugaacuacuacggcaagcaggagaacugguacagccugaagaagaacucccgcagccugggggagaacgacgacggcaacaacgaggacaacgagaagcuccggaagcccaagcacaagaagcugaagcagccggccgacgggaaccccgaccccaacgccaaccccaacguggacccgaacgccaaccccaacgucgaccccaacgccaaccccaacguggacccgaacgcgaaccccaacgccaaccccaacgccaaccccaacgccaacccgaacgcgaaccccaacgccaaccccaacgccaaccccaacgccaacccgaacgccaaccccaacgcgaaccccaacgccaaccccaacgccaacccgaacgccaaccccaacgccaaccccaacgcgaaccccaacgccaacccgaacgccaaccccaacguggaccccaacgccaaccccaacgccaacccgaacgcgaaccccaacgccaaccccaacgccaacccgaacgccaaccccaacgccaaccccaacgcgaaccccaacgccaacccgaacgccaaccccaacgccaaccccaacgcgaaccccaacgccaacccgaacgccaaccccaacgccaaccccaacgccaaccccaacgcgaacccgaacgccaaccccaacaagaacaaccagggcaacggccaggggcacaacaugcccaacgaccccaaccgcaacgucgacgagaacgccaacgccaacuccgccgugaagaacaacaacaacgaggagccgagcgacaagcacaucaaggaguaccugaacaagauccagaacucccucagcacggaguggucccccugcagcgugaccugcggcaacgggauccagguccggaucaagcccggcuccgcgaacaagcccaaggacgagcuggacuacgccaacgacaucgagaagaagaucugcaagauggagaagugcagcuccguguucaacguggucaacagcuccaucgggcugaucauggugcucagcuuccuguuccugaacggcggcgggggcagcgggggcggcgggaagcucgaguccacccgcaucuaccagauccuggccaucuacagcaccguggccuccagccugguccucguggugucccugggcgccaucagcuucuggaugugcuccaacgggagccugcagugccggaucugcaucugaggacuagugcaucacauuuaaaagcaucucagccuaccaugagaauaagagaaagaaaaugaagaucaauagcuuauucaucucuuuuucuuuuucguugguguaaagccaacacccugucuaaaaaacauaaauuucuuuaaucauuuugccucuuuucucugugcuucaauuaauaaaaaauggaaagaaccuagaucuaaaaaaaaaaaaaaaaaaaaaaaaaaaaaaaaaaaaaaaaaaaaaaaaaaaaaaaaaaaaaaaaugcaucccccccccccccccccccccccccccccccaaaggcucuuuucagagccaccagaauu

SEQ ID NO: 1253 - RNA, 1619 nt, Artificial Sequence
  mRNA Design i-2 (A64-N5-C30-hSL-N5) comprising derived and/or modified sequence from Pf(3D7)__XP_001351122.1__Pf-CSP(199-377)_L(PVTN)_HBsAg (opt1)
aggagaggcgcugccuacggagguggcagccaucuccuucucggcaucaagcuuaccauggaccccaacgccaacccgaacgccaaccccaacgcgaaccccaacgccaaccccaacgccaacccgaacgccaaccccaacgccaaccccaacgcgaaccccaacgccaacccgaacgccaaccccaacgccaaccccaacgcgaaccccaacgccaacccgaacgccaaccccaacgccaaccccaacgccaaccccaacgcgaacccgaacgccaaccccaacaagaacaaccagggcaacgggcagggccacaacaugcccaacgaccccaaccgcaacguggacgagaacgccaacgccaacagcgccgucaagaacaacaacaacgaggagccguccgacaagcacaucaaggaguaccugaacaagauccagaacagccucuccaccgaguggagccccugcuccgugaccugcgggaacggcauccaggugcggaucaagcccgggagcgcgaacaagcccaaggacgagcuggacuacgccaacgacaucgagaagaagaucugcaagauggagaagugcuccagcgucccggugacgaacauggagaacaucaccuccggcuuccugggcccccuccuggugcugcaggccggguucuuccuccugacccgcauccugaccaucccccagagccucgacuccugguggacgagccugaacuuccugggcgggucccccgucugccucggccagaacagccaguccccgaccagcaaccacucccccaccagcugcccgcccaucugccccggguaccgguggaugugccugcgccgguucaucaucuuccuguucauccuccugcugugccucaucuuccugcuggugcuccuggacuaccagggcaugcugcccgugugcccccucaucccgggcuccaccacgaccaacaccgggcccugcaagaccugcacgacccccgcccagggcaacagcauguuccccagcugcugcugcaccaagccgaccgacgggaacugcacgugcauccccauccccuccagcugggccuucgcgaaguaccugugggagugggccuccguccgcuucagcuggcugucccuccuggugcccuucgugcagugguucgucggccugagcccgaccguguggcucuccgccaucuggaugaugugguacuggggccccagccuguacuccaucgugagccccuucaucccccugcucccgaucuucuucugccugugggucuacaucugaggacuagugcaucacauuuaaaagcaucucagccuaccaugagaauaagagaaagaaaaugaagaucaauagcuuauucaucucuuuuucuuuuucguugguguaaagccaacacccugucuaaaaaacauaaauuucuuuaaucauuuugccucuuuucucugugcuucaauuaauaaaaaauggaaagaaccuagaucuaaaaaaaaaaaaaaaaaaaaaaaaaaaaaaaaaaaaaaaaaaaaaaaaaaaaaaaaaaaaaaaaugcaucccccccccccccccccccccccccccccccaaaggcucuuuucagagccaccagaauu

SEQ ID NO: 1254 - RNA, 1661 nt, Artificial Sequence
  mRNA Design i-2 (A64-N5-C30-hSL-N5) comprising derived and/or modified sequence from Pf(3D7)__XP_001351122.1__Pf-CSP(199-387)_L(PVTN)_HBsAg (opt1)
aggagaggcgcugccuacggagguggcagccaucuccuucucggcaucaagcuuaccaugauggcccccgacccgaacgccaaccccaacgcgaaccccaacgccaaccccaacgccaacccgaacgccaaccccaacgccaaccccaacgcgaaccccaacgccaacccgaacgccaaccccaacgccaaccccaacgcgaaccccaacgccaacccgaacgccaaccccaacgccaaccccaacgccaaccccaacgcgaacccgaacgccaaccccaacgccaaccccaacaagaacaaccagggcaacgggcagggccacaacaugcccaacgacccgaaccgcaacguggacgagaacgccaacgccaacagcgcggucaagaacaacaacaacgaggagcccuccgacaagcacaucaaggaguaccugaacaagauccagaacagccucuccaccgaguggagccccugcuccgugaccugcgggaacggcauccaggugcggaucaagcccgggagcgccaacaagccgaaggacgagcuggacuacgccaacgacaucgagaagaagaucugcaagauggagaagugcuccagcgucuucaacguggugaacuccagcaucggccugggccccgucacgaacauggagaacaucaccuccggguuccucggcccccugcuggugcuccaggccggguucuuccugcugacccgcauccucaccaucccccagagccuggacuccugguggacgagccugaacuuccucggcggguccccggugugccugggccagaacagccagucccccaccagcaaccacucccccaccagcugcccgcccaucugccccggcuaccgguggaugugccugcgccgguucaucaucuuccucuucauccugcugcucugccugaucuuccugcucguccugcuggacuaccaggggaugcuccccgugugcccgcugauccccggcagcaccacgaccaacaccgggcccugcaagaccugcacgacccccgcccagggcaacuccauguucccgagcugcugcugcaccaagcccaccgacggcaacugcacgugcauccccauccccuccagcugggcguucgccaaguaccugugggagugggccuccgugcgcuucagcuggcucucccugcuggucccguucgugcagugguucguggggcucagccccaccgucuggcuguccgccaucuggaugaugugguacuggggccccagccuguacuccaucgugagccccuucaucccgcuccugcccaucuucuucugccuguggguguacaucugaggacuagugcaucacauuuaaaagcaucucagccuaccaugagaauaagagaaagaaaaugaagaucaauagcuuauucaucucuuuuucuuuuucguugguguaaagccaacacccugucuaaaaaacauaaauuucuuuaaucauuuugccucuuuucucugugcuucaauuaauaaaaaauggaaagaaccuagaucuaaaaaaaaaaaaaaaaaaaaaaaaaaaaaaaaaaaaaaaaaaaaaaaaaaaaaaaaaaaaaaaaugcaucccccccccccccccccccccccccccccccaaaggcucuuuucagagccaccagaauu

SEQ ID NO: 1255 - RNA, 845 nt, Artificial Sequence
  mRNA Design i-2 (A64-N5-C30-hSL-N5) comprising derived and/or modified sequence from Pf(3D7)__XP_001351122.1__HsALB_Pf-CSP(19-152) (opt1)
aggagaggcgcugccuacggagguggcagccaucuccuucucggcaucaagcuuaccaugaagugggugaccuucaucagccuccuguuccuguucuccagcgccuacucccuguuccaggaguaccagugcuacggcagcuccagcaacacccgcguccucaacgagcugaacuacgacaacgccgggacgaaccuguacaacgagcucgagaugaacuacuacggcaagcaggagaacugguacucccugaagaagaacagccggucccugggggagaacgacgacggcaacaacgaggacaacgagaagcuccgcaagcccaagcacaagaagcugaagcagccggcggacgggaaccccgaccccaacgccaaccccaacguggacccgaacgccaaccccaacguggaccccaacgccaaccccaacgucgacccgaacgccaaccccaacgcgaaccccaacgccaaccccaacgccaacccgaacgccaaccccaacgcgaaccccugaggacuagugcaucacauuuaaaagcaucucagccuaccaugagaauaagagaaagaaaaugaagaucaauagcuuauucaucucuuuuucuuuuucguugguguaaagccaacacccugucuaaaaaacauaaauuucuuuaaucauuuugccucuuuucucugugcuucaauuaauaaaaaauggaaagaaccuagaucuaaaaaaaaaaaaaaaaaaaaaaaaaaaaaaaaaaaaaaaaaaaaaaaaaaaaaaaaaaaaaaaaugcaucccccccccccccccccccccccccccccccaaaggcucuuuucagagccaccagaauu

SEQ ID NO: 1256 - RNA, 965 nt, Artificial Sequence
  mRNA Design i-2 (A64-N5-C30-hSL-N5) comprising derived and/or modified sequence from Pf(3D7)__XP_001351122.1__HsALB_Pf-CSP(19-192) (opt1)
aggagaggcgcugccuacggagguggcagccaucuccuucucggcaucaagcuuaccaugaagugggugaccuucaucagccuccuguuccuguucuccagcgccuacucccuguuccaggaguaccagugcuacggcagcuccagcaacacccgcguccucaacgagcugaacuacgacaacgccgggacgaaccuguacaacgagcucgagaugaacuacuacggcaagcaggagaacugguacucccugaagaagaacagccggucccugggggagaacgacgacggcaacaacgaggacaacgagaagcuccgcaagcccaagcacaagaagcugaagcagccggcggacgggaaccccgaccccaacgccaaccccaacguggacccgaacgccaaccccaacguggaccccaacgccaaccccaacgucgacccgaacgccaaccccaacgcgaaccccaacgccaaccccaacgccaacccgaacgccaaccccaacgcgaaccccaacgccaaccccaacgccaacccgaacgccaaccccaacgccaaccccaacgcgaaccccaacgccaacccgaacgccaaccccaacgccaaccccaacgccaaccccaacgcgaacccgugaggacuagugcaucacauuuaaaagcaucucagccuaccaugagaauaagagaaagaaaaugaagaucaauagcuuauucaucucuuuuucuuuuucguugguguaaagccaacacccugucuaaaaaacauaaauuucuuuaaucauuuugccucuuuucucugugcuucaauuaauaaaaaauggaaagaaccuagaucuaaaaaaaaaaaaaaaaaaaaaaaaaaaaaaaaaaaaaaaaaaaaaaaaaaaaaaaaaaaaaaaaugcaucccccccccccccccccccccccccccccccaaaggcucuuuucagagccaccagaauu

SEQ ID NO: 1257 - RNA, 1205 nt, Artificial Sequence
  mRNA Design i-2 (A64-N5-C30-hSL-N5) comprising derived and/or modified sequence from Pf(3D7)__XP_001351122.1__HsALB_Pf-CSP(19-272) (opt1)
aggagaggcgcugccuacggagguggcagccaucuccuucucggcaucaagcuuaccaugaagugggugaccuucaucagccuccuguuccuguucuccagcgccuacucccuguuccaggaguaccagugcuacggcagcuccagcaacacccgcguccucaacgagcugaacuacgacaacgccgggacgaaccuguacaacgagcucgagaugaacuacuacggcaagcaggagaacugguacucccugaagaagaacagccggucccugggggagaacgacgacggcaacaacgaggacaacgagaagcuccgcaagcccaagcacaagaagcugaagcagccggcggacgggaaccccgaccccaacgccaaccccaacguggacccgaacgccaaccccaacguggaccccaacgccaaccccaacgucgacccgaacgccaaccccaacgcgaaccccaacgccaaccccaacgccaacccgaacgccaaccccaacgcgaaccccaacgccaaccccaacgccaacccgaacgccaaccccaacgccaaccccaacgcgaaccccaacgccaacccgaacgccaaccccaacgccaaccccaacgccaaccccaacgcgaacccgaacgccaaccccaacguggaccccaacgccaaccccaacgccaacccgaacgccaaccccaacgcgaaccccaacgccaacccgaacgccaaccccaacgccaaccccaacgccaaccccaacgcgaacccgaacgccaaccccaacgccaaccccaacgccaaccccaacgcgaacccgaacgccaaccccaacgccaaccccaacgccaaccccaacgccaacccgaacgcgaaccccugaggacuagugcaucacauuuaaaagcaucucagccuaccaugagaauaagagaaagaaaaugaagaucaauagcuuauucaucucuuuuucuuuuucguugguguaaagccaacacccugucuaaaaaacauaaauuucuuuaaucauuuugccucuuuucucugugcuucaauuaauaaaaaauggaaagaaccuagaucuaaaaaaaaaaaaaaaaaaaaaaaaaaaaaaaaaaaaaaaaaaaaaaaaaaaaaaaaaaaaaaaaugcaucccccccccccccccccccccccccccccccaaaggcucuuuucagagccaccagaauu

SEQ ID NO: 1258 - RNA, 1367 nt, Artificial Sequence
  mRNA Design i-2 (A64-N5-C30-hSL-N5) comprising derived and/or modified sequence from Pf(3D7)__XP_001351122.1__HsALB_Pf-CSP(19-272)_L(AAY)_Pf-CSP(310-3 27)_L(AAY)_Pf-CSP(346-375) (opt1)
aggagaggcgcugccuacggagguggcagccaucuccuucucggcaucaagcuuaccaugaagugggugaccuucaucagccuccuguuccuguucuccagcgccuacucccuguuccaggaguaccagugcuacggcagcuccagcaacacccgcguccucaacgagcugaacuacgacaacgccgggacgaaccuguacaacgagcucgagaugaacuacuacggcaagcaggagaacugguacucccugaagaagaacagccggucccugggggagaacgacgacggcaacaacgaggacaacgagaagcuccgcaagcccaagcacaagaagcugaagcagccggcggacgggaaccccgaccccaacgccaaccccaacguggacccgaacgccaaccccaacguggaccccaacgccaaccccaacgucgacccgaacgccaaccccaacgcgaaccccaacgccaaccccaacgccaacccgaacgccaaccccaacgcgaaccccaacgccaaccccaacgccaacccgaacgccaaccccaacgccaaccccaacgcgaaccccaacgccaacccgaacgccaaccccaacgccaaccccaacgccaaccccaacgcgaacccgaacgccaaccccaacguggaccccaacgccaaccccaacgccaacccgaacgccaaccccaacgcgaaccccaacgccaacccgaacgccaaccccaacgccaaccccaacgccaaccccaacgcgaacccgaacgccaaccccaacgccaaccccaacgccaaccccaacgcgaacccgaacgccaaccccaacgccaaccccaacgccaaccccaacgccaacccgaacgcgaaccccgccgccuacgagcccagcgacaagcacaucaaggaguaccugaacaagauccagaacucccucgccgccuacaucaagcccggcagcgcgaacaagccgaaggacgagcuggacuacgccaacgacaucgagaagaagaucugcaagauggagaagugcuccugaggacuagugcaucacauuuaaaagcaucucagccuaccaugagaauaagagaaagaaaaugaagaucaauagcuuauucaucucuuuuucuuuuucguugguguaaagccaacacccugucuaaaaaacauaaauuucuuuaaucauuuugccucuuuucucugugcuucaauuaauaaaaaauggaaagaaccuagaucuaaaaaaaaaaaaaaaaaaaaaaaaaaaaaaaaaaaaaaaaaaaaaaaaaaaaaaaaaaaaaaaaugcaucccccccccccccccccccccccccccccccaaaggcucuuuucagagccaccagaauu

SEQ ID NO: 1259 - RNA, 1328 nt, Artificial Sequence
  mRNA Design i-2 (A64-N5-C30-hSL-N5) comprising derived and/or modified sequence from Pf(3D7)__XP_001351122.1__HsALB_Pf-CSP(19-272)_L(AAY)_Pf-CSP(346-3 65)_L(AAY)_P2 (opt1)
aggagaggcgcugccuacggagguggcagccaucuccuucucggcaucaagcuuaccaugaagugggugaccuucaucagccuccuguuccuguucuccagcgccuacucccuguuccaggaguaccagugcuacggcagcuccagcaacacccgcguccucaacgagcugaacuacgacaacgccgggacgaaccuguacaacgagcucgagaugaacuacuacggcaagcaggagaacugguacucccugaagaagaacagccggucccugggggagaacgacgacggcaacaacgaggacaacgagaagcuccgcaagcccaagcacaagaagcugaagcagccggcggacgggaaccccgaccccaacgccaaccccaacguggacccgaacgccaaccccaacguggaccccaacgccaaccccaacgucgacccgaacgccaaccccaacgcgaaccccaacgccaaccccaacgccaacccgaacgccaaccccaacgcgaaccccaacgccaaccccaacgccaacccgaacgccaaccccaacgccaaccccaacgcgaaccccaacgccaacccgaacgccaaccccaacgccaaccccaacgccaaccccaacgcgaacccgaacgccaaccccaacguggaccccaacgccaaccccaacgccaacccgaacgccaaccccaacgcgaaccccaacgccaacccgaacgccaaccccaacgccaaccccaacgccaaccccaacgcgaacccgaacgccaaccccaacgccaaccccaacgccaaccccaacgcgaacccgaacgccaaccccaacgccaaccccaacgccaaccccaacgccaacccgaacgcgaaccccgccgccuacaucaagcccggcagcgccaacaagcccaaggacgagcuggacuacgccaacgacaucgaggcggccuaccaguacaucaaggccaacuccaaguucaucggcaucaccgagcucugaggacuagugcaucacauuuaaaagcaucucagccuaccaugagaauaagagaaagaaaaugaagaucaauagcuuauucaucucuuuuucuuuuucguugguguaaagccaacacccugucuaaaaaacauaaauuucuuuaaucauuuugccucuuuucucugugcuucaauuaauaaaaaauggaaagaaccuagaucuaaaaaaaaaaaaaaaaaaaaaaaaaaaaaaaaaaaaaaaaaaaaaaaaaaaaaaaaaaaaaaaaugcaucccccccccccccccccccccccccccccccaaaggcucuuuucagagccaccagaauu

SEQ ID NO: 1260 - RNA, 1322 nt, Artificial Sequence
  mRNA Design i-2 (A64-N5-C30-hSL-N5) comprising derived and/or modified sequence from Pf(3D7)__XP_001351122.1__HsALB_Pf-CSP(19-272)_L(AAY)_Pf-CSP(346-3 65)_L(AAY)_PADRE (opt1)
aggagaggcgcugccuacggagguggcagccaucuccuucucggcaucaagcuuaccaugaagugggugaccuucaucagccuccuguuccuguucuccagcgccuacucccuguuccaggaguaccagugcuacggcagcuccagcaacacccgcguccucaacgagcugaacuacgacaacgccgggacgaaccuguacaacgagcucgagaugaacuacuacggcaagcaggagaacugguacucccugaagaagaacagccggucccugggggagaacgacgacggcaacaacgaggacaacgagaagcuccgcaagcccaagcacaagaagcugaagcagccggcggacgggaaccccgaccccaacgccaaccccaacguggacccgaacgccaaccccaacguggaccccaacgccaaccccaacgucgacccgaacgccaaccccaacgcgaaccccaacgccaaccccaacgccaacccgaacgccaaccccaacgcgaaccccaacgccaaccccaacgccaacccgaacgccaaccccaacgccaaccccaacgcgaaccccaacgccaacccgaacgccaaccccaacgccaaccccaacgccaaccccaacgcgaacccgaacgccaaccccaacguggaccccaacgccaaccccaacgccaacccgaacgccaaccccaacgcgaaccccaacgccaacccgaacgccaaccccaacgccaaccccaacgccaaccccaacgcgaacccgaacgccaaccccaacgccaaccccaacgccaaccccaacgcgaacccgaacgccaaccccaacgccaaccccaacgccaaccccaacgccaacccgaacgcgaaccccgccgccuacaucaagcccggcagcgccaacaagcccaaggacgagcuggacuacgccaacgacaucgaggcggccuacgccaaguucguggccgccuggacccucaaggcggccgccugaggacuagugcaucacauuuaaaagcaucucagccuaccaugagaauaagagaaagaaaaugaagaucaauagcuuauucaucucuuuuucuuuuucguugguguaaagccaacacccugucuaaaaaacauaaauuucuuuaaucauuuugccucuuuucucugugcuucaauuaauaaaaaauggaaagaaccuagaucuaaaaaaaaaaaaaaaaaaaaaaaaaaaaaaaaaaaaaaaaaaaaaaaaaaaaaaaaaaaaaaaaugcaucccccccccccccccccccccccccccccccaaaggcucuuuucagagccaccagaauu

SEQ ID NO: 1261 - RNA, 1379 nt, Artificial Sequence
  mRNA Design i-2 (A64-N5-C30-hSL-N5) comprising derived and/or modified sequence from Pf(3D7)__XP_001351122.1__HsALB_Pf-CSP(19-272)_L(G4S)_Pf-CSP(310-3 27)_L(G4S)_Pf-CSP(346-375) (opt1)
aggagaggcgcugccuacggagguggcagccaucuccuucucggcaucaagcuuaccaugaagugggugaccuucaucagccuccuguuccuguucuccagcgccuacucccuguuccaggaguaccagugcuacggcagcuccagcaacacccgcguccucaacgagcugaacuacgacaacgccgggacgaaccuguacaacgagcucgagaugaacuacuacggcaagcaggagaacugguacucccugaagaagaacagccggucccugggggagaacgacgacggcaacaacgaggacaacgagaagcuccgcaagcccaagcacaagaagcugaagcagccggcggacgggaaccccgaccccaacgccaaccccaacguggacccgaacgccaaccccaacguggaccccaacgccaaccccaacgucgacccgaacgccaaccccaacgcgaaccccaacgccaaccccaacgccaacccgaacgccaaccccaacgcgaaccccaacgccaaccccaacgccaacccgaacgccaaccccaacgccaaccccaacgcgaaccccaacgccaacccgaacgccaaccccaacgccaaccccaacgccaaccccaacgcgaacccgaacgccaaccccaacguggaccccaacgccaaccccaacgccaacccgaacgccaaccccaacgcgaaccccaacgccaacccgaacgccaaccccaacgccaaccccaacgccaaccccaacgcgaacccgaacgccaaccccaacgccaaccccaacgccaaccccaacgcgaacccgaacgccaaccccaacgccaaccccaacgccaaccccaacgccaacccgaacgcgaaccccggcggcgggggcagcgagcccuccgacaagcacaucaaggaguaccugaacaagauccagaacagccucgggggcgggggcuccaucaagcccggcagcgccaacaagccgaaggacgagcuggacuacgccaacgacaucgagaagaagaucugcaagauggagaagugcuccugaggacuagugcaucacauuuaaaagcaucucagccuaccaugagaauaagagaaagaaaaugaagaucaauagcuuauucaucucuuuuucuuuuucguugguguaaagccaacacccugucuaaaaaacauaaauuucuuuaaucauuuugccucuuuucucugugcuucaauuaauaaaaaauggaaagaaccuagaucuaaaaaaaaaaaaaaaaaaaaaaaaaaaaaaaaaaaaaaaaaaaaaaaaaaaaaaaaaaaaaaaaugcaucccccccccccccccccccccccccccccccaaaggcucuuuucagagccaccagaauu

SEQ ID NO: 1262 - RNA, 1364 nt, Artificial Sequence
  mRNA Design i-2 (A64-N5-C30-hSL-N5) comprising derived and/or modified sequence from Pf(3D7)__XP_001351122.1__HsALB_Pf-CSP(19-272)_L(G4S)_Pf-CSP(310-3 27)_Pf-CSP(346-375) (opt1)
aggagaggcgcugccuacggagguggcagccaucuccuucucggcaucaagcuuaccaugaagugggugaccuucaucagccuccuguuccuguucuccagcgccuacucccuguuccaggaguaccagugcuacggcagcuccagcaacacccgcguccucaacgagcugaacuacgacaacgccgggacgaaccuguacaacgagcucgagaugaacuacuacggcaagcaggagaacugguacucccugaagaagaacagccggucccugggggagaacgacgacggcaacaacgaggacaacgagaagcuccgcaagcccaagcacaagaagcugaagcagccggcggacgggaaccccgaccccaacgccaaccccaacguggacccgaacgccaaccccaacguggaccccaacgccaaccccaacgucgacccgaacgccaaccccaacgcgaaccccaacgccaaccccaacgccaacccgaacgccaaccccaacgcgaaccccaacgccaaccccaacgccaacccgaacgccaaccccaacgccaaccccaacgcgaaccccaacgccaacccgaacgccaaccccaacgccaaccccaacgccaaccccaacgcgaacccgaacgccaaccccaacguggaccccaacgccaaccccaacgccaacccgaacgccaaccccaacgcgaaccccaacgccaacccgaacgccaaccccaacgccaaccccaacgccaaccccaacgcgaacccgaacgccaaccccaacgccaaccccaacgccaaccccaacgcgaacccgaacgccaaccccaacgccaaccccaacgccaaccccaacgccaacccgaacgcgaaccccggcggcgggggcagcgagcccuccgacaagcacaucaaggaguaccugaacaagauccagaacagccucaucaagcccggguccgccaacaagccgaaggacgagcuggacuacgccaacgacaucgagaagaagaucugcaagauggagaagugcagcugaggacuagugcaucacauuuaaaagcaucucagccuaccaugagaauaagagaaagaaaaugaagaucaauagcuuauucaucucuuuuucuuuuucguugguguaaagccaacacccugucuaaaaaacauaaauuucuuuaaucauuuugccucuuuucucugugcuucaauuaauaaaaaauggaaagaaccuagaucuaaaaaaaaaaaaaaaaaaaaaaaaaaaaaaaaaaaaaaaaaaaaaaaaaaaaaaaaaaaaaaaaugcaucccccccccccccccccccccccccccccccaaaggcucuuuucagagccaccagaauu

SEQ ID NO: 1263 - RNA, 1364 nt, Artificial Sequence
  mRNA Design i-2 (A64-N5-C30-hSL-N5) comprising derived and/or modified sequence from Pf(3D7)__XP_001351122.1__HsALB_Pf-CSP(19-325) (opt1)
aggagaggcgcugccuacggagguggcagccaucuccuucucggcaucaagcuuaccaugaagugggugaccuucaucagccuccuguuccuguucuccagcgccuacucccuguuccaggaguaccagugcuacggcagcuccagcaacacccgcguccucaacgagcugaacuacgacaacgccgggacgaaccuguacaacgagcucgagaugaacuacuacggcaagcaggagaacugguacucccugaagaagaacagccggucccugggggagaacgacgacggcaacaacgaggacaacgagaagcuccgcaagcccaagcacaagaagcugaagcagccggcggacgggaaccccgaccccaacgccaaccccaacguggacccgaacgccaaccccaacguggaccccaacgccaaccccaacgucgacccgaacgccaaccccaacgcgaaccccaacgccaaccccaacgccaacccgaacgccaaccccaacgcgaaccccaacgccaaccccaacgccaacccgaacgccaaccccaacgccaaccccaacgcgaaccccaacgccaacccgaacgccaaccccaacgccaaccccaacgccaaccccaacgcgaacccgaacgccaaccccaacguggaccccaacgccaaccccaacgccaacccgaacgccaaccccaacgcgaaccccaacgccaacccgaacgccaaccccaacgccaaccccaacgccaaccccaacgcgaacccgaacgccaaccccaacgccaaccccaacgccaaccccaacgcgaacccgaacgccaaccccaacgccaaccccaacgccaaccccaacgccaacccgaacgcgaaccccaacaagaacaaccagggcaacggccaggggcacaacaugcccaacgaccccaaccggaacguggacgagaacgccaacgccaacagcgccgucaagaacaacaacaacgaggagccguccgacaagcacaucaaggaguaccugaacaagauccagaacugaggacuagugcaucacauuuaaaagcaucucagccuaccaugagaauaagagaaagaaaaugaagaucaauagcuuauucaucucuuuuucuuuuucguugguguaaagccaacacccugucuaaaaaacauaaauuucuuuaaucauuuugccucuuuucucugugcuucaauuaauaaaaaauggaaagaaccuagaucuaaaaaaaaaaaaaaaaaaaaaaaaaaaaaaaaaaaaaaaaaaaaaaaaaaaaaaaaaaaaaaaaugcaucccccccccccccccccccccccccccccccaaaggcucuuuucagagccaccagaauu

SEQ ID NO: 1264 - RNA, 1541 nt, Artificial Sequence
  mRNA Design i-2 (A64-N5-C30-hSL-N5) comprising derived and/or modified sequence from Pf(3D7)__XP_001351122.1__HsALB_Pf-CSP(19-384) (opt1)
aggagaggcgcugccuacggagguggcagccaucuccuucucggcaucaagcuuaccaugaagugggugaccuucaucagccuccuguuccuguucuccagcgccuacucccuguuccaggaguaccagugcuacggcagcuccagcaacacccgcguccucaacgagcugaacuacgacaacgccgggacgaaccuguacaacgagcucgagaugaacuacuacggcaagcaggagaacugguacucccugaagaagaacagccggucccugggggagaacgacgacggcaacaacgaggacaacgagaagcuccgcaagcccaagcacaagaagcugaagcagccggcggacgggaaccccgaccccaacgccaaccccaacguggacccgaacgccaaccccaacguggaccccaacgccaaccccaacgucgacccgaacgccaaccccaacgcgaaccccaacgccaaccccaacgccaacccgaacgccaaccccaacgcgaaccccaacgccaaccccaacgccaacccgaacgccaaccccaacgccaaccccaacgcgaaccccaacgccaacccgaacgccaaccccaacgccaaccccaacgccaaccccaacgcgaacccgaacgccaaccccaacguggaccccaacgccaaccccaacgccaacccgaacgccaaccccaacgcgaaccccaacgccaacccgaacgccaaccccaacgccaaccccaacgccaaccccaacgcgaacccgaacgccaaccccaacgccaaccccaacgccaaccccaacgcgaacccgaacgccaaccccaacgccaaccccaacgccaaccccaacgccaacccgaacgcgaaccccaacaagaacaaccagggcaacggccaggggcacaacaugcccaacgaccccaaccggaacguggacgagaacgccaacgccaacagcgccgucaagaacaacaacaacgaggagccguccgacaagcacaucaaggaguaccugaacaagauccagaacagccucuccaccgaguggagccccugcuccgugaccugcggcaacgggauccaggugcgcaucaagcccggcagcgccaacaagcccaaggacgagcuggacuacgcgaacgacaucgagaagaagaucugcaagauggagaagugcuccagcgucuucaacguggugaacuccagcugaggacuagugcaucacauuuaaaagcaucucagccuaccaugagaauaagagaaagaaaaugaagaucaauagcuuauucaucucuuuuucuuuuucguugguguaaagccaacacccugucuaaaaaacauaaauuucuuuaaucauuuugccucuuuucucugugcuucaauuaauaaaaaauggaaagaaccuagaucuaaaaaaaaaaaaaaaaaaaaaaaaaaaaaaaaaaaaaaaaaaaaaaaaaaaaaaaaaaaaaaaaugcaucccccccccccccccccccccccccccccccaaaggcucuuuucagagccaccagaauu

SEQ ID NO: 1265 - RNA, 1679 nt, Artificial Sequence
  mRNA Design i-2 (A64-N5-C30-hSL-N5) comprising derived and/or modified sequence from Pf(3D7)__XP_001351122.1__HsALB_Pf-CSP(19-384)_TM domain HA (opt1)
aggagaggcgcugccuacggagguggcagccaucuccuucucggcaucaagcuuaccaugaagugggugaccuucaucagccuccuguuccuguucuccagcgccuacucccuguuccaggaguaccagugcuacggcagcuccagcaacacccgcguccucaacgagcugaacuacgacaacgccgggacgaaccuguacaacgagcucgagaugaacuacuacggcaagcaggagaacugguacucccugaagaagaacagccggucccugggggagaacgacgacggcaacaacgaggacaacgagaagcuccgcaagcccaagcacaagaagcugaagcagccggcggacgggaaccccgaccccaacgccaaccccaacguggacccgaacgccaaccccaacguggaccccaacgccaaccccaacgucgacccgaacgccaaccccaacgcgaaccccaacgccaaccccaacgccaacccgaacgccaaccccaacgcgaaccccaacgccaaccccaacgccaacccgaacgccaaccccaacgccaaccccaacgcgaaccccaacgccaacccgaacgccaaccccaacgccaaccccaacgccaaccccaacgcgaacccgaacgccaaccccaacguggaccccaacgccaaccccaacgccaacccgaacgccaaccccaacgcgaaccccaacgccaacccgaacgccaaccccaacgccaaccccaacgccaaccccaacgcgaacccgaacgccaaccccaacgccaaccccaacgccaaccccaacgcgaacccgaacgccaaccccaacgccaaccccaacgccaaccccaacgccaacccgaacgcgaaccccaacaagaacaaccagggcaacggccaggggcacaacaugcccaacgaccccaaccggaacguggacgagaacgccaacgccaacagcgccgucaagaacaacaacaacgaggagccguccgacaagcacaucaaggaguaccugaacaagauccagaacagccucuccaccgaguggagccccugcuccgugaccugcggcaacgggauccaggugcgcaucaagcccggcagcgccaacaagcccaaggacgagcuggacuacgcgaacgacaucgagaagaagaucugcaagauggagaagugcuccagcgucuucaacguggugaacuccagcaagcuggagagcacccggaucuaccagauccucgccaucuacuccacggucgccagcucccuggugcugguggucagccucggggccaucuccuucuggaugugcagcaacggcucccugcagugccgcaucugcaucugaggacuagugcaucacauuuaaaagcaucucagccuaccaugagaauaagagaaagaaaaugaagaucaauagcuuauucaucucuuuuucuuuuucguugguguaaagccaacacccugucuaaaaaacauaaauuucuuuaaucauuuugccucuuuucucugugcuucaauuaauaaaaaauggaaagaaccuagaucuaaaaaaaaaaaaaaaaaaaaaaaaaaaaaaaaaaaaaaaaaaaaaaaaaaaaaaaaaaaaaaaaugcaucccccccccccccccccccccccccccccccaaaggcucuuuucagagccaccagaauu

SEQ ID NO: 1266 - RNA, 1391 nt, Artificial Sequence
  mRNA Design i-2 (A64-N5-C30-hSL-N5) comprising derived and/or modified sequence from Pf(3D7)__XP_001351122.1__HsALB_Pf-CSP(82-397) (opt1)
aggagaggcgcugccuacggagguggcagccaucuccuucucggcaucaagcuuaccaugaagugggugaccuucaucagccuccuguuccuguucuccagcgccuacuccgacaacgagaagcugcgcaagcccaagcacaagaagcucaagcagccggccgacggcaaccccgaccccaacgcgaaccccaacgucgacccgaacgccaaccccaacguggaccccaacgccaaccccaacguggacccgaacgccaaccccaacgccaaccccaacgcgaaccccaacgccaacccgaacgccaaccccaacgccaaccccaacgcgaaccccaacgccaacccgaacgccaaccccaacgccaaccccaacgccaaccccaacgcgaacccgaacgccaaccccaacgccaaccccaacgccaaccccaacgccaacccgaacgcgaaccccaacgucgaccccaacgccaaccccaacgccaacccgaacgccaaccccaacgccaaccccaacgcgaacccgaacgccaaccccaacgccaaccccaacgccaaccccaacgccaacccgaacgcgaaccccaacgccaaccccaacgccaaccccaacgccaacccgaacgcgaaccccaacgccaaccccaacgccaaccccaacgccaacccgaacgccaaccccaacaagaacaaccaggggaacggccaggggcacaacaugcccaacgaccccaaccggaacguggacgagaacgcgaacgccaacagcgccgugaagaacaacaacaacgaggagccguccgacaagcacaucaaggaguaccugaacaagauccagaacagccuguccaccgaguggagccccugcuccgucacgugcggcaacgggauccaggugcgcaucaagcccggcagcgccaacaagcccaaggacgagcucgacuacgccaacgacaucgagaagaagaucugcaagauggagaagugcuccagcguguucaacgucgugaacuccagcaucggccugaucauggugcuguccuuccucuuccugaacugaggacuagugcaucacauuuaaaagcaucucagccuaccaugagaauaagagaaagaaaaugaagaucaauagcuuauucaucucuuuuucuuuuucguugguguaaagccaacacccugucuaaaaaacauaaauuucuuuaaucauuuugccucuuuucucugugcuucaauuaauaaaaaauggaaagaaccuagaucuaaaaaaaaaaaaaaaaaaaaaaaaaaaaaaaaaaaaaaaaaaaaaaaaaaaaaaaaaaaaaaaaugcaucccccccccccccccccccccccccccccccaaaggcucuuuucagagccaccagaauu

SEQ ID NO: 1267 - RNA, 743 nt, Artificial Sequence
  mRNA Design i-2 (A64-N5-C30-hSL-N5) comprising derived and/or modified sequence from Pf(3D7)__XP_001351122.1__HsALB_Pf-CSP(93-192) (opt1)
aggagaggcgcugccuacggagguggcagccaucuccuucucggcaucaagcuuaccaugaagugggugaccuucaucagccuccuguuccuguucuccagcgccuacuccaagcugaagcagcccgccgacggcaacccggaccccaacgcgaaccccaacgucgaccccaacgccaacccgaacguggaccccaacgccaaccccaacguggaccccaacgccaacccgaacgccaaccccaacgcgaaccccaacgccaaccccaacgccaacccgaacgccaaccccaacgcgaaccccaacgccaaccccaacgccaacccgaacgccaaccccaacgccaaccccaacgcgaaccccaacgccaacccgaacgccaaccccaacgccaaccccaacgccaaccccugaggacuagugcaucacauuuaaaagcaucucagccuaccaugagaauaagagaaagaaaaugaagaucaauagcuuauucaucucuuuuucuuuuucguugguguaaagccaacacccugucuaaaaaacauaaauuucuuuaaucauuuugccucuuuucucugugcuucaauuaauaaaaaauggaaagaaccuagaucuaaaaaaaaaaaaaaaaaaaaaaaaaaaaaaaaaaaaaaaaaaaaaaaaaaaaaaaaaaaaaaaaugcaucccccccccccccccccccccccccccccccaaaggcucuuuucagagccaccagaauu

SEQ ID NO: 1268 - RNA, 983 nt, Artificial Sequence
  mRNA Design i-2 (A64-N5-C30-hSL-N5) comprising derived and/or modified sequence from Pf(3D7)__XP_001351122.1__HsALB_Pf-CSP(93-272) (opt1)
aggagaggcgcugccuacggagguggcagccaucuccuucucggcaucaagcuuaccaugaagugggugaccuucaucagccuccuguuccuguucuccagcgccuacuccaagcugaagcagcccgccgacggcaacccggaccccaacgcgaaccccaacgucgaccccaacgccaacccgaacguggaccccaacgccaaccccaacguggaccccaacgccaacccgaacgccaaccccaacgcgaaccccaacgccaaccccaacgccaacccgaacgccaaccccaacgcgaaccccaacgccaaccccaacgccaacccgaacgccaaccccaacgccaaccccaacgcgaaccccaacgccaacccgaacgccaaccccaacgccaaccccaacgccaaccccaacgcgaacccgaacgucgaccccaacgccaaccccaacgccaaccccaacgccaacccgaacgccaaccccaacgcgaaccccaacgccaacccgaacgccaaccccaacgccaaccccaacgccaaccccaacgcgaacccgaacgccaaccccaacgccaaccccaacgccaaccccaacgcgaacccgaacgccaaccccaacgccaaccccaacgccaaccccaacgccaacccgugaggacuagugcaucacauuuaaaagcaucucagccuaccaugagaauaagagaaagaaaaugaagaucaauagcuuauucaucucuuuuucuuuuucguugguguaaagccaacacccugucuaaaaaacauaaauuucuuuaaucauuuugccucuuuucucugugcuucaauuaauaaaaaauggaaagaaccuagaucuaaaaaaaaaaaaaaaaaaaaaaaaaaaaaaaaaaaaaaaaaaaaaaaaaaaaaaaaaaaaaaaaugcaucccccccccccccccccccccccccccccccaaaggcucuuuucagagccaccagaauu

SEQ ID NO: 1269 - RNA, 1358 nt, Artificial Sequence
  mRNA Design i-2 (A64-N5-C30-hSL-N5) comprising derived and/or modified sequence from Pf(3D7)__XP_001351122.1__HsALB_Pf-CSP(93-397) (opt1)
aggagaggcgcugccuacggagguggcagccaucuccuucucggcaucaagcuuaccaugaagugggugaccuucaucagccuccuguuccuguucuccagcgccuacuccaagcugaagcagcccgccgacggcaacccggaccccaacgcgaaccccaacgucgaccccaacgccaacccgaacguggaccccaacgccaaccccaacguggaccccaacgccaacccgaacgccaaccccaacgcgaaccccaacgccaaccccaacgccaacccgaacgccaaccccaacgcgaaccccaacgccaaccccaacgccaacccgaacgccaaccccaacgccaaccccaacgcgaaccccaacgccaacccgaacgccaaccccaacgccaaccccaacgccaaccccaacgcgaacccgaacgucgaccccaacgccaaccccaacgccaaccccaacgccaacccgaacgccaaccccaacgcgaaccccaacgccaacccgaacgccaaccccaacgccaaccccaacgccaaccccaacgcgaacccgaacgccaaccccaacgccaaccccaacgccaaccccaacgcgaacccgaacgccaaccccaacgccaaccccaacgccaaccccaacgccaacccgaacaagaacaaccaggggaacggccaggggcacaacaugcccaacgaccccaaccgcaacguggacgagaacgcgaacgccaacagcgccgugaagaacaacaacaacgaggagcccuccgacaagcacaucaaggaguaccucaacaagauccagaacagccuguccaccgaguggagcccgugcuccgucacgugcggcaacgggauccaggugcggaucaagcccggcagcgccaacaagcccaaggacgagcuggacuacgccaacgacaucgagaagaagaucugcaagauggagaagugcuccagcguguucaacgucgugaacuccagcaucggccucaucauggugcuguccuuccuguuccucaacugaggacuagugcaucacauuuaaaagcaucucagccuaccaugagaauaagagaaagaaaaugaagaucaauagcuuauucaucucuuuuucuuuuucguugguguaaagccaacacccugucuaaaaaacauaaauuucuuuaaucauuuugccucuuuucucugugcuucaauuaauaaaaaauggaaagaaccuagaucuaaaaaaaaaaaaaaaaaaaaaaaaaaaaaaaaaaaaaaaaaaaaaaaaaaaaaaaaaaaaaaaaugcaucccccccccccccccccccccccccccccccaaaggcucuuuucagagccaccagaauu

SEQ ID NO: 1270 - RNA, 728 nt, Artificial Sequence
  mRNA Design i-2 (A64-N5-C30-hSL-N5) comprising derived and/or modified sequence from Pf(3D7)__XP_001351122.1__HsALB_Pf-CSP(98-192) (opt1)
aggagaggcgcugccuacggagguggcagccaucuccuucucggcaucaagcuuaccaugaagugggugaccuucaucagccuccuguuccuguucuccagcgccuacuccgccgacggcaaccccgacccgaacgcgaaccccaacgucgaccccaacgccaaccccaacguggacccgaacgccaaccccaacguggaccccaacgccaaccccaacgccaacccgaacgcgaaccccaacgccaaccccaacgccaaccccaacgccaacccgaacgcgaaccccaacgccaaccccaacgccaaccccaacgccaacccgaacgccaaccccaacgcgaaccccaacgccaaccccaacgccaacccgaacgccaaccccaacgccaaccccugaggacuagugcaucacauuuaaaagcaucucagccuaccaugagaauaagagaaagaaaaugaagaucaauagcuuauucaucucuuuuucuuuuucguugguguaaagccaacacccugucuaaaaaacauaaauuucuuuaaucauuuugccucuuuucucugugcuucaauuaauaaaaaauggaaagaaccuagaucuaaaaaaaaaaaaaaaaaaaaaaaaaaaaaaaaaaaaaaaaaaaaaaaaaaaaaaaaaaaaaaaaugcaucccccccccccccccccccccccccccccccaaaggcucuuuucagagccaccagaauu

SEQ ID NO: 1271 - RNA, 968 nt, Artificial Sequence
  mRNA Design i-2 (A64-N5-C30-hSL-N5) comprising derived and/or modified sequence from Pf(3D7)__XP_001351122.1__HsALB_Pf-CSP(98-272) (opt1)
aggagaggcgcugccuacggagguggcagccaucuccuucucggcaucaagcuuaccaugaagugggugaccuucaucagccuccuguuccuguucuccagcgccuacuccgccgacggcaaccccgacccgaacgcgaaccccaacgucgaccccaacgccaaccccaacguggacccgaacgccaaccccaacguggaccccaacgccaaccccaacgccaacccgaacgcgaaccccaacgccaaccccaacgccaaccccaacgccaacccgaacgcgaaccccaacgccaaccccaacgccaaccccaacgccaacccgaacgccaaccccaacgcgaaccccaacgccaaccccaacgccaacccgaacgccaaccccaacgccaaccccaacgcgaaccccaacgucgacccgaacgccaaccccaacgccaaccccaacgccaaccccaacgccaacccgaacgcgaaccccaacgccaaccccaacgccaacccgaacgccaaccccaacgccaaccccaacgcgaaccccaacgccaacccgaacgccaaccccaacgccaaccccaacgcgaaccccaacgccaacccgaacgccaaccccaacgccaaccccaacgccaaccccugaggacuagugcaucacauuuaaaagcaucucagccuaccaugagaauaagagaaagaaaaugaagaucaauagcuuauucaucucuuuuucuuuuucguugguguaaagccaacacccugucuaaaaaacauaaauuucuuuaaucauuuugccucuuuucucugugcuucaauuaauaaaaaauggaaagaaccuagaucuaaaaaaaaaaaaaaaaaaaaaaaaaaaaaaaaaaaaaaaaaaaaaaaaaaaaaaaaaaaaaaaaugcaucccccccccccccccccccccccccccccccaaaggcucuuuucagagccaccagaauu

SEQ ID NO: 1272 - RNA, 1274 nt, Artificial Sequence
  mRNA Design i-2 (A64-N5-C30-hSL-N5) comprising derived and/or modified sequence from Pf(3D7)__XP_001351122.1__HsALB_Pf-CSP(98-374) (opt1)
aggagaggcgcugccuacggagguggcagccaucuccuucucggcaucaagcuuaccaugaagugggugaccuucaucagccuccuguuccuguucuccagcgccuacuccgccgacggcaaccccgacccgaacgcgaaccccaacgucgaccccaacgccaaccccaacguggacccgaacgccaaccccaacguggaccccaacgccaaccccaacgccaacccgaacgcgaaccccaacgccaaccccaacgccaaccccaacgccaacccgaacgcgaaccccaacgccaaccccaacgccaaccccaacgccaacccgaacgccaaccccaacgcgaaccccaacgccaaccccaacgccaacccgaacgccaaccccaacgccaaccccaacgcgaaccccaacgucgacccgaacgccaaccccaacgccaaccccaacgccaaccccaacgccaacccgaacgcgaaccccaacgccaaccccaacgccaacccgaacgccaaccccaacgccaaccccaacgcgaaccccaacgccaacccgaacgccaaccccaacgccaaccccaacgcgaaccccaacgccaacccgaacgccaaccccaacgccaaccccaacgccaaccccaacaagaacaaccaggggaacggccaggggcacaacaugccgaacgaccccaaccgcaacguggacgagaacgcgaacgccaacagcgccgugaagaacaacaacaacgaggagcccuccgacaagcacaucaaggaguaccugaacaagauccagaacagccucuccaccgaguggagccccugcuccgucacgugcggcaacgggauccaggugcggaucaagccgggcagcgccaacaagcccaaggacgagcuggacuacgccaacgacaucgagaagaagaucugcaagauggagaagugcugaggacuagugcaucacauuuaaaagcaucucagccuaccaugagaauaagagaaagaaaaugaagaucaauagcuuauucaucucuuuuucuuuuucguugguguaaagccaacacccugucuaaaaaacauaaauuucuuuaaucauuuugccucuuuucucugugcuucaauuaauaaaaaauggaaagaaccuagaucuaaaaaaaaaaaaaaaaaaaaaaaaaaaaaaaaaaaaaaaaaaaaaaaaaaaaaaaaaaaaaaaaugcaucccccccccccccccccccccccccccccccaaaggcucuuuucagagccaccagaauu

SEQ ID NO: 1273 - RNA, 1343 nt, Artificial Sequence
  mRNA Design i-2 (A64-N5-C30-hSL-N5) comprising derived and/or modified sequence from Pf(3D7)__XP_001351122.1__HsALB_Pf-CSP(98-397) (opt1)
aggagaggcgcugccuacggagguggcagccaucuccuucucggcaucaagcuuaccaugaagugggugaccuucaucagccuccuguuccuguucuccagcgccuacuccgccgacggcaaccccgacccgaacgcgaaccccaacgucgaccccaacgccaaccccaacguggacccgaacgccaaccccaacguggaccccaacgccaaccccaacgccaacccgaacgcgaaccccaacgccaaccccaacgccaaccccaacgccaacccgaacgcgaaccccaacgccaaccccaacgccaaccccaacgccaacccgaacgccaaccccaacgcgaaccccaacgccaaccccaacgccaacccgaacgccaaccccaacgccaaccccaacgcgaaccccaacgucgacccgaacgccaaccccaacgccaaccccaacgccaaccccaacgccaacccgaacgcgaaccccaacgccaaccccaacgccaacccgaacgccaaccccaacgccaaccccaacgcgaaccccaacgccaacccgaacgccaaccccaacgccaaccccaacgcgaaccccaacgccaacccgaacgccaaccccaacgccaaccccaacgccaaccccaacaagaacaaccaggggaacggccaggggcacaacaugccgaacgaccccaaccgcaacguggacgagaacgcgaacgccaacagcgccgugaagaacaacaacaacgaggagcccuccgacaagcacaucaaggaguaccugaacaagauccagaacagccucuccaccgaguggagccccugcuccgucacgugcggcaacgggauccaggugcggaucaagccgggcagcgccaacaagcccaaggacgagcuggacuacgccaacgacaucgagaagaagaucugcaagauggagaagugcuccagcguguucaacgucgugaacuccagcaucggccugaucauggugcucuccuuccuguuccugaacugaggacuagugcaucacauuuaaaagcaucucagccuaccaugagaauaagagaaagaaaaugaagaucaauagcuuauucaucucuuuuucuuuuucguugguguaaagccaacacccugucuaaaaaacauaaauuucuuuaaucauuuugccucuuuucucugugcuucaauuaauaaaaaauggaaagaaccuagaucuaaaaaaaaaaaaaaaaaaaaaaaaaaaaaaaaaaaaaaaaaaaaaaaaaaaaaaaaaaaaaaaaugcaucccccccccccccccccccccccccccccccaaaggcucuuuucagagccaccagaauu

SEQ ID NO: 1274 - RNA, 1670 nt, Artificial Sequence
  mRNA Design i-2 (A64-N5-C30-hSL-N5) comprising derived and/or modified sequence from Pf(3D7)__XP_001351122.1__HsALB_Pf-CSP(199-377)_L(PVTN)_HBsAg (opt1)
aggagaggcgcugccuacggagguggcagccaucuccuucucggcaucaagcuuaccaugaagugggugaccuucaucagccuccuguuccuguucuccagcgccuacuccgaccccaacgccaacccgaacgcgaaccccaacgccaaccccaacgccaaccccaacgccaacccgaacgccaaccccaacgcgaaccccaacgccaaccccaacgccaacccgaacgccaaccccaacgcgaaccccaacgccaaccccaacgccaacccgaacgccaaccccaacgccaaccccaacgcgaaccccaacgccaacccgaacgccaaccccaacaagaacaaccagggcaacgggcagggccacaacaugcccaacgaccccaaccgcaacgucgacgagaacgccaacgccaacagcgcggugaagaacaacaacaacgaggagccguccgacaagcacaucaaggaguaccugaacaagauccagaacagccucuccaccgaguggagccccugcuccgugaccugcgggaacggcauccagguccggaucaagcccgggagcgccaacaagcccaaggacgagcuggacuacgccaacgacaucgagaagaagaucugcaagauggagaagugcuccagcgugccggugaccaacauggagaacaucaccuccggcuuccugggcccccuccugguccugcaggccggguucuuccuccugacccgcauccugacgaucccccagagccucgacuccugguggaccagccugaacuuccugggcgggucccccgugugccucggccagaacagccaguccccgaccagcaaccacagccccaccuccugcccgcccaucugccccggguaccgguggaugugccugcgccgguucaucaucuuccuguucauccuccugcugugccucaucuuccugcuggugcuccuggacuaccagggcaugcugcccgucugcccccucaucccgggcagcacgaccaccaacaccgggcccugcaagacgugcaccacccccgcccagggcaacuccauguuccccagcugcugcugcaccaagccgacggacgggaacugcacgugcauccccauccccuccagcugggcguucgccaaguaccugugggagugggccuccgugcgcuucagcuggcugucccuccuggugcccuucguccagugguucgugggccugagcccgaccguguggcucuccgccaucuggaugaugugguacuggggccccagccuguacuccaucgucagccccuucaucccccugcucccgaucuucuucugccuguggguguacaucugaggacuagugcaucacauuuaaaagcaucucagccuaccaugagaauaagagaaagaaaaugaagaucaauagcuuauucaucucuuuuucuuuuucguugguguaaagccaacacccugucuaaaaaacauaaauuucuuuaaucauuuugccucuuuucucugugcuucaauuaauaaaaaauggaaagaaccuagaucuaaaaaaaaaaaaaaaaaaaaaaaaaaaaaaaaaaaaaaaaaaaaaaaaaaaaaaaaaaaaaaaaugcaucccccccccccccccccccccccccccccccaaaggcucuuuucagagccaccagaauu

SEQ ID NO: 1275 - RNA, 1409 nt, Artificial Sequence
  mRNA Design i-2 (A64-N5-C30-hSL-N5) comprising derived and/or modified sequence from Pb(ANKA)__XP_022712148.1__Pb-CSP (opt1)
aggagaggcgcugccuacggagguggcagccaucuccuucucggcaucaagcuuaccaugaagaagugcaccauccugguggucgccagccuccugcuggugaacucccuccugcccggcuacgggcagaacaagagcauccaggcccagcgcaaccugaacgagcucugcuacaacgagggcaacgacaacaagcuguaccacgugcugaacuccaagaacgggaagaucuacaaccggaacaccgucaaccgccuccuggcggacgccccggagggcaagaagaacgagaagaagaacgagaagaucgagcggaacaacaagcugaagcagcccccccccccgcccaaccccaacgaccccccgccccccaaccccaacgacccgcccccccccaacccgaacgaccccccccccccgaaccccaacgacccccccccgcccaacgccaacgacccccccccgcccaacgccaacgaccccgccccgcccaacgcgaacgaccccgcccccccgaacgccaacgaccccgccccccccaacgcgaacgacccggccccccccaacgccaacgaccccccgccccccaaccccaacgacccggccccccccaacgccaacgaccccccgccccccaaccccaacgacccggcgcccccccaggggaacaacaacccgcagccccagccccgcccccagccgcagccccagccccagccccagccgcagccccagccccagccccagccgcggccccagccccagccccagccgggcggcaacaacaacaacaagaacaacaacaacgacgacagcuacauccccuccgccgagaagauccucgaguucgugaagcagauccgcgacagcaucacggaggaguggucccagugcaacgugaccugcgggagcggcauccggguccgcaagcggaagggguccaacaagaaggccgaggaccugacccuggaggacaucgacaccgagaucugcaagauggacaagugcagcuccaucuucaacaucgugagcaacucccucggcuucgugauccugcugguccucguguucuucaacugaggacuagugcaucacauuuaaaagcaucucagccuaccaugagaauaagagaaagaaaaugaagaucaauagcuuauucaucucuuuuucuuuuucguugguguaaagccaacacccugucuaaaaaacauaaauuucuuuaaucauuuugccucuuuucucugugcuucaauuaauaaaaaauggaaagaaccuagaucuaaaaaaaaaaaaaaaaaaaaaaaaaaaaaaaaaaaaaaaaaaaaaaaaaaaaaaaaaaaaaaaaugcaucccccccccccccccccccccccccccccccaaaggcucuuuucagagccaccagaauu

SEQ ID NO: 1276 - RNA, 1574 nt, Artificial Sequence
  mRNA Design i-2 (A64-N5-C30-hSL-N5) comprising derived and/or modified sequence from Pb(ANKA)__XP_022712148.1__Pb-CSP_L(G4SG4)_TM domain HA (opt1)
aggagaggcgcugccuacggagguggcagccaucuccuucucggcaucaagcuuaccaugaagaagugcaccauccugguggucgccagccuccugcuggugaacucccuccugcccggcuacgggcagaacaagagcauccaggcccagcgcaaccugaacgagcucugcuacaacgagggcaacgacaacaagcuguaccacgugcugaacuccaagaacgggaagaucuacaaccggaacaccgucaaccgccuccuggcggacgccccggagggcaagaagaacgagaagaagaacgagaagaucgagcggaacaacaagcugaagcagcccccccccccgcccaaccccaacgaccccccgccccccaaccccaacgacccgcccccccccaacccgaacgaccccccccccccgaaccccaacgacccccccccgcccaacgccaacgacccccccccgcccaacgccaacgaccccgccccgcccaacgcgaacgaccccgcccccccgaacgccaacgaccccgccccccccaacgcgaacgacccggccccccccaacgccaacgaccccccgccccccaaccccaacgacccggccccccccaacgccaacgaccccccgccccccaaccccaacgacccggcgcccccccaggggaacaacaacccgcagccccagccccgcccccagccgcagccccagccccagccccagccgcagccccagccccagccccagccgcggccccagccccagccccagccgggcggcaacaacaacaacaagaacaacaacaacgacgacagcuacauccccuccgccgagaagauccucgaguucgugaagcagauccgcgacagcaucacggaggaguggucccagugcaacgugaccugcgggagcggcauccggguccgcaagcggaagggguccaacaagaaggccgaggaccugacccuggaggacaucgacaccgagaucugcaagauggacaagugcagcuccaucuucaacaucgugagcaacucccucggcuucgugauccugcugguccucguguucuucaacgggggcggcgggagcggcgggggcggcaagcuggaguccacgcgcaucuaccagauccuggccaucuacagcaccguggccuccagccucguccugguggugucccugggggcgaucagcuucuggaugugcagcaacggcucccuccagugccggaucugcaucugaggacuagugcaucacauuuaaaagcaucucagccuaccaugagaauaagagaaagaaaaugaagaucaauagcuuauucaucucuuuuucuuuuucguugguguaaagccaacacccugucuaaaaaacauaaauuucuuuaaucauuuugccucuuuucucugugcuucaauuaauaaaaaauggaaagaaccuagaucuaaaaaaaaaaaaaaaaaaaaaaaaaaaaaaaaaaaaaaaaaaaaaaaaaaaaaaaaaaaaaaaaugcaucccccccccccccccccccccccccccccccaaaggcucuuuucagagccaccagaauu

SEQ ID NO: 1277 - RNA, 1394 nt, Artificial Sequence
  mRNA Design i-2 (A64-N5-C30-hSL-N5) comprising derived and/or modified sequence from Pb(ANKA)__XP_022712148.1__HsALB_Pb-CSP(24-340) (opt1)
aggagaggcgcugccuacggagguggcagccaucuccuucucggcaucaagcuuaccaugaagugggugaccuucaucagccugcucuuccuguucuccagcgccuacucccagaacaagagcauccaggcccagcgcaaccugaacgagcucugcuacaacgagggcaacgacaacaagcuguaccacguccugaacuccaagaacgggaagaucuacaaccggaacaccgugaaccgccuccuggcggacgcccccgagggcaagaagaacgagaagaagaacgagaagaucgagcggaacaacaagcugaagcagccgcccccccccccgaaccccaacgacccccccccgcccaaccccaacgaccccccgccccccaaccccaacgacccgcccccccccaacccgaacgaccccccccccccgaacgccaacgaccccccccccccgaacgccaacgaccccgcccccccgaacgcgaacgaccccgccccccccaacgccaacgacccggccccccccaacgcgaacgaccccgccccgcccaacgccaacgacccccccccgcccaaccccaacgaccccgccccgcccaacgccaacgacccccccccgcccaaccccaacgaccccgcgccgccccaggggaacaacaacccccagccgcagccccgcccccagccccagccgcagccccagccccagccccagccgcagccccagccccagccccggccgcagccccagccccagcccggcgggaacaacaacaacaagaacaacaacaacgacgacagcuacaucccguccgccgagaagauccucgaguucgugaagcagauccgcgacagcaucacggaggaguggucccagugcaacgucaccugcggcagcggcauccgggugcgcaagcggaagggguccaacaagaaggccgaggaccugacccuggaggacaucgacaccgagaucugcaagauggacaagugcagcuccaucuucaacaucgugagcaacucccucggcuucgucauccugcuggugcucguguucuucaacugaggacuagugcaucacauuuaaaagcaucucagccuaccaugagaauaagagaaagaaaaugaagaucaauagcuuauucaucucuuuuucuuuuucguugguguaaagccaacacccugucuaaaaaacauaaauuucuuuaaucauuuugccucuuuucucugugcuucaauuaauaaaaaauggaaagaaccuagaucuaaaaaaaaaaaaaaaaaaaaaaaaaaaaaaaaaaaaaaaaaaaaaaaaaaaaaaaaaaaaaaaaugcaucccccccccccccccccccccccccccccccaaaggcucuuuucagagccaccagaauu

SEQ ID NO: 1278 - RNA, 1412 nt, Artificial Sequence
  mRNA Design i-2 (A64-N5-C30-hSL-N5) comprising derived and/or modified sequence from Pb(ANKA)__XP_022712148.1__HsIns-iso1_Pb-CSP(24-340) (opt1)
aggagaggcgcugccuacggagguggcagccaucuccuucucggcaucaagcuuaccauggcccuguggaugcgccuccugccccugcucgcccugcuggcgcucuggggcccggaccccgccgccgcccagaacaagagcauccaggcccagcggaaccugaacgagcugugcuacaacgaggggaacgacaacaagcucuaccacgugcugaacuccaagaacggcaagaucuacaaccgcaacaccgucaaccggcugcucgcggacgcccccgaggggaagaagaacgagaagaagaacgagaagaucgagcgcaacaacaagcugaagcagcccccgcccccccccaacccgaacgaccccccccccccgaaccccaacgacccccccccgcccaaccccaacgaccccccgccccccaaccccaacgacccgcccccccccaacgccaacgacccgccccccccgaacgccaacgaccccgcgccccccaacgccaacgacccggccccccccaacgccaacgaccccgccccgcccaacgcgaacgaccccgcccccccgaacgccaacgaccccccccccccgaaccccaacgaccccgcccccccgaacgccaacgaccccccccccccgaaccccaacgaccccgcgccgccccagggcaacaacaacccccagccccagccgcggccccagccccagccccagccgcagccccagccccagccccagccgcagccccagccccgcccccagccgcagccccagcccgggggcaacaacaacaacaagaacaacaacaacgacgacagcuacauccccuccgccgagaagauccuggaguucgugaagcagauccgggacagcaucaccgaggaguggucccagugcaacgugacgugcggcagcgggauccgcguccggaagcgcaagggcuccaacaagaaggccgaggaccucacccuggaggacaucgacaccgagaucugcaagauggacaagugcagcuccaucuucaacaucgugagcaacucccugggguucgugauccuccugguccugguguucuucaacugaggacuagugcaucacauuuaaaagcaucucagccuaccaugagaauaagagaaagaaaaugaagaucaauagcuuauucaucucuuuuucuuuuucguugguguaaagccaacacccugucuaaaaaacauaaauuucuuuaaucauuuugccucuuuucucugugcuucaauuaauaaaaaauggaaagaaccuagaucuaaaaaaaaaaaaaaaaaaaaaaaaaaaaaaaaaaaaaaaaaaaaaaaaaaaaaaaaaaaaaaaaugcaucccccccccccccccccccccccccccccccaaaggcucuuuucagagccaccagaauu

SEQ ID NO: 1279 - RNA, 1391 nt, Artificial Sequence
  mRNA Design i-2 (A64-N5-C30-hSL-N5) comprising derived and/or modified sequence from Pb(ANKA)__XP_022712148.1__HsSPARC_Pb-CSP(24-340) (opt1)
aggagaggcgcugccuacggagguggcagccaucuccuucucggcaucaagcuuaccaugcgcgccuggaucuucuuccugcucugccuggccggccgggcgcuggcccagaacaagagcauccaggcccagcgcaaccucaacgagcugugcuacaacgaggggaacgacaacaagcuguaccacgugcucaacuccaagaacggcaagaucuacaaccggaacaccgucaaccgccugcuggccgacgcccccgaggggaagaagaacgagaagaagaacgagaagaucgagcggaacaacaagcucaagcagccgcccccccccccgaaccccaacgacccccccccgcccaaccccaacgaccccccgccccccaaccccaacgacccgcccccccccaacccgaacgaccccccccccccgaacgcgaacgaccccccccccccgaacgccaacgaccccgcccccccgaacgccaacgaccccgcgccccccaacgccaacgacccggccccccccaacgccaacgaccccgccccgcccaacgcgaacgacccccccccgcccaaccccaacgaccccgccccgcccaacgccaacgacccccccccgcccaaccccaacgaccccgccccgccccagggcaacaacaacccccagccgcagccccgcccccagccccagccgcagccccagccccagccccagccgcagccccagccccagccccggccgcagccccagccccagcccgggggcaacaacaacaacaagaacaacaacaacgacgacagcuacaucccguccgccgagaagauccuggaguucgugaagcagauccgcgacagcaucaccgaggaguggucccagugcaacgugacgugcggcagcgggauccggguccgcaagcggaagggcuccaacaagaaggcggaggaccugacccucgaggacaucgacaccgagaucugcaagauggacaagugcagcuccaucuucaacaucgugagcaacucccugggguucgugauccugcucguccugguguucuucaacugaggacuagugcaucacauuuaaaagcaucucagccuaccaugagaauaagagaaagaaaaugaagaucaauagcuuauucaucucuuuuucuuuuucguugguguaaagccaacacccugucuaaaaaacauaaauuucuuuaaucauuuugccucuuuucucugugcuucaauuaauaaaaaauggaaagaaccuagaucuaaaaaaaaaaaaaaaaaaaaaaaaaaaaaaaaaaaaaaaaaaaaaaaaaaaaaaaaaaaaaaaaugcaucccccccccccccccccccccccccccccccaaaggcucuuuucagagccaccagaauu

SEQ ID NO: 1280 - RNA, 1394 nt, Artificial Sequence
  mRNA Design i-2 (A64-N5-C30-hSL-N5) comprising derived and/or modified sequence from Pb(ANKA)__XP_022712148.1__IgE_Pb-CSP(24-340) (opt1)
aggagaggcgcugccuacggagguggcagccaucuccuucucggcaucaagcuuaccauggacuggaccuggauccuguuccucguggccgccgcgacccgcguccacagccagaacaaguccauccaggcccagcggaaccugaacgagcugugcuacaacgagggcaacgacaacaagcucuaccacgugcugaacagcaagaacgggaagaucuacaaccgcaacacggugaaccggcugcucgccgacgcccccgagggcaagaagaacgagaagaagaacgagaagaucgagcgcaacaacaagcugaagcagccgcccccccccccgaaccccaacgacccccccccgcccaaccccaacgaccccccgccccccaaccccaacgacccgcccccccccaacccgaacgaccccccccccccgaacgccaacgaccccccccccccgaacgcgaacgaccccgcccccccgaacgccaacgaccccgccccccccaacgcgaacgacccggccccccccaacgccaacgaccccgccccgcccaacgccaacgacccccccccgcccaaccccaacgaccccgcgccgcccaacgccaacgacccccccccgcccaaccccaacgaccccgccccgccccaggggaacaacaacccccagccgcagccccggccccagccccagccgcagccccagccccagccccagccgcagccccagccccagccccgcccgcagccccagccccagcccggcgggaacaacaacaacaagaacaacaacaacgacgacuccuacaucccgagcgccgagaagauccuggaguucgucaagcagauccgggacuccaucaccgaggaguggagccagugcaacgugaccugcggcuccggcauccgcgugcggaagcgcaaggggagcaacaagaaggccgaggaccucacccuggaggacaucgacacggagaucugcaagauggacaagugcuccagcaucuucaacaucgucuccaacagccugggcuucgugauccuccuggugcuggucuucuucaacugaggacuagugcaucacauuuaaaagcaucucagccuaccaugagaauaagagaaagaaaaugaagaucaauagcuuauucaucucuuuuucuuuuucguugguguaaagccaacacccugucuaaaaaacauaaauuucuuuaaucauuuugccucuuuucucugugcuucaauuaauaaaaaauggaaagaaccuagaucuaaaaaaaaaaaaaaaaaaaaaaaaaaaaaaaaaaaaaaaaaaaaaaaaaaaaaaaaaaaaaaaaugcaucccccccccccccccccccccccccccccccaaaggcucuuuucagagccaccagaauu

SEQ ID NO: 1281 - RNA, 1580 nt, Artificial Sequence
  mRNA Design i-2 (A64-N5-C30-hSL-N5) comprising derived and/or modified sequence from Pf(3D7)__XP_001351122.1__Pf-CSP (opt2)
aggagaggcgcugccuacggagguggcagccaucuccuucucggcaucaagcuuaccaugaugcgcaagcucgccauccucuccgucuccuccuuccucuucgucgaggcccucuuccaggaguaccagugcuacggcuccuccuccaacacccgcguccucaacgagcucaacuacgacaacgccggcaccaaccucuacaacgagcucgagaugaacuacuacggcaagcaggagaacugguacucccucaagaagaacucccgcucccucggcgagaacgacgacggcaacaacgaggacaacgagaagcuccgcaagcccaagcacaagaagcucaagcagcccgccgacggcaaccccgaccccaacgccaaccccaacgucgaccccaacgccaaccccaacgucgaccccaacgccaaccccaacgucgaccccaacgccaaccccaacgccaaccccaacgccaaccccaacgccaaccccaacgccaaccccaacgccaaccccaacgccaaccccaacgccaaccccaacgccaaccccaacgccaaccccaacgccaaccccaacgccaaccccaacgccaaccccaacgccaaccccaacgccaaccccaacgccaaccccaacgccaaccccaacgucgaccccaacgccaaccccaacgccaaccccaacgccaaccccaacgccaaccccaacgccaaccccaacgccaaccccaacgccaaccccaacgccaaccccaacgccaaccccaacgccaaccccaacgccaaccccaacgccaaccccaacgccaaccccaacgccaaccccaacgccaaccccaacgccaaccccaacgccaaccccaacgccaaccccaacaagaacaaccagggcaacggccagggccacaacaugcccaacgaccccaaccgcaacgucgacgagaacgccaacgccaacuccgccgucaagaacaacaacaacgaggagcccuccgacaagcacaucaaggaguaccucaacaagauccagaacucccucuccaccgaguggucccccugcuccgucaccugcggcaacggcauccagguccgcaucaagcccggcuccgccaacaagcccaaggacgagcucgacuacgccaacgacaucgagaagaagaucugcaagauggagaagugcuccuccgucuucaacgucgucaacuccuccaucggccucaucaugguccucuccuuccucuuccucaacugaggacuagugcaucacauuuaaaagcaucucagccuaccaugagaauaagagaaagaaaaugaagaucaauagcuuauucaucucuuuuucuuuuucguugguguaaagccaacacccugucuaaaaaacauaaauuucuuuaaucauuuugccucuuuucucugugcuucaauuaauaaaaaauggaaagaaccuagaucuaaaaaaaaaaaaaaaaaaaaaaaaaaaaaaaaaaaaaaaaaaaaaaaaaaaaaaaaaaaaaaaaugcaucccccccccccccccccccccccccccccccaaaggcucuuuucagagccaccagaauu

SEQ ID NO: 1282 - RNA, 1511 nt, Artificial Sequence
  mRNA Design i-2 (A64-N5-C30-hSL-N5) comprising derived and/or modified sequence from Pf(3D7)__XP_001351122.1__Pf-CSP(1-374) (opt2)
aggagaggcgcugccuacggagguggcagccaucuccuucucggcaucaagcuuaccaugaugcgcaagcucgccauccucuccgucuccuccuuccucuucgucgaggcccucuuccaggaguaccagugcuacggcuccuccuccaacacccgcguccucaacgagcucaacuacgacaacgccggcaccaaccucuacaacgagcucgagaugaacuacuacggcaagcaggagaacugguacucccucaagaagaacucccgcucccucggcgagaacgacgacggcaacaacgaggacaacgagaagcuccgcaagcccaagcacaagaagcucaagcagcccgccgacggcaaccccgaccccaacgccaaccccaacgucgaccccaacgccaaccccaacgucgaccccaacgccaaccccaacgucgaccccaacgccaaccccaacgccaaccccaacgccaaccccaacgccaaccccaacgccaaccccaacgccaaccccaacgccaaccccaacgccaaccccaacgccaaccccaacgccaaccccaacgccaaccccaacgccaaccccaacgccaaccccaacgccaaccccaacgccaaccccaacgccaaccccaacgccaaccccaacgucgaccccaacgccaaccccaacgccaaccccaacgccaaccccaacgccaaccccaacgccaaccccaacgccaaccccaacgccaaccccaacgccaaccccaacgccaaccccaacgccaaccccaacgccaaccccaacgccaaccccaacgccaaccccaacgccaaccccaacgccaaccccaacgccaaccccaacgccaaccccaacgccaaccccaacaagaacaaccagggcaacggccagggccacaacaugcccaacgaccccaaccgcaacgucgacgagaacgccaacgccaacuccgccgucaagaacaacaacaacgaggagcccuccgacaagcacaucaaggaguaccucaacaagauccagaacucccucuccaccgaguggucccccugcuccgucaccugcggcaacggcauccagguccgcaucaagcccggcuccgccaacaagcccaaggacgagcucgacuacgccaacgacaucgagaagaagaucugcaagauggagaagugcugaggacuagugcaucacauuuaaaagcaucucagccuaccaugagaauaagagaaagaaaaugaagaucaauagcuuauucaucucuuuuucuuuuucguugguguaaagccaacacccugucuaaaaaacauaaauuucuuuaaucauuuugccucuuuucucugugcuucaauuaauaaaaaauggaaagaaccuagaucuaaaaaaaaaaaaaaaaaaaaaaaaaaaaaaaaaaaaaaaaaaaaaaaaaaaaaaaaaaaaaaaaugcaucccccccccccccccccccccccccccccccaaaggcucuuuucagagccaccagaauu

SEQ ID NO: 1283 - RNA, 1364 nt, Artificial Sequence
  mRNA Design i-2 (A64-N5-C30-hSL-N5) comprising derived and/or modified sequence from Pf(3D7)__XP_001351122.1__Pf-CSP(1-325) (opt2)
aggagaggcgcugccuacggagguggcagccaucuccuucucggcaucaagcuuaccaugaugcgcaagcucgccauccucuccgucuccuccuuccucuucgucgaggcccucuuccaggaguaccagugcuacggcuccuccuccaacacccgcguccucaacgagcucaacuacgacaacgccggcaccaaccucuacaacgagcucgagaugaacuacuacggcaagcaggagaacugguacucccucaagaagaacucccgcucccucggcgagaacgacgacggcaacaacgaggacaacgagaagcuccgcaagcccaagcacaagaagcucaagcagcccgccgacggcaaccccgaccccaacgccaaccccaacgucgaccccaacgccaaccccaacgucgaccccaacgccaaccccaacgucgaccccaacgccaaccccaacgccaaccccaacgccaaccccaacgccaaccccaacgccaaccccaacgccaaccccaacgccaaccccaacgccaaccccaacgccaaccccaacgccaaccccaacgccaaccccaacgccaaccccaacgccaaccccaacgccaaccccaacgccaaccccaacgccaaccccaacgccaaccccaacgucgaccccaacgccaaccccaacgccaaccccaacgccaaccccaacgccaaccccaacgccaaccccaacgccaaccccaacgccaaccccaacgccaaccccaacgccaaccccaacgccaaccccaacgccaaccccaacgccaaccccaacgccaaccccaacgccaaccccaacgccaaccccaacgccaaccccaacgccaaccccaacgccaaccccaacaagaacaaccagggcaacggccagggccacaacaugcccaacgaccccaaccgcaacgucgacgagaacgccaacgccaacuccgccgucaagaacaacaacaacgaggagcccuccgacaagcacaucaaggaguaccucaacaagauccagaacugaggacuagugcaucacauuuaaaagcaucucagccuaccaugagaauaagagaaagaaaaugaagaucaauagcuuauucaucucuuuuucuuuuucguugguguaaagccaacacccugucuaaaaaacauaaauuucuuuaaucauuuugccucuuuucucugugcuucaauuaauaaaaaauggaaagaaccuagaucuaaaaaaaaaaaaaaaaaaaaaaaaaaaaaaaaaaaaaaaaaaaaaaaaaaaaaaaaaaaaaaaaugcaucccccccccccccccccccccccccccccccaaaggcucuuuucagagccaccagaauu

SEQ ID NO: 1284 - RNA, 1580 nt, Artificial Sequence
  mRNA Design i-2 (A64-N5-C30-hSL-N5) comprising derived and/or modified sequence from Pf(3D7)__XP_001351122.1__HsALB_Pf-CSP(19-397) (opt2)
aggagaggcgcugccuacggagguggcagccaucuccuucucggcaucaagcuuaccaugaagugggucaccuucaucucccuccucuuccucuucuccuccgccuacucccucuuccaggaguaccagugcuacggcuccuccuccaacacccgcguccucaacgagcucaacuacgacaacgccggcaccaaccucuacaacgagcucgagaugaacuacuacggcaagcaggagaacugguacucccucaagaagaacucccgcucccucggcgagaacgacgacggcaacaacgaggacaacgagaagcuccgcaagcccaagcacaagaagcucaagcagcccgccgacggcaaccccgaccccaacgccaaccccaacgucgaccccaacgccaaccccaacgucgaccccaacgccaaccccaacgucgaccccaacgccaaccccaacgccaaccccaacgccaaccccaacgccaaccccaacgccaaccccaacgccaaccccaacgccaaccccaacgccaaccccaacgccaaccccaacgccaaccccaacgccaaccccaacgccaaccccaacgccaaccccaacgccaaccccaacgccaaccccaacgccaaccccaacgccaaccccaacgucgaccccaacgccaaccccaacgccaaccccaacgccaaccccaacgccaaccccaacgccaaccccaacgccaaccccaacgccaaccccaacgccaaccccaacgccaaccccaacgccaaccccaacgccaaccccaacgccaaccccaacgccaaccccaacgccaaccccaacgccaaccccaacgccaaccccaacgccaaccccaacgccaaccccaacaagaacaaccagggcaacggccagggccacaacaugcccaacgaccccaaccgcaacgucgacgagaacgccaacgccaacuccgccgucaagaacaacaacaacgaggagcccuccgacaagcacaucaaggaguaccucaacaagauccagaacucccucuccaccgaguggucccccugcuccgucaccugcggcaacggcauccagguccgcaucaagcccggcuccgccaacaagcccaaggacgagcucgacuacgccaacgacaucgagaagaagaucugcaagauggagaagugcuccuccgucuucaacgucgucaacuccuccaucggccucaucaugguccucuccuuccucuuccucaacugaggacuagugcaucacauuuaaaagcaucucagccuaccaugagaauaagagaaagaaaaugaagaucaauagcuuauucaucucuuuuucuuuuucguugguguaaagccaacacccugucuaaaaaacauaaauuucuuuaaucauuuugccucuuuucucugugcuucaauuaauaaaaaauggaaagaaccuagaucuaaaaaaaaaaaaaaaaaaaaaaaaaaaaaaaaaaaaaaaaaaaaaaaaaaaaaaaaaaaaaaaaugcaucccccccccccccccccccccccccccccccaaaggcucuuuucagagccaccagaauu

SEQ ID NO: 1285 - RNA, 1598 nt, Artificial Sequence
  mRNA Design i-2 (A64-N5-C30-hSL-N5) comprising derived and/or modified sequence from Pf(3D7)__XP_001351122.1__HsIns-iso1_Pf-CSP(19-397) (opt2)
aggagaggcgcugccuacggagguggcagccaucuccuucucggcaucaagcuuaccauggcccucuggaugcgccuccucccccuccucgcccuccucgcccucuggggccccgaccccgccgccgcccucuuccaggaguaccagugcuacggcuccuccuccaacacccgcguccucaacgagcucaacuacgacaacgccggcaccaaccucuacaacgagcucgagaugaacuacuacggcaagcaggagaacugguacucccucaagaagaacucccgcucccucggcgagaacgacgacggcaacaacgaggacaacgagaagcuccgcaagcccaagcacaagaagcucaagcagcccgccgacggcaaccccgaccccaacgccaaccccaacgucgaccccaacgccaaccccaacgucgaccccaacgccaaccccaacgucgaccccaacgccaaccccaacgccaaccccaacgccaaccccaacgccaaccccaacgccaaccccaacgccaaccccaacgccaaccccaacgccaaccccaacgccaaccccaacgccaaccccaacgccaaccccaacgccaaccccaacgccaaccccaacgccaaccccaacgccaaccccaacgccaaccccaacgccaaccccaacgucgaccccaacgccaaccccaacgccaaccccaacgccaaccccaacgccaaccccaacgccaaccccaacgccaaccccaacgccaaccccaacgccaaccccaacgccaaccccaacgccaaccccaacgccaaccccaacgccaaccccaacgccaaccccaacgccaaccccaacgccaaccccaacgccaaccccaacgccaaccccaacgccaaccccaacaagaacaaccagggcaacggccagggccacaacaugcccaacgaccccaaccgcaacgucgacgagaacgccaacgccaacuccgccgucaagaacaacaacaacgaggagcccuccgacaagcacaucaaggaguaccucaacaagauccagaacucccucuccaccgaguggucccccugcuccgucaccugcggcaacggcauccagguccgcaucaagcccggcuccgccaacaagcccaaggacgagcucgacuacgccaacgacaucgagaagaagaucugcaagauggagaagugcuccuccgucuucaacgucgucaacuccuccaucggccucaucaugguccucuccuuccucuuccucaacugaggacuagugcaucacauuuaaaagcaucucagccuaccaugagaauaagagaaagaaaaugaagaucaauagcuuauucaucucuuuuucuuuuucguugguguaaagccaacacccugucuaaaaaacauaaauuucuuuaaucauuuugccucuuuucucugugcuucaauuaauaaaaaauggaaagaaccuagaucuaaaaaaaaaaaaaaaaaaaaaaaaaaaaaaaaaaaaaaaaaaaaaaaaaaaaaaaaaaaaaaaaugcaucccccccccccccccccccccccccccccccaaaggcucuuuucagagccaccagaauu

SEQ ID NO: 1286 - RNA, 1577 nt, Artificial Sequence
  mRNA Design i-2 (A64-N5-C30-hSL-N5) comprising derived and/or modified sequence from Pf(3D7)__XP_001351122.1__HsSPARC_Pf-CSP(19-397) (opt2)
aggagaggcgcugccuacggagguggcagccaucuccuucucggcaucaagcuuaccaugcgcgccuggaucuucuuccuccucugccucgccggccgcgcccucgcccucuuccaggaguaccagugcuacggcuccuccuccaacacccgcguccucaacgagcucaacuacgacaacgccggcaccaaccucuacaacgagcucgagaugaacuacuacggcaagcaggagaacugguacucccucaagaagaacucccgcucccucggcgagaacgacgacggcaacaacgaggacaacgagaagcuccgcaagcccaagcacaagaagcucaagcagcccgccgacggcaaccccgaccccaacgccaaccccaacgucgaccccaacgccaaccccaacgucgaccccaacgccaaccccaacgucgaccccaacgccaaccccaacgccaaccccaacgccaaccccaacgccaaccccaacgccaaccccaacgccaaccccaacgccaaccccaacgccaaccccaacgccaaccccaacgccaaccccaacgccaaccccaacgccaaccccaacgccaaccccaacgccaaccccaacgccaaccccaacgccaaccccaacgccaaccccaacgucgaccccaacgccaaccccaacgccaaccccaacgccaaccccaacgccaaccccaacgccaaccccaacgccaaccccaacgccaaccccaacgccaaccccaacgccaaccccaacgccaaccccaacgccaaccccaacgccaaccccaacgccaaccccaacgccaaccccaacgccaaccccaacgccaaccccaacgccaaccccaacgccaaccccaacaagaacaaccagggcaacggccagggccacaacaugcccaacgaccccaaccgcaacgucgacgagaacgccaacgccaacuccgccgucaagaacaacaacaacgaggagcccuccgacaagcacaucaaggaguaccucaacaagauccagaacucccucuccaccgaguggucccccugcuccgucaccugcggcaacggcauccagguccgcaucaagcccggcuccgccaacaagcccaaggacgagcucgacuacgccaacgacaucgagaagaagaucugcaagauggagaagugcuccuccgucuucaacgucgucaacuccuccaucggccucaucaugguccucuccuuccucuuccucaacugaggacuagugcaucacauuuaaaagcaucucagccuaccaugagaauaagagaaagaaaaugaagaucaauagcuuauucaucucuuuuucuuuuucguugguguaaagccaacacccugucuaaaaaacauaaauuucuuuaaucauuuugccucuuuucucugugcuucaauuaauaaaaaauggaaagaaccuagaucuaaaaaaaaaaaaaaaaaaaaaaaaaaaaaaaaaaaaaaaaaaaaaaaaaaaaaaaaaaaaaaaaugcaucccccccccccccccccccccccccccccccaaaggcucuuuucagagccaccagaauu

SEQ ID NO: 1287 - RNA, 1580 nt, Artificial Sequence
  mRNA Design i-2 (A64-N5-C30-hSL-N5) comprising derived and/or modified sequence from Pf(3D7)__XP_001351122.1__IgE_Pf-CSP(19-397) (opt2)
aggagaggcgcugccuacggagguggcagccaucuccuucucggcaucaagcuuaccauggacuggaccuggauccucuuccucgucgccgccgccacccgcguccacucccucuuccaggaguaccagugcuacggcuccuccuccaacacccgcguccucaacgagcucaacuacgacaacgccggcaccaaccucuacaacgagcucgagaugaacuacuacggcaagcaggagaacugguacucccucaagaagaacucccgcucccucggcgagaacgacgacggcaacaacgaggacaacgagaagcuccgcaagcccaagcacaagaagcucaagcagcccgccgacggcaaccccgaccccaacgccaaccccaacgucgaccccaacgccaaccccaacgucgaccccaacgccaaccccaacgucgaccccaacgccaaccccaacgccaaccccaacgccaaccccaacgccaaccccaacgccaaccccaacgccaaccccaacgccaaccccaacgccaaccccaacgccaaccccaacgccaaccccaacgccaaccccaacgccaaccccaacgccaaccccaacgccaaccccaacgccaaccccaacgccaaccccaacgccaaccccaacgucgaccccaacgccaaccccaacgccaaccccaacgccaaccccaacgccaaccccaacgccaaccccaacgccaaccccaacgccaaccccaacgccaaccccaacgccaaccccaacgccaaccccaacgccaaccccaacgccaaccccaacgccaaccccaacgccaaccccaacgccaaccccaacgccaaccccaacgccaaccccaacgccaaccccaacaagaacaaccagggcaacggccagggccacaacaugcccaacgaccccaaccgcaacgucgacgagaacgccaacgccaacuccgccgucaagaacaacaacaacgaggagcccuccgacaagcacaucaaggaguaccucaacaagauccagaacucccucuccaccgaguggucccccugcuccgucaccugcggcaacggcauccagguccgcaucaagcccggcuccgccaacaagcccaaggacgagcucgacuacgccaacgacaucgagaagaagaucugcaagauggagaagugcuccuccgucuucaacgucgucaacuccuccaucggccucaucaugguccucuccuuccucuuccucaacugaggacuagugcaucacauuuaaaagcaucucagccuaccaugagaauaagagaaagaaaaugaagaucaauagcuuauucaucucuuuuucuuuuucguugguguaaagccaacacccugucuaaaaaacauaaauuucuuuaaucauuuugccucuuuucucugugcuucaauuaauaaaaaauggaaagaaccuagaucuaaaaaaaaaaaaaaaaaaaaaaaaaaaaaaaaaaaaaaaaaaaaaaaaaaaaaaaaaaaaaaaaugcaucccccccccccccccccccccccccccccccaaaggcucuuuucagagccaccagaauu

SEQ ID NO: 1288 - RNA, 1745 nt, Artificial Sequence
  mRNA Design i-2 (A64-N5-C30-hSL-N5) comprising derived and/or modified sequence from Pf(3D7)__XP_001351122.1__Pf-CSP_L(G4SG4)_TM domain HA (opt2)
aggagaggcgcugccuacggagguggcagccaucuccuucucggcaucaagcuuaccaugaugcgcaagcucgccauccucuccgucuccuccuuccucuucgucgaggcccucuuccaggaguaccagugcuacggcuccuccuccaacacccgcguccucaacgagcucaacuacgacaacgccggcaccaaccucuacaacgagcucgagaugaacuacuacggcaagcaggagaacugguacucccucaagaagaacucccgcucccucggcgagaacgacgacggcaacaacgaggacaacgagaagcuccgcaagcccaagcacaagaagcucaagcagcccgccgacggcaaccccgaccccaacgccaaccccaacgucgaccccaacgccaaccccaacgucgaccccaacgccaaccccaacgucgaccccaacgccaaccccaacgccaaccccaacgccaaccccaacgccaaccccaacgccaaccccaacgccaaccccaacgccaaccccaacgccaaccccaacgccaaccccaacgccaaccccaacgccaaccccaacgccaaccccaacgccaaccccaacgccaaccccaacgccaaccccaacgccaaccccaacgccaaccccaacgucgaccccaacgccaaccccaacgccaaccccaacgccaaccccaacgccaaccccaacgccaaccccaacgccaaccccaacgccaaccccaacgccaaccccaacgccaaccccaacgccaaccccaacgccaaccccaacgccaaccccaacgccaaccccaacgccaaccccaacgccaaccccaacgccaaccccaacgccaaccccaacgccaaccccaacaagaacaaccagggcaacggccagggccacaacaugcccaacgaccccaaccgcaacgucgacgagaacgccaacgccaacuccgccgucaagaacaacaacaacgaggagcccuccgacaagcacaucaaggaguaccucaacaagauccagaacucccucuccaccgaguggucccccugcuccgucaccugcggcaacggcauccagguccgcaucaagcccggcuccgccaacaagcccaaggacgagcucgacuacgccaacgacaucgagaagaagaucugcaagauggagaagugcuccuccgucuucaacgucgucaacuccuccaucggccucaucaugguccucuccuuccucuuccucaacggcggcggcggcuccggcggcggcggcaagcucgaguccacccgcaucuaccagauccucgccaucuacuccaccgucgccuccucccucguccucgucgucucccucggcgccaucuccuucuggaugugcuccaacggcucccuccagugccgcaucugcaucugaggacuagugcaucacauuuaaaagcaucucagccuaccaugagaauaagagaaagaaaaugaagaucaauagcuuauucaucucuuuuucuuuuucguugguguaaagccaacacccugucuaaaaaacauaaauuucuuuaaucauuuugccucuuuucucugugcuucaauuaauaaaaaauggaaagaaccuagaucuaaaaaaaaaaaaaaaaaaaaaaaaaaaaaaaaaaaaaaaaaaaaaaaaaaaaaaaaaaaaaaaaugcaucccccccccccccccccccccccccccccccaaaggcucuuuucagagccaccagaauu

SEQ ID NO: 1289 - RNA, 1619 nt, Artificial Sequence
  mRNA Design i-2 (A64-N5-C30-hSL-N5) comprising derived and/or modified sequence from Pf(3D7)__XP_001351122.1__Pf-CSP(199-377)_L(PVTN)_HBsAg (opt2)
aggagaggcgcugccuacggagguggcagccaucuccuucucggcaucaagcuuaccauggaccccaacgccaaccccaacgccaaccccaacgccaaccccaacgccaaccccaacgccaaccccaacgccaaccccaacgccaaccccaacgccaaccccaacgccaaccccaacgccaaccccaacgccaaccccaacgccaaccccaacgccaaccccaacgccaaccccaacgccaaccccaacgccaaccccaacgccaaccccaacgccaaccccaacaagaacaaccagggcaacggccagggccacaacaugcccaacgaccccaaccgcaacgucgacgagaacgccaacgccaacuccgccgucaagaacaacaacaacgaggagcccuccgacaagcacaucaaggaguaccucaacaagauccagaacucccucuccaccgaguggucccccugcuccgucaccugcggcaacggcauccagguccgcaucaagcccggcuccgccaacaagcccaaggacgagcucgacuacgccaacgacaucgagaagaagaucugcaagauggagaagugcuccuccguccccgucaccaacauggagaacaucaccuccggcuuccucggcccccuccucguccuccaggccggcuucuuccuccucacccgcauccucaccaucccccagucccucgacuccugguggaccucccucaacuuccucggcggcucccccgucugccucggccagaacucccagucccccaccuccaaccacucccccaccuccugcccccccaucugccccggcuaccgcuggaugugccuccgccgcuucaucaucuuccucuucauccuccuccucugccucaucuuccuccucguccuccucgacuaccagggcaugcuccccgucugcccccucauccccggcuccaccaccaccaacaccggccccugcaagaccugcaccacccccgcccagggcaacuccauguuccccuccugcugcugcaccaagcccaccgacggcaacugcaccugcauccccauccccuccuccugggccuucgccaaguaccucugggagugggccuccguccgcuucuccuggcucucccuccucguccccuucguccagugguucgucggccucucccccaccgucuggcucuccgccaucuggaugaugugguacuggggccccucccucuacuccaucgucucccccuucaucccccuccuccccaucuucuucugccucugggucuacaucugaggacuagugcaucacauuuaaaagcaucucagccuaccaugagaauaagagaaagaaaaugaagaucaauagcuuauucaucucuuuuucuuuuucguugguguaaagccaacacccugucuaaaaaacauaaauuucuuuaaucauuuugccucuuuucucugugcuucaauuaauaaaaaauggaaagaaccuagaucuaaaaaaaaaaaaaaaaaaaaaaaaaaaaaaaaaaaaaaaaaaaaaaaaaaaaaaaaaaaaaaaaugcaucccccccccccccccccccccccccccccccaaaggcucuuuucagagccaccagaauu

SEQ ID NO: 1290 - RNA, 1661 nt, Artificial Sequence
  mRNA Design i-2 (A64-N5-C30-hSL-N5) comprising derived and/or modified sequence from Pf(3D7)__XP_001351122.1__Pf-CSP(199-387)_L(PVTN)_HBsAg (opt2)
aggagaggcgcugccuacggagguggcagccaucuccuucucggcaucaagcuuaccaugauggcccccgaccccaacgccaaccccaacgccaaccccaacgccaaccccaacgccaaccccaacgccaaccccaacgccaaccccaacgccaaccccaacgccaaccccaacgccaaccccaacgccaaccccaacgccaaccccaacgccaaccccaacgccaaccccaacgccaaccccaacgccaaccccaacgccaaccccaacgccaaccccaacgccaaccccaacaagaacaaccagggcaacggccagggccacaacaugcccaacgaccccaaccgcaacgucgacgagaacgccaacgccaacuccgccgucaagaacaacaacaacgaggagcccuccgacaagcacaucaaggaguaccucaacaagauccagaacucccucuccaccgaguggucccccugcuccgucaccugcggcaacggcauccagguccgcaucaagcccggcuccgccaacaagcccaaggacgagcucgacuacgccaacgacaucgagaagaagaucugcaagauggagaagugcuccuccgucuucaacgucgucaacuccuccaucggccucggccccgucaccaacauggagaacaucaccuccggcuuccucggcccccuccucguccuccaggccggcuucuuccuccucacccgcauccucaccaucccccagucccucgacuccugguggaccucccucaacuuccucggcggcucccccgucugccucggccagaacucccagucccccaccuccaaccacucccccaccuccugcccccccaucugccccggcuaccgcuggaugugccuccgccgcuucaucaucuuccucuucauccuccuccucugccucaucuuccuccucguccuccucgacuaccagggcaugcuccccgucugcccccucauccccggcuccaccaccaccaacaccggccccugcaagaccugcaccacccccgcccagggcaacuccauguuccccuccugcugcugcaccaagcccaccgacggcaacugcaccugcauccccauccccuccuccugggccuucgccaaguaccucugggagugggccuccguccgcuucuccuggcucucccuccucguccccuucguccagugguucgucggccucucccccaccgucuggcucuccgccaucuggaugaugugguacuggggccccucccucuacuccaucgucucccccuucaucccccuccuccccaucuucuucugccucugggucuacaucugaggacuagugcaucacauuuaaaagcaucucagccuaccaugagaauaagagaaagaaaaugaagaucaauagcuuauucaucucuuuuucuuuuucguugguguaaagccaacacccugucuaaaaaacauaaauuucuuuaaucauuuugccucuuuucucugugcuucaauuaauaaaaaauggaaagaaccuagaucuaaaaaaaaaaaaaaaaaaaaaaaaaaaaaaaaaaaaaaaaaaaaaaaaaaaaaaaaaaaaaaaaugcaucccccccccccccccccccccccccccccccaaaggcucuuuucagagccaccagaauu

SEQ ID NO: 1291 - RNA, 845 nt, Artificial Sequence
  mRNA Design i-2 (A64-N5-C30-hSL-N5) comprising derived and/or modified sequence from Pf(3D7)__XP_001351122.1__HsALB_Pf-CSP(19-152) (opt2)
aggagaggcgcugccuacggagguggcagccaucuccuucucggcaucaagcuuaccaugaagugggucaccuucaucucccuccucuuccucuucuccuccgccuacucccucuuccaggaguaccagugcuacggcuccuccuccaacacccgcguccucaacgagcucaacuacgacaacgccggcaccaaccucuacaacgagcucgagaugaacuacuacggcaagcaggagaacugguacucccucaagaagaacucccgcucccucggcgagaacgacgacggcaacaacgaggacaacgagaagcuccgcaagcccaagcacaagaagcucaagcagcccgccgacggcaaccccgaccccaacgccaaccccaacgucgaccccaacgccaaccccaacgucgaccccaacgccaaccccaacgucgaccccaacgccaaccccaacgccaaccccaacgccaaccccaacgccaaccccaacgccaaccccaacgccaaccccugaggacuagugcaucacauuuaaaagcaucucagccuaccaugagaauaagagaaagaaaaugaagaucaauagcuuauucaucucuuuuucuuuuucguugguguaaagccaacacccugucuaaaaaacauaaauuucuuuaaucauuuugccucuuuucucugugcuucaauuaauaaaaaauggaaagaaccuagaucuaaaaaaaaaaaaaaaaaaaaaaaaaaaaaaaaaaaaaaaaaaaaaaaaaaaaaaaaaaaaaaaaugcaucccccccccccccccccccccccccccccccaaaggcucuuuucagagccaccagaauu

SEQ ID NO: 1292 - RNA, 965 nt, Artificial Sequence
  mRNA Design i-2 (A64-N5-C30-hSL-N5) comprising derived and/or modified sequence from Pf(3D7)__XP_001351122.1__HsALB_Pf-CSP(19-192) (opt2)
aggagaggcgcugccuacggagguggcagccaucuccuucucggcaucaagcuuaccaugaagugggucaccuucaucucccuccucuuccucuucuccuccgccuacucccucuuccaggaguaccagugcuacggcuccuccuccaacacccgcguccucaacgagcucaacuacgacaacgccggcaccaaccucuacaacgagcucgagaugaacuacuacggcaagcaggagaacugguacucccucaagaagaacucccgcucccucggcgagaacgacgacggcaacaacgaggacaacgagaagcuccgcaagcccaagcacaagaagcucaagcagcccgccgacggcaaccccgaccccaacgccaaccccaacgucgaccccaacgccaaccccaacgucgaccccaacgccaaccccaacgucgaccccaacgccaaccccaacgccaaccccaacgccaaccccaacgccaaccccaacgccaaccccaacgccaaccccaacgccaaccccaacgccaaccccaacgccaaccccaacgccaaccccaacgccaaccccaacgccaaccccaacgccaaccccaacgccaaccccaacgccaaccccaacgccaaccccugaggacuagugcaucacauuuaaaagcaucucagccuaccaugagaauaagagaaagaaaaugaagaucaauagcuuauucaucucuuuuucuuuuucguugguguaaagccaacacccugucuaaaaaacauaaauuucuuuaaucauuuugccucuuuucucugugcuucaauuaauaaaaaauggaaagaaccuagaucuaaaaaaaaaaaaaaaaaaaaaaaaaaaaaaaaaaaaaaaaaaaaaaaaaaaaaaaaaaaaaaaaugcaucccccccccccccccccccccccccccccccaaaggcucuuuucagagccaccagaauu

SEQ ID NO: 1293 - RNA, 1205 nt, Artificial Sequence
  mRNA Design i-2 (A64-N5-C30-hSL-N5) comprising derived and/or modified sequence from Pf(3D7)__XP_001351122.1__HsALB_Pf-CSP(19-272) (opt2)
aggagaggcgcugccuacggagguggcagccaucuccuucucggcaucaagcuuaccaugaagugggucaccuucaucucccuccucuuccucuucuccuccgccuacucccucuuccaggaguaccagugcuacggcuccuccuccaacacccgcguccucaacgagcucaacuacgacaacgccggcaccaaccucuacaacgagcucgagaugaacuacuacggcaagcaggagaacugguacucccucaagaagaacucccgcucccucggcgagaacgacgacggcaacaacgaggacaacgagaagcuccgcaagcccaagcacaagaagcucaagcagcccgccgacggcaaccccgaccccaacgccaaccccaacgucgaccccaacgccaaccccaacgucgaccccaacgccaaccccaacgucgaccccaacgccaaccccaacgccaaccccaacgccaaccccaacgccaaccccaacgccaaccccaacgccaaccccaacgccaaccccaacgccaaccccaacgccaaccccaacgccaaccccaacgccaaccccaacgccaaccccaacgccaaccccaacgccaaccccaacgccaaccccaacgccaaccccaacgccaaccccaacgucgaccccaacgccaaccccaacgccaaccccaacgccaaccccaacgccaaccccaacgccaaccccaacgccaaccccaacgccaaccccaacgccaaccccaacgccaaccccaacgccaaccccaacgccaaccccaacgccaaccccaacgccaaccccaacgccaaccccaacgccaaccccaacgccaaccccaacgccaaccccaacgccaaccccugaggacuagugcaucacauuuaaaagcaucucagccuaccaugagaauaagagaaagaaaaugaagaucaauagcuuauucaucucuuuuucuuuuucguugguguaaagccaacacccugucuaaaaaacauaaauuucuuuaaucauuuugccucuuuucucugugcuucaauuaauaaaaaauggaaagaaccuagaucuaaaaaaaaaaaaaaaaaaaaaaaaaaaaaaaaaaaaaaaaaaaaaaaaaaaaaaaaaaaaaaaaugcaucccccccccccccccccccccccccccccccaaaggcucuuuucagagccaccagaauu

SEQ ID NO: 1294 - RNA, 1367 nt, Artificial Sequence
  mRNA Design i-2 (A64-N5-C30-hSL-N5) comprising derived and/or modified sequence from Pf(3D7)__XP_001351122.1__HsALB_Pf-CSP(19-272)_L(AAY)_Pf-CSP(310-3 27)_L(AAY)_Pf-CSP(346-375) (opt2)
aggagaggcgcugccuacggagguggcagccaucuccuucucggcaucaagcuuaccaugaagugggucaccuucaucucccuccucuuccucuucuccuccgccuacucccucuuccaggaguaccagugcuacggcuccuccuccaacacccgcguccucaacgagcucaacuacgacaacgccggcaccaaccucuacaacgagcucgagaugaacuacuacggcaagcaggagaacugguacucccucaagaagaacucccgcucccucggcgagaacgacgacggcaacaacgaggacaacgagaagcuccgcaagcccaagcacaagaagcucaagcagcccgccgacggcaaccccgaccccaacgccaaccccaacgucgaccccaacgccaaccccaacgucgaccccaacgccaaccccaacgucgaccccaacgccaaccccaacgccaaccccaacgccaaccccaacgccaaccccaacgccaaccccaacgccaaccccaacgccaaccccaacgccaaccccaacgccaaccccaacgccaaccccaacgccaaccccaacgccaaccccaacgccaaccccaacgccaaccccaacgccaaccccaacgccaaccccaacgccaaccccaacgucgaccccaacgccaaccccaacgccaaccccaacgccaaccccaacgccaaccccaacgccaaccccaacgccaaccccaacgccaaccccaacgccaaccccaacgccaaccccaacgccaaccccaacgccaaccccaacgccaaccccaacgccaaccccaacgccaaccccaacgccaaccccaacgccaaccccaacgccaaccccaacgccaaccccgccgccuacgagcccuccgacaagcacaucaaggaguaccucaacaagauccagaacucccucgccgccuacaucaagcccggcuccgccaacaagcccaaggacgagcucgacuacgccaacgacaucgagaagaagaucugcaagauggagaagugcuccugaggacuagugcaucacauuuaaaagcaucucagccuaccaugagaauaagagaaagaaaaugaagaucaauagcuuauucaucucuuuuucuuuuucguugguguaaagccaacacccugucuaaaaaacauaaauuucuuuaaucauuuugccucuuuucucugugcuucaauuaauaaaaaauggaaagaaccuagaucuaaaaaaaaaaaaaaaaaaaaaaaaaaaaaaaaaaaaaaaaaaaaaaaaaaaaaaaaaaaaaaaaugcaucccccccccccccccccccccccccccccccaaaggcucuuuucagagccaccagaauu

SEQ ID NO: 1295 - RNA, 1328 nt, Artificial Sequence
  mRNA Design i-2 (A64-N5-C30-hSL-N5) comprising derived and/or modified sequence from Pf(3D7)__XP_001351122.1__HsALB_Pf-CSP(19-272)_L(AAY)_Pf-CSP(346-3 65)_L(AAY)_P2 (opt2)
aggagaggcgcugccuacggagguggcagccaucuccuucucggcaucaagcuuaccaugaagugggucaccuucaucucccuccucuuccucuucuccuccgccuacucccucuuccaggaguaccagugcuacggcuccuccuccaacacccgcguccucaacgagcucaacuacgacaacgccggcaccaaccucuacaacgagcucgagaugaacuacuacggcaagcaggagaacugguacucccucaagaagaacucccgcucccucggcgagaacgacgacggcaacaacgaggacaacgagaagcuccgcaagcccaagcacaagaagcucaagcagcccgccgacggcaaccccgaccccaacgccaaccccaacgucgaccccaacgccaaccccaacgucgaccccaacgccaaccccaacgucgaccccaacgccaaccccaacgccaaccccaacgccaaccccaacgccaaccccaacgccaaccccaacgccaaccccaacgccaaccccaacgccaaccccaacgccaaccccaacgccaaccccaacgccaaccccaacgccaaccccaacgccaaccccaacgccaaccccaacgccaaccccaacgccaaccccaacgccaaccccaacgucgaccccaacgccaaccccaacgccaaccccaacgccaaccccaacgccaaccccaacgccaaccccaacgccaaccccaacgccaaccccaacgccaaccccaacgccaaccccaacgccaaccccaacgccaaccccaacgccaaccccaacgccaaccccaacgccaaccccaacgccaaccccaacgccaaccccaacgccaaccccaacgccaaccccgccgccuacaucaagcccggcuccgccaacaagcccaaggacgagcucgacuacgccaacgacaucgaggccgccuaccaguacaucaaggccaacuccaaguucaucggcaucaccgagcucugaggacuagugcaucacauuuaaaagcaucucagccuaccaugagaauaagagaaagaaaaugaagaucaauagcuuauucaucucuuuuucuuuuucguugguguaaagccaacacccugucuaaaaaacauaaauuucuuuaaucauuuugccucuuuucucugugcuucaauuaauaaaaaauggaaagaaccuagaucuaaaaaaaaaaaaaaaaaaaaaaaaaaaaaaaaaaaaaaaaaaaaaaaaaaaaaaaaaaaaaaaaugcaucccccccccccccccccccccccccccccccaaaggcucuuuucagagccaccagaauu

SEQ ID NO: 1296 - RNA, 1322 nt, Artificial Sequence
  mRNA Design i-2 (A64-N5-C30-hSL-N5) comprising derived and/or modified sequence from Pf(3D7)__XP_001351122.1__HsALB_Pf-CSP(19-272)_L(AAY)_Pf-CSP(346-3 65)_L(AAY)_PADRE (opt2)
aggagaggcgcugccuacggagguggcagccaucuccuucucggcaucaagcuuaccaugaagugggucaccuucaucucccuccucuuccucuucuccuccgccuacucccucuuccaggaguaccagugcuacggcuccuccuccaacacccgcguccucaacgagcucaacuacgacaacgccggcaccaaccucuacaacgagcucgagaugaacuacuacggcaagcaggagaacugguacucccucaagaagaacucccgcucccucggcgagaacgacgacggcaacaacgaggacaacgagaagcuccgcaagcccaagcacaagaagcucaagcagcccgccgacggcaaccccgaccccaacgccaaccccaacgucgaccccaacgccaaccccaacgucgaccccaacgccaaccccaacgucgaccccaacgccaaccccaacgccaaccccaacgccaaccccaacgccaaccccaacgccaaccccaacgccaaccccaacgccaaccccaacgccaaccccaacgccaaccccaacgccaaccccaacgccaaccccaacgccaaccccaacgccaaccccaacgccaaccccaacgccaaccccaacgccaaccccaacgccaaccccaacgucgaccccaacgccaaccccaacgccaaccccaacgccaaccccaacgccaaccccaacgccaaccccaacgccaaccccaacgccaaccccaacgccaaccccaacgccaaccccaacgccaaccccaacgccaaccccaacgccaaccccaacgccaaccccaacgccaaccccaacgccaaccccaacgccaaccccaacgccaaccccaacgccaaccccgccgccuacaucaagcccggcuccgccaacaagcccaaggacgagcucgacuacgccaacgacaucgaggccgccuacgccaaguucgucgccgccuggacccucaaggccgccgccugaggacuagugcaucacauuuaaaagcaucucagccuaccaugagaauaagagaaagaaaaugaagaucaauagcuuauucaucucuuuuucuuuuucguugguguaaagccaacacccugucuaaaaaacauaaauuucuuuaaucauuuugccucuuuucucugugcuucaauuaauaaaaaauggaaagaaccuagaucuaaaaaaaaaaaaaaaaaaaaaaaaaaaaaaaaaaaaaaaaaaaaaaaaaaaaaaaaaaaaaaaaugcaucccccccccccccccccccccccccccccccaaaggcucuuuucagagccaccagaauu

SEQ ID NO: 1297 - RNA, 1379 nt, Artificial Sequence
  mRNA Design i-2 (A64-N5-C30-hSL-N5) comprising derived and/or modified sequence from Pf(3D7)__XP_001351122.1__HsALB_Pf-CSP(19-272)_L(G4S)_Pf-CSP(310-3 27)_L(G4S)_Pf-CSP(346-375) (opt2)
aggagaggcgcugccuacggagguggcagccaucuccuucucggcaucaagcuuaccaugaagugggucaccuucaucucccuccucuuccucuucuccuccgccuacucccucuuccaggaguaccagugcuacggcuccuccuccaacacccgcguccucaacgagcucaacuacgacaacgccggcaccaaccucuacaacgagcucgagaugaacuacuacggcaagcaggagaacugguacucccucaagaagaacucccgcucccucggcgagaacgacgacggcaacaacgaggacaacgagaagcuccgcaagcccaagcacaagaagcucaagcagcccgccgacggcaaccccgaccccaacgccaaccccaacgucgaccccaacgccaaccccaacgucgaccccaacgccaaccccaacgucgaccccaacgccaaccccaacgccaaccccaacgccaaccccaacgccaaccccaacgccaaccccaacgccaaccccaacgccaaccccaacgccaaccccaacgccaaccccaacgccaaccccaacgccaaccccaacgccaaccccaacgccaaccccaacgccaaccccaacgccaaccccaacgccaaccccaacgccaaccccaacgucgaccccaacgccaaccccaacgccaaccccaacgccaaccccaacgccaaccccaacgccaaccccaacgccaaccccaacgccaaccccaacgccaaccccaacgccaaccccaacgccaaccccaacgccaaccccaacgccaaccccaacgccaaccccaacgccaaccccaacgccaaccccaacgccaaccccaacgccaaccccaacgccaaccccggcggcggcggcuccgagcccuccgacaagcacaucaaggaguaccucaacaagauccagaacucccucggcggcggcggcuccaucaagcccggcuccgccaacaagcccaaggacgagcucgacuacgccaacgacaucgagaagaagaucugcaagauggagaagugcuccugaggacuagugcaucacauuuaaaagcaucucagccuaccaugagaauaagagaaagaaaaugaagaucaauagcuuauucaucucuuuuucuuuuucguugguguaaagccaacacccugucuaaaaaacauaaauuucuuuaaucauuuugccucuuuucucugugcuucaauuaauaaaaaauggaaagaaccuagaucuaaaaaaaaaaaaaaaaaaaaaaaaaaaaaaaaaaaaaaaaaaaaaaaaaaaaaaaaaaaaaaaaugcaucccccccccccccccccccccccccccccccaaaggcucuuuucagagccaccagaauu

SEQ ID NO: 1298 - RNA, 1364 nt, Artificial Sequence
  mRNA Design i-2 (A64-N5-C30-hSL-N5) comprising derived and/or modified sequence from Pf(3D7)__XP_001351122.1__HsALB_Pf-CSP(19-272)_L(G4S)_Pf-CSP(310-3 27)_Pf-CSP(346-375) (opt2)
aggagaggcgcugccuacggagguggcagccaucuccuucucggcaucaagcuuaccaugaagugggucaccuucaucucccuccucuuccucuucuccuccgccuacucccucuuccaggaguaccagugcuacggcuccuccuccaacacccgcguccucaacgagcucaacuacgacaacgccggcaccaaccucuacaacgagcucgagaugaacuacuacggcaagcaggagaacugguacucccucaagaagaacucccgcucccucggcgagaacgacgacggcaacaacgaggacaacgagaagcuccgcaagcccaagcacaagaagcucaagcagcccgccgacggcaaccccgaccccaacgccaaccccaacgucgaccccaacgccaaccccaacgucgaccccaacgccaaccccaacgucgaccccaacgccaaccccaacgccaaccccaacgccaaccccaacgccaaccccaacgccaaccccaacgccaaccccaacgccaaccccaacgccaaccccaacgccaaccccaacgccaaccccaacgccaaccccaacgccaaccccaacgccaaccccaacgccaaccccaacgccaaccccaacgccaaccccaacgccaaccccaacgucgaccccaacgccaaccccaacgccaaccccaacgccaaccccaacgccaaccccaacgccaaccccaacgccaaccccaacgccaaccccaacgccaaccccaacgccaaccccaacgccaaccccaacgccaaccccaacgccaaccccaacgccaaccccaacgccaaccccaacgccaaccccaacgccaaccccaacgccaaccccaacgccaaccccggcggcggcggcuccgagcccuccgacaagcacaucaaggaguaccucaacaagauccagaacucccucaucaagcccggcuccgccaacaagcccaaggacgagcucgacuacgccaacgacaucgagaagaagaucugcaagauggagaagugcuccugaggacuagugcaucacauuuaaaagcaucucagccuaccaugagaauaagagaaagaaaaugaagaucaauagcuuauucaucucuuuuucuuuuucguugguguaaagccaacacccugucuaaaaaacauaaauuucuuuaaucauuuugccucuuuucucugugcuucaauuaauaaaaaauggaaagaaccuagaucuaaaaaaaaaaaaaaaaaaaaaaaaaaaaaaaaaaaaaaaaaaaaaaaaaaaaaaaaaaaaaaaaugcaucccccccccccccccccccccccccccccccaaaggcucuuuucagagccaccagaauu

SEQ ID NO: 1299 - RNA, 1364 nt, Artificial Sequence
  mRNA Design i-2 (A64-N5-C30-hSL-N5) comprising derived and/or modified sequence from Pf(3D7)__XP_001351122.1__HsALB_Pf-CSP(19-325) (opt2)
aggagaggcgcugccuacggagguggcagccaucuccuucucggcaucaagcuuaccaugaagugggucaccuucaucucccuccucuuccucuucuccuccgccuacucccucuuccaggaguaccagugcuacggcuccuccuccaacacccgcguccucaacgagcucaacuacgacaacgccggcaccaaccucuacaacgagcucgagaugaacuacuacggcaagcaggagaacugguacucccucaagaagaacucccgcucccucggcgagaacgacgacggcaacaacgaggacaacgagaagcuccgcaagcccaagcacaagaagcucaagcagcccgccgacggcaaccccgaccccaacgccaaccccaacgucgaccccaacgccaaccccaacgucgaccccaacgccaaccccaacgucgaccccaacgccaaccccaacgccaaccccaacgccaaccccaacgccaaccccaacgccaaccccaacgccaaccccaacgccaaccccaacgccaaccccaacgccaaccccaacgccaaccccaacgccaaccccaacgccaaccccaacgccaaccccaacgccaaccccaacgccaaccccaacgccaaccccaacgccaaccccaacgucgaccccaacgccaaccccaacgccaaccccaacgccaaccccaacgccaaccccaacgccaaccccaacgccaaccccaacgccaaccccaacgccaaccccaacgccaaccccaacgccaaccccaacgccaaccccaacgccaaccccaacgccaaccccaacgccaaccccaacgccaaccccaacgccaaccccaacgccaaccccaacgccaaccccaacaagaacaaccagggcaacggccagggccacaacaugcccaacgaccccaaccgcaacgucgacgagaacgccaacgccaacuccgccgucaagaacaacaacaacgaggagcccuccgacaagcacaucaaggaguaccucaacaagauccagaacugaggacuagugcaucacauuuaaaagcaucucagccuaccaugagaauaagagaaagaaaaugaagaucaauagcuuauucaucucuuuuucuuuuucguugguguaaagccaacacccugucuaaaaaacauaaauuucuuuaaucauuuugccucuuuucucugugcuucaauuaauaaaaaauggaaagaaccuagaucuaaaaaaaaaaaaaaaaaaaaaaaaaaaaaaaaaaaaaaaaaaaaaaaaaaaaaaaaaaaaaaaaugcaucccccccccccccccccccccccccccccccaaaggcucuuuucagagccaccagaauu

SEQ ID NO: 1300 - RNA, 1541 nt, Artificial Sequence
  mRNA Design i-2 (A64-N5-C30-hSL-N5) comprising derived and/or modified sequence from Pf(3D7)__XP_001351122.1__HsALB_Pf-CSP(19-384) (opt2)
aggagaggcgcugccuacggagguggcagccaucuccuucucggcaucaagcuuaccaugaagugggucaccuucaucucccuccucuuccucuucuccuccgccuacucccucuuccaggaguaccagugcuacggcuccuccuccaacacccgcguccucaacgagcucaacuacgacaacgccggcaccaaccucuacaacgagcucgagaugaacuacuacggcaagcaggagaacugguacucccucaagaagaacucccgcucccucggcgagaacgacgacggcaacaacgaggacaacgagaagcuccgcaagcccaagcacaagaagcucaagcagcccgccgacggcaaccccgaccccaacgccaaccccaacgucgaccccaacgccaaccccaacgucgaccccaacgccaaccccaacgucgaccccaacgccaaccccaacgccaaccccaacgccaaccccaacgccaaccccaacgccaaccccaacgccaaccccaacgccaaccccaacgccaaccccaacgccaaccccaacgccaaccccaacgccaaccccaacgccaaccccaacgccaaccccaacgccaaccccaacgccaaccccaacgccaaccccaacgccaaccccaacgucgaccccaacgccaaccccaacgccaaccccaacgccaaccccaacgccaaccccaacgccaaccccaacgccaaccccaacgccaaccccaacgccaaccccaacgccaaccccaacgccaaccccaacgccaaccccaacgccaaccccaacgccaaccccaacgccaaccccaacgccaaccccaacgccaaccccaacgccaaccccaacgccaaccccaacaagaacaaccagggcaacggccagggccacaacaugcccaacgaccccaaccgcaacgucgacgagaacgccaacgccaacuccgccgucaagaacaacaacaacgaggagcccuccgacaagcacaucaaggaguaccucaacaagauccagaacucccucuccaccgaguggucccccugcuccgucaccugcggcaacggcauccagguccgcaucaagcccggcuccgccaacaagcccaaggacgagcucgacuacgccaacgacaucgagaagaagaucugcaagauggagaagugcuccuccgucuucaacgucgucaacuccuccugaggacuagugcaucacauuuaaaagcaucucagccuaccaugagaauaagagaaagaaaaugaagaucaauagcuuauucaucucuuuuucuuuuucguugguguaaagccaacacccugucuaaaaaacauaaauuucuuuaaucauuuugccucuuuucucugugcuucaauuaauaaaaaauggaaagaaccuagaucuaaaaaaaaaaaaaaaaaaaaaaaaaaaaaaaaaaaaaaaaaaaaaaaaaaaaaaaaaaaaaaaaugcaucccccccccccccccccccccccccccccccaaaggcucuuuucagagccaccagaauu

SEQ ID NO: 1301 - RNA, 1679 nt, Artificial Sequence
  mRNA Design i-2 (A64-N5-C30-hSL-N5) comprising derived and/or modified sequence from Pf(3D7)__XP_001351122.1__HsALB_Pf-CSP(19-384)_TM domain HA (opt2)
aggagaggcgcugccuacggagguggcagccaucuccuucucggcaucaagcuuaccaugaagugggucaccuucaucucccuccucuuccucuucuccuccgccuacucccucuuccaggaguaccagugcuacggcuccuccuccaacacccgcguccucaacgagcucaacuacgacaacgccggcaccaaccucuacaacgagcucgagaugaacuacuacggcaagcaggagaacugguacucccucaagaagaacucccgcucccucggcgagaacgacgacggcaacaacgaggacaacgagaagcuccgcaagcccaagcacaagaagcucaagcagcccgccgacggcaaccccgaccccaacgccaaccccaacgucgaccccaacgccaaccccaacgucgaccccaacgccaaccccaacgucgaccccaacgccaaccccaacgccaaccccaacgccaaccccaacgccaaccccaacgccaaccccaacgccaaccccaacgccaaccccaacgccaaccccaacgccaaccccaacgccaaccccaacgccaaccccaacgccaaccccaacgccaaccccaacgccaaccccaacgccaaccccaacgccaaccccaacgccaaccccaacgucgaccccaacgccaaccccaacgccaaccccaacgccaaccccaacgccaaccccaacgccaaccccaacgccaaccccaacgccaaccccaacgccaaccccaacgccaaccccaacgccaaccccaacgccaaccccaacgccaaccccaacgccaaccccaacgccaaccccaacgccaaccccaacgccaaccccaacgccaaccccaacgccaaccccaacaagaacaaccagggcaacggccagggccacaacaugcccaacgaccccaaccgcaacgucgacgagaacgccaacgccaacuccgccgucaagaacaacaacaacgaggagcccuccgacaagcacaucaaggaguaccucaacaagauccagaacucccucuccaccgaguggucccccugcuccgucaccugcggcaacggcauccagguccgcaucaagcccggcuccgccaacaagcccaaggacgagcucgacuacgccaacgacaucgagaagaagaucugcaagauggagaagugcuccuccgucuucaacgucgucaacuccuccaagcucgaguccacccgcaucuaccagauccucgccaucuacuccaccgucgccuccucccucguccucgucgucucccucggcgccaucuccuucuggaugugcuccaacggcucccuccagugccgcaucugcaucugaggacuagugcaucacauuuaaaagcaucucagccuaccaugagaauaagagaaagaaaaugaagaucaauagcuuauucaucucuuuuucuuuuucguugguguaaagccaacacccugucuaaaaaacauaaauuucuuuaaucauuuugccucuuuucucugugcuucaauuaauaaaaaauggaaagaaccuagaucuaaaaaaaaaaaaaaaaaaaaaaaaaaaaaaaaaaaaaaaaaaaaaaaaaaaaaaaaaaaaaaaaugcaucccccccccccccccccccccccccccccccaaaggcucuuuucagagccaccagaauu

SEQ ID NO: 1302 - RNA, 1391 nt, Artificial Sequence
  mRNA Design i-2 (A64-N5-C30-hSL-N5) comprising derived and/or modified sequence from Pf(3D7)__XP_001351122.1__HsALB_Pf-CSP(82-397) (opt2)
aggagaggcgcugccuacggagguggcagccaucuccuucucggcaucaagcuuaccaugaagugggucaccuucaucucccuccucuuccucuucuccuccgccuacuccgacaacgagaagcuccgcaagcccaagcacaagaagcucaagcagcccgccgacggcaaccccgaccccaacgccaaccccaacgucgaccccaacgccaaccccaacgucgaccccaacgccaaccccaacgucgaccccaacgccaaccccaacgccaaccccaacgccaaccccaacgccaaccccaacgccaaccccaacgccaaccccaacgccaaccccaacgccaaccccaacgccaaccccaacgccaaccccaacgccaaccccaacgccaaccccaacgccaaccccaacgccaaccccaacgccaaccccaacgccaaccccaacgccaaccccaacgucgaccccaacgccaaccccaacgccaaccccaacgccaaccccaacgccaaccccaacgccaaccccaacgccaaccccaacgccaaccccaacgccaaccccaacgccaaccccaacgccaaccccaacgccaaccccaacgccaaccccaacgccaaccccaacgccaaccccaacgccaaccccaacgccaaccccaacgccaaccccaacgccaaccccaacaagaacaaccagggcaacggccagggccacaacaugcccaacgaccccaaccgcaacgucgacgagaacgccaacgccaacuccgccgucaagaacaacaacaacgaggagcccuccgacaagcacaucaaggaguaccucaacaagauccagaacucccucuccaccgaguggucccccugcuccgucaccugcggcaacggcauccagguccgcaucaagcccggcuccgccaacaagcccaaggacgagcucgacuacgccaacgacaucgagaagaagaucugcaagauggagaagugcuccuccgucuucaacgucgucaacuccuccaucggccucaucaugguccucuccuuccucuuccucaacugaggacuagugcaucacauuuaaaagcaucucagccuaccaugagaauaagagaaagaaaaugaagaucaauagcuuauucaucucuuuuucuuuuucguugguguaaagccaacacccugucuaaaaaacauaaauuucuuuaaucauuuugccucuuuucucugugcuucaauuaauaaaaaauggaaagaaccuagaucuaaaaaaaaaaaaaaaaaaaaaaaaaaaaaaaaaaaaaaaaaaaaaaaaaaaaaaaaaaaaaaaaugcaucccccccccccccccccccccccccccccccaaaggcucuuuucagagccaccagaauu

SEQ ID NO: 1303 - RNA, 743 nt, Artificial Sequence
  mRNA Design i-2 (A64-N5-C30-hSL-N5) comprising derived and/or modified sequence from Pf(3D7)__XP_001351122.1__HsALB_Pf-CSP(93-192) (opt2)
aggagaggcgcugccuacggagguggcagccaucuccuucucggcaucaagcuuaccaugaagugggucaccuucaucucccuccucuuccucuucuccuccgccuacuccaagcucaagcagcccgccgacggcaaccccgaccccaacgccaaccccaacgucgaccccaacgccaaccccaacgucgaccccaacgccaaccccaacgucgaccccaacgccaaccccaacgccaaccccaacgccaaccccaacgccaaccccaacgccaaccccaacgccaaccccaacgccaaccccaacgccaaccccaacgccaaccccaacgccaaccccaacgccaaccccaacgccaaccccaacgccaaccccaacgccaaccccaacgccaaccccaacgccaaccccugaggacuagugcaucacauuuaaaagcaucucagccuaccaugagaauaagagaaagaaaaugaagaucaauagcuuauucaucucuuuuucuuuuucguugguguaaagccaacacccugucuaaaaaacauaaauuucuuuaaucauuuugccucuuuucucugugcuucaauuaauaaaaaauggaaagaaccuagaucuaaaaaaaaaaaaaaaaaaaaaaaaaaaaaaaaaaaaaaaaaaaaaaaaaaaaaaaaaaaaaaaaugcaucccccccccccccccccccccccccccccccaaaggcucuuuucagagccaccagaauu

SEQ ID NO: 1304 - RNA, 983 nt, Artificial Sequence
  mRNA Design i-2 (A64-N5-C30-hSL-N5) comprising derived and/or modified sequence from Pf(3D7)__XP_001351122.1__HsALB_Pf-CSP(93-272) (opt2)
aggagaggcgcugccuacggagguggcagccaucuccuucucggcaucaagcuuaccaugaagugggucaccuucaucucccuccucuuccucuucuccuccgccuacuccaagcucaagcagcccgccgacggcaaccccgaccccaacgccaaccccaacgucgaccccaacgccaaccccaacgucgaccccaacgccaaccccaacgucgaccccaacgccaaccccaacgccaaccccaacgccaaccccaacgccaaccccaacgccaaccccaacgccaaccccaacgccaaccccaacgccaaccccaacgccaaccccaacgccaaccccaacgccaaccccaacgccaaccccaacgccaaccccaacgccaaccccaacgccaaccccaacgccaaccccaacgccaaccccaacgucgaccccaacgccaaccccaacgccaaccccaacgccaaccccaacgccaaccccaacgccaaccccaacgccaaccccaacgccaaccccaacgccaaccccaacgccaaccccaacgccaaccccaacgccaaccccaacgccaaccccaacgccaaccccaacgccaaccccaacgccaaccccaacgccaaccccaacgccaaccccaacgccaaccccugaggacuagugcaucacauuuaaaagcaucucagccuaccaugagaauaagagaaagaaaaugaagaucaauagcuuauucaucucuuuuucuuuuucguugguguaaagccaacacccugucuaaaaaacauaaauuucuuuaaucauuuugccucuuuucucugugcuucaauuaauaaaaaauggaaagaaccuagaucuaaaaaaaaaaaaaaaaaaaaaaaaaaaaaaaaaaaaaaaaaaaaaaaaaaaaaaaaaaaaaaaaugcaucccccccccccccccccccccccccccccccaaaggcucuuuucagagccaccagaauu

SEQ ID NO: 1305 - RNA, 1358 nt, Artificial Sequence
  mRNA Design i-2 (A64-N5-C30-hSL-N5) comprising derived and/or modified sequence from Pf(3D7)__XP_001351122.1__HsALB_Pf-CSP(93-397) (opt2)
aggagaggcgcugccuacggagguggcagccaucuccuucucggcaucaagcuuaccaugaagugggucaccuucaucucccuccucuuccucuucuccuccgccuacuccaagcucaagcagcccgccgacggcaaccccgaccccaacgccaaccccaacgucgaccccaacgccaaccccaacgucgaccccaacgccaaccccaacgucgaccccaacgccaaccccaacgccaaccccaacgccaaccccaacgccaaccccaacgccaaccccaacgccaaccccaacgccaaccccaacgccaaccccaacgccaaccccaacgccaaccccaacgccaaccccaacgccaaccccaacgccaaccccaacgccaaccccaacgccaaccccaacgccaaccccaacgccaaccccaacgucgaccccaacgccaaccccaacgccaaccccaacgccaaccccaacgccaaccccaacgccaaccccaacgccaaccccaacgccaaccccaacgccaaccccaacgccaaccccaacgccaaccccaacgccaaccccaacgccaaccccaacgccaaccccaacgccaaccccaacgccaaccccaacgccaaccccaacgccaaccccaacgccaaccccaacaagaacaaccagggcaacggccagggccacaacaugcccaacgaccccaaccgcaacgucgacgagaacgccaacgccaacuccgccgucaagaacaacaacaacgaggagcccuccgacaagcacaucaaggaguaccucaacaagauccagaacucccucuccaccgaguggucccccugcuccgucaccugcggcaacggcauccagguccgcaucaagcccggcuccgccaacaagcccaaggacgagcucgacuacgccaacgacaucgagaagaagaucugcaagauggagaagugcuccuccgucuucaacgucgucaacuccuccaucggccucaucaugguccucuccuuccucuuccucaacugaggacuagugcaucacauuuaaaagcaucucagccuaccaugagaauaagagaaagaaaaugaagaucaauagcuuauucaucucuuuuucuuuuucguugguguaaagccaacacccugucuaaaaaacauaaauuucuuuaaucauuuugccucuuuucucugugcuucaauuaauaaaaaauggaaagaaccuagaucuaaaaaaaaaaaaaaaaaaaaaaaaaaaaaaaaaaaaaaaaaaaaaaaaaaaaaaaaaaaaaaaaugcaucccccccccccccccccccccccccccccccaaaggcucuuuucagagccaccagaauu

SEQ ID NO: 1306 - RNA, 728 nt, Artificial Sequence
  mRNA Design i-2 (A64-N5-C30-hSL-N5) comprising derived and/or modified sequence from Pf(3D7)__XP_001351122.1__HsALB_Pf-CSP(98-192) (opt2)
aggagaggcgcugccuacggagguggcagccaucuccuucucggcaucaagcuuaccaugaagugggucaccuucaucucccuccucuuccucuucuccuccgccuacuccgccgacggcaaccccgaccccaacgccaaccccaacgucgaccccaacgccaaccccaacgucgaccccaacgccaaccccaacgucgaccccaacgccaaccccaacgccaaccccaacgccaaccccaacgccaaccccaacgccaaccccaacgccaaccccaacgccaaccccaacgccaaccccaacgccaaccccaacgccaaccccaacgccaaccccaacgccaaccccaacgccaaccccaacgccaaccccaacgccaaccccaacgccaaccccugaggacuagugcaucacauuuaaaagcaucucagccuaccaugagaauaagagaaagaaaaugaagaucaauagcuuauucaucucuuuuucuuuuucguugguguaaagccaacacccugucuaaaaaacauaaauuucuuuaaucauuuugccucuuuucucugugcuucaauuaauaaaaaauggaaagaaccuagaucuaaaaaaaaaaaaaaaaaaaaaaaaaaaaaaaaaaaaaaaaaaaaaaaaaaaaaaaaaaaaaaaaugcaucccccccccccccccccccccccccccccccaaaggcucuuuucagagccaccagaauu

SEQ ID NO: 1307 - RNA, 968 nt, Artificial Sequence
  mRNA Design i-2 (A64-N5-C30-hSL-N5) comprising derived and/or modified sequence from Pf(3D7)__XP_001351122.1__HsALB_Pf-CSP(98-272) (opt2)
aggagaggcgcugccuacggagguggcagccaucuccuucucggcaucaagcuuaccaugaagugggucaccuucaucucccuccucuuccucuucuccuccgccuacuccgccgacggcaaccccgaccccaacgccaaccccaacgucgaccccaacgccaaccccaacgucgaccccaacgccaaccccaacgucgaccccaacgccaaccccaacgccaaccccaacgccaaccccaacgccaaccccaacgccaaccccaacgccaaccccaacgccaaccccaacgccaaccccaacgccaaccccaacgccaaccccaacgccaaccccaacgccaaccccaacgccaaccccaacgccaaccccaacgccaaccccaacgccaaccccaacgccaaccccaacgucgaccccaacgccaaccccaacgccaaccccaacgccaaccccaacgccaaccccaacgccaaccccaacgccaaccccaacgccaaccccaacgccaaccccaacgccaaccccaacgccaaccccaacgccaaccccaacgccaaccccaacgccaaccccaacgccaaccccaacgccaaccccaacgccaaccccaacgccaaccccaacgccaaccccugaggacuagugcaucacauuuaaaagcaucucagccuaccaugagaauaagagaaagaaaaugaagaucaauagcuuauucaucucuuuuucuuuuucguugguguaaagccaacacccugucuaaaaaacauaaauuucuuuaaucauuuugccucuuuucucugugcuucaauuaauaaaaaauggaaagaaccuagaucuaaaaaaaaaaaaaaaaaaaaaaaaaaaaaaaaaaaaaaaaaaaaaaaaaaaaaaaaaaaaaaaaugcaucccccccccccccccccccccccccccccccaaaggcucuuuucagagccaccagaauu

SEQ ID NO: 1308 - RNA, 1274 nt, Artificial Sequence
  mRNA Design i-2 (A64-N5-C30-hSL-N5) comprising derived and/or modified sequence from Pf(3D7)__XP_001351122.1__HsALB_Pf-CSP(98-374) (opt2)
aggagaggcgcugccuacggagguggcagccaucuccuucucggcaucaagcuuaccaugaagugggucaccuucaucucccuccucuuccucuucuccuccgccuacuccgccgacggcaaccccgaccccaacgccaaccccaacgucgaccccaacgccaaccccaacgucgaccccaacgccaaccccaacgucgaccccaacgccaaccccaacgccaaccccaacgccaaccccaacgccaaccccaacgccaaccccaacgccaaccccaacgccaaccccaacgccaaccccaacgccaaccccaacgccaaccccaacgccaaccccaacgccaaccccaacgccaaccccaacgccaaccccaacgccaaccccaacgccaaccccaacgccaaccccaacgucgaccccaacgccaaccccaacgccaaccccaacgccaaccccaacgccaaccccaacgccaaccccaacgccaaccccaacgccaaccccaacgccaaccccaacgccaaccccaacgccaaccccaacgccaaccccaacgccaaccccaacgccaaccccaacgccaaccccaacgccaaccccaacgccaaccccaacgccaaccccaacgccaaccccaacaagaacaaccagggcaacggccagggccacaacaugcccaacgaccccaaccgcaacgucgacgagaacgccaacgccaacuccgccgucaagaacaacaacaacgaggagcccuccgacaagcacaucaaggaguaccucaacaagauccagaacucccucuccaccgaguggucccccugcuccgucaccugcggcaacggcauccagguccgcaucaagcccggcuccgccaacaagcccaaggacgagcucgacuacgccaacgacaucgagaagaagaucugcaagauggagaagugcugaggacuagugcaucacauuuaaaagcaucucagccuaccaugagaauaagagaaagaaaaugaagaucaauagcuuauucaucucuuuuucuuuuucguugguguaaagccaacacccugucuaaaaaacauaaauuucuuuaaucauuuugccucuuuucucugugcuucaauuaauaaaaaauggaaagaaccuagaucuaaaaaaaaaaaaaaaaaaaaaaaaaaaaaaaaaaaaaaaaaaaaaaaaaaaaaaaaaaaaaaaaugcaucccccccccccccccccccccccccccccccaaaggcucuuuucagagccaccagaauu

SEQ ID NO: 1309 - RNA, 1343 nt, Artificial Sequence
  mRNA Design i-2 (A64-N5-C30-hSL-N5) comprising derived and/or modified sequence from Pf(3D7)__XP_001351122.1__HsALB_Pf-CSP(98-397) (opt2)
aggagaggcgcugccuacggagguggcagccaucuccuucucggcaucaagcuuaccaugaagugggucaccuucaucucccuccucuuccucuucuccuccgccuacuccgccgacggcaaccccgaccccaacgccaaccccaacgucgaccccaacgccaaccccaacgucgaccccaacgccaaccccaacgucgaccccaacgccaaccccaacgccaaccccaacgccaaccccaacgccaaccccaacgccaaccccaacgccaaccccaacgccaaccccaacgccaaccccaacgccaaccccaacgccaaccccaacgccaaccccaacgccaaccccaacgccaaccccaacgccaaccccaacgccaaccccaacgccaaccccaacgccaaccccaacgucgaccccaacgccaaccccaacgccaaccccaacgccaaccccaacgccaaccccaacgccaaccccaacgccaaccccaacgccaaccccaacgccaaccccaacgccaaccccaacgccaaccccaacgccaaccccaacgccaaccccaacgccaaccccaacgccaaccccaacgccaaccccaacgccaaccccaacgccaaccccaacgccaaccccaacaagaacaaccagggcaacggccagggccacaacaugcccaacgaccccaaccgcaacgucgacgagaacgccaacgccaacuccgccgucaagaacaacaacaacgaggagcccuccgacaagcacaucaaggaguaccucaacaagauccagaacucccucuccaccgaguggucccccugcuccgucaccugcggcaacggcauccagguccgcaucaagcccggcuccgccaacaagcccaaggacgagcucgacuacgccaacgacaucgagaagaagaucugcaagauggagaagugcuccuccgucuucaacgucgucaacuccuccaucggccucaucaugguccucuccuuccucuuccucaacugaggacuagugcaucacauuuaaaagcaucucagccuaccaugagaauaagagaaagaaaaugaagaucaauagcuuauucaucucuuuuucuuuuucguugguguaaagccaacacccugucuaaaaaacauaaauuucuuuaaucauuuugccucuuuucucugugcuucaauuaauaaaaaauggaaagaaccuagaucuaaaaaaaaaaaaaaaaaaaaaaaaaaaaaaaaaaaaaaaaaaaaaaaaaaaaaaaaaaaaaaaaugcaucccccccccccccccccccccccccccccccaaaggcucuuuucagagccaccagaauu

SEQ ID NO: 1310 - RNA, 1670 nt, Artificial Sequence
  mRNA Design i-2 (A64-N5-C30-hSL-N5) comprising derived and/or modified sequence from Pf(3D7)__XP_001351122.1__HsALB_Pf-CSP(199-377)_L(PVTN)_HBsAg (opt2)
aggagaggcgcugccuacggagguggcagccaucuccuucucggcaucaagcuuaccaugaagugggucaccuucaucucccuccucuuccucuucuccuccgccuacuccgaccccaacgccaaccccaacgccaaccccaacgccaaccccaacgccaaccccaacgccaaccccaacgccaaccccaacgccaaccccaacgccaaccccaacgccaaccccaacgccaaccccaacgccaaccccaacgccaaccccaacgccaaccccaacgccaaccccaacgccaaccccaacgccaaccccaacgccaaccccaacgccaaccccaacaagaacaaccagggcaacggccagggccacaacaugcccaacgaccccaaccgcaacgucgacgagaacgccaacgccaacuccgccgucaagaacaacaacaacgaggagcccuccgacaagcacaucaaggaguaccucaacaagauccagaacucccucuccaccgaguggucccccugcuccgucaccugcggcaacggcauccagguccgcaucaagcccggcuccgccaacaagcccaaggacgagcucgacuacgccaacgacaucgagaagaagaucugcaagauggagaagugcuccuccguccccgucaccaacauggagaacaucaccuccggcuuccucggcccccuccucguccuccaggccggcuucuuccuccucacccgcauccucaccaucccccagucccucgacuccugguggaccucccucaacuuccucggcggcucccccgucugccucggccagaacucccagucccccaccuccaaccacucccccaccuccugcccccccaucugccccggcuaccgcuggaugugccuccgccgcuucaucaucuuccucuucauccuccuccucugccucaucuuccuccucguccuccucgacuaccagggcaugcuccccgucugcccccucauccccggcuccaccaccaccaacaccggccccugcaagaccugcaccacccccgcccagggcaacuccauguuccccuccugcugcugcaccaagcccaccgacggcaacugcaccugcauccccauccccuccuccugggccuucgccaaguaccucugggagugggccuccguccgcuucuccuggcucucccuccucguccccuucguccagugguucgucggccucucccccaccgucuggcucuccgccaucuggaugaugugguacuggggccccucccucuacuccaucgucucccccuucaucccccuccuccccaucuucuucugccucugggucuacaucugaggacuagugcaucacauuuaaaagcaucucagccuaccaugagaauaagagaaagaaaaugaagaucaauagcuuauucaucucuuuuucuuuuucguugguguaaagccaacacccugucuaaaaaacauaaauuucuuuaaucauuuugccucuuuucucugugcuucaauuaauaaaaaauggaaagaaccuagaucuaaaaaaaaaaaaaaaaaaaaaaaaaaaaaaaaaaaaaaaaaaaaaaaaaaaaaaaaaaaaaaaaugcaucccccccccccccccccccccccccccccccaaaggcucuuuucagagccaccagaauu

SEQ ID NO: 1311 - RNA, 1409 nt, Artificial Sequence
  mRNA Design i-2 (A64-N5-C30-hSL-N5) comprising derived and/or modified sequence from Pb(ANKA)__XP_022712148.1__Pb-CSP (opt2)
aggagaggcgcugccuacggagguggcagccaucuccuucucggcaucaagcuuaccaugaagaagugcaccauccucgucgucgccucccuccuccucgucaacucccuccuccccggcuacggccagaacaaguccauccaggcccagcgcaaccucaacgagcucugcuacaacgagggcaacgacaacaagcucuaccacguccucaacuccaagaacggcaagaucuacaaccgcaacaccgucaaccgccuccucgccgacgcccccgagggcaagaagaacgagaagaagaacgagaagaucgagcgcaacaacaagcucaagcagcccccccccccccccaaccccaacgacccccccccccccaaccccaacgacccccccccccccaaccccaacgacccccccccccccaaccccaacgacccccccccccccaacgccaacgacccccccccccccaacgccaacgaccccgccccccccaacgccaacgaccccgccccccccaacgccaacgaccccgccccccccaacgccaacgaccccgccccccccaacgccaacgacccccccccccccaaccccaacgaccccgccccccccaacgccaacgacccccccccccccaaccccaacgaccccgcccccccccagggcaacaacaacccccagccccagccccgcccccagccccagccccagccccagccccagccccagccccagccccagccccagccccgcccccagccccagccccagcccggcggcaacaacaacaacaagaacaacaacaacgacgacuccuacauccccuccgccgagaagauccucgaguucgucaagcagauccgcgacuccaucaccgaggaguggucccagugcaacgucaccugcggcuccggcauccgcguccgcaagcgcaagggcuccaacaagaaggccgaggaccucacccucgaggacaucgacaccgagaucugcaagauggacaagugcuccuccaucuucaacaucgucuccaacucccucggcuucgucauccuccucguccucgucuucuucaacugaggacuagugcaucacauuuaaaagcaucucagccuaccaugagaauaagagaaagaaaaugaagaucaauagcuuauucaucucuuuuucuuuuucguugguguaaagccaacacccugucuaaaaaacauaaauuucuuuaaucauuuugccucuuuucucugugcuucaauuaauaaaaaauggaaagaaccuagaucuaaaaaaaaaaaaaaaaaaaaaaaaaaaaaaaaaaaaaaaaaaaaaaaaaaaaaaaaaaaaaaaaugcaucccccccccccccccccccccccccccccccaaaggcucuuuucagagccaccagaauu

SEQ ID NO: 1312 - RNA, 1574 nt, Artificial Sequence
  mRNA Design i-2 (A64-N5-C30-hSL-N5) comprising derived and/or modified sequence from Pb(ANKA)__XP_022712148.1__Pb-CSP_L(G4SG4)_TM domain HA (opt2)
aggagaggcgcugccuacggagguggcagccaucuccuucucggcaucaagcuuaccaugaagaagugcaccauccucgucgucgccucccuccuccucgucaacucccuccuccccggcuacggccagaacaaguccauccaggcccagcgcaaccucaacgagcucugcuacaacgagggcaacgacaacaagcucuaccacguccucaacuccaagaacggcaagaucuacaaccgcaacaccgucaaccgccuccucgccgacgcccccgagggcaagaagaacgagaagaagaacgagaagaucgagcgcaacaacaagcucaagcagcccccccccccccccaaccccaacgacccccccccccccaaccccaacgacccccccccccccaaccccaacgacccccccccccccaaccccaacgacccccccccccccaacgccaacgacccccccccccccaacgccaacgaccccgccccccccaacgccaacgaccccgccccccccaacgccaacgaccccgccccccccaacgccaacgaccccgccccccccaacgccaacgacccccccccccccaaccccaacgaccccgccccccccaacgccaacgacccccccccccccaaccccaacgaccccgcccccccccagggcaacaacaacccccagccccagccccgcccccagccccagccccagccccagccccagccccagccccagccccagccccagccccgcccccagccccagccccagcccggcggcaacaacaacaacaagaacaacaacaacgacgacuccuacauccccuccgccgagaagauccucgaguucgucaagcagauccgcgacuccaucaccgaggaguggucccagugcaacgucaccugcggcuccggcauccgcguccgcaagcgcaagggcuccaacaagaaggccgaggaccucacccucgaggacaucgacaccgagaucugcaagauggacaagugcuccuccaucuucaacaucgucuccaacucccucggcuucgucauccuccucguccucgucuucuucaacggcggcggcggcuccggcggcggcggcaagcucgaguccacccgcaucuaccagauccucgccaucuacuccaccgucgccuccucccucguccucgucgucucccucggcgccaucuccuucuggaugugcuccaacggcucccuccagugccgcaucugcaucugaggacuagugcaucacauuuaaaagcaucucagccuaccaugagaauaagagaaagaaaaugaagaucaauagcuuauucaucucuuuuucuuuuucguugguguaaagccaacacccugucuaaaaaacauaaauuucuuuaaucauuuugccucuuuucucugugcuucaauuaauaaaaaauggaaagaaccuagaucuaaaaaaaaaaaaaaaaaaaaaaaaaaaaaaaaaaaaaaaaaaaaaaaaaaaaaaaaaaaaaaaaugcaucccccccccccccccccccccccccccccccaaaggcucuuuucagagccaccagaauu

SEQ ID NO: 1313 - RNA, 1394 nt, Artificial Sequence
  mRNA Design i-2 (A64-N5-C30-hSL-N5) comprising derived and/or modified sequence from Pb(ANKA)__XP_022712148.1__HsALB_Pb-CSP(24-340) (opt2)
aggagaggcgcugccuacggagguggcagccaucuccuucucggcaucaagcuuaccaugaagugggucaccuucaucucccuccucuuccucuucuccuccgccuacucccagaacaaguccauccaggcccagcgcaaccucaacgagcucugcuacaacgagggcaacgacaacaagcucuaccacguccucaacuccaagaacggcaagaucuacaaccgcaacaccgucaaccgccuccucgccgacgcccccgagggcaagaagaacgagaagaagaacgagaagaucgagcgcaacaacaagcucaagcagcccccccccccccccaaccccaacgacccccccccccccaaccccaacgacccccccccccccaaccccaacgacccccccccccccaaccccaacgacccccccccccccaacgccaacgacccccccccccccaacgccaacgaccccgccccccccaacgccaacgaccccgccccccccaacgccaacgaccccgccccccccaacgccaacgaccccgccccccccaacgccaacgacccccccccccccaaccccaacgaccccgccccccccaacgccaacgacccccccccccccaaccccaacgaccccgcccccccccagggcaacaacaacccccagccccagccccgcccccagccccagccccagccccagccccagccccagccccagccccagccccagccccgcccccagccccagccccagcccggcggcaacaacaacaacaagaacaacaacaacgacgacuccuacauccccuccgccgagaagauccucgaguucgucaagcagauccgcgacuccaucaccgaggaguggucccagugcaacgucaccugcggcuccggcauccgcguccgcaagcgcaagggcuccaacaagaaggccgaggaccucacccucgaggacaucgacaccgagaucugcaagauggacaagugcuccuccaucuucaacaucgucuccaacucccucggcuucgucauccuccucguccucgucuucuucaacugaggacuagugcaucacauuuaaaagcaucucagccuaccaugagaauaagagaaagaaaaugaagaucaauagcuuauucaucucuuuuucuuuuucguugguguaaagccaacacccugucuaaaaaacauaaauuucuuuaaucauuuugccucuuuucucugugcuucaauuaauaaaaaauggaaagaaccuagaucuaaaaaaaaaaaaaaaaaaaaaaaaaaaaaaaaaaaaaaaaaaaaaaaaaaaaaaaaaaaaaaaaugcaucccccccccccccccccccccccccccccccaaaggcucuuuucagagccaccagaauu

SEQ ID NO: 1314 - RNA, 1412 nt, Artificial Sequence
  mRNA Design i-2 (A64-N5-C30-hSL-N5) comprising derived and/or modified sequence from Pb(ANKA)__XP_022712148.1__HsIns-iso1_Pb-CSP(24-340) (opt2)
aggagaggcgcugccuacggagguggcagccaucuccuucucggcaucaagcuuaccauggcccucuggaugcgccuccucccccuccucgcccuccucgcccucuggggccccgaccccgccgccgcccagaacaaguccauccaggcccagcgcaaccucaacgagcucugcuacaacgagggcaacgacaacaagcucuaccacguccucaacuccaagaacggcaagaucuacaaccgcaacaccgucaaccgccuccucgccgacgcccccgagggcaagaagaacgagaagaagaacgagaagaucgagcgcaacaacaagcucaagcagcccccccccccccccaaccccaacgacccccccccccccaaccccaacgacccccccccccccaaccccaacgacccccccccccccaaccccaacgacccccccccccccaacgccaacgacccccccccccccaacgccaacgaccccgccccccccaacgccaacgaccccgccccccccaacgccaacgaccccgccccccccaacgccaacgaccccgccccccccaacgccaacgacccccccccccccaaccccaacgaccccgccccccccaacgccaacgacccccccccccccaaccccaacgaccccgcccccccccagggcaacaacaacccccagccccagccccgcccccagccccagccccagccccagccccagccccagccccagccccagccccagccccgcccccagccccagccccagcccggcggcaacaacaacaacaagaacaacaacaacgacgacuccuacauccccuccgccgagaagauccucgaguucgucaagcagauccgcgacuccaucaccgaggaguggucccagugcaacgucaccugcggcuccggcauccgcguccgcaagcgcaagggcuccaacaagaaggccgaggaccucacccucgaggacaucgacaccgagaucugcaagauggacaagugcuccuccaucuucaacaucgucuccaacucccucggcuucgucauccuccucguccucgucuucuucaacugaggacuagugcaucacauuuaaaagcaucucagccuaccaugagaauaagagaaagaaaaugaagaucaauagcuuauucaucucuuuuucuuuuucguugguguaaagccaacacccugucuaaaaaacauaaauuucuuuaaucauuuugccucuuuucucugugcuucaauuaauaaaaaauggaaagaaccuagaucuaaaaaaaaaaaaaaaaaaaaaaaaaaaaaaaaaaaaaaaaaaaaaaaaaaaaaaaaaaaaaaaaugcaucccccccccccccccccccccccccccccccaaaggcucuuuucagagccaccagaauu

SEQ ID NO: 1315 - RNA, 1391 nt, Artificial Sequence
  mRNA Design i-2 (A64-N5-C30-hSL-N5) comprising derived and/or modified sequence from Pb(ANKA)__XP_022712148.1__HsSPARC_Pb-CSP(24-340) (opt2)
aggagaggcgcugccuacggagguggcagccaucuccuucucggcaucaagcuuaccaugcgcgccuggaucuucuuccuccucugccucgccggccgcgcccucgcccagaacaaguccauccaggcccagcgcaaccucaacgagcucugcuacaacgagggcaacgacaacaagcucuaccacguccucaacuccaagaacggcaagaucuacaaccgcaacaccgucaaccgccuccucgccgacgcccccgagggcaagaagaacgagaagaagaacgagaagaucgagcgcaacaacaagcucaagcagcccccccccccccccaaccccaacgacccccccccccccaaccccaacgacccccccccccccaaccccaacgacccccccccccccaaccccaacgacccccccccccccaacgccaacgacccccccccccccaacgccaacgaccccgccccccccaacgccaacgaccccgccccccccaacgccaacgaccccgccccccccaacgccaacgaccccgccccccccaacgccaacgacccccccccccccaaccccaacgaccccgccccccccaacgccaacgacccccccccccccaaccccaacgaccccgcccccccccagggcaacaacaacccccagccccagccccgcccccagccccagccccagccccagccccagccccagccccagccccagccccagccccgcccccagccccagccccagcccggcggcaacaacaacaacaagaacaacaacaacgacgacuccuacauccccuccgccgagaagauccucgaguucgucaagcagauccgcgacuccaucaccgaggaguggucccagugcaacgucaccugcggcuccggcauccgcguccgcaagcgcaagggcuccaacaagaaggccgaggaccucacccucgaggacaucgacaccgagaucugcaagauggacaagugcuccuccaucuucaacaucgucuccaacucccucggcuucgucauccuccucguccucgucuucuucaacugaggacuagugcaucacauuuaaaagcaucucagccuaccaugagaauaagagaaagaaaaugaagaucaauagcuuauucaucucuuuuucuuuuucguugguguaaagccaacacccugucuaaaaaacauaaauuucuuuaaucauuuugccucuuuucucugugcuucaauuaauaaaaaauggaaagaaccuagaucuaaaaaaaaaaaaaaaaaaaaaaaaaaaaaaaaaaaaaaaaaaaaaaaaaaaaaaaaaaaaaaaaugcaucccccccccccccccccccccccccccccccaaaggcucuuuucagagccaccagaauu

SEQ ID NO: 1316 - RNA, 1394 nt, Artificial Sequence
  mRNA Design i-2 (A64-N5-C30-hSL-N5) comprising derived and/or modified sequence from Pb(ANKA)__XP_022712148.1__IgE_Pb-CSP(24-340) (opt2)
aggagaggcgcugccuacggagguggcagccaucuccuucucggcaucaagcuuaccauggacuggaccuggauccucuuccucgucgccgccgccacccgcguccacucccagaacaaguccauccaggcccagcgcaaccucaacgagcucugcuacaacgagggcaacgacaacaagcucuaccacguccucaacuccaagaacggcaagaucuacaaccgcaacaccgucaaccgccuccucgccgacgcccccgagggcaagaagaacgagaagaagaacgagaagaucgagcgcaacaacaagcucaagcagcccccccccccccccaaccccaacgacccccccccccccaaccccaacgacccccccccccccaaccccaacgacccccccccccccaaccccaacgacccccccccccccaacgccaacgacccccccccccccaacgccaacgaccccgccccccccaacgccaacgaccccgccccccccaacgccaacgaccccgccccccccaacgccaacgaccccgccccccccaacgccaacgacccccccccccccaaccccaacgaccccgccccccccaacgccaacgacccccccccccccaaccccaacgaccccgcccccccccagggcaacaacaacccccagccccagccccgcccccagccccagccccagccccagccccagccccagccccagccccagccccagccccgcccccagccccagccccagcccggcggcaacaacaacaacaagaacaacaacaacgacgacuccuacauccccuccgccgagaagauccucgaguucgucaagcagauccgcgacuccaucaccgaggaguggucccagugcaacgucaccugcggcuccggcauccgcguccgcaagcgcaagggcuccaacaagaaggccgaggaccucacccucgaggacaucgacaccgagaucugcaagauggacaagugcuccuccaucuucaacaucgucuccaacucccucggcuucgucauccuccucguccucgucuucuucaacugaggacuagugcaucacauuuaaaagcaucucagccuaccaugagaauaagagaaagaaaaugaagaucaauagcuuauucaucucuuuuucuuuuucguugguguaaagccaacacccugucuaaaaaacauaaauuucuuuaaucauuuugccucuuuucucugugcuucaauuaauaaaaaauggaaagaaccuagaucuaaaaaaaaaaaaaaaaaaaaaaaaaaaaaaaaaaaaaaaaaaaaaaaaaaaaaaaaaaaaaaaaugcaucccccccccccccccccccccccccccccccaaaggcucuuuucagagccaccagaauu

SEQ ID NO: 1317 - RNA, 1580 nt, Artificial Sequence
  mRNA Design i-2 (A64-N5-C30-hSL-N5) comprising derived and/or modified sequence from Pf(3D7)__XP_001351122.1__Pf-CSP (opt3)
aggagaggcgcugccuacggagguggcagccaucuccuucucggcaucaagcuuaccaugaugagaaagcuggccauccucagcguguccucuuuccuuuuugucgaggcucuguuccaggaauaccaaugcuauggcucaaguagcaacaccaggguuuugaaugaguuaaacuacgacaaugcagggacaaaccuguauaaugaacuagagaugaacuacuauggaaaacaggaaaauugguacucccucaagaaaaacucucggucgcugggugagaaugaugacggcaacaaugaggauaacgaaaaacuucgcaagcccaagcacaagaaacugaagcagccugccgacgggaauccagauccgaacgcgaaucccaacguggacccuaacgcuaauccaaacguagaucccaaugccaacccuaauguggacccaaacgcaaaucccaacgccaauccuaacgcuaauccaaacgcaaauccgaacgccaaucccaacgcuaacccuaaugccaacccaaaugcgaaccccaaugcaaacccuaaugccaacccaaaugcuaaccccaaugccaacccgaaugcaaacccuaaugcuaaccccaacgccaauccaaacgcgaauccuaacgccaaucccaacgucgauccaaaugcaaaccccaaugcuaacccuaaugccaacccaaaugcuaacccgaaugccaaccccaacgcaaauccuaacgccaauccaaacgcuaaucccaacgcgaauccuaacgcaaauccaaacgccaaucccaacgcuaauccgaacgccaauccuaacgcaaauccaaacgccaaccccaaugcuaacccuaaugccaaccccaaugcaaacccaaauaaaaacaaucagggaaacggccaaggucauaauaugccuaacgaccccaaucgaaacguggaugagaaugcgaacgcuaacucagccguuaagaauaacaauaacgaggaaccaagcgacaaacacauuaaggaguauuugaauaagauacagaacagucucuccacugaauggucuccguguagcgugacgugcgggaauggaauccagguccguauuaaaccuggcuccgcaaacaagcccaaagaugagcuggacuacgccaaugacaucgaaaagaaaauuuguaagauggagaaaugcucaaguguguuuaacguaguuaauagcucuaucggccugauaauggugcucuccuucuuauuucugaacugaggacuagugcaucacauuuaaaagcaucucagccuaccaugagaauaagagaaagaaaaugaagaucaauagcuuauucaucucuuuuucuuuuucguugguguaaagccaacacccugucuaaaaaacauaaauuucuuuaaucauuuugccucuuuucucugugcuucaauuaauaaaaaauggaaagaaccuagaucuaaaaaaaaaaaaaaaaaaaaaaaaaaaaaaaaaaaaaaaaaaaaaaaaaaaaaaaaaaaaaaaaugcaucccccccccccccccccccccccccccccccaaaggcucuuuucagagccaccagaauu

SEQ ID NO: 1318 - RNA, 1511 nt, Artificial Sequence
  mRNA Design i-2 (A64-N5-C30-hSL-N5) comprising derived and/or modified sequence from Pf(3D7)__XP_001351122.1__Pf-CSP(1-374) (opt3)
aggagaggcgcugccuacggagguggcagccaucuccuucucggcaucaagcuuaccaugaugagaaagcuggccauccucagcguguccucuuuccuuuuugucgaggcucuguuccaggaauaccaaugcuauggcucaaguagcaacaccaggguuuugaaugaguuaaacuacgacaaugcagggacaaaccuguauaaugaacuagagaugaacuacuauggaaaacaggaaaauugguacucccucaagaaaaacucucggucgcugggugagaaugaugacggcaacaaugaggauaacgaaaaacuucgcaagcccaagcacaagaaacugaagcagccugccgacgggaauccagauccgaacgcgaaucccaacguggacccuaacgcuaauccaaacguagaucccaaugccaacccuaauguggacccaaacgcaaaucccaacgccaauccuaacgcuaauccaaacgcaaauccgaacgccaaucccaacgcuaacccuaaugccaacccaaaugcgaaccccaaugcaaacccuaaugccaacccaaaugcuaaccccaaugccaacccgaaugcaaacccuaaugcuaaccccaacgccaauccaaacgcgaauccuaacgccaaucccaacgucgauccaaaugcaaaccccaaugcuaacccuaaugccaacccaaaugcuaacccgaaugccaaccccaacgcaaauccuaacgccaauccaaacgcuaaucccaacgcgaauccuaacgcaaauccaaacgccaaucccaacgcuaauccgaacgccaauccuaacgcaaauccaaacgccaaccccaaugcuaacccuaaugccaaccccaaugcaaacccaaauaaaaacaaucagggaaacggccaaggucauaauaugccuaacgaccccaaucgaaacguggaugagaaugcgaacgcuaacucagccguuaagaauaacaauaacgaggaaccaagcgacaaacacauuaaggaguauuugaauaagauacagaacagucucuccacugaauggucuccguguagcgugacgugcgggaauggaauccagguccguauuaaaccuggcuccgcaaacaagcccaaagaugagcuggacuacgccaaugacaucgaaaagaaaauuuguaagauggagaaaugcugaggacuagugcaucacauuuaaaagcaucucagccuaccaugagaauaagagaaagaaaaugaagaucaauagcuuauucaucucuuuuucuuuuucguugguguaaagccaacacccugucuaaaaaacauaaauuucuuuaaucauuuugccucuuuucucugugcuucaauuaauaaaaaauggaaagaaccuagaucuaaaaaaaaaaaaaaaaaaaaaaaaaaaaaaaaaaaaaaaaaaaaaaaaaaaaaaaaaaaaaaaaugcaucccccccccccccccccccccccccccccccaaaggcucuuuucagagccaccagaauu

SEQ ID NO: 1319 - RNA, 1364 nt, Artificial Sequence
  mRNA Design i-2 (A64-N5-C30-hSL-N5) comprising derived and/or modified sequence from Pf(3D7)__XP_001351122.1__Pf-CSP(1-325) (opt3)
aggagaggcgcugccuacggagguggcagccaucuccuucucggcaucaagcuuaccaugaugagaaagcuggccauccucagcguguccucuuuccuuuuugucgaggcucuguuccaggaauaccaaugcuauggcucaaguagcaacaccaggguuuugaaugaguuaaacuacgacaaugcagggacaaaccuguauaaugaacuagagaugaacuacuauggaaaacaggaaaauugguacucccucaagaaaaacucucggucgcugggugagaaugaugacggcaacaaugaggauaacgaaaaacuucgcaagcccaagcacaagaaacugaagcagccugccgacgggaauccagauccgaacgcgaaucccaacguggacccuaacgcuaauccaaacguagaucccaaugccaacccuaauguggacccaaacgcaaaucccaacgccaauccuaacgcuaauccaaacgcaaauccgaacgccaaucccaacgcuaacccuaaugccaacccaaaugcgaaccccaaugcaaacccuaaugccaacccaaaugcuaaccccaaugccaacccgaaugcaaacccuaaugcuaaccccaacgccaauccaaacgcgaauccuaacgccaaucccaacgucgauccaaaugcaaaccccaaugcuaacccuaaugccaacccaaaugcuaacccgaaugccaaccccaacgcaaauccuaacgccaauccaaacgcuaaucccaacgcgaauccuaacgcaaauccaaacgccaaucccaacgcuaauccgaacgccaauccuaacgcaaauccaaacgccaaccccaaugcuaacccuaaugccaaccccaaugcaaacccaaauaaaaacaaucagggaaacggccaaggucauaauaugccuaacgaccccaaucgaaacguggaugagaaugcgaacgcuaacucagccguuaagaauaacaauaacgaggaaccaagcgacaaacacauuaaggaguauuugaauaagauacagaacugaggacuagugcaucacauuuaaaagcaucucagccuaccaugagaauaagagaaagaaaaugaagaucaauagcuuauucaucucuuuuucuuuuucguugguguaaagccaacacccugucuaaaaaacauaaauuucuuuaaucauuuugccucuuuucucugugcuucaauuaauaaaaaauggaaagaaccuagaucuaaaaaaaaaaaaaaaaaaaaaaaaaaaaaaaaaaaaaaaaaaaaaaaaaaaaaaaaaaaaaaaaugcaucccccccccccccccccccccccccccccccaaaggcucuuuucagagccaccagaauu

SEQ ID NO: 1320 - RNA, 1580 nt, Artificial Sequence
  mRNA Design i-2 (A64-N5-C30-hSL-N5) comprising derived and/or modified sequence from Pf(3D7)__XP_001351122.1__HsALB_Pf-CSP(19-397) (opt3)
aggagaggcgcugccuacggagguggcagccaucuccuucucggcaucaagcuuaccaugaagugggugaccuucaucagccugcucuuucuuuucuccucugccuacucacuguuucaggaguaucaaugcuacggcaguagcuccaacacaagagucuugaaugaauuaaacuaugacaaugcugggacuaaccuguacaaugagcuagaaaugaacuauuacggaaaacaggagaauugguauucucucaagaaaaacucgaggucacugggugaaaaugaugacggcaacaaugaggauaacgagaaacuucggaagcccaagcacaagaaacugaagcagccugcagacgggaauccagauccgaacgccaaucccaacguugacccuaacgcgaauccaaacguggaucccaaugcuaacccuaauguagacccaaacgccaaucccaacgcaaauccuaacgccaauccaaacgcuaauccgaacgcaaaucccaacgccaacccuaaugcuaacccaaaugccaaccccaaugcgaacccuaaugcaaacccaaaugccaaccccaaugcuaacccgaaugccaacccuaaugcaaaccccaacgcuaauccaaacgccaauccuaacgcgaaucccaacguggauccaaaugccaaccccaaugcaaacccuaaugcuaacccaaaugccaacccgaaugcuaaccccaacgccaauccuaacgcaaauccaaacgccaaucccaacgcuaauccuaacgcgaauccaaacgcaaaucccaacgccaauccgaacgcuaauccuaacgccaauccaaacgcaaaccccaaugccaacccuaaugcuaaccccaaugccaacccaaauaaaaacaaucagggaaacggccaaggucauaauaugccuaacgaccccaaucgcaacgucgaugaaaaugcaaacgcgaacagcgcugugaagaauaacaauaacgaggaaccaagugacaaacacauuaaggaguacuugaauaagauacagaacucccucucuacggaguggagcccguguuccguuaccugcgggaauggaauccaggugcgaauuaaaccuggcucagccaacaagcccaaagaugaacuggacuacgcaaaugacaucgagaagaaaauuuguaagauggaaaaaugcaguagcgucuucaacgugguaaauucuuccaucggccugauaaugguucucucauuuuuauuccugaacugaggacuagugcaucacauuuaaaagcaucucagccuaccaugagaauaagagaaagaaaaugaagaucaauagcuuauucaucucuuuuucuuuuucguugguguaaagccaacacccugucuaaaaaacauaaauuucuuuaaucauuuugccucuuuucucugugcuucaauuaauaaaaaauggaaagaaccuagaucuaaaaaaaaaaaaaaaaaaaaaaaaaaaaaaaaaaaaaaaaaaaaaaaaaaaaaaaaaaaaaaaaugcaucccccccccccccccccccccccccccccccaaaggcucuuuucagagccaccagaauu

SEQ ID NO: 1321 - RNA, 1598 nt, Artificial Sequence
  mRNA Design i-2 (A64-N5-C30-hSL-N5) comprising derived and/or modified sequence from Pf(3D7)__XP_001351122.1__HsIns-iso1_Pf-CSP(19-397) (opt3)
aggagaggcgcugccuacggagguggcagccaucuccuucucggcaucaagcuuaccauggcccuguggaugagacuccuuccccuguuggcuuuacuggcacuauggggcccugacccagccgcggcucucuuccaggaguaccaaugcuaugggagcuccucuaacaccagggugcugaaugaacuuaacuacgauaaugccggaacaaaccuguauaaugaguuggaaaugaacuacuaugguaagcaggagaauugguacucacucaaaaagaacagucggagccugggcgaaaaugacgaugggaacaaugaggacaacgagaaacugcgcaagccgaaacacaagaagcucaaacagcccgcagauggaaauccugacccaaacgccaaucccaacgucgauccuaacgcuaauccaaacguugaccccaaugcaaacccuaauguggauccaaacgccaauccgaacgcuaaucccaacgccaauccuaacgcgaauccaaacgcaaaucccaacgccaacccuaaugcuaacccaaaugccaaccccaaugcaaacccgaaugcuaacccuaaugccaaccccaaugcgaacccaaaugccaacccuaaugcaaaccccaacgcuaauccaaacgccaaucccaacgcuaauccuaacguagacccaaaugccaacccgaaugcaaaccccaaugccaacccuaaugcuaacccaaaugcgaaccccaacgcaaauccuaacgccaauccaaacgcuaaucccaacgccaauccgaacgcaaauccuaacgccaauccaaacgcuaaucccaacgccaauccuaacgcaaaucccaacgcgaacccaaaugcuaacccuaaugccaaccccaaugcaaacccaaauaagaacaaucagggcaacggucaagggcauaauaugccgaacgauccuaaucgaaacguggacgaaaaugccaacgcuaacuccgccgucaaaaauaacaauaacgaggaacccucugauaagcacaucaaagaguauuuaaauaagauucagaacucgcugucaacugaguggagcccauguagugugacgugcggaaauggcauacagguucguaucaagcccggcuccgcaaacaaaccuaaggacgaacuugacuacgcuaaugauauugagaaaaagaucuguaaaauggaaaagugcucuagcguguuuaacgucguaaauuccucaauuggguugaucauggugcugaguuuccuauuucucaacugaggacuagugcaucacauuuaaaagcaucucagccuaccaugagaauaagagaaagaaaaugaagaucaauagcuuauucaucucuuuuucuuuuucguugguguaaagccaacacccugucuaaaaaacauaaauuucuuuaaucauuuugccucuuuucucugugcuucaauuaauaaaaaauggaaagaaccuagaucuaaaaaaaaaaaaaaaaaaaaaaaaaaaaaaaaaaaaaaaaaaaaaaaaaaaaaaaaaaaaaaaaugcaucccccccccccccccccccccccccccccccaaaggcucuuuucagagccaccagaauu

SEQ ID NO: 1322 - RNA, 1577 nt, Artificial Sequence
  mRNA Design i-2 (A64-N5-C30-hSL-N5) comprising derived and/or modified sequence from Pf(3D7)__XP_001351122.1__HsSPARC_Pf-CSP(19-397) (opt3)
aggagaggcgcugccuacggagguggcagccaucuccuucucggcaucaagcuuaccaugagagccuggaucuucuuucugcucugccuugcuggcagggcacuggccuuguuccaggaguaccaauguuaugggagcuccucuaacacccggguguuaaaugaacugaacuacgacaaugcgggaacaaaccuauauaaugagcucgaaaugaacuacuaugguaagcaggagaauugguacucacugaaaaagaacagucgcagccuuggcgaaaaugaugacgggaacaaugaggauaacgagaaacugcgaaagcccaaacacaagaaguugaaacagccugcugacggaaauccagauccgaacgccaaucccaacgucgacccuaacgcaaauccaaacguugaucccaaugccaacccuaauguggacccaaacgcuaaucccaacgcaaauccuaacgccaauccaaacgcuaauccgaacgccaaucccaacgcgaacccuaaugcaaacccaaaugccaaccccaaugcuaacccuaaugccaacccaaaugcaaaccccaaugcuaacccgaaugccaacccuaaugcgaaccccaacgccaauccaaacgcaaauccuaacgcuaaucccaacguagauccaaaugccaaccccaaugcuaacccuaaugccaacccaaaugcaaacccgaaugccaaccccaacgcuaauccuaacgcgaauccaaacgcaaaucccaacgccaauccuaacgcuaauccaaacgccaaucccaacgcaaauccgaacgccaauccuaacgcuaauccaaacgccaaccccaaugcaaacccuaaugcgaaccccaaugcuaacccaaauaagaacaaucagggcaacggucaagggcauaauaugccuaacgaccccaaucguaacguggaugaaaaugccaacgcaaacuccgccgucaaaaauaacaauaacgaggaaccaucugacaagcacauuaaagaguaucucaauaagauacagaacucgcugucaacugaguggagcccgugcagugugacguguggaaauggcauccagguuagaauuaagccuggcuccgcuaacaaacccaaggaugaacuggacuacgccaaugacaucgagaaaaagauuugcaaaauggaaaaguguucuagcguguuuaacgucguaaauuccucaaucgggcucauaaugguguuaaguuuccuguuucuuaacugaggacuagugcaucacauuuaaaagcaucucagccuaccaugagaauaagagaaagaaaaugaagaucaauagcuuauucaucucuuuuucuuuuucguugguguaaagccaacacccugucuaaaaaacauaaauuucuuuaaucauuuugccucuuuucucugugcuucaauuaauaaaaaauggaaagaaccuagaucuaaaaaaaaaaaaaaaaaaaaaaaaaaaaaaaaaaaaaaaaaaaaaaaaaaaaaaaaaaaaaaaaugcaucccccccccccccccccccccccccccccccaaaggcucuuuucagagccaccagaauu

SEQ ID NO: 1323 - RNA, 1580 nt, Artificial Sequence
  mRNA Design i-2 (A64-N5-C30-hSL-N5) comprising derived and/or modified sequence from Pf(3D7)__XP_001351122.1__IgE_Pf-CSP(19-397) (opt3)
aggagaggcgcugccuacggagguggcagccaucuccuucucggcaucaagcuuaccauggacuggaccuggauccuguuccucguggccgcugcaacaagaguccacagccuuuuucaggaguaccaaugcuauggcuccucuucaaacacuaggguucugaaugaauugaacuacgauaaugccgggacgaacuuauauaaugagcuggaaaugaacuacuauggaaagcaggagaauugguacagucuaaagaagaacagccggucccucggugaaaaugacgauggcaacaaugaggacaacgagaaacugcgcaagcccaaacauaagaaacuuaaacagccugcggaugggaauccagacccgaacgcuaaucccaacguggauccuaacgccaauccaaacguagaccccaaugcaaacccuaauguggauccaaacgccaaucccaacgcuaauccuaacgcaaauccaaacgccaauccgaacgcuaaucccaacgccaacccuaaugcgaacccaaaugcaaaccccaaugccaacccuaaugcuaacccaaaugccaaccccaaugcaaacccgaaugcuaacccuaaugccaaccccaacgcgaauccaaacgccaauccuaacgcaaaucccaacgucgacccaaaugcuaaccccaaugccaacccuaaugcuaacccaaaugccaacccgaaugcaaaccccaacgccaauccuaacgcuaauccaaacgcgaaucccaacgcaaauccuaacgccaauccaaacgcuaaucccaacgccaauccgaacgcaaauccuaacgccaauccaaacgcuaaccccaaugccaacccuaaugcaaaccccaaugcgaacccaaauaagaacaaucagggaaacggccaaggucacaauaugccuaacgaucccaaucgaaacguggacgaaaaugcuaacgccaacucugcaguuaaaaauaacaauaacgaggaaccaucggauaagcauauuaaagaguaucugaauaagauacagaacucauugagcaccgaguggaguccguguuccgugacaugcgggaauggaauccagguccguauuaagccuggcucugccaacaaacccaaggacgaacucgacuacgcuaaugauaucgagaaaaagauuuguaaaauggaaaagugcagcuccguguucaacguaguuaauucaaguaucggccugauaauggugcugagcuuucucuucuuaaacugaggacuagugcaucacauuuaaaagcaucucagccuaccaugagaauaagagaaagaaaaugaagaucaauagcuuauucaucucuuuuucuuuuucguugguguaaagccaacacccugucuaaaaaacauaaauuucuuuaaucauuuugccucuuuucucugugcuucaauuaauaaaaaauggaaagaaccuagaucuaaaaaaaaaaaaaaaaaaaaaaaaaaaaaaaaaaaaaaaaaaaaaaaaaaaaaaaaaaaaaaaaugcaucccccccccccccccccccccccccccccccaaaggcucuuuucagagccaccagaauu

SEQ ID NO: 1324 - RNA, 1745 nt, Artificial Sequence
  mRNA Design i-2 (A64-N5-C30-hSL-N5) comprising derived and/or modified sequence from Pf(3D7)__XP_001351122.1__Pf-CSP_L(G4SG4)_TM domain HA (opt3)
aggagaggcgcugccuacggagguggcagccaucuccuucucggcaucaagcuuaccaugaugagaaagcuggccauccucagcguguccucuuuccuuuuugucgaggcucuguuccaggaauaccaaugcuauggcucaaguagcaacaccaggguuuugaaugaguuaaacuacgacaaugcagggacaaaccuguauaaugaacuagagaugaacuacuauggaaagcaggaaaauugguacucccucaagaaaaacucucggucgcugggugagaaugaugacggcaacaaugaggauaacgaaaaacuucgcaagcccaagcacaagaaacugaagcagccugccgacgggaauccagauccgaacgcgaaucccaacguggacccuaacgcuaauccaaacguagaucccaaugccaacccuaauguggacccaaacgcaaaucccaacgccaauccuaacgcuaauccaaacgcaaauccgaacgccaaucccaacgcuaacccuaaugccaacccaaaugcgaaccccaaugcaaacccuaaugccaacccaaaugcuaaccccaaugccaacccgaaugcaaacccuaaugcuaaccccaacgccaauccaaacgcgaauccuaacgccaaucccaacgucgauccaaaugcaaaccccaaugcuaacccuaaugccaacccaaaugcuaacccgaaugccaaccccaacgcaaauccuaacgccaauccaaacgcuaaucccaacgcgaauccuaacgcaaauccaaacgccaaucccaacgcuaauccgaacgccaauccuaacgcaaauccaaacgccaaccccaaugcuaacccuaaugccaaccccaaugcaaacccaaauaaaaacaaucagggaaacggccaaggucauaauaugccuaacgaccccaaucgaaacguggaugagaaugcgaacgcuaacucagccguuaagaauaacaauaacgaggaaccaagcgacaaacacauuaaggaguauuugaauaagauacagaacagucucuccacugaauggucuccguguagcgugacgugcgggaauggaauccagguccguauuaaaccuggcuccgcaaacaagcccaaagaugagcuggacuacgccaaugacaucgaaaagaaaauuuguaagauggagaaaugcucaaguguguuuaacguaguuaauagcucuaucggccugauaauggugcucuccuucuuauuucugaacgggggagguggcucagggggaggcgguaaacuugaaagcaccagaaucuaccagauuuuggcuaucuauaguacagucgccucuucccuggugcuaguggucagccucggggcaauuucguucuggauguguucuaauggaucccugcaaugcaggaucuguauaugaggacuagugcaucacauuuaaaagcaucucagccuaccaugagaauaagagaaagaaaaugaagaucaauagcuuauucaucucuuuuucuuuuucguugguguaaagccaacacccugucuaaaaaacauaaauuucuuuaaucauuuugccucuuuucucugugcuucaauuaauaaaaaauggaaagaaccuagaucuaaaaaaaaaaaaaaaaaaaaaaaaaaaaaaaaaaaaaaaaaaaaaaaaaaaaaaaaaaaaaaaaugcaucccccccccccccccccccccccccccccccaaaggcucuuuucagagccaccagaauu

SEQ ID NO: 1325 - RNA, 1619 nt, Artificial Sequence
  mRNA Design i-2 (A64-N5-C30-hSL-N5) comprising derived and/or modified sequence from Pf(3D7)__XP_001351122.1__Pf-CSP(199-377)_L(PVTN)_HBsAg (opt3)
aggagaggcgcugccuacggagguggcagccaucuccuucucggcaucaagcuuaccauggaccccaacgccaauccuaacgcuaauccaaacgcaaauccgaacgccaaucccaacgcgaauccuaacgcuaauccaaacgccaaucccaacgcaaauccuaacgccaacccaaaugcuaaccccaaugcaaacccuaaugccaacccaaaugcuaacccgaaugccaaccccaaugcgaacccuaaugcaaacccaaaugccaaccccaacgcuaauccuaacaagaauaaccagggcaaugggcaaggacacaacaugccaaaugaucccaacagaaauguggacgagaacgccaaugcaaacagcgcugucaaaaauaacaauaacgaggaaccguccgauaagcauaucaaagaauaccugaacaagauucaaaauucucucucaaccgaguggaguccuugcagcguuacaugugguaacggcauacaggugaggaucaaacccggguccgccaauaagccaaaggacgaacuugauuaugcgaacgacauugagaaaaagaucugcaaaauggagaaguguucuucgguaccugugacuaauauggaaaacauuacgucaggauuccugggccccuuguuaguccugcaggccggguuuuuccuacucacccggauccugacaauaccacagagccuugauaguugguggacuucccugaauuuucucgguggaucucccgugugcuugggccagaacagccaguccccuaccucaaaucacaguccaacaagcuguccgcccaucugcccuggcuaccgcuggaugugucugcgacguuucauuaucuuucuguucauucucuuacugugccuuaucuuuuugcugguucuacucgacuaucaggggaugcugccaguguguccccuuauaccuggaucuaccacuacaaacaccgguccaugcaaaacguguacuacccccgcacaaggcaauuccauguucccgucaugcugcuguacaaagccuacugaugggaacugcaccuguauuccaauccccagcaguugggcuuuugccaaguaccugugggagugggcuucugucagauucuccugguugagccuccuggugccuuuuguacagugguucguuggauuaucgcccacaguguggcugucugccauuuggaugaugugguauuggggcccaucccucuacucaaucgucaguccuuuuaucccccuucugccaauuuucuucugcuuguggguguauauaugaggacuagugcaucacauuuaaaagcaucucagccuaccaugagaauaagagaaagaaaaugaagaucaauagcuuauucaucucuuuuucuuuuucguugguguaaagccaacacccugucuaaaaaacauaaauuucuuuaaucauuuugccucuuuucucugugcuucaauuaauaaaaaauggaaagaaccuagaucuaaaaaaaaaaaaaaaaaaaaaaaaaaaaaaaaaaaaaaaaaaaaaaaaaaaaaaaaaaaaaaaaugcaucccccccccccccccccccccccccccccccaaaggcucuuuucagagccaccagaauu

SEQ ID NO: 1326 - RNA, 1661 nt, Artificial Sequence
  mRNA Design i-2 (A64-N5-C30-hSL-N5) comprising derived and/or modified sequence from Pf(3D7)__XP_001351122.1__Pf-CSP(199-387)_L(PVTN)_HBsAg (opt3)
aggagaggcgcugccuacggagguggcagccaucuccuucucggcaucaagcuuaccaugauggcccccgacccuaacgcuaauccaaacgcaaauccgaacgccaaucccaacgcgaauccuaacgcuaauccaaacgccaaucccaacgcaaauccuaacgccaauccaaacgcuaaccccaaugcaaacccuaaugccaacccaaaugcuaacccgaaugccaaccccaaugcgaacccuaaugcaaacccaaaugccaaccccaaugcuaacccuaacgccaauccaaacaagaauaaccagggcaaugggcaaggacacaacaugcccaaugauccgaacagaaauguggacgagaacgcaaaugcuaacagcgccgucaaaaauaacaauaacgaggaaccuuccgauaagcauaucaaagaauaccugaacaagauucaaaauucucucucaaccgaguggagucccugcagcguuacaugugguaacggcauacaggugaggaucaaaccaggguccgcgaauaagccuaaggacgaacuugauuaugccaacgacauugagaaaaagaucugcaaaauggagaaguguucuucgguauucaauguggucaacucaagcauuggacugggccccgugacuaauauggaaaacaucacgaguggguuuuuggguccauuacugguucuacaggcaggauucuuucuccugacccggauacuuacaaucccccagucccuggauucuugguggacuagcuugaauuuccucggcggcuccccugugugccuggggcagaacucacagaguccaaccagcaaucacucuccgacauccugucccccuauuugcccaggauaccgcuggaugugucugcgacguuuuaucauuuuccucuuuaucuuacugcuuugcuugauauuccugcuaguccuccuggacuaucaggguaugcuucccguguguccucugauuccaggcucaaccacuacaaacaccgggcccugcaaaacguguacuaccccggcucaaggaaauagcauguuuccuaguugcugcuguacaaagccaacugauggcaacugcaccuguauccccauuccuucuuccugggccuucgcuaaguacuugugggagugggccagcguaagauuuucguggcucucucuguuaguucccuucgugcagugguuugucggucuguccccaacaguguggcucucagcaaucuggaugaugugguauugggggccuagucuuuacagcaucgugucccccuucauuccacuguugccgauauucuuuugccuaugggucuauaucugaggacuagugcaucacauuuaaaagcaucucagccuaccaugagaauaagagaaagaaaaugaagaucaauagcuuauucaucucuuuuucuuuuucguugguguaaagccaacacccugucuaaaaaacauaaauuucuuuaaucauuuugccucuuuucucugugcuucaauuaauaaaaaauggaaagaaccuagaucuaaaaaaaaaaaaaaaaaaaaaaaaaaaaaaaaaaaaaaaaaaaaaaaaaaaaaaaaaaaaaaaaugcaucccccccccccccccccccccccccccccccaaaggcucuuuucagagccaccagaauu

SEQ ID NO: 1327 - RNA, 845 nt, Artificial Sequence
  mRNA Design i-2 (A64-N5-C30-hSL-N5) comprising derived and/or modified sequence from Pf(3D7)__XP_001351122.1__HsALB_Pf-CSP(19-152) (opt3)
aggagaggcgcugccuacggagguggcagccaucuccuucucggcaucaagcuuaccaugaagugggugaccuucaucagccugcucuuucuuuucuccucugccuacucacuguuucaggaguaucaaugcuacggcaguagcuccaacacaagagucuugaaugaauuaaacuaugacaaugcugggacuaaccuguacaaugagcuagaaaugaacuauuacggaaaacaggagaauugguauucucucaagaaaaacucgaggucacugggugaaaaugaugacggcaacaaugaggauaacgagaaacuucggaagcccaagcacaagaaacugaagcagccugcagacgggaauccagauccgaacgccaaucccaacguugacccuaacgcgaauccaaacguggaucccaaugcuaacccuaauguagacccaaacgccaaucccaacgcaaauccuaacgccaauccaaacgcuaauccgaacgcaaaucccaacgccaacccuugaggacuagugcaucacauuuaaaagcaucucagccuaccaugagaauaagagaaagaaaaugaagaucaauagcuuauucaucucuuuuucuuuuucguugguguaaagccaacacccugucuaaaaaacauaaauuucuuuaaucauuuugccucuuuucucugugcuucaauuaauaaaaaauggaaagaaccuagaucuaaaaaaaaaaaaaaaaaaaaaaaaaaaaaaaaaaaaaaaaaaaaaaaaaaaaaaaaaaaaaaaaugcaucccccccccccccccccccccccccccccccaaaggcucuuuucagagccaccagaauu

SEQ ID NO: 1328 - RNA, 965 nt, Artificial Sequence
  mRNA Design i-2 (A64-N5-C30-hSL-N5) comprising derived and/or modified sequence from Pf(3D7)__XP_001351122.1__HsALB_Pf-CSP(19-192) (opt3)
aggagaggcgcugccuacggagguggcagccaucuccuucucggcaucaagcuuaccaugaagugggugaccuucaucagccugcucuuucuuuucuccucugccuacucacuguuucaggaguaucaaugcuacggcaguagcuccaacacaagagucuugaaugaauuaaacuaugacaaugcugggacuaaccuguacaaugagcuagaaaugaacuauuacggaaaacaggagaauugguauucucucaagaaaaacucgaggucacugggugaaaaugaugacggcaacaaugaggauaacgagaaacuucggaagcccaagcacaagaaacugaagcagccugcagacgggaauccagauccgaacgccaaucccaacguugacccuaacgcgaauccaaacguggaucccaaugcuaacccuaauguagacccaaacgccaaucccaacgcaaauccuaacgccaauccaaacgcuaauccgaacgcaaaucccaacgccaacccuaaugcuaacccaaaugccaaccccaaugcgaacccuaaugcaaacccaaaugccaaccccaaugcuaacccgaaugccaacccuaaugcaaaccccaacgcuaauccaaacgccaauccuugaggacuagugcaucacauuuaaaagcaucucagccuaccaugagaauaagagaaagaaaaugaagaucaauagcuuauucaucucuuuuucuuuuucguugguguaaagccaacacccugucuaaaaaacauaaauuucuuuaaucauuuugccucuuuucucugugcuucaauuaauaaaaaauggaaagaaccuagaucuaaaaaaaaaaaaaaaaaaaaaaaaaaaaaaaaaaaaaaaaaaaaaaaaaaaaaaaaaaaaaaaaugcaucccccccccccccccccccccccccccccccaaaggcucuuuucagagccaccagaauu

SEQ ID NO: 1329 - RNA, 1205 nt, Artificial Sequence
  mRNA Design i-2 (A64-N5-C30-hSL-N5) comprising derived and/or modified sequence from Pf(3D7)__XP_001351122.1__HsALB_Pf-CSP(19-272) (opt3)
aggagaggcgcugccuacggagguggcagccaucuccuucucggcaucaagcuuaccaugaagugggugaccuucaucagccugcucuuucuuuucuccucugccuacucacuguuucaggaguaucaaugcuacggcaguagcuccaacacaagagucuugaaugaauuaaacuaugacaaugcugggacuaaccuguacaaugagcuagaaaugaacuauuacggaaaacaggagaauugguauucucucaagaaaaacucgaggucacugggugaaaaugaugacggcaacaaugaggauaacgagaaacuucggaagcccaagcacaagaaacugaagcagccugcagacgggaauccagauccgaacgccaaucccaacguugacccuaacgcgaauccaaacguggaucccaaugcuaacccuaauguagacccaaacgccaaucccaacgcaaauccuaacgccaauccaaacgcuaauccgaacgcaaaucccaacgccaacccuaaugcuaacccaaaugccaaccccaaugcgaacccuaaugcaaacccaaaugccaaccccaaugcuaacccgaaugccaacccuaaugcaaaccccaacgcuaauccaaacgccaauccuaacgcgaaucccaacguggauccaaaugccaaccccaaugcaaacccuaaugcuaacccaaaugccaacccgaaugcuaaccccaacgccaauccuaacgcaaauccaaacgccaaucccaacgcuaauccuaacgcgaauccaaacgcaaaucccaacgccaauccgaacgcuaauccuaacgccaauccaaacgcaaaccccaaugccaacccuaaugcuaaccccaaugccaacccaugaggacuagugcaucacauuuaaaagcaucucagccuaccaugagaauaagagaaagaaaaugaagaucaauagcuuauucaucucuuuuucuuuuucguugguguaaagccaacacccugucuaaaaaacauaaauuucuuuaaucauuuugccucuuuucucugugcuucaauuaauaaaaaauggaaagaaccuagaucuaaaaaaaaaaaaaaaaaaaaaaaaaaaaaaaaaaaaaaaaaaaaaaaaaaaaaaaaaaaaaaaaugcaucccccccccccccccccccccccccccccccaaaggcucuuuucagagccaccagaauu

SEQ ID NO: 1330 - RNA, 1367 nt, Artificial Sequence
  mRNA Design i-2 (A64-N5-C30-hSL-N5) comprising derived and/or modified sequence from Pf(3D7)__XP_001351122.1__HsALB_Pf-CSP(19-272)_L(AAY)_Pf-CSP(310-3 27)_L(AAY)_Pf-CSP(346-375) (opt3)
aggagaggcgcugccuacggagguggcagccaucuccuucucggcaucaagcuuaccaugaagugggugaccuucaucagccugcucuuucuuuucuccucugccuacucacuguuucaggaguaucaaugcuacggcaguagcuccaacacaagagucuugaaugaauuaaacuaugacaaugcugggacuaaccuguacaaugagcuagaaaugaacuauuacggaaaacaggagaauugguauucucucaagaaaaacucgaggucacugggugaaaaugaugacggcaacaaugaggauaacgagaaacuucggaagcccaagcacaagaaacugaagcagccugcagacgggaauccagauccgaacgccaaucccaacguugacccuaacgcgaauccaaacguggaucccaaugcuaacccuaauguagacccaaacgccaaucccaacgcaaauccuaacgccaauccaaacgcuaauccgaacgcaaaucccaacgccaacccuaaugcuaacccaaaugccaaccccaaugcgaacccuaaugcaaacccaaaugccaaccccaaugcuaacccgaaugccaacccuaaugcaaaccccaacgcuaauccaaacgccaauccuaacgcgaaucccaacguggauccaaaugccaaccccaaugcaaacccuaaugcuaacccaaaugccaacccgaaugcuaaccccaacgccaauccuaacgcaaauccaaacgccaaucccaacgcuaauccuaacgcgaauccaaacgcaaaucccaacgccaauccgaacgcuaauccuaacgccaauccaaacgcaaaccccaaugccaacccuaaugcuaaccccaaugccaacccagcagcguacgaaccuagcgacaaacauauuaaggaguacuugaauaaaauacagaacagucucgcugccuauaucaagcccggauccgcaaauaagccaaaagaugaacuggacuacgccaacgauauugagaagaaaaucuguaagauggagaaaugcucuugaggacuagugcaucacauuuaaaagcaucucagccuaccaugagaauaagagaaagaaaaugaagaucaauagcuuauucaucucuuuuucuuuuucguugguguaaagccaacacccugucuaaaaaacauaaauuucuuuaaucauuuugccucuuuucucugugcuucaauuaauaaaaaauggaaagaaccuagaucuaaaaaaaaaaaaaaaaaaaaaaaaaaaaaaaaaaaaaaaaaaaaaaaaaaaaaaaaaaaaaaaaugcaucccccccccccccccccccccccccccccccaaaggcucuuuucagagccaccagaauu

SEQ ID NO: 1331 - RNA, 1328 nt, Artificial Sequence
  mRNA Design i-2 (A64-N5-C30-hSL-N5) comprising derived and/or modified sequence from Pf(3D7)__XP_001351122.1__HsALB_Pf-CSP(19-272)_L(AAY)_Pf-CSP(346-3 65)_L(AAY)_P2 (opt3)
aggagaggcgcugccuacggagguggcagccaucuccuucucggcaucaagcuuaccaugaagugggugaccuucaucagccugcucuuucuuuucuccucugccuacucacuguuucaggaguaucaaugcuacggcaguagcuccaacacaagagucuugaaugaauuaaacuaugacaaugcugggacuaaccuguacaaugagcuagaaaugaacuauuacggaaaacaggagaauugguauucucucaagaaaaacucgaggucacugggugaaaaugaugacggcaacaaugaggauaacgagaaacuucggaagcccaagcacaagaaacugaagcagccugcagacgggaauccagauccgaacgccaaucccaacguugacccuaacgcgaauccaaacguggaucccaaugcuaacccuaauguagacccaaacgccaaucccaacgcaaauccuaacgccaauccaaacgcuaauccgaacgcaaaucccaacgccaacccuaaugcuaacccaaaugccaaccccaaugcgaacccuaaugcaaacccaaaugccaaccccaaugcuaacccgaaugccaacccuaaugcaaaccccaacgcuaauccaaacgccaauccuaacgcgaaucccaacguggauccaaaugccaaccccaaugcaaacccuaaugcuaacccaaaugccaacccgaaugcuaaccccaacgccaauccuaacgcaaauccaaacgccaaucccaacgcuaauccuaacgcgaauccaaacgcaaaucccaacgccaauccgaacgcuaauccuaacgccaauccaaacgcaaaccccaaugccaacccuaaugcuaaccccaaugccaacccagcagcguacauuaaaccuggaagcgcuaauaagcccaaagacgaauuggauuacgccaacgacauagaggcagccuaucaguacaucaaggcuaauaguaaguucauuggcaucacggaacucugaggacuagugcaucacauuuaaaagcaucucagccuaccaugagaauaagagaaagaaaaugaagaucaauagcuuauucaucucuuuuucuuuuucguugguguaaagccaacacccugucuaaaaaacauaaauuucuuuaaucauuuugccucuuuucucugugcuucaauuaauaaaaaauggaaagaaccuagaucuaaaaaaaaaaaaaaaaaaaaaaaaaaaaaaaaaaaaaaaaaaaaaaaaaaaaaaaaaaaaaaaaugcaucccccccccccccccccccccccccccccccaaaggcucuuuucagagccaccagaauu

SEQ ID NO: 1332 - RNA, 1322 nt, Artificial Sequence
  mRNA Design i-2 (A64-N5-C30-hSL-N5) comprising derived and/or modified sequence from Pf(3D7)__XP_001351122.1__HsALB_Pf-CSP(19-272)_L(AAY)_Pf-CSP(346-3 65)_L(AAY)_PADRE (opt3)
aggagaggcgcugccuacggagguggcagccaucuccuucucggcaucaagcuuaccaugaagugggugaccuucaucagccugcucuuucuuuucuccucugccuacucacuguuucaggaguaucaaugcuacggcaguagcuccaacacaagagucuugaaugaauuaaacuaugacaaugcugggacuaaccuguacaaugagcuagaaaugaacuauuacggaaaacaggagaauugguauucucucaagaaaaacucgaggucacugggugaaaaugaugacggcaacaaugaggauaacgagaaacuucggaagcccaagcacaagaaacugaagcagccugcagacgggaauccagauccgaacgccaaucccaacguugacccuaacgcgaauccaaacguggaucccaaugcuaacccuaauguagacccaaacgccaaucccaacgcaaauccuaacgccaauccaaacgcuaauccgaacgcaaaucccaacgccaacccuaaugcuaacccaaaugccaaccccaaugcgaacccuaaugcaaacccaaaugccaaccccaaugcuaacccgaaugccaacccuaaugcaaaccccaacgcuaauccaaacgccaauccuaacgcgaaucccaacguggauccaaaugccaaccccaaugcaaacccuaaugcuaacccaaaugccaacccgaaugcuaaccccaacgccaauccuaacgcaaauccaaacgccaaucccaacgcuaauccuaacgcgaauccaaacgcaaaucccaacgccaauccgaacgcuaauccuaacgccaauccaaacgcaaaccccaaugccaacccuaaugcuaaccccaaugccaacccagcagcguacauuaaaccuggaagcgcuaauaagcccaaagacgaauuggauuacgccaacgacauagaggcagccuaugcuaaguucgucgccgcauggacgcucaaggcugccgcgugaggacuagugcaucacauuuaaaagcaucucagccuaccaugagaauaagagaaagaaaaugaagaucaauagcuuauucaucucuuuuucuuuuucguugguguaaagccaacacccugucuaaaaaacauaaauuucuuuaaucauuuugccucuuuucucugugcuucaauuaauaaaaaauggaaagaaccuagaucuaaaaaaaaaaaaaaaaaaaaaaaaaaaaaaaaaaaaaaaaaaaaaaaaaaaaaaaaaaaaaaaaugcaucccccccccccccccccccccccccccccccaaaggcucuuuucagagccaccagaauu

SEQ ID NO: 1333 - RNA, 1379 nt, Artificial Sequence
  mRNA Design i-2 (A64-N5-C30-hSL-N5) comprising derived and/or modified sequence from Pf(3D7)__XP_001351122.1__HsALB_Pf-CSP(19-272)_L(G4S)_Pf-CSP(310-3 27)_L(G4S)_Pf-CSP(346-375) (opt3)
aggagaggcgcugccuacggagguggcagccaucuccuucucggcaucaagcuuaccaugaagugggugaccuucaucagccugcucuuucuuuucuccucugccuacucacuguuucaggaguaucaaugcuacggcaguagcuccaacacaagagucuugaaugaauuaaacuaugacaaugcugggacuaaccuguacaaugagcuagaaaugaacuauuacggaaaacaggagaauugguauucucucaagaaaaacucgaggucacugggugaaaaugaugacggcaacaaugaggauaacgagaaacuucggaagcccaagcacaagaaacugaagcagccugcagacgggaauccagauccgaacgccaaucccaacguugacccuaacgcgaauccaaacguggaucccaaugcuaacccuaauguagacccaaacgccaaucccaacgcaaauccuaacgccaauccaaacgcuaauccgaacgcaaaucccaacgccaacccuaaugcuaacccaaaugccaaccccaaugcgaacccuaaugcaaacccaaaugccaaccccaaugcuaacccgaaugccaacccuaaugcaaaccccaacgcuaauccaaacgccaauccuaacgcgaaucccaacguggauccaaaugccaaccccaaugcaaacccuaaugcuaacccaaaugccaacccgaaugcuaaccccaacgccaauccuaacgcaaauccaaacgccaaucccaacgcuaauccuaacgcgaauccaaacgcaaaucccaacgccaauccgaacgcuaauccuaacgccaauccaaacgcaaaccccaaugccaacccuaaugcuaaccccaaugccaacccaggaggcggugggagcgaaccuagugacaaacauauuaaggaguacuugaauaaaauacagaacucccucggaggcggcgggucuaucaagcccggaagcgcaaauaagccaaaagaugaacuggacuacgcgaacgauauugagaagaaaaucuguaagauggagaaaugcuccugaggacuagugcaucacauuuaaaagcaucucagccuaccaugagaauaagagaaagaaaaugaagaucaauagcuuauucaucucuuuuucuuuuucguugguguaaagccaacacccugucuaaaaaacauaaauuucuuuaaucauuuugccucuuuucucugugcuucaauuaauaaaaaauggaaagaaccuagaucuaaaaaaaaaaaaaaaaaaaaaaaaaaaaaaaaaaaaaaaaaaaaaaaaaaaaaaaaaaaaaaaaugcaucccccccccccccccccccccccccccccccaaaggcucuuuucagagccaccagaauu

SEQ ID NO: 1334 - RNA, 1364 nt, Artificial Sequence
  mRNA Design i-2 (A64-N5-C30-hSL-N5) comprising derived and/or modified sequence from Pf(3D7)__XP_001351122.1__HsALB_Pf-CSP(19-272)_L(G4S)_Pf-CSP(310-3 27)_Pf-CSP(346-375) (opt3)
aggagaggcgcugccuacggagguggcagccaucuccuucucggcaucaagcuuaccaugaagugggugaccuucaucagccugcucuuucuuuucuccucugccuacucacuguuucaggaguaucaaugcuacggcaguagcuccaacacaagagucuugaaugaauuaaacuaugacaaugcugggacuaaccuguacaaugagcuagaaaugaacuauuacggaaaacaggagaauugguauucucucaagaaaaacucgaggucacugggugaaaaugaugacggcaacaaugaggauaacgagaaacuucggaagcccaagcacaagaaacugaagcagccugcagacgggaauccagauccgaacgccaaucccaacguugacccuaacgcgaauccaaacguggaucccaaugcuaacccuaauguagacccaaacgccaaucccaacgcaaauccuaacgccaauccaaacgcuaauccgaacgcaaaucccaacgccaacccuaaugcuaacccaaaugccaaccccaaugcgaacccuaaugcaaacccaaaugccaaccccaaugcuaacccgaaugccaacccuaaugcaaaccccaacgcuaauccaaacgccaauccuaacgcgaaucccaacguggauccaaaugccaaccccaaugcaaacccuaaugcuaacccaaaugccaacccgaaugcuaaccccaacgccaauccuaacgcaaauccaaacgccaaucccaacgcuaauccuaacgcgaauccaaacgcaaaucccaacgccaauccgaacgcuaauccuaacgccaauccaaacgcaaaccccaaugccaacccuaaugcuaaccccaaugccaacccaggaggcggugggagcgaaccuagugacaaacauauuaaggaguacuugaauaaaauacagaacucccucaucaagcccggaucugcaaauaagccaaaagaugaacuggacuacgcgaacgauauugagaagaaaaucuguaagauggagaaaugcagcugaggacuagugcaucacauuuaaaagcaucucagccuaccaugagaauaagagaaagaaaaugaagaucaauagcuuauucaucucuuuuucuuuuucguugguguaaagccaacacccugucuaaaaaacauaaauuucuuuaaucauuuugccucuuuucucugugcuucaauuaauaaaaaauggaaagaaccuagaucuaaaaaaaaaaaaaaaaaaaaaaaaaaaaaaaaaaaaaaaaaaaaaaaaaaaaaaaaaaaaaaaaugcaucccccccccccccccccccccccccccccccaaaggcucuuuucagagccaccagaauu

SEQ ID NO: 1335 - RNA, 1364 nt, Artificial Sequence
  mRNA Design i-2 (A64-N5-C30-hSL-N5) comprising derived and/or modified sequence from Pf(3D7)__XP_001351122.1__HsALB_Pf-CSP(19-325) (opt3)
aggagaggcgcugccuacggagguggcagccaucuccuucucggcaucaagcuuaccaugaagugggugaccuucaucagccugcucuuucuuuucuccucugccuacucacuguuucaggaguaucaaugcuacggcaguagcuccaacacaagagucuugaaugaauuaaacuaugacaaugcugggacuaaccuguacaaugagcuagaaaugaacuauuacggaaaacaggagaauugguauucucucaagaaaaacucgaggucacugggugaaaaugaugacggcaacaaugaggauaacgagaaacuucggaagcccaagcacaagaaacugaagcagccugcagacgggaauccagauccgaacgccaaucccaacguugacccuaacgcgaauccaaacguggaucccaaugcuaacccuaauguagacccaaacgccaaucccaacgcaaauccuaacgccaauccaaacgcuaauccgaacgcaaaucccaacgccaacccuaaugcuaacccaaaugccaaccccaaugcgaacccuaaugcaaacccaaaugccaaccccaaugcuaacccgaaugccaacccuaaugcaaaccccaacgcuaauccaaacgccaauccuaacgcgaaucccaacguggauccaaaugccaaccccaaugcaaacccuaaugcuaacccaaaugccaacccgaaugcuaaccccaacgccaauccuaacgcaaauccaaacgccaaucccaacgcuaauccuaacgcgaauccaaacgcaaaucccaacgccaauccgaacgcuaauccuaacgccaauccaaacgcaaaccccaaugccaacccuaaugcuaaccccaaugccaacccaaauaaaaacaaucagggaaacggccaaggucauaauaugccuaacgaccccaaucgcaacgucgaugaaaaugcaaacgcgaacagcgcugugaagaauaacaauaacgaggaaccaagugacaaacacauuaaggaguacuugaauaagauacagaacugaggacuagugcaucacauuuaaaagcaucucagccuaccaugagaauaagagaaagaaaaugaagaucaauagcuuauucaucucuuuuucuuuuucguugguguaaagccaacacccugucuaaaaaacauaaauuucuuuaaucauuuugccucuuuucucugugcuucaauuaauaaaaaauggaaagaaccuagaucuaaaaaaaaaaaaaaaaaaaaaaaaaaaaaaaaaaaaaaaaaaaaaaaaaaaaaaaaaaaaaaaaugcaucccccccccccccccccccccccccccccccaaaggcucuuuucagagccaccagaauu

SEQ ID NO: 1336 - RNA, 1541 nt, Artificial Sequence
  mRNA Design i-2 (A64-N5-C30-hSL-N5) comprising derived and/or modified sequence from Pf(3D7)__XP_001351122.1__HsALB_Pf-CSP(19-384) (opt3)
aggagaggcgcugccuacggagguggcagccaucuccuucucggcaucaagcuuaccaugaagugggugaccuucaucagccugcucuuucuuuucuccucugccuacucacuguuucaggaguaucaaugcuacggcaguagcuccaacacaagagucuugaaugaauuaaacuaugacaaugcugggacuaaccuguacaaugagcuagaaaugaacuauuacggaaaacaggagaauugguauucucucaagaaaaacucgaggucacugggugaaaaugaugacggcaacaaugaggauaacgagaaacuucggaagcccaagcacaagaaacugaagcagccugcagacgggaauccagauccgaacgccaaucccaacguugacccuaacgcgaauccaaacguggaucccaaugcuaacccuaauguagacccaaacgccaaucccaacgcaaauccuaacgccaauccaaacgcuaauccgaacgcaaaucccaacgccaacccuaaugcuaacccaaaugccaaccccaaugcgaacccuaaugcaaacccaaaugccaaccccaaugcuaacccgaaugccaacccuaaugcaaaccccaacgcuaauccaaacgccaauccuaacgcgaaucccaacguggauccaaaugccaaccccaaugcaaacccuaaugcuaacccaaaugccaacccgaaugcuaaccccaacgccaauccuaacgcaaauccaaacgccaaucccaacgcuaauccuaacgcgaauccaaacgcaaaucccaacgccaauccgaacgcuaauccuaacgccaauccaaacgcaaaccccaaugccaacccuaaugcuaaccccaaugccaacccaaauaaaaacaaucagggaaacggccaaggucauaauaugccuaacgaccccaaucgcaacgucgaugaaaaugcaaacgcgaacagcgcugugaagaauaacaauaacgaggaaccaagugacaaacacauuaaggaguacuugaauaagauacagaacucccucucuacggaguggagcccguguuccguuaccugcgggaauggaauccaggugcgaauuaaaccuggcucagccaacaagcccaaagaugaacuggacuacgcaaaugacaucgagaagaaaauuuguaagauggaaaaaugcaguagcgucuucaacgugguaaauucuuccugaggacuagugcaucacauuuaaaagcaucucagccuaccaugagaauaagagaaagaaaaugaagaucaauagcuuauucaucucuuuuucuuuuucguugguguaaagccaacacccugucuaaaaaacauaaauuucuuuaaucauuuugccucuuuucucugugcuucaauuaauaaaaaauggaaagaaccuagaucuaaaaaaaaaaaaaaaaaaaaaaaaaaaaaaaaaaaaaaaaaaaaaaaaaaaaaaaaaaaaaaaaugcaucccccccccccccccccccccccccccccccaaaggcucuuuucagagccaccagaauu

SEQ ID NO: 1337 - RNA, 1679 nt, Artificial Sequence
  mRNA Design i-2 (A64-N5-C30-hSL-N5) comprising derived and/or modified sequence from Pf(3D7)__XP_001351122.1__HsALB_Pf-CSP(19-384)_TM domain HA (opt3)
aggagaggcgcugccuacggagguggcagccaucuccuucucggcaucaagcuuaccaugaagugggugaccuucaucagccugcucuuucuuuucuccucugccuacucacuguuucaggaguaucaaugcuacggcaguagcuccaacacaagagucuugaaugaauuaaacuaugacaaugcugggacuaaccuguacaaugagcuagaaaugaacuauuacggaaaacaggagaauugguauucucucaagaaaaacucgaggucacugggugaaaaugaugacggcaacaaugaggauaacgagaaacuucggaagcccaagcacaagaaacugaagcagccugcagacgggaauccagauccgaacgccaaucccaacguugacccuaacgcgaauccaaacguggaucccaaugcuaacccuaauguagacccaaacgccaaucccaacgcaaauccuaacgccaauccaaacgcuaauccgaacgcaaaucccaacgccaacccuaaugcuaacccaaaugccaaccccaaugcgaacccuaaugcaaacccaaaugccaaccccaaugcuaacccgaaugccaacccuaaugcaaaccccaacgcuaauccaaacgccaauccuaacgcgaaucccaacguggauccaaaugccaaccccaaugcaaacccuaaugcuaacccaaaugccaacccgaaugcuaaccccaacgccaauccuaacgcaaauccaaacgccaaucccaacgcuaauccuaacgcgaauccaaacgcaaaucccaacgccaauccgaacgcuaauccuaacgccaauccaaacgcaaaccccaaugccaacccuaaugcuaaccccaaugccaacccaaauaaaaacaaucagggaaacggccaaggucauaauaugccuaacgaccccaaucgcaacgucgaugaaaaugcaaacgcgaacagcgcugugaagaauaacaauaacgaggaaccaagugacaaacacauuaaggaguacuugaauaagauacagaacucccucucuacggaguggagcccguguuccguuaccugcgggaauggaauccaggugcgaauuaaaccuggcucagccaacaagcccaaagaugaacuggacuacgcaaaugacaucgagaagaaaauuuguaagauggaaaaaugcaguagcgucuucaacgugguaaauucuuccaagcuggagucaacacguaucuaucagauacucgccaucuacagcacuguugcuaguucuuuagugcuggucgugucccuuggcgccauuagcuuuuggauguguucgaacgggucuuugcaaugcagaaucuguauuugaggacuagugcaucacauuuaaaagcaucucagccuaccaugagaauaagagaaagaaaaugaagaucaauagcuuauucaucucuuuuucuuuuucguugguguaaagccaacacccugucuaaaaaacauaaauuucuuuaaucauuuugccucuuuucucugugcuucaauuaauaaaaaauggaaagaaccuagaucuaaaaaaaaaaaaaaaaaaaaaaaaaaaaaaaaaaaaaaaaaaaaaaaaaaaaaaaaaaaaaaaaugcaucccccccccccccccccccccccccccccccaaaggcucuuuucagagccaccagaauu

SEQ ID NO: 1338 - RNA, 1391 nt, Artificial Sequence
  mRNA Design i-2 (A64-N5-C30-hSL-N5) comprising derived and/or modified sequence from Pf(3D7)__XP_001351122.1__HsALB_Pf-CSP(82-397) (opt3)
aggagaggcgcugccuacggagguggcagccaucuccuucucggcaucaagcuuaccaugaagugggugaccuucaucagccugcucuuucuuuucuccucugccuacucagacaacgagaaacugagaaagcccaaacacaagaaauugaagcagccugcugauggcaauccagacccgaacgcaaaucccaacgucgauccuaaugccaacccaaauguugaccccaacgcgaauccuaacguggauccaaaugcuaaccccaaugccaacccuaaugcaaacccaaacgccaauccgaacgcuaaucccaacgcaaauccuaacgccaauccaaacgcuaaucccaacgccaauccuaacgcgaauccaaacgcaaaucccaacgccaacccgaaugcuaacccuaaugccaaccccaaugcaaacccaaaugcuaacccuaaugccaaccccaauguagacccaaacgcgaaucccaacgccaauccuaacgcaaacccaaaugcuaacccgaaugccaaccccaaugcuaacccuaaugccaacccaaaugcaaaccccaaugccaacccuaaugcuaacccaaaugcgaaccccaacgcaaauccgaacgccaauccuaacgcuaauccaaacgccaaucccaacgcaaauccuaacgccaaucccaacgcuaauccaaacaagaauaaccaggggaauggacagggucauaacaugccuaacgaucccaauaggaacguggacgaaaaugccaacgcaaauagugcggucaaaaacaauaacaaugaggaaccaagcgauaagcacauuaaagaguauuuaaacaagauacaaaauucccugucuacagaauggucgccgugcucagugacuuguggcaacgggauccagguucggauuaaaccuggaagcgcuaauaagcccaaggacgagcuagauuacgccaacgacaucgagaaaaagauuugcaaaauggaaaaguguaguuccguguuuaaugucgugaacucuagcaucggccucauaaugguacuguccuuccuuuuucugaacugaggacuagugcaucacauuuaaaagcaucucagccuaccaugagaauaagagaaagaaaaugaagaucaauagcuuauucaucucuuuuucuuuuucguugguguaaagccaacacccugucuaaaaaacauaaauuucuuuaaucauuuugccucuuuucucugugcuucaauuaauaaaaaauggaaagaaccuagaucuaaaaaaaaaaaaaaaaaaaaaaaaaaaaaaaaaaaaaaaaaaaaaaaaaaaaaaaaaaaaaaaaugcaucccccccccccccccccccccccccccccccaaaggcucuuuucagagccaccagaauu

SEQ ID NO: 1339 - RNA, 743 nt, Artificial Sequence
  mRNA Design i-2 (A64-N5-C30-hSL-N5) comprising derived and/or modified sequence from Pf(3D7)__XP_001351122.1__HsALB_Pf-CSP(93-192) (opt3)
aggagaggcgcugccuacggagguggcagccaucuccuucucggcaucaagcuuaccaugaagugggugaccuucaucagccugcucuuucuuuucuccucugccuacucaaaacugaagcagcccgcugacggcaacccugauccaaaugcaaacccgaaugucgaccccaacgccaauccuaacguugauccaaaugcgaaccccaauguggacccuaacgcuaauccaaacgccaaucccaacgcaaauccuaacgccaacccaaaugcuaacccgaaugcaaaccccaaugccaacccuaaugcuaacccaaaugccaaccccaaugcgaacccuaaugcaaacccaaaugccaaccccaacgcuaauccgaacgccaauccuaacgcaaaucccaacgcuaauccaugaggacuagugcaucacauuuaaaagcaucucagccuaccaugagaauaagagaaagaaaaugaagaucaauagcuuauucaucucuuuuucuuuuucguugguguaaagccaacacccugucuaaaaaacauaaauuucuuuaaucauuuugccucuuuucucugugcuucaauuaauaaaaaauggaaagaaccuagaucuaaaaaaaaaaaaaaaaaaaaaaaaaaaaaaaaaaaaaaaaaaaaaaaaaaaaaaaaaaaaaaaaugcaucccccccccccccccccccccccccccccccaaaggcucuuuucagagccaccagaauu

SEQ ID NO: 1340 - RNA, 983 nt, Artificial Sequence
  mRNA Design i-2 (A64-N5-C30-hSL-N5) comprising derived and/or modified sequence from Pf(3D7)__XP_001351122.1__HsALB_Pf-CSP(93-272) (opt3)
aggagaggcgcugccuacggagguggcagccaucuccuucucggcaucaagcuuaccaugaagugggugaccuucaucagccugcucuuucuuuucuccucugccuacucaaaacugaagcagcccgcugacggcaacccugauccaaaugcaaacccgaaugucgaccccaacgccaauccuaacguugauccaaaugcgaaccccaauguggacccuaacgcuaauccaaacgccaaucccaacgcaaauccuaacgccaacccaaaugcuaacccgaaugcaaaccccaaugccaacccuaaugcuaacccaaaugccaaccccaaugcgaacccuaaugcaaacccaaaugccaaccccaacgcuaauccgaacgccaauccuaacgcaaaucccaacgcuaauccaaacgccaauccuaacguagaucccaaugcgaacccaaaugccaaccccaaugcaaacccuaacgcuaauccaaacgccaauccgaacgcuaaucccaacgccaauccuaacgcaaauccaaacgccaaucccaacgcuaauccuaacgcgaauccaaacgcaaaccccaaugccaacccgaaugcuaacccuaaugccaacccaaaugcaaaccccaaugccaacccuaaugcuaaccccugaggacuagugcaucacauuuaaaagcaucucagccuaccaugagaauaagagaaagaaaaugaagaucaauagcuuauucaucucuuuuucuuuuucguugguguaaagccaacacccugucuaaaaaacauaaauuucuuuaaucauuuugccucuuuucucugugcuucaauuaauaaaaaauggaaagaaccuagaucuaaaaaaaaaaaaaaaaaaaaaaaaaaaaaaaaaaaaaaaaaaaaaaaaaaaaaaaaaaaaaaaaugcaucccccccccccccccccccccccccccccccaaaggcucuuuucagagccaccagaauu

SEQ ID NO: 1341 - RNA, 1358 nt, Artificial Sequence
  mRNA Design i-2 (A64-N5-C30-hSL-N5) comprising derived and/or modified sequence from Pf(3D7)__XP_001351122.1__HsALB_Pf-CSP(93-397) (opt3)
aggagaggcgcugccuacggagguggcagccaucuccuucucggcaucaagcuuaccaugaagugggugaccuucaucagccugcucuuucuuuucuccucugccuacucaaaacugaagcagcccgcugacggcaacccugauccaaaugcaaacccgaaugucgaccccaacgccaauccuaacguugauccaaaugcgaaccccaauguggacccuaacgcuaauccaaacgccaaucccaacgcaaauccuaacgccaacccaaaugcuaacccgaaugcaaaccccaaugccaacccuaaugcuaacccaaaugccaaccccaaugcgaacccuaaugcaaacccaaaugccaaccccaacgcuaauccgaacgccaauccuaacgcaaaucccaacgcuaauccaaacgccaauccuaacguagaucccaaugcgaacccaaaugccaaccccaaugcaaacccuaacgcuaauccaaacgccaauccgaacgcuaaucccaacgccaauccuaacgcaaauccaaacgccaaucccaacgcuaauccuaacgcgaauccaaacgcaaaccccaaugccaacccgaaugcuaacccuaaugccaacccaaaugcaaaccccaaugccaacccuaaugcuaaccccaauaaaaacaaucaagggaacggacagggucacaauaugccaaacgacccuaacagaaauguggaugagaacgccaaugcaaacagugcggucaagaauaacaauaacgaggaacccagcgacaaacauauuaaggaauauuugaauaagauacagaacuccuuaucuacagaguggucgccaugcucagugacuuguggcaaugggauccagguuaggauuaaaccgggaagcgcuaacaagccuaaagaugaacuggacuacgccaaugauaucgagaagaaaauuugcaagauggagaaguguaguuccguguuuaacgucguaaauucuagcaucggccuaauaauggugcucuccuuccuguuucuuaacugaggacuagugcaucacauuuaaaagcaucucagccuaccaugagaauaagagaaagaaaaugaagaucaauagcuuauucaucucuuuuucuuuuucguugguguaaagccaacacccugucuaaaaaacauaaauuucuuuaaucauuuugccucuuuucucugugcuucaauuaauaaaaaauggaaagaaccuagaucuaaaaaaaaaaaaaaaaaaaaaaaaaaaaaaaaaaaaaaaaaaaaaaaaaaaaaaaaaaaaaaaaugcaucccccccccccccccccccccccccccccccaaaggcucuuuucagagccaccagaauu

SEQ ID NO: 1342 - RNA, 728 nt, Artificial Sequence
  mRNA Design i-2 (A64-N5-C30-hSL-N5) comprising derived and/or modified sequence from Pf(3D7)__XP_001351122.1__HsALB_Pf-CSP(98-192) (opt3)
aggagaggcgcugccuacggagguggcagccaucuccuucucggcaucaagcuuaccaugaagugggugaccuucaucagccugcucuuucuuuucuccucugccuacucagcugacggcaaccccgauccuaaugcaaacccaaaugucgacccgaacgccaaucccaacguugauccuaaugcgaacccaaauguggaccccaacgcuaauccuaacgccaauccaaacgcaaaucccaacgccaacccuaaugcuaacccaaaugcaaacccgaaugccaaccccaaugcuaacccuaaugccaacccaaaugcgaaccccaaugcaaacccuaaugccaacccaaacgcuaaucccaacgccaauccgaacgcaaauccuaacgcuaaucccugaggacuagugcaucacauuuaaaagcaucucagccuaccaugagaauaagagaaagaaaaugaagaucaauagcuuauucaucucuuuuucuuuuucguugguguaaagccaacacccugucuaaaaaacauaaauuucuuuaaucauuuugccucuuuucucugugcuucaauuaauaaaaaauggaaagaaccuagaucuaaaaaaaaaaaaaaaaaaaaaaaaaaaaaaaaaaaaaaaaaaaaaaaaaaaaaaaaaaaaaaaaugcaucccccccccccccccccccccccccccccccaaaggcucuuuucagagccaccagaauu

SEQ ID NO: 1343 - RNA, 968 nt, Artificial Sequence
  mRNA Design i-2 (A64-N5-C30-hSL-N5) comprising derived and/or modified sequence from Pf(3D7)__XP_001351122.1__HsALB_Pf-CSP(98-272) (opt3)
aggagaggcgcugccuacggagguggcagccaucuccuucucggcaucaagcuuaccaugaagugggugaccuucaucagccugcucuuucuuuucuccucugccuacucagcugacggcaaccccgauccuaaugcaaacccaaaugucgacccgaacgccaaucccaacguugauccuaaugcgaacccaaauguggaccccaacgcuaauccuaacgccaauccaaacgcaaaucccaacgccaacccuaaugcuaacccaaaugcaaacccgaaugccaaccccaaugcuaacccuaaugccaacccaaaugcgaaccccaaugcaaacccuaaugccaacccaaacgcuaaucccaacgccaauccgaacgcaaauccuaacgcuaaucccaacgccaauccaaacguagauccuaaugcgaaccccaaugccaacccaaaugcaaaccccaacgcuaauccuaacgccaauccaaacgcuaauccgaacgccaaucccaacgcaaauccuaacgccaauccaaacgcuaaucccaacgcgaauccuaacgcaaacccaaaugccaaccccaaugcuaacccgaaugccaacccuaaugcaaacccaaaugccaaccccaaugcuaacccuugaggacuagugcaucacauuuaaaagcaucucagccuaccaugagaauaagagaaagaaaaugaagaucaauagcuuauucaucucuuuuucuuuuucguugguguaaagccaacacccugucuaaaaaacauaaauuucuuuaaucauuuugccucuuuucucugugcuucaauuaauaaaaaauggaaagaaccuagaucuaaaaaaaaaaaaaaaaaaaaaaaaaaaaaaaaaaaaaaaaaaaaaaaaaaaaaaaaaaaaaaaaugcaucccccccccccccccccccccccccccccccaaaggcucuuuucagagccaccagaauu

SEQ ID NO: 1344 - RNA, 1274 nt, Artificial Sequence
  mRNA Design i-2 (A64-N5-C30-hSL-N5) comprising derived and/or modified sequence from Pf(3D7)__XP_001351122.1__HsALB_Pf-CSP(98-374) (opt3)
aggagaggcgcugccuacggagguggcagccaucuccuucucggcaucaagcuuaccaugaagugggugaccuucaucagccugcucuuucuuuucuccucugccuacucagcugacggcaaccccgauccuaaugcaaacccaaaugucgacccgaacgccaaucccaacguugauccuaaugcgaacccaaauguggaccccaacgcuaauccuaacgccaauccaaacgcaaaucccaacgccaacccuaaugcuaacccaaaugcaaacccgaaugccaaccccaaugcuaacccuaaugccaacccaaaugcgaaccccaaugcaaacccuaaugccaacccaaacgcuaaucccaacgccaauccgaacgcaaauccuaacgcuaaucccaacgccaauccaaacguagauccuaaugcgaaccccaaugccaacccaaaugcaaaccccaacgcuaauccuaacgccaauccaaacgcuaauccgaacgccaaucccaacgcaaauccuaacgccaauccaaacgcuaaucccaacgcgaauccuaacgcaaacccaaaugccaaccccaaugcuaacccgaaugccaacccuaaugcaaacccaaaugccaaccccaaugcuaacccuaauaaaaacaaucaggggaacggacaaggucacaauaugcccaacgacccaaacagaaauguggaugagaacgccaaugcaaacagugcggucaagaauaacaauaacgaggaaccuagcgacaaacauauuaaggaauaucugaauaaaauacagaacuccuugucuacagaguggucgcccugcucagugacuuguggcaaugggauccagguuaggauuaagccaggaagcgcuaacaagccgaaagaugaauuagacuacgccaaugauaucgagaagaaaauuugcaagauggagaaauguugaggacuagugcaucacauuuaaaagcaucucagccuaccaugagaauaagagaaagaaaaugaagaucaauagcuuauucaucucuuuuucuuuuucguugguguaaagccaacacccugucuaaaaaacauaaauuucuuuaaucauuuugccucuuuucucugugcuucaauuaauaaaaaauggaaagaaccuagaucuaaaaaaaaaaaaaaaaaaaaaaaaaaaaaaaaaaaaaaaaaaaaaaaaaaaaaaaaaaaaaaaaugcaucccccccccccccccccccccccccccccccaaaggcucuuuucagagccaccagaauu

SEQ ID NO: 1345 - RNA, 1343 nt, Artificial Sequence
  mRNA Design i-2 (A64-N5-C30-hSL-N5) comprising derived and/or modified sequence from Pf(3D7)__XP_001351122.1__HsALB_Pf-CSP(98-397) (opt3)
aggagaggcgcugccuacggagguggcagccaucuccuucucggcaucaagcuuaccaugaagugggugaccuucaucagccugcucuuucuuuucuccucugccuacucagcugacggcaaccccgauccuaaugcaaacccaaaugucgacccgaacgccaaucccaacguugauccuaaugcgaacccaaauguggaccccaacgcuaauccuaacgccaauccaaacgcaaaucccaacgccaacccuaaugcuaacccaaaugcaaacccgaaugccaaccccaaugcuaacccuaaugccaacccaaaugcgaaccccaaugcaaacccuaaugccaacccaaacgcuaaucccaacgccaauccgaacgcaaauccuaacgcuaaucccaacgccaauccaaacguagauccuaaugcgaaccccaaugccaacccaaaugcaaaccccaacgcuaauccuaacgccaauccaaacgcuaauccgaacgccaaucccaacgcaaauccuaacgccaauccaaacgcuaaucccaacgcgaauccuaacgcaaacccaaaugccaaccccaaugcuaacccgaaugccaacccuaaugcaaacccaaaugccaaccccaaugcuaacccuaauaaaaacaaucaggggaacggacaaggucacaauaugcccaacgacccaaacagaaauguggaugagaacgccaaugcaaacagugcggucaagaauaacaauaacgaggaaccuagcgacaaacauauuaaggaauaucugaauaaaauacagaacuccuugucuacagaguggucgcccugcucagugacuuguggcaaugggauccagguuaggauuaagccaggaagcgcuaacaagccgaaagaugaauuagacuacgccaaugauaucgagaagaaaauuugcaagauggagaaauguaguuccguguuuaacgucguaaauucuagcaucggccugauaauggugcuauccuuccucuuucugaacugaggacuagugcaucacauuuaaaagcaucucagccuaccaugagaauaagagaaagaaaaugaagaucaauagcuuauucaucucuuuuucuuuuucguugguguaaagccaacacccugucuaaaaaacauaaauuucuuuaaucauuuugccucuuuucucugugcuucaauuaauaaaaaauggaaagaaccuagaucuaaaaaaaaaaaaaaaaaaaaaaaaaaaaaaaaaaaaaaaaaaaaaaaaaaaaaaaaaaaaaaaaugcaucccccccccccccccccccccccccccccccaaaggcucuuuucagagccaccagaauu

SEQ ID NO: 1346 - RNA, 1670 nt, Artificial Sequence
  mRNA Design i-2 (A64-N5-C30-hSL-N5) comprising derived and/or modified sequence from Pf(3D7)__XP_001351122.1__HsALB_Pf-CSP(199-377)_L(PVTN)_HBsAg (opt3)
aggagaggcgcugccuacggagguggcagccaucuccuucucggcaucaagcuuaccaugaagugggugaccuucaucagccugcucuuucuuuucuccucugccuacucagaccccaacgcuaauccuaacgcaaauccaaacgccaauccgaacgcgaaucccaacgcuaauccuaacgccaauccaaacgcaaaucccaacgccaauccuaacgcuaacccaaaugcaaaccccaaugccaacccuaaugcuaacccaaaugccaacccgaaugcgaaccccaaugcaaacccuaaugccaacccaaaugcuaaccccaacgccaauccuaacaaaaauaaccagggcaaugggcaaggacacaacaugccaaaugaucccaacagaaaugucgacgagaacgcaaaugcuaacagugccguuaagaauaacaauaacgaggaaccgagcgauaaacauauuaaggaauaucugaacaaaauacaaaauuccuugucuacagaguggucgccuugcucagugacuugugguaacggcauccagguaaggauuaagcccgggagcgcgaauaagccaaaagacgaauuagauuacgccaacgacaucgagaagaaaauuugcaagauggagaaauguaguuccgugccugucacgaauauggaaaacaucaccucuggauuucugggcccccuacucgugcugcaggcagguuucuuucuucugacacggauauugacuaucccacagagccucgauuccugguggaccucacugaauuuccucgggggaagucccguuugccugggccagaacagccagucuccuacauccaaucacucaccaaccagcuguccgcccauuugcccuggcuaucgcuggauguguuuacgacguuuuaucauuuuccuguuuauccuuuugcugugccuaauauuccuccuggugcuucuggacuaccaggggauguugccagucuguccccucauuccuggaaguacuacaaccaacacggguccaugcaagacuuguaccacacccgcucaaggcaauucuauguuuccguccugcugcuguacuaagccuaccgaugggaacugcacauguaucccaauucccagcucgugggccuucgcuaaauaucugugggagugggccucugugagauuuuccugguuaucacugcucguaccuuucguucagugguucgugggacuuagucccaccgucuggcugagcgcaaucuggaugaugugguacuggggcccauccuuguauucuaucgugagcccuuuuauuccccuacugccaauauucuuuugccucuggguguacaucugaggacuagugcaucacauuuaaaagcaucucagccuaccaugagaauaagagaaagaaaaugaagaucaauagcuuauucaucucuuuuucuuuuucguugguguaaagccaacacccugucuaaaaaacauaaauuucuuuaaucauuuugccucuuuucucugugcuucaauuaauaaaaaauggaaagaaccuagaucuaaaaaaaaaaaaaaaaaaaaaaaaaaaaaaaaaaaaaaaaaaaaaaaaaaaaaaaaaaaaaaaaugcaucccccccccccccccccccccccccccccccaaaggcucuuuucagagccaccagaauu

SEQ ID NO: 1347 - RNA, 1409 nt, Artificial Sequence
  mRNA Design i-2 (A64-N5-C30-hSL-N5) comprising derived and/or modified sequence from Pb(ANKA)__XP_022712148.1__Pb-CSP (opt3)
aggagaggcgcugccuacggagguggcagccaucuccuucucggcaucaagcuuaccaugaagaaaugcaccauccugguggucgccagccuccuucugguuaacuccuuguuacccggcuacgggcagaauaagucuauucaagcucagagaaaccugaaugagcuauguuauaacgaaggaaaugacaacaaacucuaccacgugcuuaauucaaagaacgguaaaauauauaauaggaacacaguaaaucggcugcuggcagaugccccugagggcaagaagaacgaaaagaaaaaugagaaaaucgaacgcaacaauaaguugaaacagccaccgcccccuccaaaccccaacgacccuccacccccuaauccaaacgauccgcccccuccaaaucccaacgacccuccacccccgaauccuaacgaucccccaccucccaaugcgaacgacccacccccuccaaaugcuaacgauccggcacccccuaaugccaacgacccagcucccccuaaugccaacgauccagcacccccgaaugccaacgacccugcuccacccaacgccaaugauccucccccaccuaaccccaaugacccagcgccgccuaacgcaaaugaucccccacccccuaacccaaaugaccccgccccuccgcaggggaacaauaacccacaaccccagccucgaccacagccccagccucaaccgcagccccagccacagccucaaccccagccacagccucguccccaaccacagccgcagccuggaggcaauaacaauaacaagaauaacaacaaugacgauaguuacauucccagcgcugagaagauccucgaguucgugaaacagauuagagacuccaucacugaagaguggucucaaugcaacgucacgugugguucggggauaagggugcggaagcgcaaaggaucaaauaagaaagccgaagaucugacccuggaggacaucgauacagagauuugcaagauggacaaauguagcaguaucuuuaacauuguuuccaauucucucggcuucgugaucuuacugguccuuguguuuuucaacugaggacuagugcaucacauuuaaaagcaucucagccuaccaugagaauaagagaaagaaaaugaagaucaauagcuuauucaucucuuuuucuuuuucguugguguaaagccaacacccugucuaaaaaacauaaauuucuuuaaucauuuugccucuuuucucugugcuucaauuaauaaaaaauggaaagaaccuagaucuaaaaaaaaaaaaaaaaaaaaaaaaaaaaaaaaaaaaaaaaaaaaaaaaaaaaaaaaaaaaaaaaugcaucccccccccccccccccccccccccccccccaaaggcucuuuucagagccaccagaauu

SEQ ID NO: 1348 - RNA, 1574 nt, Artificial Sequence
  mRNA Design i-2 (A64-N5-C30-hSL-N5) comprising derived and/or modified sequence from Pb(ANKA)__XP_022712148.1__Pb-CSP_L(G4SG4)_TM domain HA (opt3)
aggagaggcgcugccuacggagguggcagccaucuccuucucggcaucaagcuuaccaugaagaaaugcaccauccugguggucgccagccuccuucugguuaacuccuuguuacccggcuacgggcagaauaagucuauucaagcucagagaaaccugaaugagcuauguuauaacgaaggaaaugacaacaaacucuaccacgugcuuaauucaaagaacgguaaaauauauaauaggaacacaguaaaucggcugcuggcagaugccccugagggcaagaagaacgaaaagaaaaaugagaaaaucgaacgcaacaauaaguugaaacagccaccgcccccuccaaaccccaacgacccuccacccccuaauccaaacgauccgcccccuccaaaucccaacgacccuccacccccgaauccuaacgaucccccaccucccaaugcgaacgacccacccccuccaaaugcuaacgauccggcacccccuaaugccaacgacccagcucccccuaaugccaacgauccagcacccccgaaugccaacgacccugcuccacccaacgccaaugauccucccccaccuaaccccaaugacccagcgccgccuaacgcaaaugaucccccacccccuaacccaaaugaccccgccccuccgcaggggaacaauaacccacaaccccagccucgaccacagccccagccucaaccgcagccccagccacagccucaaccccagccacagccucguccccaaccacagccgcagccuggaggcaauaacaauaacaagaauaacaacaaugacgauaguuacauucccagcgcugagaagauccucgaguucgugaaacagauuagagacuccaucacugaagaguggucucaaugcaacgucacgugugguucggggauaagggugcggaagcgcaaaggaucaaauaagaaagccgaagaucugacccuggaggacaucgauacagagauuugcaagauggacaaauguagcaguaucuuuaacauuguuuccaauucucucggcuucgugaucuuacugguccuuguguuuuucaacggcgggggagguagcggcgggggaggcaaguuggaauccacuagaauauaucagauucuggcaaucuacucaaccguagcuaguagccuaguucucguggucucucugggugccauuuccuuuuggaugugcucaaaugggagccuucaguguaggaucugcaucugaggacuagugcaucacauuuaaaagcaucucagccuaccaugagaauaagagaaagaaaaugaagaucaauagcuuauucaucucuuuuucuuuuucguugguguaaagccaacacccugucuaaaaaacauaaauuucuuuaaucauuuugccucuuuucucugugcuucaauuaauaaaaaauggaaagaaccuagaucuaaaaaaaaaaaaaaaaaaaaaaaaaaaaaaaaaaaaaaaaaaaaaaaaaaaaaaaaaaaaaaaaugcaucccccccccccccccccccccccccccccccaaaggcucuuuucagagccaccagaauu

SEQ ID NO: 1349 - RNA, 1394 nt, Artificial Sequence
  mRNA Design i-2 (A64-N5-C30-hSL-N5) comprising derived and/or modified sequence from Pb(ANKA)__XP_022712148.1__HsALB_Pb-CSP(24-340) (opt3)
aggagaggcgcugccuacggagguggcagccaucuccuucucggcaucaagcuuaccaugaagugggugaccuucaucagccugcucuuucuuuucuccucugccuacucacagaacaaaaguauucaagcucagagaaaucugaacgaguugugcuauaaugaaggcaacgacaauaaguuauaccacguccugaacagcaaaaaugggaagauauauaacaggaauacaguuaaccggcuacucgcagaugcccccgaggguaaaaagaaugaaaagaaaaacgagaagaucgaacgcaauaacaaacugaagcagccuccaccgcccccuaauccaaacgaucccccuccacccaacccuaaugacccaccgcccccuaacccaaaugaucccccuccacccaacccgaaugacccucccccaccuaacgcgaaugaucccccacccccuaacgcuaaugacccagccccgcccaacgcaaaugacccugccccacccaacgcuaaugauccugcaccacccaacgccaaugacccggcuccuccaaacgccaacgaucccccucccccaaauccuaacgaccccgcgccaccgaaugcaaacgauccucccccacccaauccuaacgacccagcucccccucagggaaauaacaauccgcaaccacagccccgaccucagccacagccccaaccucagccgcagccccagccacaaccucagccccagccacguccucaaccccagccacagccgggcgggaacaauaacaauaaaaacaauaacaacgacgauuccuacauuccuucugccgagaagauccuugaguuugugaagcagauuagagacucgaucacugaagaguggucacaauguaauguaacgugcggaagcggcauaagggugcggaaacgcaaggguaguaacaaaaaggccgaagaucugaccuuggaggacaucgauacagagauuuguaaaauggacaagugcuccucuaucuucaauauugucagcaacucccucggguuugugauccugcugguucucguguucuuuaauugaggacuagugcaucacauuuaaaagcaucucagccuaccaugagaauaagagaaagaaaaugaagaucaauagcuuauucaucucuuuuucuuuuucguugguguaaagccaacacccugucuaaaaaacauaaauuucuuuaaucauuuugccucuuuucucugugcuucaauuaauaaaaaauggaaagaaccuagaucuaaaaaaaaaaaaaaaaaaaaaaaaaaaaaaaaaaaaaaaaaaaaaaaaaaaaaaaaaaaaaaaaugcaucccccccccccccccccccccccccccccccaaaggcucuuuucagagccaccagaauu

SEQ ID NO: 1350 - RNA, 1412 nt, Artificial Sequence
  mRNA Design i-2 (A64-N5-C30-hSL-N5) comprising derived and/or modified sequence from Pb(ANKA)__XP_022712148.1__HsIns-iso1_Pb-CSP(24-340) (opt3)
aggagaggcgcugccuacggagguggcagccaucuccuucucggcaucaagcuuaccauggcccuguggaugagacuccuuccccuguuggcuuuacuggcacuauggggcccugacccagccgcggcucagaacaagagcauccaagcccagaggaaucucaacgagcugugcuacaaugaagggaacgauaauaaacuuuaucacguucugaacuccaagaauggaaaaauuuacaaccggaauaccgucaaccgcuugcucgcagacgccccggaggguaagaaaaaugaaaagaagaacgagaaaauagaacgaaauaacaagcugaaacagcccccuccacccccuaauccaaacgaucccccuccaccgaaccccaaugacccuccacccccuaacccaaaugaucccccgccucccaacccaaaugacccucccccacccaacgcuaaugauccuccaccgcccaacgcaaaugacccugccccacccaacgcuaaugauccugccccacccaacgcgaaugacccggcaccuccaaacgccaaugaucccgcuccucccaacgccaacgacccaccucccccaaauccgaacgauccugcacccccaaaugcuaacgaucccccuccacccaauccuaacgacccggccccaccccagggcaauaacaauccucaaccacagccccguccucagccgcagccccaaccacagccucagccccagccacaaccucagccccagccaagaccgcaaccucagccccagccagggggaaacaauaacaauaagaacaauaacaacgacgacucuuauauccccucagcggagaaaauucuggaguucguuaagcagaucagggauaguauuacagaagaguggagccaauguaaugugacuugcggcuccgguauccggguacgcaagagaaaagggucuaacaagaaagccgaagaccucacguuagaggauauagacaccgagaucuguaagauggauaaaugcucgucaauuuuuaauaucgugagcaacagucugggauucgucauucuuuuggugcugguguuuuucaauugaggacuagugcaucacauuuaaaagcaucucagccuaccaugagaauaagagaaagaaaaugaagaucaauagcuuauucaucucuuuuucuuuuucguugguguaaagccaacacccugucuaaaaaacauaaauuucuuuaaucauuuugccucuuuucucugugcuucaauuaauaaaaaauggaaagaaccuagaucuaaaaaaaaaaaaaaaaaaaaaaaaaaaaaaaaaaaaaaaaaaaaaaaaaaaaaaaaaaaaaaaaugcaucccccccccccccccccccccccccccccccaaaggcucuuuucagagccaccagaauu

SEQ ID NO: 1351 - RNA, 1391 nt, Artificial Sequence
  mRNA Design i-2 (A64-N5-C30-hSL-N5) comprising derived and/or modified sequence from Pb(ANKA)__XP_022712148.1__HsSPARC_Pb-CSP(24-340) (opt3)
aggagaggcgcugccuacggagguggcagccaucuccuucucggcaucaagcuuaccaugagagccuggaucuucuuucugcucugccuugcuggcagggcacuggcccagaacaagagcauucaagcgcagcggaauuugaacgaguuauguuacaaugaagggaacgacaauaaacuguaucacguucuaaacuccaagaauggaaaaauauacaaccgcaauaccgucaaccgacuccuggcugaugcccccgaggguaagaaaaaugaaaagaagaacgagaaaaucgaacguaauaacaaacuuaagcagccuccaccgcccccuaauccaaacgacccgccuccacccaacccuaaugauccaccgcccccuaacccaaaugaucccccuccacccaacccgaaugacccucccccaccuaacgcaaaugaucccccacccccuaacgccaaugacccagcuccgcccaacgcaaaugacccugccccacccaacgcuaaugauccugccccacccaacgcgaaugacccggcaccuccaaacgccaacgaucccccucccccaaauccuaacgaccccgcuccaccgaaugccaacgauccucccccacccaauccuaacgacccagcacccccucagggcaauaacaauccgcaaccacagcccagaccucagccacagccccaaccucagccgcagccccagccacaaccucagccccagccaaggccucaaccccagccacagcccgggggaaacaauaacaauaagaacaauaacaacgacgauucuuauauuccuucagcugagaaaauccuggaguucguuaagcagauucgggacaguaucacagaagaguggagccaaugcaaugugacuuguggcuccgguauacgcguaagaaagaggaaagggucuaacaagaaagccgaagauuugacgcucgaggacaucgauaccgagauuugcaagauggacaaauguucgucaaucuuuaauauugugagcaacagucugggauucgucauccugcucguguuaguguuuuucaauugaggacuagugcaucacauuuaaaagcaucucagccuaccaugagaauaagagaaagaaaaugaagaucaauagcuuauucaucucuuuuucuuuuucguugguguaaagccaacacccugucuaaaaaacauaaauuucuuuaaucauuuugccucuuuucucugugcuucaauuaauaaaaaauggaaagaaccuagaucuaaaaaaaaaaaaaaaaaaaaaaaaaaaaaaaaaaaaaaaaaaaaaaaaaaaaaaaaaaaaaaaaugcaucccccccccccccccccccccccccccccccaaaggcucuuuucagagccaccagaauu

SEQ ID NO: 1352 - RNA, 1394 nt, Artificial Sequence
  mRNA Design i-2 (A64-N5-C30-hSL-N5) comprising derived and/or modified sequence from Pb(ANKA)__XP_022712148.1__IgE_Pb-CSP(24-340) (opt3)
aggagaggcgcugccuacggagguggcagccaucuccuucucggcaucaagcuuaccauggacuggaccuggauccuguuccucguggccgcugcaacaagaguccacagccagaacaaguccauucaagcccagaggaaucuuaacgagcugugcuacaaugaaggcaacgauaauaaauuguaucauguuuuaaacucuaagaaugggaaaauauacaaccggaauacugugaaccgccugcuagcggacgcucccgagggaaagaaaaaugaaaagaagaacgagaaaaucgaacgaaauaacaagcucaaacagccuccaccgcccccuaauccaaacgaucccccuccacccaacccuaaugacccaccgcccccuaacccaaaugaucccccuccacccaacccgaaugacccucccccaccuaacgccaaugaucccccacccccuaacgcaaaugacccagccccgcccaacgcuaaugauccugcaccacccaacgccaaugacccugcuccacccaacgccaaugauccggcgccuccaaacgcaaacgaucccccucccccaaauccuaacgaccccgccccaccgaaugcuaacgacccucccccacccaauccuaacgacccagcacccccucaggguaauaacaauccgcaaccacagccccguccucagccacagccccaaccucagccgcagccccagccacaaccucagccccagccaagaccucaaccccagccacagccgggcgggaacaauaacaauaagaacaauaacaacgaugacucauauauuccuagugccgagaaaauccuggaguuuguaaagcagauuagggauagcaucacggaagaguggucccaauguaaugugaccugcggaucuggcauacggguccgcaagagaaaagguucgaacaagaaagcugaagaccuuacacuggaggauaucgacacugagauuuguaagauggauaaaugcucaagcaucuucaauauugugaguaacuccuugggguuuguuauccuccuggugcuggucuucuuuaauugaggacuagugcaucacauuuaaaagcaucucagccuaccaugagaauaagagaaagaaaaugaagaucaauagcuuauucaucucuuuuucuuuuucguugguguaaagccaacacccugucuaaaaaacauaaauuucuuuaaucauuuugccucuuuucucugugcuucaauuaauaaaaaauggaaagaaccuagaucuaaaaaaaaaaaaaaaaaaaaaaaaaaaaaaaaaaaaaaaaaaaaaaaaaaaaaaaaaaaaaaaaugcaucccccccccccccccccccccccccccccccaaaggcucuuuucagagccaccagaauu

SEQ ID NO: 1353 - RNA, 1580 nt, Artificial Sequence
  mRNA Design i-2 (A64-N5-C30-hSL-N5) comprising derived and/or modified sequence from Pf(3D7)__XP_001351122.1__Pf-CSP (opt4)
aggagaggcgcugccuacggagguggcagccaucuccuucucggcaucaagcuuaccaugaugagaaagcuggccauccugagcgugagcagcuuccuguucguggaggcccuguuccaggaguaccagugcuacggcagcagcagcaacaccagagugcugaacgagcugaacuacgacaacgccggcaccaaccuguacaacgagcuggagaugaacuacuacggcaagcaggagaacugguacagccugaagaagaacagcagaagccugggcgagaacgacgacggcaacaacgaggacaacgagaagcugagaaagcccaagcacaagaagcugaagcagcccgccgacggcaaccccgaccccaacgccaaccccaacguggaccccaacgccaaccccaacguggaccccaacgccaaccccaacguggaccccaacgccaaccccaacgccaaccccaacgccaaccccaacgccaaccccaacgccaaccccaacgccaaccccaacgccaaccccaacgccaaccccaacgccaaccccaacgccaaccccaacgccaaccccaacgccaaccccaacgccaaccccaacgccaaccccaacgccaaccccaacgccaaccccaacgccaaccccaacguggaccccaacgccaaccccaacgccaaccccaacgccaaccccaacgccaaccccaacgccaaccccaacgccaaccccaacgccaaccccaacgccaaccccaacgccaaccccaacgccaaccccaacgccaaccccaacgccaaccccaacgccaaccccaacgccaaccccaacgccaaccccaacgccaaccccaacgccaaccccaacgccaaccccaacaagaacaaccagggcaacggccagggccacaacaugcccaacgaccccaacagaaacguggacgagaacgccaacgccaacagcgccgugaagaacaacaacaacgaggagcccagcgacaagcacaucaaggaguaccugaacaagauccagaacagccugagcaccgaguggagccccugcagcgugaccugcggcaacggcauccaggugagaaucaagcccggcagcgccaacaagcccaaggacgagcuggacuacgccaacgacaucgagaagaagaucugcaagauggagaagugcagcagcguguucaacguggugaacagcagcaucggccugaucauggugcugagcuuccuguuccugaacugaggacuagugcaucacauuuaaaagcaucucagccuaccaugagaauaagagaaagaaaaugaagaucaauagcuuauucaucucuuuuucuuuuucguugguguaaagccaacacccugucuaaaaaacauaaauuucuuuaaucauuuugccucuuuucucugugcuucaauuaauaaaaaauggaaagaaccuagaucuaaaaaaaaaaaaaaaaaaaaaaaaaaaaaaaaaaaaaaaaaaaaaaaaaaaaaaaaaaaaaaaaugcaucccccccccccccccccccccccccccccccaaaggcucuuuucagagccaccagaauu

SEQ ID NO: 1354 - RNA, 1511 nt, Artificial Sequence
  mRNA Design i-2 (A64-N5-C30-hSL-N5) comprising derived and/or modified sequence from Pf(3D7)__XP_001351122.1__Pf-CSP(1-374) (opt4)
aggagaggcgcugccuacggagguggcagccaucuccuucucggcaucaagcuuaccaugaugagaaagcuggccauccugagcgugagcagcuuccuguucguggaggcccuguuccaggaguaccagugcuacggcagcagcagcaacaccagagugcugaacgagcugaacuacgacaacgccggcaccaaccuguacaacgagcuggagaugaacuacuacggcaagcaggagaacugguacagccugaagaagaacagcagaagccugggcgagaacgacgacggcaacaacgaggacaacgagaagcugagaaagcccaagcacaagaagcugaagcagcccgccgacggcaaccccgaccccaacgccaaccccaacguggaccccaacgccaaccccaacguggaccccaacgccaaccccaacguggaccccaacgccaaccccaacgccaaccccaacgccaaccccaacgccaaccccaacgccaaccccaacgccaaccccaacgccaaccccaacgccaaccccaacgccaaccccaacgccaaccccaacgccaaccccaacgccaaccccaacgccaaccccaacgccaaccccaacgccaaccccaacgccaaccccaacgccaaccccaacguggaccccaacgccaaccccaacgccaaccccaacgccaaccccaacgccaaccccaacgccaaccccaacgccaaccccaacgccaaccccaacgccaaccccaacgccaaccccaacgccaaccccaacgccaaccccaacgccaaccccaacgccaaccccaacgccaaccccaacgccaaccccaacgccaaccccaacgccaaccccaacgccaaccccaacaagaacaaccagggcaacggccagggccacaacaugcccaacgaccccaacagaaacguggacgagaacgccaacgccaacagcgccgugaagaacaacaacaacgaggagcccagcgacaagcacaucaaggaguaccugaacaagauccagaacagccugagcaccgaguggagccccugcagcgugaccugcggcaacggcauccaggugagaaucaagcccggcagcgccaacaagcccaaggacgagcuggacuacgccaacgacaucgagaagaagaucugcaagauggagaagugcugaggacuagugcaucacauuuaaaagcaucucagccuaccaugagaauaagagaaagaaaaugaagaucaauagcuuauucaucucuuuuucuuuuucguugguguaaagccaacacccugucuaaaaaacauaaauuucuuuaaucauuuugccucuuuucucugugcuucaauuaauaaaaaauggaaagaaccuagaucuaaaaaaaaaaaaaaaaaaaaaaaaaaaaaaaaaaaaaaaaaaaaaaaaaaaaaaaaaaaaaaaaugcaucccccccccccccccccccccccccccccccaaaggcucuuuucagagccaccagaauu

SEQ ID NO: 1355 - RNA, 1364 nt, Artificial Sequence
  mRNA Design i-2 (A64-N5-C30-hSL-N5) comprising derived and/or modified sequence from Pf(3D7)__XP_001351122.1__Pf-CSP(1-325) (opt4)
aggagaggcgcugccuacggagguggcagccaucuccuucucggcaucaagcuuaccaugaugagaaagcuggccauccugagcgugagcagcuuccuguucguggaggcccuguuccaggaguaccagugcuacggcagcagcagcaacaccagagugcugaacgagcugaacuacgacaacgccggcaccaaccuguacaacgagcuggagaugaacuacuacggcaagcaggagaacugguacagccugaagaagaacagcagaagccugggcgagaacgacgacggcaacaacgaggacaacgagaagcugagaaagcccaagcacaagaagcugaagcagcccgccgacggcaaccccgaccccaacgccaaccccaacguggaccccaacgccaaccccaacguggaccccaacgccaaccccaacguggaccccaacgccaaccccaacgccaaccccaacgccaaccccaacgccaaccccaacgccaaccccaacgccaaccccaacgccaaccccaacgccaaccccaacgccaaccccaacgccaaccccaacgccaaccccaacgccaaccccaacgccaaccccaacgccaaccccaacgccaaccccaacgccaaccccaacgccaaccccaacguggaccccaacgccaaccccaacgccaaccccaacgccaaccccaacgccaaccccaacgccaaccccaacgccaaccccaacgccaaccccaacgccaaccccaacgccaaccccaacgccaaccccaacgccaaccccaacgccaaccccaacgccaaccccaacgccaaccccaacgccaaccccaacgccaaccccaacgccaaccccaacgccaaccccaacaagaacaaccagggcaacggccagggccacaacaugcccaacgaccccaacagaaacguggacgagaacgccaacgccaacagcgccgugaagaacaacaacaacgaggagcccagcgacaagcacaucaaggaguaccugaacaagauccagaacugaggacuagugcaucacauuuaaaagcaucucagccuaccaugagaauaagagaaagaaaaugaagaucaauagcuuauucaucucuuuuucuuuuucguugguguaaagccaacacccugucuaaaaaacauaaauuucuuuaaucauuuugccucuuuucucugugcuucaauuaauaaaaaauggaaagaaccuagaucuaaaaaaaaaaaaaaaaaaaaaaaaaaaaaaaaaaaaaaaaaaaaaaaaaaaaaaaaaaaaaaaaugcaucccccccccccccccccccccccccccccccaaaggcucuuuucagagccaccagaauu

SEQ ID NO: 1356 - RNA, 1580 nt, Artificial Sequence
  mRNA Design i-2 (A64-N5-C30-hSL-N5) comprising derived and/or modified sequence from Pf(3D7)__XP_001351122.1__HsALB_Pf-CSP(19-397) (opt4)
aggagaggcgcugccuacggagguggcagccaucuccuucucggcaucaagcuuaccaugaagugggugaccuucaucagccugcuguuccuguucagcagcgccuacagccuguuccaggaguaccagugcuacggcagcagcagcaacaccagagugcugaacgagcugaacuacgacaacgccggcaccaaccuguacaacgagcuggagaugaacuacuacggcaagcaggagaacugguacagccugaagaagaacagcagaagccugggcgagaacgacgacggcaacaacgaggacaacgagaagcugagaaagcccaagcacaagaagcugaagcagcccgccgacggcaaccccgaccccaacgccaaccccaacguggaccccaacgccaaccccaacguggaccccaacgccaaccccaacguggaccccaacgccaaccccaacgccaaccccaacgccaaccccaacgccaaccccaacgccaaccccaacgccaaccccaacgccaaccccaacgccaaccccaacgccaaccccaacgccaaccccaacgccaaccccaacgccaaccccaacgccaaccccaacgccaaccccaacgccaaccccaacgccaaccccaacgccaaccccaacguggaccccaacgccaaccccaacgccaaccccaacgccaaccccaacgccaaccccaacgccaaccccaacgccaaccccaacgccaaccccaacgccaaccccaacgccaaccccaacgccaaccccaacgccaaccccaacgccaaccccaacgccaaccccaacgccaaccccaacgccaaccccaacgccaaccccaacgccaaccccaacgccaaccccaacaagaacaaccagggcaacggccagggccacaacaugcccaacgaccccaacagaaacguggacgagaacgccaacgccaacagcgccgugaagaacaacaacaacgaggagcccagcgacaagcacaucaaggaguaccugaacaagauccagaacagccugagcaccgaguggagccccugcagcgugaccugcggcaacggcauccaggugagaaucaagcccggcagcgccaacaagcccaaggacgagcuggacuacgccaacgacaucgagaagaagaucugcaagauggagaagugcagcagcguguucaacguggugaacagcagcaucggccugaucauggugcugagcuuccuguuccugaacugaggacuagugcaucacauuuaaaagcaucucagccuaccaugagaauaagagaaagaaaaugaagaucaauagcuuauucaucucuuuuucuuuuucguugguguaaagccaacacccugucuaaaaaacauaaauuucuuuaaucauuuugccucuuuucucugugcuucaauuaauaaaaaauggaaagaaccuagaucuaaaaaaaaaaaaaaaaaaaaaaaaaaaaaaaaaaaaaaaaaaaaaaaaaaaaaaaaaaaaaaaaugcaucccccccccccccccccccccccccccccccaaaggcucuuuucagagccaccagaauu

SEQ ID NO: 1357 - RNA, 1598 nt, Artificial Sequence
  mRNA Design i-2 (A64-N5-C30-hSL-N5) comprising derived and/or modified sequence from Pf(3D7)__XP_001351122.1__HsIns-iso1_Pf-CSP(19-397) (opt4)
aggagaggcgcugccuacggagguggcagccaucuccuucucggcaucaagcuuaccauggcccuguggaugagacugcugccccugcuggcccugcuggcccuguggggccccgaccccgccgccgcccuguuccaggaguaccagugcuacggcagcagcagcaacaccagagugcugaacgagcugaacuacgacaacgccggcaccaaccuguacaacgagcuggagaugaacuacuacggcaagcaggagaacugguacagccugaagaagaacagcagaagccugggcgagaacgacgacggcaacaacgaggacaacgagaagcugagaaagcccaagcacaagaagcugaagcagcccgccgacggcaaccccgaccccaacgccaaccccaacguggaccccaacgccaaccccaacguggaccccaacgccaaccccaacguggaccccaacgccaaccccaacgccaaccccaacgccaaccccaacgccaaccccaacgccaaccccaacgccaaccccaacgccaaccccaacgccaaccccaacgccaaccccaacgccaaccccaacgccaaccccaacgccaaccccaacgccaaccccaacgccaaccccaacgccaaccccaacgccaaccccaacgccaaccccaacguggaccccaacgccaaccccaacgccaaccccaacgccaaccccaacgccaaccccaacgccaaccccaacgccaaccccaacgccaaccccaacgccaaccccaacgccaaccccaacgccaaccccaacgccaaccccaacgccaaccccaacgccaaccccaacgccaaccccaacgccaaccccaacgccaaccccaacgccaaccccaacgccaaccccaacaagaacaaccagggcaacggccagggccacaacaugcccaacgaccccaacagaaacguggacgagaacgccaacgccaacagcgccgugaagaacaacaacaacgaggagcccagcgacaagcacaucaaggaguaccugaacaagauccagaacagccugagcaccgaguggagccccugcagcgugaccugcggcaacggcauccaggugagaaucaagcccggcagcgccaacaagcccaaggacgagcuggacuacgccaacgacaucgagaagaagaucugcaagauggagaagugcagcagcguguucaacguggugaacagcagcaucggccugaucauggugcugagcuuccuguuccugaacugaggacuagugcaucacauuuaaaagcaucucagccuaccaugagaauaagagaaagaaaaugaagaucaauagcuuauucaucucuuuuucuuuuucguugguguaaagccaacacccugucuaaaaaacauaaauuucuuuaaucauuuugccucuuuucucugugcuucaauuaauaaaaaauggaaagaaccuagaucuaaaaaaaaaaaaaaaaaaaaaaaaaaaaaaaaaaaaaaaaaaaaaaaaaaaaaaaaaaaaaaaaugcaucccccccccccccccccccccccccccccccaaaggcucuuuucagagccaccagaauu

SEQ ID NO: 1358 - RNA, 1577 nt, Artificial Sequence
  mRNA Design i-2 (A64-N5-C30-hSL-N5) comprising derived and/or modified sequence from Pf(3D7)__XP_001351122.1__HsSPARC_Pf-CSP(19-397) (opt4)
aggagaggcgcugccuacggagguggcagccaucuccuucucggcaucaagcuuaccaugagagccuggaucuucuuccugcugugccuggccggcagagcccuggcccuguuccaggaguaccagugcuacggcagcagcagcaacaccagagugcugaacgagcugaacuacgacaacgccggcaccaaccuguacaacgagcuggagaugaacuacuacggcaagcaggagaacugguacagccugaagaagaacagcagaagccugggcgagaacgacgacggcaacaacgaggacaacgagaagcugagaaagcccaagcacaagaagcugaagcagcccgccgacggcaaccccgaccccaacgccaaccccaacguggaccccaacgccaaccccaacguggaccccaacgccaaccccaacguggaccccaacgccaaccccaacgccaaccccaacgccaaccccaacgccaaccccaacgccaaccccaacgccaaccccaacgccaaccccaacgccaaccccaacgccaaccccaacgccaaccccaacgccaaccccaacgccaaccccaacgccaaccccaacgccaaccccaacgccaaccccaacgccaaccccaacgccaaccccaacguggaccccaacgccaaccccaacgccaaccccaacgccaaccccaacgccaaccccaacgccaaccccaacgccaaccccaacgccaaccccaacgccaaccccaacgccaaccccaacgccaaccccaacgccaaccccaacgccaaccccaacgccaaccccaacgccaaccccaacgccaaccccaacgccaaccccaacgccaaccccaacgccaaccccaacaagaacaaccagggcaacggccagggccacaacaugcccaacgaccccaacagaaacguggacgagaacgccaacgccaacagcgccgugaagaacaacaacaacgaggagcccagcgacaagcacaucaaggaguaccugaacaagauccagaacagccugagcaccgaguggagccccugcagcgugaccugcggcaacggcauccaggugagaaucaagcccggcagcgccaacaagcccaaggacgagcuggacuacgccaacgacaucgagaagaagaucugcaagauggagaagugcagcagcguguucaacguggugaacagcagcaucggccugaucauggugcugagcuuccuguuccugaacugaggacuagugcaucacauuuaaaagcaucucagccuaccaugagaauaagagaaagaaaaugaagaucaauagcuuauucaucucuuuuucuuuuucguugguguaaagccaacacccugucuaaaaaacauaaauuucuuuaaucauuuugccucuuuucucugugcuucaauuaauaaaaaauggaaagaaccuagaucuaaaaaaaaaaaaaaaaaaaaaaaaaaaaaaaaaaaaaaaaaaaaaaaaaaaaaaaaaaaaaaaaugcaucccccccccccccccccccccccccccccccaaaggcucuuuucagagccaccagaauu

SEQ ID NO: 1359 - RNA, 1580 nt, Artificial Sequence
  mRNA Design i-2 (A64-N5-C30-hSL-N5) comprising derived and/or modified sequence from Pf(3D7)__XP_001351122.1__IgE_Pf-CSP(19-397) (opt4)
aggagaggcgcugccuacggagguggcagccaucuccuucucggcaucaagcuuaccauggacuggaccuggauccuguuccugguggccgccgccaccagagugcacagccuguuccaggaguaccagugcuacggcagcagcagcaacaccagagugcugaacgagcugaacuacgacaacgccggcaccaaccuguacaacgagcuggagaugaacuacuacggcaagcaggagaacugguacagccugaagaagaacagcagaagccugggcgagaacgacgacggcaacaacgaggacaacgagaagcugagaaagcccaagcacaagaagcugaagcagcccgccgacggcaaccccgaccccaacgccaaccccaacguggaccccaacgccaaccccaacguggaccccaacgccaaccccaacguggaccccaacgccaaccccaacgccaaccccaacgccaaccccaacgccaaccccaacgccaaccccaacgccaaccccaacgccaaccccaacgccaaccccaacgccaaccccaacgccaaccccaacgccaaccccaacgccaaccccaacgccaaccccaacgccaaccccaacgccaaccccaacgccaaccccaacgccaaccccaacguggaccccaacgccaaccccaacgccaaccccaacgccaaccccaacgccaaccccaacgccaaccccaacgccaaccccaacgccaaccccaacgccaaccccaacgccaaccccaacgccaaccccaacgccaaccccaacgccaaccccaacgccaaccccaacgccaaccccaacgccaaccccaacgccaaccccaacgccaaccccaacgccaaccccaacaagaacaaccagggcaacggccagggccacaacaugcccaacgaccccaacagaaacguggacgagaacgccaacgccaacagcgccgugaagaacaacaacaacgaggagcccagcgacaagcacaucaaggaguaccugaacaagauccagaacagccugagcaccgaguggagccccugcagcgugaccugcggcaacggcauccaggugagaaucaagcccggcagcgccaacaagcccaaggacgagcuggacuacgccaacgacaucgagaagaagaucugcaagauggagaagugcagcagcguguucaacguggugaacagcagcaucggccugaucauggugcugagcuuccuguuccugaacugaggacuagugcaucacauuuaaaagcaucucagccuaccaugagaauaagagaaagaaaaugaagaucaauagcuuauucaucucuuuuucuuuuucguugguguaaagccaacacccugucuaaaaaacauaaauuucuuuaaucauuuugccucuuuucucugugcuucaauuaauaaaaaauggaaagaaccuagaucuaaaaaaaaaaaaaaaaaaaaaaaaaaaaaaaaaaaaaaaaaaaaaaaaaaaaaaaaaaaaaaaaugcaucccccccccccccccccccccccccccccccaaaggcucuuuucagagccaccagaauu

SEQ ID NO: 1360 - RNA, 1745 nt, Artificial Sequence
  mRNA Design i-2 (A64-N5-C30-hSL-N5) comprising derived and/or modified sequence from Pf(3D7)__XP_001351122.1__Pf-CSP_L(G4SG4)_TM domain HA (opt4)
aggagaggcgcugccuacggagguggcagccaucuccuucucggcaucaagcuuaccaugaugagaaagcuggccauccugagcgugagcagcuuccuguucguggaggcccuguuccaggaguaccagugcuacggcagcagcagcaacaccagagugcugaacgagcugaacuacgacaacgccggcaccaaccuguacaacgagcuggagaugaacuacuacggcaagcaggagaacugguacagccugaagaagaacagcagaagccugggcgagaacgacgacggcaacaacgaggacaacgagaagcugagaaagcccaagcacaagaagcugaagcagcccgccgacggcaaccccgaccccaacgccaaccccaacguggaccccaacgccaaccccaacguggaccccaacgccaaccccaacguggaccccaacgccaaccccaacgccaaccccaacgccaaccccaacgccaaccccaacgccaaccccaacgccaaccccaacgccaaccccaacgccaaccccaacgccaaccccaacgccaaccccaacgccaaccccaacgccaaccccaacgccaaccccaacgccaaccccaacgccaaccccaacgccaaccccaacgccaaccccaacguggaccccaacgccaaccccaacgccaaccccaacgccaaccccaacgccaaccccaacgccaaccccaacgccaaccccaacgccaaccccaacgccaaccccaacgccaaccccaacgccaaccccaacgccaaccccaacgccaaccccaacgccaaccccaacgccaaccccaacgccaaccccaacgccaaccccaacgccaaccccaacgccaaccccaacaagaacaaccagggcaacggccagggccacaacaugcccaacgaccccaacagaaacguggacgagaacgccaacgccaacagcgccgugaagaacaacaacaacgaggagcccagcgacaagcacaucaaggaguaccugaacaagauccagaacagccugagcaccgaguggagccccugcagcgugaccugcggcaacggcauccaggugagaaucaagcccggcagcgccaacaagcccaaggacgagcuggacuacgccaacgacaucgagaagaagaucugcaagauggagaagugcagcagcguguucaacguggugaacagcagcaucggccugaucauggugcugagcuuccuguuccugaacggcggcggcggcagcggcggcggcggcaagcuggagagcaccagaaucuaccagauccuggccaucuacagcaccguggccagcagccuggugcugguggugagccugggcgccaucagcuucuggaugugcagcaacggcagccugcagugcagaaucugcaucugaggacuagugcaucacauuuaaaagcaucucagccuaccaugagaauaagagaaagaaaaugaagaucaauagcuuauucaucucuuuuucuuuuucguugguguaaagccaacacccugucuaaaaaacauaaauuucuuuaaucauuuugccucuuuucucugugcuucaauuaauaaaaaauggaaagaaccuagaucuaaaaaaaaaaaaaaaaaaaaaaaaaaaaaaaaaaaaaaaaaaaaaaaaaaaaaaaaaaaaaaaaugcaucccccccccccccccccccccccccccccccaaaggcucuuuucagagccaccagaauu

SEQ ID NO: 1361 - RNA, 1619 nt, Artificial Sequence
  mRNA Design i-2 (A64-N5-C30-hSL-N5) comprising derived and/or modified sequence from Pf(3D7)__XP_001351122.1__Pf-CSP(199-377)_L(PVTN)_HBsAg (opt4)
aggagaggcgcugccuacggagguggcagccaucuccuucucggcaucaagcuuaccauggaccccaacgccaaccccaacgccaaccccaacgccaaccccaacgccaaccccaacgccaaccccaacgccaaccccaacgccaaccccaacgccaaccccaacgccaaccccaacgccaaccccaacgccaaccccaacgccaaccccaacgccaaccccaacgccaaccccaacgccaaccccaacgccaaccccaacgccaaccccaacgccaaccccaacaagaacaaccagggcaacggccagggccacaacaugcccaacgaccccaacagaaacguggacgagaacgccaacgccaacagcgccgugaagaacaacaacaacgaggagcccagcgacaagcacaucaaggaguaccugaacaagauccagaacagccugagcaccgaguggagccccugcagcgugaccugcggcaacggcauccaggugagaaucaagcccggcagcgccaacaagcccaaggacgagcuggacuacgccaacgacaucgagaagaagaucugcaagauggagaagugcagcagcgugcccgugaccaacauggagaacaucaccagcggcuuccugggcccccugcuggugcugcaggccggcuucuuccugcugaccagaauccugaccaucccccagagccuggacagcugguggaccagccugaacuuccugggcggcagccccgugugccugggccagaacagccagagccccaccagcaaccacagccccaccagcugcccccccaucugccccggcuacagauggaugugccugagaagauucaucaucuuccuguucauccugcugcugugccugaucuuccugcuggugcugcuggacuaccagggcaugcugcccgugugcccccugauccccggcagcaccaccaccaacaccggccccugcaagaccugcaccacccccgcccagggcaacagcauguuccccagcugcugcugcaccaagcccaccgacggcaacugcaccugcauccccauccccagcagcugggccuucgccaaguaccugugggagugggccagcgugagauucagcuggcugagccugcuggugcccuucgugcagugguucgugggccugagccccaccguguggcugagcgccaucuggaugaugugguacuggggccccagccuguacagcaucgugagccccuucaucccccugcugcccaucuucuucugccuguggguguacaucugaggacuagugcaucacauuuaaaagcaucucagccuaccaugagaauaagagaaagaaaaugaagaucaauagcuuauucaucucuuuuucuuuuucguugguguaaagccaacacccugucuaaaaaacauaaauuucuuuaaucauuuugccucuuuucucugugcuucaauuaauaaaaaauggaaagaaccuagaucuaaaaaaaaaaaaaaaaaaaaaaaaaaaaaaaaaaaaaaaaaaaaaaaaaaaaaaaaaaaaaaaaugcaucccccccccccccccccccccccccccccccaaaggcucuuuucagagccaccagaauu

SEQ ID NO: 1362 - RNA, 1661 nt, Artificial Sequence
  mRNA Design i-2 (A64-N5-C30-hSL-N5) comprising derived and/or modified sequence from Pf(3D7)__XP_001351122.1__Pf-CSP(199-387)_L(PVTN)_HBsAg (opt4)
aggagaggcgcugccuacggagguggcagccaucuccuucucggcaucaagcuuaccaugauggcccccgaccccaacgccaaccccaacgccaaccccaacgccaaccccaacgccaaccccaacgccaaccccaacgccaaccccaacgccaaccccaacgccaaccccaacgccaaccccaacgccaaccccaacgccaaccccaacgccaaccccaacgccaaccccaacgccaaccccaacgccaaccccaacgccaaccccaacgccaaccccaacgccaaccccaacaagaacaaccagggcaacggccagggccacaacaugcccaacgaccccaacagaaacguggacgagaacgccaacgccaacagcgccgugaagaacaacaacaacgaggagcccagcgacaagcacaucaaggaguaccugaacaagauccagaacagccugagcaccgaguggagccccugcagcgugaccugcggcaacggcauccaggugagaaucaagcccggcagcgccaacaagcccaaggacgagcuggacuacgccaacgacaucgagaagaagaucugcaagauggagaagugcagcagcguguucaacguggugaacagcagcaucggccugggccccgugaccaacauggagaacaucaccagcggcuuccugggcccccugcuggugcugcaggccggcuucuuccugcugaccagaauccugaccaucccccagagccuggacagcugguggaccagccugaacuuccugggcggcagccccgugugccugggccagaacagccagagccccaccagcaaccacagccccaccagcugcccccccaucugccccggcuacagauggaugugccugagaagauucaucaucuuccuguucauccugcugcugugccugaucuuccugcuggugcugcuggacuaccagggcaugcugcccgugugcccccugauccccggcagcaccaccaccaacaccggccccugcaagaccugcaccacccccgcccagggcaacagcauguuccccagcugcugcugcaccaagcccaccgacggcaacugcaccugcauccccauccccagcagcugggccuucgccaaguaccugugggagugggccagcgugagauucagcuggcugagccugcuggugcccuucgugcagugguucgugggccugagccccaccguguggcugagcgccaucuggaugaugugguacuggggccccagccuguacagcaucgugagccccuucaucccccugcugcccaucuucuucugccuguggguguacaucugaggacuagugcaucacauuuaaaagcaucucagccuaccaugagaauaagagaaagaaaaugaagaucaauagcuuauucaucucuuuuucuuuuucguugguguaaagccaacacccugucuaaaaaacauaaauuucuuuaaucauuuugccucuuuucucugugcuucaauuaauaaaaaauggaaagaaccuagaucuaaaaaaaaaaaaaaaaaaaaaaaaaaaaaaaaaaaaaaaaaaaaaaaaaaaaaaaaaaaaaaaaugcaucccccccccccccccccccccccccccccccaaaggcucuuuucagagccaccagaauu

SEQ ID NO: 1363 - RNA, 845 nt, Artificial Sequence
  mRNA Design i-2 (A64-N5-C30-hSL-N5) comprising derived and/or modified sequence from Pf(3D7)__XP_001351122.1__HsALB_Pf-CSP(19-152) (opt4)
aggagaggcgcugccuacggagguggcagccaucuccuucucggcaucaagcuuaccaugaagugggugaccuucaucagccugcuguuccuguucagcagcgccuacagccuguuccaggaguaccagugcuacggcagcagcagcaacaccagagugcugaacgagcugaacuacgacaacgccggcaccaaccuguacaacgagcuggagaugaacuacuacggcaagcaggagaacugguacagccugaagaagaacagcagaagccugggcgagaacgacgacggcaacaacgaggacaacgagaagcugagaaagcccaagcacaagaagcugaagcagcccgccgacggcaaccccgaccccaacgccaaccccaacguggaccccaacgccaaccccaacguggaccccaacgccaaccccaacguggaccccaacgccaaccccaacgccaaccccaacgccaaccccaacgccaaccccaacgccaaccccaacgccaaccccugaggacuagugcaucacauuuaaaagcaucucagccuaccaugagaauaagagaaagaaaaugaagaucaauagcuuauucaucucuuuuucuuuuucguugguguaaagccaacacccugucuaaaaaacauaaauuucuuuaaucauuuugccucuuuucucugugcuucaauuaauaaaaaauggaaagaaccuagaucuaaaaaaaaaaaaaaaaaaaaaaaaaaaaaaaaaaaaaaaaaaaaaaaaaaaaaaaaaaaaaaaaugcaucccccccccccccccccccccccccccccccaaaggcucuuuucagagccaccagaauu

SEQ ID NO: 1364 - RNA, 965 nt, Artificial Sequence
  mRNA Design i-2 (A64-N5-C30-hSL-N5) comprising derived and/or modified sequence from Pf(3D7)__XP_001351122.1__HsALB_Pf-CSP(19-192) (opt4)
aggagaggcgcugccuacggagguggcagccaucuccuucucggcaucaagcuuaccaugaagugggugaccuucaucagccugcuguuccuguucagcagcgccuacagccuguuccaggaguaccagugcuacggcagcagcagcaacaccagagugcugaacgagcugaacuacgacaacgccggcaccaaccuguacaacgagcuggagaugaacuacuacggcaagcaggagaacugguacagccugaagaagaacagcagaagccugggcgagaacgacgacggcaacaacgaggacaacgagaagcugagaaagcccaagcacaagaagcugaagcagcccgccgacggcaaccccgaccccaacgccaaccccaacguggaccccaacgccaaccccaacguggaccccaacgccaaccccaacguggaccccaacgccaaccccaacgccaaccccaacgccaaccccaacgccaaccccaacgccaaccccaacgccaaccccaacgccaaccccaacgccaaccccaacgccaaccccaacgccaaccccaacgccaaccccaacgccaaccccaacgccaaccccaacgccaaccccaacgccaaccccaacgccaaccccugaggacuagugcaucacauuuaaaagcaucucagccuaccaugagaauaagagaaagaaaaugaagaucaauagcuuauucaucucuuuuucuuuuucguugguguaaagccaacacccugucuaaaaaacauaaauuucuuuaaucauuuugccucuuuucucugugcuucaauuaauaaaaaauggaaagaaccuagaucuaaaaaaaaaaaaaaaaaaaaaaaaaaaaaaaaaaaaaaaaaaaaaaaaaaaaaaaaaaaaaaaaugcaucccccccccccccccccccccccccccccccaaaggcucuuuucagagccaccagaauu

SEQ ID NO: 1365 - RNA, 1205 nt, Artificial Sequence
  mRNA Design i-2 (A64-N5-C30-hSL-N5) comprising derived and/or modified sequence from Pf(3D7)__XP_001351122.1__HsALB_Pf-CSP(19-272) (opt4)
aggagaggcgcugccuacggagguggcagccaucuccuucucggcaucaagcuuaccaugaagugggugaccuucaucagccugcuguuccuguucagcagcgccuacagccuguuccaggaguaccagugcuacggcagcagcagcaacaccagagugcugaacgagcugaacuacgacaacgccggcaccaaccuguacaacgagcuggagaugaacuacuacggcaagcaggagaacugguacagccugaagaagaacagcagaagccugggcgagaacgacgacggcaacaacgaggacaacgagaagcugagaaagcccaagcacaagaagcugaagcagcccgccgacggcaaccccgaccccaacgccaaccccaacguggaccccaacgccaaccccaacguggaccccaacgccaaccccaacguggaccccaacgccaaccccaacgccaaccccaacgccaaccccaacgccaaccccaacgccaaccccaacgccaaccccaacgccaaccccaacgccaaccccaacgccaaccccaacgccaaccccaacgccaaccccaacgccaaccccaacgccaaccccaacgccaaccccaacgccaaccccaacgccaaccccaacgccaaccccaacguggaccccaacgccaaccccaacgccaaccccaacgccaaccccaacgccaaccccaacgccaaccccaacgccaaccccaacgccaaccccaacgccaaccccaacgccaaccccaacgccaaccccaacgccaaccccaacgccaaccccaacgccaaccccaacgccaaccccaacgccaaccccaacgccaaccccaacgccaaccccaacgccaaccccugaggacuagugcaucacauuuaaaagcaucucagccuaccaugagaauaagagaaagaaaaugaagaucaauagcuuauucaucucuuuuucuuuuucguugguguaaagccaacacccugucuaaaaaacauaaauuucuuuaaucauuuugccucuuuucucugugcuucaauuaauaaaaaauggaaagaaccuagaucuaaaaaaaaaaaaaaaaaaaaaaaaaaaaaaaaaaaaaaaaaaaaaaaaaaaaaaaaaaaaaaaaugcaucccccccccccccccccccccccccccccccaaaggcucuuuucagagccaccagaauu

SEQ ID NO: 1366 - RNA, 1367 nt, Artificial Sequence
  mRNA Design i-2 (A64-N5-C30-hSL-N5) comprising derived and/or modified sequence from Pf(3D7)__XP_001351122.1__HsALB_Pf-CSP(19-272)_L(AAY)_Pf-CSP(310-3 27)_L(AAY)_Pf-CSP(346-375) (opt4)
aggagaggcgcugccuacggagguggcagccaucuccuucucggcaucaagcuuaccaugaagugggugaccuucaucagccugcuguuccuguucagcagcgccuacagccuguuccaggaguaccagugcuacggcagcagcagcaacaccagagugcugaacgagcugaacuacgacaacgccggcaccaaccuguacaacgagcuggagaugaacuacuacggcaagcaggagaacugguacagccugaagaagaacagcagaagccugggcgagaacgacgacggcaacaacgaggacaacgagaagcugagaaagcccaagcacaagaagcugaagcagcccgccgacggcaaccccgaccccaacgccaaccccaacguggaccccaacgccaaccccaacguggaccccaacgccaaccccaacguggaccccaacgccaaccccaacgccaaccccaacgccaaccccaacgccaaccccaacgccaaccccaacgccaaccccaacgccaaccccaacgccaaccccaacgccaaccccaacgccaaccccaacgccaaccccaacgccaaccccaacgccaaccccaacgccaaccccaacgccaaccccaacgccaaccccaacgccaaccccaacguggaccccaacgccaaccccaacgccaaccccaacgccaaccccaacgccaaccccaacgccaaccccaacgccaaccccaacgccaaccccaacgccaaccccaacgccaaccccaacgccaaccccaacgccaaccccaacgccaaccccaacgccaaccccaacgccaaccccaacgccaaccccaacgccaaccccaacgccaaccccaacgccaaccccgccgccuacgagcccagcgacaagcacaucaaggaguaccugaacaagauccagaacagccuggccgccuacaucaagcccggcagcgccaacaagcccaaggacgagcuggacuacgccaacgacaucgagaagaagaucugcaagauggagaagugcagcugaggacuagugcaucacauuuaaaagcaucucagccuaccaugagaauaagagaaagaaaaugaagaucaauagcuuauucaucucuuuuucuuuuucguugguguaaagccaacacccugucuaaaaaacauaaauuucuuuaaucauuuugccucuuuucucugugcuucaauuaauaaaaaauggaaagaaccuagaucuaaaaaaaaaaaaaaaaaaaaaaaaaaaaaaaaaaaaaaaaaaaaaaaaaaaaaaaaaaaaaaaaugcaucccccccccccccccccccccccccccccccaaaggcucuuuucagagccaccagaauu

SEQ ID NO: 1367 - RNA, 1328 nt, Artificial Sequence
  mRNA Design i-2 (A64-N5-C30-hSL-N5) comprising derived and/or modified sequence from Pf(3D7)__XP_001351122.1__HsALB_Pf-CSP(19-272)_L(AAY)_Pf-CSP(346-3 65)_L(AAY)_P2 (opt4)
aggagaggcgcugccuacggagguggcagccaucuccuucucggcaucaagcuuaccaugaagugggugaccuucaucagccugcuguuccuguucagcagcgccuacagccuguuccaggaguaccagugcuacggcagcagcagcaacaccagagugcugaacgagcugaacuacgacaacgccggcaccaaccuguacaacgagcuggagaugaacuacuacggcaagcaggagaacugguacagccugaagaagaacagcagaagccugggcgagaacgacgacggcaacaacgaggacaacgagaagcugagaaagcccaagcacaagaagcugaagcagcccgccgacggcaaccccgaccccaacgccaaccccaacguggaccccaacgccaaccccaacguggaccccaacgccaaccccaacguggaccccaacgccaaccccaacgccaaccccaacgccaaccccaacgccaaccccaacgccaaccccaacgccaaccccaacgccaaccccaacgccaaccccaacgccaaccccaacgccaaccccaacgccaaccccaacgccaaccccaacgccaaccccaacgccaaccccaacgccaaccccaacgccaaccccaacgccaaccccaacguggaccccaacgccaaccccaacgccaaccccaacgccaaccccaacgccaaccccaacgccaaccccaacgccaaccccaacgccaaccccaacgccaaccccaacgccaaccccaacgccaaccccaacgccaaccccaacgccaaccccaacgccaaccccaacgccaaccccaacgccaaccccaacgccaaccccaacgccaaccccaacgccaaccccgccgccuacaucaagcccggcagcgccaacaagcccaaggacgagcuggacuacgccaacgacaucgaggccgccuaccaguacaucaaggccaacagcaaguucaucggcaucaccgagcugugaggacuagugcaucacauuuaaaagcaucucagccuaccaugagaauaagagaaagaaaaugaagaucaauagcuuauucaucucuuuuucuuuuucguugguguaaagccaacacccugucuaaaaaacauaaauuucuuuaaucauuuugccucuuuucucugugcuucaauuaauaaaaaauggaaagaaccuagaucuaaaaaaaaaaaaaaaaaaaaaaaaaaaaaaaaaaaaaaaaaaaaaaaaaaaaaaaaaaaaaaaaugcaucccccccccccccccccccccccccccccccaaaggcucuuuucagagccaccagaauu

SEQ ID NO: 1368 - RNA, 1322 nt, Artificial Sequence
  mRNA Design i-2 (A64-N5-C30-hSL-N5) comprising derived and/or modified sequence from Pf(3D7)__XP_001351122.1__HsALB_Pf-CSP(19-272)_L(AAY)_Pf-CSP(346-3 65)_L(AAY)_PADRE (opt4)
aggagaggcgcugccuacggagguggcagccaucuccuucucggcaucaagcuuaccaugaagugggugaccuucaucagccugcuguuccuguucagcagcgccuacagccuguuccaggaguaccagugcuacggcagcagcagcaacaccagagugcugaacgagcugaacuacgacaacgccggcaccaaccuguacaacgagcuggagaugaacuacuacggcaagcaggagaacugguacagccugaagaagaacagcagaagccugggcgagaacgacgacggcaacaacgaggacaacgagaagcugagaaagcccaagcacaagaagcugaagcagcccgccgacggcaaccccgaccccaacgccaaccccaacguggaccccaacgccaaccccaacguggaccccaacgccaaccccaacguggaccccaacgccaaccccaacgccaaccccaacgccaaccccaacgccaaccccaacgccaaccccaacgccaaccccaacgccaaccccaacgccaaccccaacgccaaccccaacgccaaccccaacgccaaccccaacgccaaccccaacgccaaccccaacgccaaccccaacgccaaccccaacgccaaccccaacgccaaccccaacguggaccccaacgccaaccccaacgccaaccccaacgccaaccccaacgccaaccccaacgccaaccccaacgccaaccccaacgccaaccccaacgccaaccccaacgccaaccccaacgccaaccccaacgccaaccccaacgccaaccccaacgccaaccccaacgccaaccccaacgccaaccccaacgccaaccccaacgccaaccccaacgccaaccccgccgccuacaucaagcccggcagcgccaacaagcccaaggacgagcuggacuacgccaacgacaucgaggccgccuacgccaaguucguggccgccuggacccugaaggccgccgccugaggacuagugcaucacauuuaaaagcaucucagccuaccaugagaauaagagaaagaaaaugaagaucaauagcuuauucaucucuuuuucuuuuucguugguguaaagccaacacccugucuaaaaaacauaaauuucuuuaaucauuuugccucuuuucucugugcuucaauuaauaaaaaauggaaagaaccuagaucuaaaaaaaaaaaaaaaaaaaaaaaaaaaaaaaaaaaaaaaaaaaaaaaaaaaaaaaaaaaaaaaaugcaucccccccccccccccccccccccccccccccaaaggcucuuuucagagccaccagaauu

SEQ ID NO: 1369 - RNA, 1379 nt, Artificial Sequence
  mRNA Design i-2 (A64-N5-C30-hSL-N5) comprising derived and/or modified sequence from Pf(3D7)__XP_001351122.1__HsALB_Pf-CSP(19-272)_L(G4S)_Pf-CSP(310-3 27)_L(G4S)_Pf-CSP(346-375) (opt4)
aggagaggcgcugccuacggagguggcagccaucuccuucucggcaucaagcuuaccaugaagugggugaccuucaucagccugcuguuccuguucagcagcgccuacagccuguuccaggaguaccagugcuacggcagcagcagcaacaccagagugcugaacgagcugaacuacgacaacgccggcaccaaccuguacaacgagcuggagaugaacuacuacggcaagcaggagaacugguacagccugaagaagaacagcagaagccugggcgagaacgacgacggcaacaacgaggacaacgagaagcugagaaagcccaagcacaagaagcugaagcagcccgccgacggcaaccccgaccccaacgccaaccccaacguggaccccaacgccaaccccaacguggaccccaacgccaaccccaacguggaccccaacgccaaccccaacgccaaccccaacgccaaccccaacgccaaccccaacgccaaccccaacgccaaccccaacgccaaccccaacgccaaccccaacgccaaccccaacgccaaccccaacgccaaccccaacgccaaccccaacgccaaccccaacgccaaccccaacgccaaccccaacgccaaccccaacgccaaccccaacguggaccccaacgccaaccccaacgccaaccccaacgccaaccccaacgccaaccccaacgccaaccccaacgccaaccccaacgccaaccccaacgccaaccccaacgccaaccccaacgccaaccccaacgccaaccccaacgccaaccccaacgccaaccccaacgccaaccccaacgccaaccccaacgccaaccccaacgccaaccccaacgccaaccccggcggcggcggcagcgagcccagcgacaagcacaucaaggaguaccugaacaagauccagaacagccugggcggcggcggcagcaucaagcccggcagcgccaacaagcccaaggacgagcuggacuacgccaacgacaucgagaagaagaucugcaagauggagaagugcagcugaggacuagugcaucacauuuaaaagcaucucagccuaccaugagaauaagagaaagaaaaugaagaucaauagcuuauucaucucuuuuucuuuuucguugguguaaagccaacacccugucuaaaaaacauaaauuucuuuaaucauuuugccucuuuucucugugcuucaauuaauaaaaaauggaaagaaccuagaucuaaaaaaaaaaaaaaaaaaaaaaaaaaaaaaaaaaaaaaaaaaaaaaaaaaaaaaaaaaaaaaaaugcaucccccccccccccccccccccccccccccccaaaggcucuuuucagagccaccagaauu

SEQ ID NO: 1370 - RNA, 1364 nt, Artificial Sequence
  mRNA Design i-2 (A64-N5-C30-hSL-N5) comprising derived and/or modified sequence from Pf(3D7)__XP_001351122.1__HsALB_Pf-CSP(19-272)_L(G4S)_Pf-CSP(310-3 27)_Pf-CSP(346-375) (opt4)
aggagaggcgcugccuacggagguggcagccaucuccuucucggcaucaagcuuaccaugaagugggugaccuucaucagccugcuguuccuguucagcagcgccuacagccuguuccaggaguaccagugcuacggcagcagcagcaacaccagagugcugaacgagcugaacuacgacaacgccggcaccaaccuguacaacgagcuggagaugaacuacuacggcaagcaggagaacugguacagccugaagaagaacagcagaagccugggcgagaacgacgacggcaacaacgaggacaacgagaagcugagaaagcccaagcacaagaagcugaagcagcccgccgacggcaaccccgaccccaacgccaaccccaacguggaccccaacgccaaccccaacguggaccccaacgccaaccccaacguggaccccaacgccaaccccaacgccaaccccaacgccaaccccaacgccaaccccaacgccaaccccaacgccaaccccaacgccaaccccaacgccaaccccaacgccaaccccaacgccaaccccaacgccaaccccaacgccaaccccaacgccaaccccaacgccaaccccaacgccaaccccaacgccaaccccaacgccaaccccaacguggaccccaacgccaaccccaacgccaaccccaacgccaaccccaacgccaaccccaacgccaaccccaacgccaaccccaacgccaaccccaacgccaaccccaacgccaaccccaacgccaaccccaacgccaaccccaacgccaaccccaacgccaaccccaacgccaaccccaacgccaaccccaacgccaaccccaacgccaaccccaacgccaaccccggcggcggcggcagcgagcccagcgacaagcacaucaaggaguaccugaacaagauccagaacagccugaucaagcccggcagcgccaacaagcccaaggacgagcuggacuacgccaacgacaucgagaagaagaucugcaagauggagaagugcagcugaggacuagugcaucacauuuaaaagcaucucagccuaccaugagaauaagagaaagaaaaugaagaucaauagcuuauucaucucuuuuucuuuuucguugguguaaagccaacacccugucuaaaaaacauaaauuucuuuaaucauuuugccucuuuucucugugcuucaauuaauaaaaaauggaaagaaccuagaucuaaaaaaaaaaaaaaaaaaaaaaaaaaaaaaaaaaaaaaaaaaaaaaaaaaaaaaaaaaaaaaaaugcaucccccccccccccccccccccccccccccccaaaggcucuuuucagagccaccagaauu

SEQ ID NO: 1371 - RNA, 1364 nt, Artificial Sequence
  mRNA Design i-2 (A64-N5-C30-hSL-N5) comprising derived and/or modified sequence from Pf(3D7)__XP_001351122.1__HsALB_Pf-CSP(19-325) (opt4)
aggagaggcgcugccuacggagguggcagccaucuccuucucggcaucaagcuuaccaugaagugggugaccuucaucagccugcuguuccuguucagcagcgccuacagccuguuccaggaguaccagugcuacggcagcagcagcaacaccagagugcugaacgagcugaacuacgacaacgccggcaccaaccuguacaacgagcuggagaugaacuacuacggcaagcaggagaacugguacagccugaagaagaacagcagaagccugggcgagaacgacgacggcaacaacgaggacaacgagaagcugagaaagcccaagcacaagaagcugaagcagcccgccgacggcaaccccgaccccaacgccaaccccaacguggaccccaacgccaaccccaacguggaccccaacgccaaccccaacguggaccccaacgccaaccccaacgccaaccccaacgccaaccccaacgccaaccccaacgccaaccccaacgccaaccccaacgccaaccccaacgccaaccccaacgccaaccccaacgccaaccccaacgccaaccccaacgccaaccccaacgccaaccccaacgccaaccccaacgccaaccccaacgccaaccccaacgccaaccccaacguggaccccaacgccaaccccaacgccaaccccaacgccaaccccaacgccaaccccaacgccaaccccaacgccaaccccaacgccaaccccaacgccaaccccaacgccaaccccaacgccaaccccaacgccaaccccaacgccaaccccaacgccaaccccaacgccaaccccaacgccaaccccaacgccaaccccaacgccaaccccaacgccaaccccaacaagaacaaccagggcaacggccagggccacaacaugcccaacgaccccaacagaaacguggacgagaacgccaacgccaacagcgccgugaagaacaacaacaacgaggagcccagcgacaagcacaucaaggaguaccugaacaagauccagaacugaggacuagugcaucacauuuaaaagcaucucagccuaccaugagaauaagagaaagaaaaugaagaucaauagcuuauucaucucuuuuucuuuuucguugguguaaagccaacacccugucuaaaaaacauaaauuucuuuaaucauuuugccucuuuucucugugcuucaauuaauaaaaaauggaaagaaccuagaucuaaaaaaaaaaaaaaaaaaaaaaaaaaaaaaaaaaaaaaaaaaaaaaaaaaaaaaaaaaaaaaaaugcaucccccccccccccccccccccccccccccccaaaggcucuuuucagagccaccagaauu

SEQ ID NO: 1372 - RNA, 1541 nt, Artificial Sequence
  mRNA Design i-2 (A64-N5-C30-hSL-N5) comprising derived and/or modified sequence from Pf(3D7)__XP_001351122.1__HsALB_Pf-CSP(19-384) (opt4)
aggagaggcgcugccuacggagguggcagccaucuccuucucggcaucaagcuuaccaugaagugggugaccuucaucagccugcuguuccuguucagcagcgccuacagccuguuccaggaguaccagugcuacggcagcagcagcaacaccagagugcugaacgagcugaacuacgacaacgccggcaccaaccuguacaacgagcuggagaugaacuacuacggcaagcaggagaacugguacagccugaagaagaacagcagaagccugggcgagaacgacgacggcaacaacgaggacaacgagaagcugagaaagcccaagcacaagaagcugaagcagcccgccgacggcaaccccgaccccaacgccaaccccaacguggaccccaacgccaaccccaacguggaccccaacgccaaccccaacguggaccccaacgccaaccccaacgccaaccccaacgccaaccccaacgccaaccccaacgccaaccccaacgccaaccccaacgccaaccccaacgccaaccccaacgccaaccccaacgccaaccccaacgccaaccccaacgccaaccccaacgccaaccccaacgccaaccccaacgccaaccccaacgccaaccccaacgccaaccccaacguggaccccaacgccaaccccaacgccaaccccaacgccaaccccaacgccaaccccaacgccaaccccaacgccaaccccaacgccaaccccaacgccaaccccaacgccaaccccaacgccaaccccaacgccaaccccaacgccaaccccaacgccaaccccaacgccaaccccaacgccaaccccaacgccaaccccaacgccaaccccaacgccaaccccaacaagaacaaccagggcaacggccagggccacaacaugcccaacgaccccaacagaaacguggacgagaacgccaacgccaacagcgccgugaagaacaacaacaacgaggagcccagcgacaagcacaucaaggaguaccugaacaagauccagaacagccugagcaccgaguggagccccugcagcgugaccugcggcaacggcauccaggugagaaucaagcccggcagcgccaacaagcccaaggacgagcuggacuacgccaacgacaucgagaagaagaucugcaagauggagaagugcagcagcguguucaacguggugaacagcagcugaggacuagugcaucacauuuaaaagcaucucagccuaccaugagaauaagagaaagaaaaugaagaucaauagcuuauucaucucuuuuucuuuuucguugguguaaagccaacacccugucuaaaaaacauaaauuucuuuaaucauuuugccucuuuucucugugcuucaauuaauaaaaaauggaaagaaccuagaucuaaaaaaaaaaaaaaaaaaaaaaaaaaaaaaaaaaaaaaaaaaaaaaaaaaaaaaaaaaaaaaaaugcaucccccccccccccccccccccccccccccccaaaggcucuuuucagagccaccagaauu

SEQ ID NO: 1373 - RNA, 1679 nt, Artificial Sequence
  mRNA Design i-2 (A64-N5-C30-hSL-N5) comprising derived and/or modified sequence from Pf(3D7)__XP_001351122.1__HsALB_Pf-CSP(19-384)_TM domain HA (opt4)
aggagaggcgcugccuacggagguggcagccaucuccuucucggcaucaagcuuaccaugaagugggugaccuucaucagccugcuguuccuguucagcagcgccuacagccuguuccaggaguaccagugcuacggcagcagcagcaacaccagagugcugaacgagcugaacuacgacaacgccggcaccaaccuguacaacgagcuggagaugaacuacuacggcaagcaggagaacugguacagccugaagaagaacagcagaagccugggcgagaacgacgacggcaacaacgaggacaacgagaagcugagaaagcccaagcacaagaagcugaagcagcccgccgacggcaaccccgaccccaacgccaaccccaacguggaccccaacgccaaccccaacguggaccccaacgccaaccccaacguggaccccaacgccaaccccaacgccaaccccaacgccaaccccaacgccaaccccaacgccaaccccaacgccaaccccaacgccaaccccaacgccaaccccaacgccaaccccaacgccaaccccaacgccaaccccaacgccaaccccaacgccaaccccaacgccaaccccaacgccaaccccaacgccaaccccaacgccaaccccaacguggaccccaacgccaaccccaacgccaaccccaacgccaaccccaacgccaaccccaacgccaaccccaacgccaaccccaacgccaaccccaacgccaaccccaacgccaaccccaacgccaaccccaacgccaaccccaacgccaaccccaacgccaaccccaacgccaaccccaacgccaaccccaacgccaaccccaacgccaaccccaacgccaaccccaacaagaacaaccagggcaacggccagggccacaacaugcccaacgaccccaacagaaacguggacgagaacgccaacgccaacagcgccgugaagaacaacaacaacgaggagcccagcgacaagcacaucaaggaguaccugaacaagauccagaacagccugagcaccgaguggagccccugcagcgugaccugcggcaacggcauccaggugagaaucaagcccggcagcgccaacaagcccaaggacgagcuggacuacgccaacgacaucgagaagaagaucugcaagauggagaagugcagcagcguguucaacguggugaacagcagcaagcuggagagcaccagaaucuaccagauccuggccaucuacagcaccguggccagcagccuggugcugguggugagccugggcgccaucagcuucuggaugugcagcaacggcagccugcagugcagaaucugcaucugaggacuagugcaucacauuuaaaagcaucucagccuaccaugagaauaagagaaagaaaaugaagaucaauagcuuauucaucucuuuuucuuuuucguugguguaaagccaacacccugucuaaaaaacauaaauuucuuuaaucauuuugccucuuuucucugugcuucaauuaauaaaaaauggaaagaaccuagaucuaaaaaaaaaaaaaaaaaaaaaaaaaaaaaaaaaaaaaaaaaaaaaaaaaaaaaaaaaaaaaaaaugcaucccccccccccccccccccccccccccccccaaaggcucuuuucagagccaccagaauu

SEQ ID NO: 1374 - RNA, 1391 nt, Artificial Sequence
  mRNA Design i-2 (A64-N5-C30-hSL-N5) comprising derived and/or modified sequence from Pf(3D7)__XP_001351122.1__HsALB_Pf-CSP(82-397) (opt4)
aggagaggcgcugccuacggagguggcagccaucuccuucucggcaucaagcuuaccaugaagugggugaccuucaucagccugcuguuccuguucagcagcgccuacagcgacaacgagaagcugagaaagcccaagcacaagaagcugaagcagcccgccgacggcaaccccgaccccaacgccaaccccaacguggaccccaacgccaaccccaacguggaccccaacgccaaccccaacguggaccccaacgccaaccccaacgccaaccccaacgccaaccccaacgccaaccccaacgccaaccccaacgccaaccccaacgccaaccccaacgccaaccccaacgccaaccccaacgccaaccccaacgccaaccccaacgccaaccccaacgccaaccccaacgccaaccccaacgccaaccccaacgccaaccccaacgccaaccccaacguggaccccaacgccaaccccaacgccaaccccaacgccaaccccaacgccaaccccaacgccaaccccaacgccaaccccaacgccaaccccaacgccaaccccaacgccaaccccaacgccaaccccaacgccaaccccaacgccaaccccaacgccaaccccaacgccaaccccaacgccaaccccaacgccaaccccaacgccaaccccaacgccaaccccaacaagaacaaccagggcaacggccagggccacaacaugcccaacgaccccaacagaaacguggacgagaacgccaacgccaacagcgccgugaagaacaacaacaacgaggagcccagcgacaagcacaucaaggaguaccugaacaagauccagaacagccugagcaccgaguggagccccugcagcgugaccugcggcaacggcauccaggugagaaucaagcccggcagcgccaacaagcccaaggacgagcuggacuacgccaacgacaucgagaagaagaucugcaagauggagaagugcagcagcguguucaacguggugaacagcagcaucggccugaucauggugcugagcuuccuguuccugaacugaggacuagugcaucacauuuaaaagcaucucagccuaccaugagaauaagagaaagaaaaugaagaucaauagcuuauucaucucuuuuucuuuuucguugguguaaagccaacacccugucuaaaaaacauaaauuucuuuaaucauuuugccucuuuucucugugcuucaauuaauaaaaaauggaaagaaccuagaucuaaaaaaaaaaaaaaaaaaaaaaaaaaaaaaaaaaaaaaaaaaaaaaaaaaaaaaaaaaaaaaaaugcaucccccccccccccccccccccccccccccccaaaggcucuuuucagagccaccagaauu

SEQ ID NO: 1375 - RNA, 743 nt, Artificial Sequence
  mRNA Design i-2 (A64-N5-C30-hSL-N5) comprising derived and/or modified sequence from Pf(3D7)__XP_001351122.1__HsALB_Pf-CSP(93-192) (opt4)
aggagaggcgcugccuacggagguggcagccaucuccuucucggcaucaagcuuaccaugaagugggugaccuucaucagccugcuguuccuguucagcagcgccuacagcaagcugaagcagcccgccgacggcaaccccgaccccaacgccaaccccaacguggaccccaacgccaaccccaacguggaccccaacgccaaccccaacguggaccccaacgccaaccccaacgccaaccccaacgccaaccccaacgccaaccccaacgccaaccccaacgccaaccccaacgccaaccccaacgccaaccccaacgccaaccccaacgccaaccccaacgccaaccccaacgccaaccccaacgccaaccccaacgccaaccccaacgccaaccccaacgccaaccccugaggacuagugcaucacauuuaaaagcaucucagccuaccaugagaauaagagaaagaaaaugaagaucaauagcuuauucaucucuuuuucuuuuucguugguguaaagccaacacccugucuaaaaaacauaaauuucuuuaaucauuuugccucuuuucucugugcuucaauuaauaaaaaauggaaagaaccuagaucuaaaaaaaaaaaaaaaaaaaaaaaaaaaaaaaaaaaaaaaaaaaaaaaaaaaaaaaaaaaaaaaaugcaucccccccccccccccccccccccccccccccaaaggcucuuuucagagccaccagaauu

SEQ ID NO: 1376 - RNA, 983 nt, Artificial Sequence
  mRNA Design i-2 (A64-N5-C30-hSL-N5) comprising derived and/or modified sequence from Pf(3D7)__XP_001351122.1__HsALB_Pf-CSP(93-272) (opt4)
aggagaggcgcugccuacggagguggcagccaucuccuucucggcaucaagcuuaccaugaagugggugaccuucaucagccugcuguuccuguucagcagcgccuacagcaagcugaagcagcccgccgacggcaaccccgaccccaacgccaaccccaacguggaccccaacgccaaccccaacguggaccccaacgccaaccccaacguggaccccaacgccaaccccaacgccaaccccaacgccaaccccaacgccaaccccaacgccaaccccaacgccaaccccaacgccaaccccaacgccaaccccaacgccaaccccaacgccaaccccaacgccaaccccaacgccaaccccaacgccaaccccaacgccaaccccaacgccaaccccaacgccaaccccaacgccaaccccaacguggaccccaacgccaaccccaacgccaaccccaacgccaaccccaacgccaaccccaacgccaaccccaacgccaaccccaacgccaaccccaacgccaaccccaacgccaaccccaacgccaaccccaacgccaaccccaacgccaaccccaacgccaaccccaacgccaaccccaacgccaaccccaacgccaaccccaacgccaaccccaacgccaaccccugaggacuagugcaucacauuuaaaagcaucucagccuaccaugagaauaagagaaagaaaaugaagaucaauagcuuauucaucucuuuuucuuuuucguugguguaaagccaacacccugucuaaaaaacauaaauuucuuuaaucauuuugccucuuuucucugugcuucaauuaauaaaaaauggaaagaaccuagaucuaaaaaaaaaaaaaaaaaaaaaaaaaaaaaaaaaaaaaaaaaaaaaaaaaaaaaaaaaaaaaaaaugcaucccccccccccccccccccccccccccccccaaaggcucuuuucagagccaccagaauu

SEQ ID NO: 1377 - RNA, 1358 nt, Artificial Sequence
  mRNA Design i-2 (A64-N5-C30-hSL-N5) comprising derived and/or modified sequence from Pf(3D7)__XP_001351122.1__HsALB_Pf-CSP(93-397) (opt4)
aggagaggcgcugccuacggagguggcagccaucuccuucucggcaucaagcuuaccaugaagugggugaccuucaucagccugcuguuccuguucagcagcgccuacagcaagcugaagcagcccgccgacggcaaccccgaccccaacgccaaccccaacguggaccccaacgccaaccccaacguggaccccaacgccaaccccaacguggaccccaacgccaaccccaacgccaaccccaacgccaaccccaacgccaaccccaacgccaaccccaacgccaaccccaacgccaaccccaacgccaaccccaacgccaaccccaacgccaaccccaacgccaaccccaacgccaaccccaacgccaaccccaacgccaaccccaacgccaaccccaacgccaaccccaacgccaaccccaacguggaccccaacgccaaccccaacgccaaccccaacgccaaccccaacgccaaccccaacgccaaccccaacgccaaccccaacgccaaccccaacgccaaccccaacgccaaccccaacgccaaccccaacgccaaccccaacgccaaccccaacgccaaccccaacgccaaccccaacgccaaccccaacgccaaccccaacgccaaccccaacgccaaccccaacaagaacaaccagggcaacggccagggccacaacaugcccaacgaccccaacagaaacguggacgagaacgccaacgccaacagcgccgugaagaacaacaacaacgaggagcccagcgacaagcacaucaaggaguaccugaacaagauccagaacagccugagcaccgaguggagccccugcagcgugaccugcggcaacggcauccaggugagaaucaagcccggcagcgccaacaagcccaaggacgagcuggacuacgccaacgacaucgagaagaagaucugcaagauggagaagugcagcagcguguucaacguggugaacagcagcaucggccugaucauggugcugagcuuccuguuccugaacugaggacuagugcaucacauuuaaaagcaucucagccuaccaugagaauaagagaaagaaaaugaagaucaauagcuuauucaucucuuuuucuuuuucguugguguaaagccaacacccugucuaaaaaacauaaauuucuuuaaucauuuugccucuuuucucugugcuucaauuaauaaaaaauggaaagaaccuagaucuaaaaaaaaaaaaaaaaaaaaaaaaaaaaaaaaaaaaaaaaaaaaaaaaaaaaaaaaaaaaaaaaugcaucccccccccccccccccccccccccccccccaaaggcucuuuucagagccaccagaauu

SEQ ID NO: 1378 - RNA, 728 nt, Artificial Sequence
  mRNA Design i-2 (A64-N5-C30-hSL-N5) comprising derived and/or modified sequence from Pf(3D7)__XP_001351122.1__HsALB_Pf-CSP(98-192) (opt4)
aggagaggcgcugccuacggagguggcagccaucuccuucucggcaucaagcuuaccaugaagugggugaccuucaucagccugcuguuccuguucagcagcgccuacagcgccgacggcaaccccgaccccaacgccaaccccaacguggaccccaacgccaaccccaacguggaccccaacgccaaccccaacguggaccccaacgccaaccccaacgccaaccccaacgccaaccccaacgccaaccccaacgccaaccccaacgccaaccccaacgccaaccccaacgccaaccccaacgccaaccccaacgccaaccccaacgccaaccccaacgccaaccccaacgccaaccccaacgccaaccccaacgccaaccccaacgccaaccccugaggacuagugcaucacauuuaaaagcaucucagccuaccaugagaauaagagaaagaaaaugaagaucaauagcuuauucaucucuuuuucuuuuucguugguguaaagccaacacccugucuaaaaaacauaaauuucuuuaaucauuuugccucuuuucucugugcuucaauuaauaaaaaauggaaagaaccuagaucuaaaaaaaaaaaaaaaaaaaaaaaaaaaaaaaaaaaaaaaaaaaaaaaaaaaaaaaaaaaaaaaaugcaucccccccccccccccccccccccccccccccaaaggcucuuuucagagccaccagaauu

SEQ ID NO: 1379 - RNA, 968 nt, Artificial Sequence
  mRNA Design i-2 (A64-N5-C30-hSL-N5) comprising derived and/or modified sequence from Pf(3D7)__XP_001351122.1__HsALB_Pf-CSP(98-272) (opt4)
aggagaggcgcugccuacggagguggcagccaucuccuucucggcaucaagcuuaccaugaagugggugaccuucaucagccugcuguuccuguucagcagcgccuacagcgccgacggcaaccccgaccccaacgccaaccccaacguggaccccaacgccaaccccaacguggaccccaacgccaaccccaacguggaccccaacgccaaccccaacgccaaccccaacgccaaccccaacgccaaccccaacgccaaccccaacgccaaccccaacgccaaccccaacgccaaccccaacgccaaccccaacgccaaccccaacgccaaccccaacgccaaccccaacgccaaccccaacgccaaccccaacgccaaccccaacgccaaccccaacgccaaccccaacguggaccccaacgccaaccccaacgccaaccccaacgccaaccccaacgccaaccccaacgccaaccccaacgccaaccccaacgccaaccccaacgccaaccccaacgccaaccccaacgccaaccccaacgccaaccccaacgccaaccccaacgccaaccccaacgccaaccccaacgccaaccccaacgccaaccccaacgccaaccccaacgccaaccccugaggacuagugcaucacauuuaaaagcaucucagccuaccaugagaauaagagaaagaaaaugaagaucaauagcuuauucaucucuuuuucuuuuucguugguguaaagccaacacccugucuaaaaaacauaaauuucuuuaaucauuuugccucuuuucucugugcuucaauuaauaaaaaauggaaagaaccuagaucuaaaaaaaaaaaaaaaaaaaaaaaaaaaaaaaaaaaaaaaaaaaaaaaaaaaaaaaaaaaaaaaaugcaucccccccccccccccccccccccccccccccaaaggcucuuuucagagccaccagaauu

SEQ ID NO: 1380 - RNA, 1274 nt, Artificial Sequence
  mRNA Design i-2 (A64-N5-C30-hSL-N5) comprising derived and/or modified sequence from Pf(3D7)__XP_001351122.1__HsALB_Pf-CSP(98-374) (opt4)
aggagaggcgcugccuacggagguggcagccaucuccuucucggcaucaagcuuaccaugaagugggugaccuucaucagccugcuguuccuguucagcagcgccuacagcgccgacggcaaccccgaccccaacgccaaccccaacguggaccccaacgccaaccccaacguggaccccaacgccaaccccaacguggaccccaacgccaaccccaacgccaaccccaacgccaaccccaacgccaaccccaacgccaaccccaacgccaaccccaacgccaaccccaacgccaaccccaacgccaaccccaacgccaaccccaacgccaaccccaacgccaaccccaacgccaaccccaacgccaaccccaacgccaaccccaacgccaaccccaacgccaaccccaacguggaccccaacgccaaccccaacgccaaccccaacgccaaccccaacgccaaccccaacgccaaccccaacgccaaccccaacgccaaccccaacgccaaccccaacgccaaccccaacgccaaccccaacgccaaccccaacgccaaccccaacgccaaccccaacgccaaccccaacgccaaccccaacgccaaccccaacgccaaccccaacgccaaccccaacaagaacaaccagggcaacggccagggccacaacaugcccaacgaccccaacagaaacguggacgagaacgccaacgccaacagcgccgugaagaacaacaacaacgaggagcccagcgacaagcacaucaaggaguaccugaacaagauccagaacagccugagcaccgaguggagccccugcagcgugaccugcggcaacggcauccaggugagaaucaagcccggcagcgccaacaagcccaaggacgagcuggacuacgccaacgacaucgagaagaagaucugcaagauggagaagugcugaggacuagugcaucacauuuaaaagcaucucagccuaccaugagaauaagagaaagaaaaugaagaucaauagcuuauucaucucuuuuucuuuuucguugguguaaagccaacacccugucuaaaaaacauaaauuucuuuaaucauuuugccucuuuucucugugcuucaauuaauaaaaaauggaaagaaccuagaucuaaaaaaaaaaaaaaaaaaaaaaaaaaaaaaaaaaaaaaaaaaaaaaaaaaaaaaaaaaaaaaaaugcaucccccccccccccccccccccccccccccccaaaggcucuuuucagagccaccagaauu

SEQ ID NO: 1381 - RNA, 1343 nt, Artificial Sequence
  mRNA Design i-2 (A64-N5-C30-hSL-N5) comprising derived and/or modified sequence from Pf(3D7)__XP_001351122.1__HsALB_Pf-CSP(98-397) (opt4)
aggagaggcgcugccuacggagguggcagccaucuccuucucggcaucaagcuuaccaugaagugggugaccuucaucagccugcuguuccuguucagcagcgccuacagcgccgacggcaaccccgaccccaacgccaaccccaacguggaccccaacgccaaccccaacguggaccccaacgccaaccccaacguggaccccaacgccaaccccaacgccaaccccaacgccaaccccaacgccaaccccaacgccaaccccaacgccaaccccaacgccaaccccaacgccaaccccaacgccaaccccaacgccaaccccaacgccaaccccaacgccaaccccaacgccaaccccaacgccaaccccaacgccaaccccaacgccaaccccaacgccaaccccaacguggaccccaacgccaaccccaacgccaaccccaacgccaaccccaacgccaaccccaacgccaaccccaacgccaaccccaacgccaaccccaacgccaaccccaacgccaaccccaacgccaaccccaacgccaaccccaacgccaaccccaacgccaaccccaacgccaaccccaacgccaaccccaacgccaaccccaacgccaaccccaacgccaaccccaacaagaacaaccagggcaacggccagggccacaacaugcccaacgaccccaacagaaacguggacgagaacgccaacgccaacagcgccgugaagaacaacaacaacgaggagcccagcgacaagcacaucaaggaguaccugaacaagauccagaacagccugagcaccgaguggagccccugcagcgugaccugcggcaacggcauccaggugagaaucaagcccggcagcgccaacaagcccaaggacgagcuggacuacgccaacgacaucgagaagaagaucugcaagauggagaagugcagcagcguguucaacguggugaacagcagcaucggccugaucauggugcugagcuuccuguuccugaacugaggacuagugcaucacauuuaaaagcaucucagccuaccaugagaauaagagaaagaaaaugaagaucaauagcuuauucaucucuuuuucuuuuucguugguguaaagccaacacccugucuaaaaaacauaaauuucuuuaaucauuuugccucuuuucucugugcuucaauuaauaaaaaauggaaagaaccuagaucuaaaaaaaaaaaaaaaaaaaaaaaaaaaaaaaaaaaaaaaaaaaaaaaaaaaaaaaaaaaaaaaaugcaucccccccccccccccccccccccccccccccaaaggcucuuuucagagccaccagaauu

SEQ ID NO: 1382 - RNA, 1670 nt, Artificial Sequence
  mRNA Design i-2 (A64-N5-C30-hSL-N5) comprising derived and/or modified sequence from Pf(3D7)__XP_001351122.1__HsALB_Pf-CSP(199-377)_L(PVTN)_HBsAg (opt4)
aggagaggcgcugccuacggagguggcagccaucuccuucucggcaucaagcuuaccaugaagugggugaccuucaucagccugcuguuccuguucagcagcgccuacagcgaccccaacgccaaccccaacgccaaccccaacgccaaccccaacgccaaccccaacgccaaccccaacgccaaccccaacgccaaccccaacgccaaccccaacgccaaccccaacgccaaccccaacgccaaccccaacgccaaccccaacgccaaccccaacgccaaccccaacgccaaccccaacgccaaccccaacgccaaccccaacgccaaccccaacaagaacaaccagggcaacggccagggccacaacaugcccaacgaccccaacagaaacguggacgagaacgccaacgccaacagcgccgugaagaacaacaacaacgaggagcccagcgacaagcacaucaaggaguaccugaacaagauccagaacagccugagcaccgaguggagccccugcagcgugaccugcggcaacggcauccaggugagaaucaagcccggcagcgccaacaagcccaaggacgagcuggacuacgccaacgacaucgagaagaagaucugcaagauggagaagugcagcagcgugcccgugaccaacauggagaacaucaccagcggcuuccugggcccccugcuggugcugcaggccggcuucuuccugcugaccagaauccugaccaucccccagagccuggacagcugguggaccagccugaacuuccugggcggcagccccgugugccugggccagaacagccagagccccaccagcaaccacagccccaccagcugcccccccaucugccccggcuacagauggaugugccugagaagauucaucaucuuccuguucauccugcugcugugccugaucuuccugcuggugcugcuggacuaccagggcaugcugcccgugugcccccugauccccggcagcaccaccaccaacaccggccccugcaagaccugcaccacccccgcccagggcaacagcauguuccccagcugcugcugcaccaagcccaccgacggcaacugcaccugcauccccauccccagcagcugggccuucgccaaguaccugugggagugggccagcgugagauucagcuggcugagccugcuggugcccuucgugcagugguucgugggccugagccccaccguguggcugagcgccaucuggaugaugugguacuggggccccagccuguacagcaucgugagccccuucaucccccugcugcccaucuucuucugccuguggguguacaucugaggacuagugcaucacauuuaaaagcaucucagccuaccaugagaauaagagaaagaaaaugaagaucaauagcuuauucaucucuuuuucuuuuucguugguguaaagccaacacccugucuaaaaaacauaaauuucuuuaaucauuuugccucuuuucucugugcuucaauuaauaaaaaauggaaagaaccuagaucuaaaaaaaaaaaaaaaaaaaaaaaaaaaaaaaaaaaaaaaaaaaaaaaaaaaaaaaaaaaaaaaaugcaucccccccccccccccccccccccccccccccaaaggcucuuuucagagccaccagaauu

SEQ ID NO: 1383 - RNA, 1409 nt, Artificial Sequence
  mRNA Design i-2 (A64-N5-C30-hSL-N5) comprising derived and/or modified sequence from Pb(ANKA)__XP_022712148.1__Pb-CSP (opt4)
aggagaggcgcugccuacggagguggcagccaucuccuucucggcaucaagcuuaccaugaagaagugcaccauccuggugguggccagccugcugcuggugaacagccugcugcccggcuacggccagaacaagagcauccaggcccagagaaaccugaacgagcugugcuacaacgagggcaacgacaacaagcuguaccacgugcugaacagcaagaacggcaagaucuacaacagaaacaccgugaacagacugcuggccgacgcccccgagggcaagaagaacgagaagaagaacgagaagaucgagagaaacaacaagcugaagcagcccccccccccccccaaccccaacgacccccccccccccaaccccaacgacccccccccccccaaccccaacgacccccccccccccaaccccaacgacccccccccccccaacgccaacgacccccccccccccaacgccaacgaccccgccccccccaacgccaacgaccccgccccccccaacgccaacgaccccgccccccccaacgccaacgaccccgccccccccaacgccaacgacccccccccccccaaccccaacgaccccgccccccccaacgccaacgacccccccccccccaaccccaacgaccccgcccccccccagggcaacaacaacccccagccccagcccagaccccagccccagccccagccccagccccagccccagccccagccccagccccagcccagaccccagccccagccccagcccggcggcaacaacaacaacaagaacaacaacaacgacgacagcuacauccccagcgccgagaagauccuggaguucgugaagcagaucagagacagcaucaccgaggaguggagccagugcaacgugaccugcggcagcggcaucagagugagaaagagaaagggcagcaacaagaaggccgaggaccugacccuggaggacaucgacaccgagaucugcaagauggacaagugcagcagcaucuucaacaucgugagcaacagccugggcuucgugauccugcuggugcugguguucuucaacugaggacuagugcaucacauuuaaaagcaucucagccuaccaugagaauaagagaaagaaaaugaagaucaauagcuuauucaucucuuuuucuuuuucguugguguaaagccaacacccugucuaaaaaacauaaauuucuuuaaucauuuugccucuuuucucugugcuucaauuaauaaaaaauggaaagaaccuagaucuaaaaaaaaaaaaaaaaaaaaaaaaaaaaaaaaaaaaaaaaaaaaaaaaaaaaaaaaaaaaaaaaugcaucccccccccccccccccccccccccccccccaaaggcucuuuucagagccaccagaauu

SEQ ID NO: 1384 - RNA, 1574 nt, Artificial Sequence
  mRNA Design i-2 (A64-N5-C30-hSL-N5) comprising derived and/or modified sequence from Pb(ANKA)__XP_022712148.1__Pb-CSP_L(G4SG4)_TM domain HA (opt4)
aggagaggcgcugccuacggagguggcagccaucuccuucucggcaucaagcuuaccaugaagaagugcaccauccuggugguggccagccugcugcuggugaacagccugcugcccggcuacggccagaacaagagcauccaggcccagagaaaccugaacgagcugugcuacaacgagggcaacgacaacaagcuguaccacgugcugaacagcaagaacggcaagaucuacaacagaaacaccgugaacagacugcuggccgacgcccccgagggcaagaagaacgagaagaagaacgagaagaucgagagaaacaacaagcugaagcagcccccccccccccccaaccccaacgacccccccccccccaaccccaacgacccccccccccccaaccccaacgacccccccccccccaaccccaacgacccccccccccccaacgccaacgacccccccccccccaacgccaacgaccccgccccccccaacgccaacgaccccgccccccccaacgccaacgaccccgccccccccaacgccaacgaccccgccccccccaacgccaacgacccccccccccccaaccccaacgaccccgccccccccaacgccaacgacccccccccccccaaccccaacgaccccgcccccccccagggcaacaacaacccccagccccagcccagaccccagccccagccccagccccagccccagccccagccccagccccagccccagcccagaccccagccccagccccagcccggcggcaacaacaacaacaagaacaacaacaacgacgacagcuacauccccagcgccgagaagauccuggaguucgugaagcagaucagagacagcaucaccgaggaguggagccagugcaacgugaccugcggcagcggcaucagagugagaaagagaaagggcagcaacaagaaggccgaggaccugacccuggaggacaucgacaccgagaucugcaagauggacaagugcagcagcaucuucaacaucgugagcaacagccugggcuucgugauccugcuggugcugguguucuucaacggcggcggcggcagcggcggcggcggcaagcuggagagcaccagaaucuaccagauccuggccaucuacagcaccguggccagcagccuggugcugguggugagccugggcgccaucagcuucuggaugugcagcaacggcagccugcagugcagaaucugcaucugaggacuagugcaucacauuuaaaagcaucucagccuaccaugagaauaagagaaagaaaaugaagaucaauagcuuauucaucucuuuuucuuuuucguugguguaaagccaacacccugucuaaaaaacauaaauuucuuuaaucauuuugccucuuuucucugugcuucaauuaauaaaaaauggaaagaaccuagaucuaaaaaaaaaaaaaaaaaaaaaaaaaaaaaaaaaaaaaaaaaaaaaaaaaaaaaaaaaaaaaaaaugcaucccccccccccccccccccccccccccccccaaaggcucuuuucagagccaccagaauu

SEQ ID NO: 1385 - RNA, 1394 nt, Artificial Sequence
  mRNA Design i-2 (A64-N5-C30-hSL-N5) comprising derived and/or modified sequence from Pb(ANKA)__XP_022712148.1__HsALB_Pb-CSP(24-340) (opt4)
aggagaggcgcugccuacggagguggcagccaucuccuucucggcaucaagcuuaccaugaagugggugaccuucaucagccugcuguuccuguucagcagcgccuacagccagaacaagagcauccaggcccagagaaaccugaacgagcugugcuacaacgagggcaacgacaacaagcuguaccacgugcugaacagcaagaacggcaagaucuacaacagaaacaccgugaacagacugcuggccgacgcccccgagggcaagaagaacgagaagaagaacgagaagaucgagagaaacaacaagcugaagcagcccccccccccccccaaccccaacgacccccccccccccaaccccaacgacccccccccccccaaccccaacgacccccccccccccaaccccaacgacccccccccccccaacgccaacgacccccccccccccaacgccaacgaccccgccccccccaacgccaacgaccccgccccccccaacgccaacgaccccgccccccccaacgccaacgaccccgccccccccaacgccaacgacccccccccccccaaccccaacgaccccgccccccccaacgccaacgacccccccccccccaaccccaacgaccccgcccccccccagggcaacaacaacccccagccccagcccagaccccagccccagccccagccccagccccagccccagccccagccccagccccagcccagaccccagccccagccccagcccggcggcaacaacaacaacaagaacaacaacaacgacgacagcuacauccccagcgccgagaagauccuggaguucgugaagcagaucagagacagcaucaccgaggaguggagccagugcaacgugaccugcggcagcggcaucagagugagaaagagaaagggcagcaacaagaaggccgaggaccugacccuggaggacaucgacaccgagaucugcaagauggacaagugcagcagcaucuucaacaucgugagcaacagccugggcuucgugauccugcuggugcugguguucuucaacugaggacuagugcaucacauuuaaaagcaucucagccuaccaugagaauaagagaaagaaaaugaagaucaauagcuuauucaucucuuuuucuuuuucguugguguaaagccaacacccugucuaaaaaacauaaauuucuuuaaucauuuugccucuuuucucugugcuucaauuaauaaaaaauggaaagaaccuagaucuaaaaaaaaaaaaaaaaaaaaaaaaaaaaaaaaaaaaaaaaaaaaaaaaaaaaaaaaaaaaaaaaugcaucccccccccccccccccccccccccccccccaaaggcucuuuucagagccaccagaauu

SEQ ID NO: 1386 - RNA, 1412 nt, Artificial Sequence
  mRNA Design i-2 (A64-N5-C30-hSL-N5) comprising derived and/or modified sequence from Pb(ANKA)__XP_022712148.1__HsIns-iso1_Pb-CSP(24-340) (opt4)
aggagaggcgcugccuacggagguggcagccaucuccuucucggcaucaagcuuaccauggcccuguggaugagacugcugccccugcuggcccugcuggcccuguggggccccgaccccgccgccgcccagaacaagagcauccaggcccagagaaaccugaacgagcugugcuacaacgagggcaacgacaacaagcuguaccacgugcugaacagcaagaacggcaagaucuacaacagaaacaccgugaacagacugcuggccgacgcccccgagggcaagaagaacgagaagaagaacgagaagaucgagagaaacaacaagcugaagcagcccccccccccccccaaccccaacgacccccccccccccaaccccaacgacccccccccccccaaccccaacgacccccccccccccaaccccaacgacccccccccccccaacgccaacgacccccccccccccaacgccaacgaccccgccccccccaacgccaacgaccccgccccccccaacgccaacgaccccgccccccccaacgccaacgaccccgccccccccaacgccaacgacccccccccccccaaccccaacgaccccgccccccccaacgccaacgacccccccccccccaaccccaacgaccccgcccccccccagggcaacaacaacccccagccccagcccagaccccagccccagccccagccccagccccagccccagccccagccccagccccagcccagaccccagccccagccccagcccggcggcaacaacaacaacaagaacaacaacaacgacgacagcuacauccccagcgccgagaagauccuggaguucgugaagcagaucagagacagcaucaccgaggaguggagccagugcaacgugaccugcggcagcggcaucagagugagaaagagaaagggcagcaacaagaaggccgaggaccugacccuggaggacaucgacaccgagaucugcaagauggacaagugcagcagcaucuucaacaucgugagcaacagccugggcuucgugauccugcuggugcugguguucuucaacugaggacuagugcaucacauuuaaaagcaucucagccuaccaugagaauaagagaaagaaaaugaagaucaauagcuuauucaucucuuuuucuuuuucguugguguaaagccaacacccugucuaaaaaacauaaauuucuuuaaucauuuugccucuuuucucugugcuucaauuaauaaaaaauggaaagaaccuagaucuaaaaaaaaaaaaaaaaaaaaaaaaaaaaaaaaaaaaaaaaaaaaaaaaaaaaaaaaaaaaaaaaugcaucccccccccccccccccccccccccccccccaaaggcucuuuucagagccaccagaauu

SEQ ID NO: 1387 - RNA, 1391 nt, Artificial Sequence
  mRNA Design i-2 (A64-N5-C30-hSL-N5) comprising derived and/or modified sequence from Pb(ANKA)__XP_022712148.1__HsSPARC_Pb-CSP(24-340) (opt4)
aggagaggcgcugccuacggagguggcagccaucuccuucucggcaucaagcuuaccaugagagccuggaucuucuuccugcugugccuggccggcagagcccuggcccagaacaagagcauccaggcccagagaaaccugaacgagcugugcuacaacgagggcaacgacaacaagcuguaccacgugcugaacagcaagaacggcaagaucuacaacagaaacaccgugaacagacugcuggccgacgcccccgagggcaagaagaacgagaagaagaacgagaagaucgagagaaacaacaagcugaagcagcccccccccccccccaaccccaacgacccccccccccccaaccccaacgacccccccccccccaaccccaacgacccccccccccccaaccccaacgacccccccccccccaacgccaacgacccccccccccccaacgccaacgaccccgccccccccaacgccaacgaccccgccccccccaacgccaacgaccccgccccccccaacgccaacgaccccgccccccccaacgccaacgacccccccccccccaaccccaacgaccccgccccccccaacgccaacgacccccccccccccaaccccaacgaccccgcccccccccagggcaacaacaacccccagccccagcccagaccccagccccagccccagccccagccccagccccagccccagccccagccccagcccagaccccagccccagccccagcccggcggcaacaacaacaacaagaacaacaacaacgacgacagcuacauccccagcgccgagaagauccuggaguucgugaagcagaucagagacagcaucaccgaggaguggagccagugcaacgugaccugcggcagcggcaucagagugagaaagagaaagggcagcaacaagaaggccgaggaccugacccuggaggacaucgacaccgagaucugcaagauggacaagugcagcagcaucuucaacaucgugagcaacagccugggcuucgugauccugcuggugcugguguucuucaacugaggacuagugcaucacauuuaaaagcaucucagccuaccaugagaauaagagaaagaaaaugaagaucaauagcuuauucaucucuuuuucuuuuucguugguguaaagccaacacccugucuaaaaaacauaaauuucuuuaaucauuuugccucuuuucucugugcuucaauuaauaaaaaauggaaagaaccuagaucuaaaaaaaaaaaaaaaaaaaaaaaaaaaaaaaaaaaaaaaaaaaaaaaaaaaaaaaaaaaaaaaaugcaucccccccccccccccccccccccccccccccaaaggcucuuuucagagccaccagaauu

SEQ ID NO: 1388 - RNA, 1394 nt, Artificial Sequence
  mRNA Design i-2 (A64-N5-C30-hSL-N5) comprising derived and/or modified sequence from Pb(ANKA)__XP_022712148.1__IgE_Pb-CSP(24-340) (opt4)
aggagaggcgcugccuacggagguggcagccaucuccuucucggcaucaagcuuaccauggacuggaccuggauccuguuccugguggccgccgccaccagagugcacagccagaacaagagcauccaggcccagagaaaccugaacgagcugugcuacaacgagggcaacgacaacaagcuguaccacgugcugaacagcaagaacggcaagaucuacaacagaaacaccgugaacagacugcuggccgacgcccccgagggcaagaagaacgagaagaagaacgagaagaucgagagaaacaacaagcugaagcagcccccccccccccccaaccccaacgacccccccccccccaaccccaacgacccccccccccccaaccccaacgacccccccccccccaaccccaacgacccccccccccccaacgccaacgacccccccccccccaacgccaacgaccccgccccccccaacgccaacgaccccgccccccccaacgccaacgaccccgccccccccaacgccaacgaccccgccccccccaacgccaacgacccccccccccccaaccccaacgaccccgccccccccaacgccaacgacccccccccccccaaccccaacgaccccgcccccccccagggcaacaacaacccccagccccagcccagaccccagccccagccccagccccagccccagccccagccccagccccagccccagcccagaccccagccccagccccagcccggcggcaacaacaacaacaagaacaacaacaacgacgacagcuacauccccagcgccgagaagauccuggaguucgugaagcagaucagagacagcaucaccgaggaguggagccagugcaacgugaccugcggcagcggcaucagagugagaaagagaaagggcagcaacaagaaggccgaggaccugacccuggaggacaucgacaccgagaucugcaagauggacaagugcagcagcaucuucaacaucgugagcaacagccugggcuucgugauccugcuggugcugguguucuucaacugaggacuagugcaucacauuuaaaagcaucucagccuaccaugagaauaagagaaagaaaaugaagaucaauagcuuauucaucucuuuuucuuuuucguugguguaaagccaacacccugucuaaaaaacauaaauuucuuuaaucauuuugccucuuuucucugugcuucaauuaauaaaaaauggaaagaaccuagaucuaaaaaaaaaaaaaaaaaaaaaaaaaaaaaaaaaaaaaaaaaaaaaaaaaaaaaaaaaaaaaaaaugcaucccccccccccccccccccccccccccccccaaaggcucuuuucagagccaccagaauu

SEQ ID NO: 1389 - RNA, 1580 nt, Artificial Sequence
  mRNA Design i-2 (A64-N5-C30-hSL-N5) comprising derived and/or modified sequence from Pf(3D7)__XP_001351122.1__Pf-CSP (opt5)
aggagaggcgcugccuacggagguggcagccaucuccuucucggcaucaagcuuaccaugaugagaaagcuggccauccucagcguguccucuuuccuguuugucgaggcucuuuuccaggaauaccaaugcuauggcagcuccucuaacacccggguucugaaugagcucaacuacgacaaugccgggacaaaccuguauaaugaacuugagaugaacuacuauggaaaacaggaaaauugguacagccugaagaaaaacucccgcucucucggcgagaaugaugacgggaacaaugaggauaacgaaaagcugagaaaacccaagcacaagaaacugaagcagccugcggacggaaauccggaucccaacgcuaauccuaacguggaccccaacgccaauccuaacguggaucccaaugccaacccuaaugucgacccgaacgcuaaucccaacgccaauccuaacgcuaaucccaacgccaauccuaacgcgaaucccaacgccaacccgaaugcuaacccuaaugccaaccccaaugcuaacccuaaugccaaccccaaugcgaaccccaaugccaacccuaaugcuaacccgaaugccaaccccaacgcuaauccuaacgccaaucccaacgccaauccuaacguggaucccaaugcuaacccgaaugcgaacccuaaugccaaccccaaugcuaacccuaaugccaaccccaacgccaauccuaacgcuaaucccaacgccaauccgaacgcgaauccuaacgcuaaucccaacgccaaucccaacgccaauccuaacgcuaauccgaacgccaaucccaacgcuaacccuaaugccaaccccaaugcgaacccuaaugccaaccccaauaaaaacaaucagggcaacgggcaaggacauaauaugccuaacgaccccaaucggaacguugaugagaaugcuaacgccaacagcgcugugaagaauaacaauaacgaggaaccguccgacaaacacauuaaggaguaucucaauaagauccagaacagccugucuacggaaugguccccuuguagcgugaccugcggcaauggcauucagguccgcaucaaacccgggucugccaacaagccuaaagaugagcuugacuacgcgaaugacauugaaaagaaaaucuguaagauggagaaaugcuccagcguuuuuaacguggucaauucuuccaucggacugauuauggugcucagcuuccuguuucuuaacugaggacuagugcaucacauuuaaaagcaucucagccuaccaugagaauaagagaaagaaaaugaagaucaauagcuuauucaucucuuuuucuuuuucguugguguaaagccaacacccugucuaaaaaacauaaauuucuuuaaucauuuugccucuuuucucugugcuucaauuaauaaaaaauggaaagaaccuagaucuaaaaaaaaaaaaaaaaaaaaaaaaaaaaaaaaaaaaaaaaaaaaaaaaaaaaaaaaaaaaaaaaugcaucccccccccccccccccccccccccccccccaaaggcucuuuucagagccaccagaauu

SEQ ID NO: 1390 - RNA, 1511 nt, Artificial Sequence
  mRNA Design i-2 (A64-N5-C30-hSL-N5) comprising derived and/or modified sequence from Pf(3D7)__XP_001351122.1__Pf-CSP(1-374) (opt5)
aggagaggcgcugccuacggagguggcagccaucuccuucucggcaucaagcuuaccaugaugagaaagcuggccauccucagcguguccucuuuccuguuugucgaggcucuuuuccaggaauaccaaugcuauggcagcuccucuaacacccggguucugaaugagcucaacuacgacaaugccgggacaaaccuguauaaugaacuugagaugaacuacuauggaaaacaggaaaauugguacagccugaagaaaaacucccgcucucucggcgagaaugaugacgggaacaaugaggauaacgaaaagcugagaaaacccaagcacaagaaacugaagcagccugcggacggaaauccggaucccaacgcuaauccuaacguggaccccaacgccaauccuaacguggaucccaaugccaacccuaaugucgacccgaacgcuaaucccaacgccaauccuaacgcuaaucccaacgccaauccuaacgcgaaucccaacgccaacccgaaugcuaacccuaaugccaaccccaaugcuaacccuaaugccaaccccaaugcgaaccccaaugccaacccuaaugcuaacccgaaugccaaccccaacgcuaauccuaacgccaaucccaacgccaauccuaacguggaucccaaugcuaacccgaaugcgaacccuaaugccaaccccaaugcuaacccuaaugccaaccccaacgccaauccuaacgcuaaucccaacgccaauccgaacgcgaauccuaacgcuaaucccaacgccaaucccaacgccaauccuaacgcuaauccgaacgccaaucccaacgcuaacccuaaugccaaccccaaugcgaacccuaaugccaaccccaauaaaaacaaucagggcaacgggcaaggacauaauaugccuaacgaccccaaucggaacguugaugagaaugcuaacgccaacagcgcugugaagaauaacaauaacgaggaaccguccgacaaacacauuaaggaguaucucaauaagauccagaacagccugucuacggaaugguccccuuguagcgugaccugcggcaauggcauucagguccgcaucaaacccgggucugccaacaagccuaaagaugagcuugacuacgcgaaugacauugaaaagaaaaucuguaagauggagaaaugcugaggacuagugcaucacauuuaaaagcaucucagccuaccaugagaauaagagaaagaaaaugaagaucaauagcuuauucaucucuuuuucuuuuucguugguguaaagccaacacccugucuaaaaaacauaaauuucuuuaaucauuuugccucuuuucucugugcuucaauuaauaaaaaauggaaagaaccuagaucuaaaaaaaaaaaaaaaaaaaaaaaaaaaaaaaaaaaaaaaaaaaaaaaaaaaaaaaaaaaaaaaaugcaucccccccccccccccccccccccccccccccaaaggcucuuuucagagccaccagaauu

SEQ ID NO: 1391 - RNA, 1364 nt, Artificial Sequence
  mRNA Design i-2 (A64-N5-C30-hSL-N5) comprising derived and/or modified sequence from Pf(3D7)__XP_001351122.1__Pf-CSP(1-325) (opt5)
aggagaggcgcugccuacggagguggcagccaucuccuucucggcaucaagcuuaccaugaugagaaagcuggccauccucagcguguccucuuuccuguuugucgaggcucuuuuccaggaauaccaaugcuauggcagcuccucuaacacccggguucugaaugagcucaacuacgacaaugccgggacaaaccuguauaaugaacuugagaugaacuacuauggaaaacaggaaaauugguacagccugaagaaaaacucccgcucucucggcgagaaugaugacgggaacaaugaggauaacgaaaagcugagaaaacccaagcacaagaaacugaagcagccugcggacggaaauccggaucccaacgcuaauccuaacguggaccccaacgccaauccuaacguggaucccaaugccaacccuaaugucgacccgaacgcuaaucccaacgccaauccuaacgcuaaucccaacgccaauccuaacgcgaaucccaacgccaacccgaaugcuaacccuaaugccaaccccaaugcuaacccuaaugccaaccccaaugcgaaccccaaugccaacccuaaugcuaacccgaaugccaaccccaacgcuaauccuaacgccaaucccaacgccaauccuaacguggaucccaaugcuaacccgaaugcgaacccuaaugccaaccccaaugcuaacccuaaugccaaccccaacgccaauccuaacgcuaaucccaacgccaauccgaacgcgaauccuaacgcuaaucccaacgccaaucccaacgccaauccuaacgcuaauccgaacgccaaucccaacgcuaacccuaaugccaaccccaaugcgaacccuaaugccaaccccaauaaaaacaaucagggcaacgggcaaggacauaauaugccuaacgaccccaaucggaacguugaugagaaugcuaacgccaacagcgcugugaagaauaacaauaacgaggaaccguccgacaaacacauuaaggaguaucucaauaagauccagaacugaggacuagugcaucacauuuaaaagcaucucagccuaccaugagaauaagagaaagaaaaugaagaucaauagcuuauucaucucuuuuucuuuuucguugguguaaagccaacacccugucuaaaaaacauaaauuucuuuaaucauuuugccucuuuucucugugcuucaauuaauaaaaaauggaaagaaccuagaucuaaaaaaaaaaaaaaaaaaaaaaaaaaaaaaaaaaaaaaaaaaaaaaaaaaaaaaaaaaaaaaaaugcaucccccccccccccccccccccccccccccccaaaggcucuuuucagagccaccagaauu

SEQ ID NO: 1392 - RNA, 1580 nt, Artificial Sequence
  mRNA Design i-2 (A64-N5-C30-hSL-N5) comprising derived and/or modified sequence from Pf(3D7)__XP_001351122.1__HsALB_Pf-CSP(19-397) (opt5)
aggagaggcgcugccuacggagguggcagccaucuccuucucggcaucaagcuuaccaugaagugggugaccuucaucagccugcucuuucuguucuccucugccuacagccuuuuucaggaguaucaaugcuacggcuccucuagcaacacaagaguccugaaugaacucaacuaugacaaugcugggacgaaccuguacaaugagcuugaaaugaacuauuacggaaaacaggagaauugguauucccugaagaaaaacucucggagccucggcgaaaaugaugacgggaacaaugaggauaacgagaagcugcgcaaacccaagcacaagaaacugaagcagccugccgacggaaauccggaucccaacgcgaauccuaacguugaccccaacgcuaauccuaacguggaucccaaugccaacccuaauguggacccgaacgccaaucccaacgcuaauccuaacgccaaucccaacgcuaauccuaacgccaaucccaacgcgaacccgaaugccaacccuaaugcuaaccccaaugccaacccuaaugcuaaccccaaugccaaccccaaugcgaacccuaaugccaacccgaaugcuaaccccaacgccaauccuaacgcuaaucccaacgccaauccuaacgucgaucccaaugccaacccgaaugcuaacccuaaugcgaaccccaaugccaacccuaaugcuaaccccaacgccaauccuaacgccaaucccaacgcuaauccgaacgccaauccuaacgcgaaucccaacgcuaaucccaacgccaauccuaacgccaauccgaacgcuaaucccaacgccaacccuaaugcuaaccccaaugccaacccuaaugcgaaccccaauaaaaacaaucagggcaacgggcaaggacauaauaugccuaacgaccccaauagaaacguggaugaaaaugccaacgcuaacuccgccguuaagaauaacaauaacgaggaaccgagcgacaaacacauuaaggaguaccucaauaagauccagaacucucuguccaccgaguggagcccuuguucugugacaugcggcaauggcauucagguccggaucaaacccggguccgcuaacaagccuaaagaugaacuugacuacgccaaugacauugagaagaaaaucuguaagauggaaaaaugcagcucuguguucaacguugucaauuccagcaucggacugauuauggugcucuccuuucuguuccuuaacugaggacuagugcaucacauuuaaaagcaucucagccuaccaugagaauaagagaaagaaaaugaagaucaauagcuuauucaucucuuuuucuuuuucguugguguaaagccaacacccugucuaaaaaacauaaauuucuuuaaucauuuugccucuuuucucugugcuucaauuaauaaaaaauggaaagaaccuagaucuaaaaaaaaaaaaaaaaaaaaaaaaaaaaaaaaaaaaaaaaaaaaaaaaaaaaaaaaaaaaaaaaugcaucccccccccccccccccccccccccccccccaaaggcucuuuucagagccaccagaauu

SEQ ID NO: 1393 - RNA, 1598 nt, Artificial Sequence
  mRNA Design i-2 (A64-N5-C30-hSL-N5) comprising derived and/or modified sequence from Pf(3D7)__XP_001351122.1__HsIns-iso1_Pf-CSP(19-397) (opt5)
aggagaggcgcugccuacggagguggcagccaucuccuucucggcaucaagcuuaccauggcccuguggaugagacuccugccccuucuggcucuccuggcccuuuggggcccugacccggcggcugcccuguuccaggaguaccaaugcuaugggagcuccucuaacacccgggugcucaaugaacugaacuacgauaaugccggaacaaaccuguauaaugagcucgaaaugaacuacuauggcaagcaggagaauugguacagccugaaaaagaacucccgcucucuuggggaaaaugacgauggaaacaaugaggacaacgagaaacugagaaagcccaaacacaagaagcucaaacagccugcugauggcaaucccgacccuaacgccaaucccaacgucgauccuaacgcuaauccgaacguugaccccaaugccaacccuaauguggaucccaacgcgaauccuaacgccaaucccaacgcuaauccgaacgccaauccuaacgcuaaucccaacgccaacccuaaugcgaaccccaaugccaaccccaaugcuaacccuaaugccaacccgaaugcuaaccccaaugccaacccuaaugccaaccccaaugcuaacccuaacgcgaaucccaacgccaauccgaacgcuaauccuaacguggaccccaaugccaacccuaaugccaaccccaaugcuaacccuaaugccaaccccaaugcgaacccgaacgcuaauccuaacgccaaucccaacgccaaucccaacgcuaauccuaacgccaauccgaacgcuaaucccaacgccaauccuaacgcgaaucccaacgccaauccuaacgcuaaccccaaugccaacccuaaugcuaaccccaaugccaacccgaauaagaacaaucaggggaacggacaaggccauaauaugccuaacgaucccaaucggaacgucgacgaaaaugcgaacgccaacagcgcugugaaaaauaacaauaacgaggaaccuuccgauaagcacaucaaagaguaucugaauaagauucagaacucucuuagcacggaguggucccccuguagcguuaccugcggcaaugggauccaggugcgcauuaagccgggaucugccaacaaaccuaaggacgaacuggacuacgcuaaugauaucgagaaaaagauuuguaaaauggaaaagugcuccagcgucuuuaacgugguuaauucuuccaucggccucaucauggugcugagcuuccuguuucucaacugaggacuagugcaucacauuuaaaagcaucucagccuaccaugagaauaagagaaagaaaaugaagaucaauagcuuauucaucucuuuuucuuuuucguugguguaaagccaacacccugucuaaaaaacauaaauuucuuuaaucauuuugccucuuuucucugugcuucaauuaauaaaaaauggaaagaaccuagaucuaaaaaaaaaaaaaaaaaaaaaaaaaaaaaaaaaaaaaaaaaaaaaaaaaaaaaaaaaaaaaaaaugcaucccccccccccccccccccccccccccccccaaaggcucuuuucagagccaccagaauu

SEQ ID NO: 1394 - RNA, 1577 nt, Artificial Sequence
  mRNA Design i-2 (A64-N5-C30-hSL-N5) comprising derived and/or modified sequence from Pf(3D7)__XP_001351122.1__HsSPARC_Pf-CSP(19-397) (opt5)
aggagaggcgcugccuacggagguggcagccaucuccuucucggcaucaagcuuaccaugagagccuggaucuucuuucugcucugccuggcuggccgggcccuugcgcuguuccaggaguaccaauguuaugggagcuccucuaacacccgcgugcucaaugaacugaacuacgacaaugcuggaacaaaccuuuauaaugagcuggaaaugaacuacuauggcaagcaggagaauugguacagccucaaaaagaacuccagaucucugggggaaaaugaugacggaaacaaugaggauaacgagaaacugcggaagcccaaacacaagaagcucaaacagccugccgacggcaauccggaucccaacgccaauccuaacgucgaccccaacgcuaauccuaacguugaucccaaugccaacccuaauguggacccgaacgcuaaucccaacgccaauccuaacgcgaaucccaacgccaauccuaacgcuaaucccaacgccaacccgaaugcuaacccuaaugccaaccccaaugcgaacccuaaugccaaccccaaugcuaaccccaaugccaacccuaaugcuaacccgaaugccaaccccaacgccaauccuaacgcuaaucccaacgcgaauccuaacguggaucccaaugccaacccgaaugcuaacccuaaugccaaccccaaugccaacccuaaugcuaaccccaacgccaauccuaacgcgaaucccaacgcuaauccgaacgccaauccuaacgccaaucccaacgcuaaucccaacgccaauccuaacgcuaauccgaacgccaaucccaacgcgaacccuaaugccaaccccaaugcuaacccuaaugccaaccccaauaagaacaaucaggggaacggacaaggccauaauaugccuaacgaccccaaucgcaacgucgaugaaaaugcuaacgccaacagcgcggugaaaaauaacaauaacgaggaaccguccgacaagcacauuaaagaguaucugaauaagauccagaacucucuuagcacggagugguccccuugcagcguuaccuguggcaaugggauucaggugagaaucaagcccggaucugccaacaaaccuaaggaugaacuggacuacgcuaaugacauugagaaaaagaucugcaaaauggaaaaguguuccagcgucuuuaacgugguuaauucuuccaucggccucauuauggugcugagcuuccuuuuucugaacugaggacuagugcaucacauuuaaaagcaucucagccuaccaugagaauaagagaaagaaaaugaagaucaauagcuuauucaucucuuuuucuuuuucguugguguaaagccaacacccugucuaaaaaacauaaauuucuuuaaucauuuugccucuuuucucugugcuucaauuaauaaaaaauggaaagaaccuagaucuaaaaaaaaaaaaaaaaaaaaaaaaaaaaaaaaaaaaaaaaaaaaaaaaaaaaaaaaaaaaaaaaugcaucccccccccccccccccccccccccccccccaaaggcucuuuucagagccaccagaauu

SEQ ID NO: 1395 - RNA, 1580 nt, Artificial Sequence
  mRNA Design i-2 (A64-N5-C30-hSL-N5) comprising derived and/or modified sequence from Pf(3D7)__XP_001351122.1__IgE_Pf-CSP(19-397) (opt5)
aggagaggcgcugccuacggagguggcagccaucuccuucucggcaucaagcuuaccauggacuggaccuggauccuguuccucguggccgcugccacaagaguccacagccuguuucaggaguaccaaugcuauggcuccucuagcaacacgcggguucuuaaugaacugaacuacgauaaugcggggaccaaccucuauaaugagcuggaaaugaacuacuauggaaagcaggagaauugguacucccuuaaaaagaacucucgcagccugggcgaaaaugacgaugggaacaaugaggacaacgagaaacucagaaagcccaaacauaagaagcugaaacagccugcugauggaaauccggaccccaacgccaauccuaacguggaucccaacgccaauccuaacguggaccccaaugcuaacccuaaugucgauccgaacgccaaucccaacgcuaauccuaacgccaaucccaacgcgaauccuaacgccaaucccaacgcuaacccgaaugccaacccuaaugcuaaccccaaugccaacccuaaugcgaaccccaaugccaaccccaaugcuaacccuaaugccaacccgaaugcuaaccccaacgccaauccuaacgccaaucccaacgcuaauccuaacguggaccccaaugcgaacccgaaugccaacccuaaugcuaaccccaaugccaacccuaaugccaaccccaacgcuaauccuaacgccaaucccaacgcgaauccgaacgcuaauccuaacgccaaucccaacgccaaucccaacgcuaauccuaacgccaauccgaacgcuaaucccaacgccaacccuaaugcgaaccccaaugccaacccuaaugcuaaccccaauaagaacaaucagggcaacgggcaaggacacaauaugccuaacgaucccaaucggaacguugacgaaaaugccaacgcuaacuccgccgugaaaaauaacaauaacgaggaaccgucugauaagcauauuaaagaguaucugaauaagauccagaacagccucuccacagaguggagcccuuguucugugaccugcggcaauggcauucagguccgcaucaagcccggguccgcgaacaaaccuaaggacgaacuggacuacgccaaugauauugagaaaaagaucuguaaaauggaaaagugcagcucuguuuucaacguggucaauuccagcaucggacuuauuauggugcugucuuuucucuuccugaacugaggacuagugcaucacauuuaaaagcaucucagccuaccaugagaauaagagaaagaaaaugaagaucaauagcuuauucaucucuuuuucuuuuucguugguguaaagccaacacccugucuaaaaaacauaaauuucuuuaaucauuuugccucuuuucucugugcuucaauuaauaaaaaauggaaagaaccuagaucuaaaaaaaaaaaaaaaaaaaaaaaaaaaaaaaaaaaaaaaaaaaaaaaaaaaaaaaaaaaaaaaaugcaucccccccccccccccccccccccccccccccaaaggcucuuuucagagccaccagaauu

SEQ ID NO: 1396 - RNA, 1745 nt, Artificial Sequence
  mRNA Design i-2 (A64-N5-C30-hSL-N5) comprising derived and/or modified sequence from Pf(3D7)__XP_001351122.1__Pf-CSP_L(G4SG4)_TM domain HA (opt5)
aggagaggcgcugccuacggagguggcagccaucuccuucucggcaucaagcuuaccaugaugagaaagcuggccauccucagcguguccucuuuccuguuugucgaggcucuuuuccaggaauaccaaugcuauggcagcuccucuaacacccggguucugaaugagcucaacuacgacaaugccgggacaaaccuguauaaugaacuugagaugaacuacuauggaaaacaggaaaauugguacagccugaagaaaaacucccgcucucucggcgagaaugaugacgggaacaaugaggauaacgaaaagcugagaaaacccaagcacaagaaacugaagcagccugcggacggaaauccggaucccaacgcuaauccuaacguggaccccaacgccaauccuaacguggaucccaaugccaacccuaaugucgacccgaacgcuaaucccaacgccaauccuaacgcuaaucccaacgccaauccuaacgcgaaucccaacgccaacccgaaugcuaacccuaaugccaaccccaaugcuaacccuaaugccaaccccaaugcgaaccccaaugccaacccuaaugcuaacccgaaugccaaccccaacgcuaauccuaacgccaaucccaacgccaauccuaacguggaucccaaugcuaacccgaaugcgaacccuaaugccaaccccaaugcuaacccuaaugccaaccccaacgccaauccuaacgcuaaucccaacgccaauccgaacgcgaauccuaacgcuaaucccaacgccaaucccaacgccaauccuaacgcuaauccgaacgccaaucccaacgcuaacccuaaugccaaccccaaugcgaacccuaaugccaaccccaauaaaaacaaucagggcaacgggcaaggacauaauaugccuaacgaccccaaucggaacguugaugagaaugcuaacgccaacagcgcugugaagaauaacaauaacgaggaaccguccgacaaacacauuaaggaguaucucaauaagauccagaacagccugucuacggaaugguccccuuguagcgugaccugcggcaauggcauucagguccgcaucaaacccgggucugccaacaagccuaaagaugagcuugacuacgcgaaugacauugaaaagaaaaucuguaagauggagaaaugcuccagcguuuuuaacguggucaauucuuccaucggacugauuauggugcucagcuuccuguuucuuaacggcgggggaggcuccgggggaggcggcaagcuggaaucuacaagaaucuaccagauucucgccaucuauagcaccguggcuuccagccugguccugguugugucucucggggccauuuccuucuggauguguagcaauggaucucugcaaugccggaucuguauuugaggacuagugcaucacauuuaaaagcaucucagccuaccaugagaauaagagaaagaaaaugaagaucaauagcuuauucaucucuuuuucuuuuucguugguguaaagccaacacccugucuaaaaaacauaaauuucuuuaaucauuuugccucuuuucucugugcuucaauuaauaaaaaauggaaagaaccuagaucuaaaaaaaaaaaaaaaaaaaaaaaaaaaaaaaaaaaaaaaaaaaaaaaaaaaaaaaaaaaaaaaaugcaucccccccccccccccccccccccccccccccaaaggcucuuuucagagccaccagaauu

SEQ ID NO: 1397 - RNA, 1619 nt, Artificial Sequence
  mRNA Design i-2 (A64-N5-C30-hSL-N5) comprising derived and/or modified sequence from Pf(3D7)__XP_001351122.1__Pf-CSP(199-377)_L(PVTN)_HBsAg (opt5)
aggagaggcgcugccuacggagguggcagccaucuccuucucggcaucaagcuuaccauggaccccaacgccaauccuaacgcuaauccgaacgccaaucccaacgcgaauccuaacgcuaaucccaacgccaauccuaacgccaaucccaacgcuaauccuaacgccaacccgaaugcuaaccccaaugccaacccuaaugcgaaccccaaugccaacccuaaugcuaaccccaaugccaacccgaaugcuaacccuaaugccaaccccaacgcgaauccuaacaagaauaaccagggcaaugggcaaggacacaacaugcccaaugaucccaacagaaauguggacgagaacgccaaugcuaacagcgccgucaaaaauaacaauaacgaggaaccuuccgauaagcauaucaaagaauaccugaacaagauucaaaauucucucagcaccgagugguccccgugcucuguuacauguggcaacgggauccaggugcggauuaaacccggaagcgcuaauaagccuaaggacgaacuggauuaugccaacgacaucgagaaaaagauuugcaaaauggagaaguguuccucugugcccgucacgaauauggaaaacaucaccagcggcuuccuugggccucugcucgugcugcaggccggauuuuuccuucugacacgcauccucaccauuccccagucccuggauagcugguggacaucucugaauuuucucggcggcuccccgguuugccuggggcagaacagccagucuccuaccuccaaucacagccccacaucuuguccucccaucugcccuggauacagauggaugugucuucggcgcuucauuaucuuucuguucauucuccugcuuugccugaucuuucuccuggugcugcucgacuaucagggcaugcugcccgucuguccgcuuauuccuggguccaccacgaccaacacaggacccugcaaaaccuguacaacccccgcucaaggcaauagcauguucccuuccugcugcuguacgaagccgacagaugggaacugcaccuguauccccaucccuucuagcugggcguuugccaaguaccugugggagugggcuuccgugagauucagcuggcucucucugcuuguucccuuugugcagugguucgucggacuguccccuacaguguggcucagcgccauuuggaugaugugguauuggggccccucucuguacagcaucguguccccuuuuauuccccugcucccgaucuucuucugccugugggucuauauuugaggacuagugcaucacauuuaaaagcaucucagccuaccaugagaauaagagaaagaaaaugaagaucaauagcuuauucaucucuuuuucuuuuucguugguguaaagccaacacccugucuaaaaaacauaaauuucuuuaaucauuuugccucuuuucucugugcuucaauuaauaaaaaauggaaagaaccuagaucuaaaaaaaaaaaaaaaaaaaaaaaaaaaaaaaaaaaaaaaaaaaaaaaaaaaaaaaaaaaaaaaaugcaucccccccccccccccccccccccccccccccaaaggcucuuuucagagccaccagaauu

SEQ ID NO: 1398 - RNA, 1661 nt, Artificial Sequence
  mRNA Design i-2 (A64-N5-C30-hSL-N5) comprising derived and/or modified sequence from Pf(3D7)__XP_001351122.1__Pf-CSP(199-387)_L(PVTN)_HBsAg (opt5)
aggagaggcgcugccuacggagguggcagccaucuccuucucggcaucaagcuuaccaugauggcccccgacccuaacgcuaauccgaacgccaaucccaacgcgaauccuaacgcuaaucccaacgccaauccuaacgccaaucccaacgcuaauccuaacgccaauccgaacgcuaaccccaaugccaacccuaaugcgaaccccaaugccaacccuaaugcuaaccccaaugccaacccgaaugcuaacccuaaugccaaccccaaugcgaacccuaacgccaaucccaacaagaauaaccagggcaaugggcaaggacacaacaugcccaaugauccuaacagaaauguggacgagaacgcuaaugccaacagcgcugucaaaaauaacaauaacgaggaaccguccgauaagcauaucaaagaauaccugaacaagauucaaaauucucucagcaccgaguggucccccugcucuguuacauguggcaacgggauccaggugcggauuaaaccuggaagcgccaauaagcccaaggacgaacuggauuaugccaacgacaucgagaaaaagauuugcaaaauggagaaguguuccucuguguucaaugucgugaacagcuccaucggccuugggccuguuacgaauauggaaaacaucaccagcggauuucugggcccccuccuggugcuucaggcuggcuucuuucugcucacacgcauucugaccaucccgcagucucuggauuccugguggacaagccucaauuuccuugggggaucuccugucugccugggccagaacucccagagccccaccucuaaucacuccccuacaagcugucccccuauuugccccggguacagauggaugugucugcggcgcuuuaucauuuuccucuuuauccugcuucugugccucauuuuccugcuggugcuccuggacuaucagggaaugcuuccgguuuguccucugauccccggcuccaccacgaccaacacagggcccugcaaaaccuguacaaccccugcgcaaggaaauucuauguuuccgagcugcugcuguacgaagcccacagauggcaacugcaccuguaucccuauucccuccagcugggccuucgcuaaguaccucugggagugggccucugugagauuuuccuggcugagccuucuggucccuuucgugcagugguuugugggccucucucccacagucuggcugagcgccaucuggaugaugugguauugggggccuucccuguacucuauuguuagccccuucaucccgcuccugccuauuuucuuuugccuuuggguguauaucugaggacuagugcaucacauuuaaaagcaucucagccuaccaugagaauaagagaaagaaaaugaagaucaauagcuuauucaucucuuuuucuuuuucguugguguaaagccaacacccugucuaaaaaacauaaauuucuuuaaucauuuugccucuuuucucugugcuucaauuaauaaaaaauggaaagaaccuagaucuaaaaaaaaaaaaaaaaaaaaaaaaaaaaaaaaaaaaaaaaaaaaaaaaaaaaaaaaaaaaaaaaugcaucccccccccccccccccccccccccccccccaaaggcucuuuucagagccaccagaauu

SEQ ID NO: 1399 - RNA, 845 nt, Artificial Sequence
  mRNA Design i-2 (A64-N5-C30-hSL-N5) comprising derived and/or modified sequence from Pf(3D7)__XP_001351122.1__HsALB_Pf-CSP(19-152) (opt5)
aggagaggcgcugccuacggagguggcagccaucuccuucucggcaucaagcuuaccaugaagugggugaccuucaucagccugcucuuucuguucuccucugccuacagccuuuuucaggaguaucaaugcuacggcuccucuagcaacacaagaguccugaaugaacucaacuaugacaaugcugggacgaaccuguacaaugagcuugaaaugaacuauuacggaaaacaggagaauugguauucccugaagaaaaacucucggagccucggcgaaaaugaugacgggaacaaugaggauaacgagaagcugcgcaaacccaagcacaagaaacugaagcagccugccgacggaaauccggaucccaacgcgaauccuaacguugaccccaacgcuaauccuaacguggaucccaaugccaacccuaauguggacccgaacgccaaucccaacgcuaauccuaacgccaaucccaacgcuaauccuaacgccaaucccaacgcgaacccgugaggacuagugcaucacauuuaaaagcaucucagccuaccaugagaauaagagaaagaaaaugaagaucaauagcuuauucaucucuuuuucuuuuucguugguguaaagccaacacccugucuaaaaaacauaaauuucuuuaaucauuuugccucuuuucucugugcuucaauuaauaaaaaauggaaagaaccuagaucuaaaaaaaaaaaaaaaaaaaaaaaaaaaaaaaaaaaaaaaaaaaaaaaaaaaaaaaaaaaaaaaaugcaucccccccccccccccccccccccccccccccaaaggcucuuuucagagccaccagaauu

SEQ ID NO: 1400 - RNA, 965 nt, Artificial Sequence
  mRNA Design i-2 (A64-N5-C30-hSL-N5) comprising derived and/or modified sequence from Pf(3D7)__XP_001351122.1__HsALB_Pf-CSP(19-192) (opt5)
aggagaggcgcugccuacggagguggcagccaucuccuucucggcaucaagcuuaccaugaagugggugaccuucaucagccugcucuuucuguucuccucugccuacagccuuuuucaggaguaucaaugcuacggcuccucuagcaacacaagaguccugaaugaacucaacuaugacaaugcugggacgaaccuguacaaugagcuugaaaugaacuauuacggaaaacaggagaauugguauucccugaagaaaaacucucggagccucggcgaaaaugaugacgggaacaaugaggauaacgagaagcugcgcaaacccaagcacaagaaacugaagcagccugccgacggaaauccggaucccaacgcgaauccuaacguugaccccaacgcuaauccuaacguggaucccaaugccaacccuaauguggacccgaacgccaaucccaacgcuaauccuaacgccaaucccaacgcuaauccuaacgccaaucccaacgcgaacccgaaugccaacccuaaugcuaaccccaaugccaacccuaaugcuaaccccaaugccaaccccaaugcgaacccuaaugccaacccgaaugcuaaccccaacgccaauccuaacgcuaaucccugaggacuagugcaucacauuuaaaagcaucucagccuaccaugagaauaagagaaagaaaaugaagaucaauagcuuauucaucucuuuuucuuuuucguugguguaaagccaacacccugucuaaaaaacauaaauuucuuuaaucauuuugccucuuuucucugugcuucaauuaauaaaaaauggaaagaaccuagaucuaaaaaaaaaaaaaaaaaaaaaaaaaaaaaaaaaaaaaaaaaaaaaaaaaaaaaaaaaaaaaaaaugcaucccccccccccccccccccccccccccccccaaaggcucuuuucagagccaccagaauu

SEQ ID NO: 1401 - RNA, 1205 nt, Artificial Sequence
  mRNA Design i-2 (A64-N5-C30-hSL-N5) comprising derived and/or modified sequence from Pf(3D7)__XP_001351122.1__HsALB_Pf-CSP(19-272) (opt5)
aggagaggcgcugccuacggagguggcagccaucuccuucucggcaucaagcuuaccaugaagugggugaccuucaucagccugcucuuucuguucuccucugccuacagccuuuuucaggaguaucaaugcuacggcuccucuagcaacacaagaguccugaaugaacucaacuaugacaaugcugggacgaaccuguacaaugagcuugaaaugaacuauuacggaaaacaggagaauugguauucccugaagaaaaacucucggagccucggcgaaaaugaugacgggaacaaugaggauaacgagaagcugcgcaaacccaagcacaagaaacugaagcagccugccgacggaaauccggaucccaacgcgaauccuaacguugaccccaacgcuaauccuaacguggaucccaaugccaacccuaauguggacccgaacgccaaucccaacgcuaauccuaacgccaaucccaacgcuaauccuaacgccaaucccaacgcgaacccgaaugccaacccuaaugcuaaccccaaugccaacccuaaugcuaaccccaaugccaaccccaaugcgaacccuaaugccaacccgaaugcuaaccccaacgccaauccuaacgcuaaucccaacgccaauccuaacgucgaucccaaugccaacccgaaugcuaacccuaaugcgaaccccaaugccaacccuaaugcuaaccccaacgccaauccuaacgccaaucccaacgcuaauccgaacgccaauccuaacgcgaaucccaacgcuaaucccaacgccaauccuaacgccaauccgaacgcuaaucccaacgccaacccuaaugcuaaccccaaugccaacccuaaugcgaaccccugaggacuagugcaucacauuuaaaagcaucucagccuaccaugagaauaagagaaagaaaaugaagaucaauagcuuauucaucucuuuuucuuuuucguugguguaaagccaacacccugucuaaaaaacauaaauuucuuuaaucauuuugccucuuuucucugugcuucaauuaauaaaaaauggaaagaaccuagaucuaaaaaaaaaaaaaaaaaaaaaaaaaaaaaaaaaaaaaaaaaaaaaaaaaaaaaaaaaaaaaaaaugcaucccccccccccccccccccccccccccccccaaaggcucuuuucagagccaccagaauu

SEQ ID NO: 1402 - RNA, 1367 nt, Artificial Sequence
  mRNA Design i-2 (A64-N5-C30-hSL-N5) comprising derived and/or modified sequence from Pf(3D7)__XP_001351122.1__HsALB_Pf-CSP(19-272)_L(AAY)_Pf-CSP(310-3 27)_L(AAY)_Pf-CSP(346-375) (opt5)
aggagaggcgcugccuacggagguggcagccaucuccuucucggcaucaagcuuaccaugaagugggugaccuucaucagccugcucuuucuguucuccucugccuacagccuuuuucaggaguaucaaugcuacggcuccucuagcaacacaagaguccugaaugaacucaacuaugacaaugcugggacgaaccuguacaaugagcuugaaaugaacuauuacggaaaacaggagaauugguauucccugaagaaaaacucucggagccucggcgaaaaugaugacgggaacaaugaggauaacgagaagcugcgcaaacccaagcacaagaaacugaagcagccugccgacggaaauccggaucccaacgcgaauccuaacguugaccccaacgcuaauccuaacguggaucccaaugccaacccuaauguggacccgaacgccaaucccaacgcuaauccuaacgccaaucccaacgcuaauccuaacgccaaucccaacgcgaacccgaaugccaacccuaaugcuaaccccaaugccaacccuaaugcuaaccccaaugccaaccccaaugcgaacccuaaugccaacccgaaugcuaaccccaacgccaauccuaacgcuaaucccaacgccaauccuaacgucgaucccaaugccaacccgaaugcuaacccuaaugcgaaccccaaugccaacccuaaugcuaaccccaacgccaauccuaacgccaaucccaacgcuaauccgaacgccaauccuaacgcgaaucccaacgcuaaucccaacgccaauccuaacgccaauccgaacgcuaaucccaacgccaacccuaaugcuaaccccaaugccaacccuaaugcgaaccccgccgcuuacgaaccuuccgacaaacauauuaaggaguaccucaauaaaauccagaacagccuggccgcuuauauuaagcccggcucugccaauaagccgaaagaugaacuugacuacgcgaacgauaucgagaagaaaauuuguaagauggagaaaugcuccugaggacuagugcaucacauuuaaaagcaucucagccuaccaugagaauaagagaaagaaaaugaagaucaauagcuuauucaucucuuuuucuuuuucguugguguaaagccaacacccugucuaaaaaacauaaauuucuuuaaucauuuugccucuuuucucugugcuucaauuaauaaaaaauggaaagaaccuagaucuaaaaaaaaaaaaaaaaaaaaaaaaaaaaaaaaaaaaaaaaaaaaaaaaaaaaaaaaaaaaaaaaugcaucccccccccccccccccccccccccccccccaaaggcucuuuucagagccaccagaauu

SEQ ID NO: 1403 - RNA, 1328 nt, Artificial Sequence
  mRNA Design i-2 (A64-N5-C30-hSL-N5) comprising derived and/or modified sequence from Pf(3D7)__XP_001351122.1__HsALB_Pf-CSP(19-272)_L(AAY)_Pf-CSP(346-3 65)_L(AAY)_P2 (opt5)
aggagaggcgcugccuacggagguggcagccaucuccuucucggcaucaagcuuaccaugaagugggugaccuucaucagccugcucuuucuguucuccucugccuacagccuuuuucaggaguaucaaugcuacggcuccucuagcaacacaagaguccugaaugaacucaacuaugacaaugcugggacgaaccuguacaaugagcuugaaaugaacuauuacggaaaacaggagaauugguauucccugaagaaaaacucucggagccucggcgaaaaugaugacgggaacaaugaggauaacgagaagcugcgcaaacccaagcacaagaaacugaagcagccugccgacggaaauccggaucccaacgcgaauccuaacguugaccccaacgcuaauccuaacguggaucccaaugccaacccuaauguggacccgaacgccaaucccaacgcuaauccuaacgccaaucccaacgcuaauccuaacgccaaucccaacgcgaacccgaaugccaacccuaaugcuaaccccaaugccaacccuaaugcuaaccccaaugccaaccccaaugcgaacccuaaugccaacccgaaugcuaaccccaacgccaauccuaacgcuaaucccaacgccaauccuaacgucgaucccaaugccaacccgaaugcuaacccuaaugcgaaccccaaugccaacccuaaugcuaaccccaacgccaauccuaacgccaaucccaacgcuaauccgaacgccaauccuaacgcgaaucccaacgcuaaucccaacgccaauccuaacgccaauccgaacgcuaaucccaacgccaacccuaaugcuaaccccaaugccaacccuaaugcgaaccccgccgcuuacauuaaaccuggcuccgccaauaagcccaaagacgaacucgauuacgcuaacgacaucgaggccgcguaucaguacauuaaggccaauagcaaguucaucgggauuaccgaacugugaggacuagugcaucacauuuaaaagcaucucagccuaccaugagaauaagagaaagaaaaugaagaucaauagcuuauucaucucuuuuucuuuuucguugguguaaagccaacacccugucuaaaaaacauaaauuucuuuaaucauuuugccucuuuucucugugcuucaauuaauaaaaaauggaaagaaccuagaucuaaaaaaaaaaaaaaaaaaaaaaaaaaaaaaaaaaaaaaaaaaaaaaaaaaaaaaaaaaaaaaaaugcaucccccccccccccccccccccccccccccccaaaggcucuuuucagagccaccagaauu

SEQ ID NO: 1404 - RNA, 1322 nt, Artificial Sequence
  mRNA Design i-2 (A64-N5-C30-hSL-N5) comprising derived and/or modified sequence from Pf(3D7)__XP_001351122.1__HsALB_Pf-CSP(19-272)_L(AAY)_Pf-CSP(346-3 65)_L(AAY)_PADRE (opt5)
aggagaggcgcugccuacggagguggcagccaucuccuucucggcaucaagcuuaccaugaagugggugaccuucaucagccugcucuuucuguucuccucugccuacagccuuuuucaggaguaucaaugcuacggcuccucuagcaacacaagaguccugaaugaacucaacuaugacaaugcugggacgaaccuguacaaugagcuugaaaugaacuauuacggaaaacaggagaauugguauucccugaagaaaaacucucggagccucggcgaaaaugaugacgggaacaaugaggauaacgagaagcugcgcaaacccaagcacaagaaacugaagcagccugccgacggaaauccggaucccaacgcgaauccuaacguugaccccaacgcuaauccuaacguggaucccaaugccaacccuaauguggacccgaacgccaaucccaacgcuaauccuaacgccaaucccaacgcuaauccuaacgccaaucccaacgcgaacccgaaugccaacccuaaugcuaaccccaaugccaacccuaaugcuaaccccaaugccaaccccaaugcgaacccuaaugccaacccgaaugcuaaccccaacgccaauccuaacgcuaaucccaacgccaauccuaacgucgaucccaaugccaacccgaaugcuaacccuaaugcgaaccccaaugccaacccuaaugcuaaccccaacgccaauccuaacgccaaucccaacgcuaauccgaacgccaauccuaacgcgaaucccaacgcuaaucccaacgccaauccuaacgccaauccgaacgcuaaucccaacgccaacccuaaugcuaaccccaaugccaacccuaaugcgaaccccgccgcuuacauuaaaccuggcuccgccaauaagcccaaagacgaacucgauuacgcuaacgacaucgaggccgcguaugccaaguucguggcugccuggacccugaaggcugccgccugaggacuagugcaucacauuuaaaagcaucucagccuaccaugagaauaagagaaagaaaaugaagaucaauagcuuauucaucucuuuuucuuuuucguugguguaaagccaacacccugucuaaaaaacauaaauuucuuuaaucauuuugccucuuuucucugugcuucaauuaauaaaaaauggaaagaaccuagaucuaaaaaaaaaaaaaaaaaaaaaaaaaaaaaaaaaaaaaaaaaaaaaaaaaaaaaaaaaaaaaaaaugcaucccccccccccccccccccccccccccccccaaaggcucuuuucagagccaccagaauu

SEQ ID NO: 1405 - RNA, 1379 nt, Artificial Sequence
  mRNA Design i-2 (A64-N5-C30-hSL-N5) comprising derived and/or modified sequence from Pf(3D7)__XP_001351122.1__HsALB_Pf-CSP(19-272)_L(G4S)_Pf-CSP(310-3 27)_L(G4S)_Pf-CSP(346-375) (opt5)
aggagaggcgcugccuacggagguggcagccaucuccuucucggcaucaagcuuaccaugaagugggugaccuucaucagccugcucuuucuguucuccucugccuacagccuuuuucaggaguaucaaugcuacggcuccucuagcaacacaagaguccugaaugaacucaacuaugacaaugcugggacgaaccuguacaaugagcuugaaaugaacuauuacggaaaacaggagaauugguauucccugaagaaaaacucucggagccucggcgaaaaugaugacgggaacaaugaggauaacgagaagcugcgcaaacccaagcacaagaaacugaagcagccugccgacggaaauccggaucccaacgcgaauccuaacguugaccccaacgcuaauccuaacguggaucccaaugccaacccuaauguggacccgaacgccaaucccaacgcuaauccuaacgccaaucccaacgcuaauccuaacgccaaucccaacgcgaacccgaaugccaacccuaaugcuaaccccaaugccaacccuaaugcuaaccccaaugccaaccccaaugcgaacccuaaugccaacccgaaugcuaaccccaacgccaauccuaacgcuaaucccaacgccaauccuaacgucgaucccaaugccaacccgaaugcuaacccuaaugcgaaccccaaugccaacccuaaugcuaaccccaacgccaauccuaacgccaaucccaacgcuaauccgaacgccaauccuaacgcgaaucccaacgcuaaucccaacgccaauccuaacgccaauccgaacgcuaaucccaacgccaacccuaaugcuaaccccaaugccaacccuaaugcgaaccccggcgggggaggcuccgaaccuagcgacaaacauauuaaggaguaccucaauaaaauccagaacucucugggcgggggaggcuccauuaagcccgggagcgccaauaagccgaaagaugaacuugacuacgcuaacgauaucgagaagaaaauuuguaagauggagaaaugcucuugaggacuagugcaucacauuuaaaagcaucucagccuaccaugagaauaagagaaagaaaaugaagaucaauagcuuauucaucucuuuuucuuuuucguugguguaaagccaacacccugucuaaaaaacauaaauuucuuuaaucauuuugccucuuuucucugugcuucaauuaauaaaaaauggaaagaaccuagaucuaaaaaaaaaaaaaaaaaaaaaaaaaaaaaaaaaaaaaaaaaaaaaaaaaaaaaaaaaaaaaaaaugcaucccccccccccccccccccccccccccccccaaaggcucuuuucagagccaccagaauu

SEQ ID NO: 1406 - RNA, 1364 nt, Artificial Sequence
  mRNA Design i-2 (A64-N5-C30-hSL-N5) comprising derived and/or modified sequence from Pf(3D7)__XP_001351122.1__HsALB_Pf-CSP(19-272)_L(G4S)_Pf-CSP(310-3 27)_Pf-CSP(346-375) (opt5)
aggagaggcgcugccuacggagguggcagccaucuccuucucggcaucaagcuuaccaugaagugggugaccuucaucagccugcucuuucuguucuccucugccuacagccuuuuucaggaguaucaaugcuacggcuccucuagcaacacaagaguccugaaugaacucaacuaugacaaugcugggacgaaccuguacaaugagcuugaaaugaacuauuacggaaaacaggagaauugguauucccugaagaaaaacucucggagccucggcgaaaaugaugacgggaacaaugaggauaacgagaagcugcgcaaacccaagcacaagaaacugaagcagccugccgacggaaauccggaucccaacgcgaauccuaacguugaccccaacgcuaauccuaacguggaucccaaugccaacccuaauguggacccgaacgccaaucccaacgcuaauccuaacgccaaucccaacgcuaauccuaacgccaaucccaacgcgaacccgaaugccaacccuaaugcuaaccccaaugccaacccuaaugcuaaccccaaugccaaccccaaugcgaacccuaaugccaacccgaaugcuaaccccaacgccaauccuaacgcuaaucccaacgccaauccuaacgucgaucccaaugccaacccgaaugcuaacccuaaugcgaaccccaaugccaacccuaaugcuaaccccaacgccaauccuaacgccaaucccaacgcuaauccgaacgccaauccuaacgcgaaucccaacgcuaaucccaacgccaauccuaacgccaauccgaacgcuaaucccaacgccaacccuaaugcuaaccccaaugccaacccuaaugcgaaccccggcgggggaggcuccgaaccuagcgacaaacauauuaaggaguaccucaauaaaauccagaacucucugauuaagcccggcuccgccaauaagccgaaagaugaacuugacuacgcuaacgauaucgagaagaaaauuuguaagauggagaaaugcagcugaggacuagugcaucacauuuaaaagcaucucagccuaccaugagaauaagagaaagaaaaugaagaucaauagcuuauucaucucuuuuucuuuuucguugguguaaagccaacacccugucuaaaaaacauaaauuucuuuaaucauuuugccucuuuucucugugcuucaauuaauaaaaaauggaaagaaccuagaucuaaaaaaaaaaaaaaaaaaaaaaaaaaaaaaaaaaaaaaaaaaaaaaaaaaaaaaaaaaaaaaaaugcaucccccccccccccccccccccccccccccccaaaggcucuuuucagagccaccagaauu

SEQ ID NO: 1407 - RNA, 1364 nt, Artificial Sequence
  mRNA Design i-2 (A64-N5-C30-hSL-N5) comprising derived and/or modified sequence from Pf(3D7)__XP_001351122.1__HsALB_Pf-CSP(19-325) (opt5)
aggagaggcgcugccuacggagguggcagccaucuccuucucggcaucaagcuuaccaugaagugggugaccuucaucagccugcucuuucuguucuccucugccuacagccuuuuucaggaguaucaaugcuacggcuccucuagcaacacaagaguccugaaugaacucaacuaugacaaugcugggacgaaccuguacaaugagcuugaaaugaacuauuacggaaaacaggagaauugguauucccugaagaaaaacucucggagccucggcgaaaaugaugacgggaacaaugaggauaacgagaagcugcgcaaacccaagcacaagaaacugaagcagccugccgacggaaauccggaucccaacgcgaauccuaacguugaccccaacgcuaauccuaacguggaucccaaugccaacccuaauguggacccgaacgccaaucccaacgcuaauccuaacgccaaucccaacgcuaauccuaacgccaaucccaacgcgaacccgaaugccaacccuaaugcuaaccccaaugccaacccuaaugcuaaccccaaugccaaccccaaugcgaacccuaaugccaacccgaaugcuaaccccaacgccaauccuaacgcuaaucccaacgccaauccuaacgucgaucccaaugccaacccgaaugcuaacccuaaugcgaaccccaaugccaacccuaaugcuaaccccaacgccaauccuaacgccaaucccaacgcuaauccgaacgccaauccuaacgcgaaucccaacgcuaaucccaacgccaauccuaacgccaauccgaacgcuaaucccaacgccaacccuaaugcuaaccccaaugccaacccuaaugcgaaccccaauaaaaacaaucagggcaacgggcaaggacauaauaugccuaacgaccccaauagaaacguggaugaaaaugccaacgcuaacuccgccguuaagaauaacaauaacgaggaaccgagcgacaaacacauuaaggaguaccucaauaagauccagaacugaggacuagugcaucacauuuaaaagcaucucagccuaccaugagaauaagagaaagaaaaugaagaucaauagcuuauucaucucuuuuucuuuuucguugguguaaagccaacacccugucuaaaaaacauaaauuucuuuaaucauuuugccucuuuucucugugcuucaauuaauaaaaaauggaaagaaccuagaucuaaaaaaaaaaaaaaaaaaaaaaaaaaaaaaaaaaaaaaaaaaaaaaaaaaaaaaaaaaaaaaaaugcaucccccccccccccccccccccccccccccccaaaggcucuuuucagagccaccagaauu

SEQ ID NO: 1408 - RNA, 1541 nt, Artificial Sequence
  mRNA Design i-2 (A64-N5-C30-hSL-N5) comprising derived and/or modified sequence from Pf(3D7)__XP_001351122.1__HsALB_Pf-CSP(19-384) (opt5)
aggagaggcgcugccuacggagguggcagccaucuccuucucggcaucaagcuuaccaugaagugggugaccuucaucagccugcucuuucuguucuccucugccuacagccuuuuucaggaguaucaaugcuacggcuccucuagcaacacaagagugcugaaugaacucaacuaugacaaugcugggacgaaccuguacaaugagcuugaaaugaacuauuacggaaaacaggagaauugguauucccugaagaaaaacucucggagccucggcgaaaaugaugacgggaacaaugaggauaacgagaagcugcgcaaacccaagcacaagaaacugaagcagccugccgacggaaauccggaucccaacgcgaauccuaacguugaccccaacgcuaauccuaacguggaucccaaugccaacccuaauguggacccgaacgccaaucccaacgcuaauccuaacgccaaucccaacgcuaauccuaacgccaaucccaacgcgaacccgaaugccaacccuaaugcuaaccccaaugccaacccuaaugcuaaccccaaugccaaccccaaugcgaacccuaaugccaacccgaaugcuaaccccaacgccaauccuaacgcuaaucccaacgccaauccuaacgucgaucccaaugccaacccgaaugcuaacccuaaugcgaaccccaaugccaacccuaaugcuaaccccaacgccaauccuaacgccaaucccaacgcuaauccgaacgccaauccuaacgcgaaucccaacgcuaaucccaacgccaauccuaacgccaauccgaacgcuaaucccaacgccaacccuaaugcuaaccccaaugccaacccuaaugcgaaccccaauaaaaacaaucagggcaacgggcaaggacauaauaugccuaacgaccccaauagaaacguggaugaaaaugccaacgcuaacuccgccguuaagaauaacaauaacgaggaaccgagcgacaaacacauuaaggaguaccucaauaagauccagaacucucuguccaccgaguggagcccuuguucugugacaugcggcaauggcauucagguccggaucaaacccggguccgcuaacaagccuaaagaugaacuugacuacgccaaugacauugagaagaaaaucuguaagauggaaaaaugcagcucuguguucaacguugucaauuccagcugaggacuagugcaucacauuuaaaagcaucucagccuaccaugagaauaagagaaagaaaaugaagaucaauagcuuauucaucucuuuuucuuuuucguugguguaaagccaacacccugucuaaaaaacauaaauuucuuuaaucauuuugccucuuuucucugugcuucaauuaauaaaaaauggaaagaaccuagaucuaaaaaaaaaaaaaaaaaaaaaaaaaaaaaaaaaaaaaaaaaaaaaaaaaaaaaaaaaaaaaaaaugcaucccccccccccccccccccccccccccccccaaaggcucuuuucagagccaccagaauu

SEQ ID NO: 1409 - RNA, 1679 nt, Artificial Sequence
  mRNA Design i-2 (A64-N5-C30-hSL-N5) comprising derived and/or modified sequence from Pf(3D7)__XP_001351122.1__HsALB_Pf-CSP(19-384)_TM domain HA (opt5)
aggagaggcgcugccuacggagguggcagccaucuccuucucggcaucaagcuuaccaugaagugggugaccuucaucagccugcucuuucuguucuccucugccuacagccuuuuucaggaguaucaaugcuacggcuccucuagcaacacaagaguccugaaugaacucaacuaugacaaugcugggacgaaccuguacaaugagcuugaaaugaacuauuacggaaaacaggagaauugguauucccugaagaaaaacucucggagccucggcgaaaaugaugacgggaacaaugaggauaacgagaagcugcgcaaacccaagcacaagaaacugaagcagccugccgacggaaauccggaucccaacgcgaauccuaacguugaccccaacgcuaauccuaacguggaucccaaugccaacccuaauguggacccgaacgccaaucccaacgcuaauccuaacgccaaucccaacgcuaauccuaacgccaaucccaacgcgaacccgaaugccaacccuaaugcuaaccccaaugccaacccuaaugcuaaccccaaugccaaccccaaugcgaacccuaaugccaacccgaaugcuaaccccaacgccaauccuaacgcuaaucccaacgccaauccuaacgucgaucccaaugccaacccgaaugcuaacccuaaugcgaaccccaaugccaacccuaaugcuaaccccaacgccaauccuaacgccaaucccaacgcuaauccgaacgccaauccuaacgcgaaucccaacgcuaaucccaacgccaauccuaacgccaauccgaacgcuaaucccaacgccaacccuaaugcuaaccccaaugccaacccuaaugcgaaccccaauaaaaacaaucagggcaacgggcaaggacauaauaugccuaacgaccccaauagaaacguggaugaaaaugccaacgcuaacuccgccguuaagaauaacaauaacgaggaaccgagcgacaaacacauuaaggaguaccucaauaagauccagaacucucuguccaccgaguggagcccuuguucugugacaugcggcaauggcauucagguccggaucaaacccggguccgcuaacaagccuaaagaugaacuugacuacgccaaugacauugagaagaaaaucuguaagauggaaaaaugcagcucuguguucaacguugucaauuccagcaagcuggaguccacccgcaucuaucagauucucgcgaucuacucuacaguggccagcucccuggugcuuguggucagccugggagcuauuucuuuuuggauguguuccaacggcagccuccaaugcagaaucuguauuugaggacuagugcaucacauuuaaaagcaucucagccuaccaugagaauaagagaaagaaaaugaagaucaauagcuuauucaucucuuuuucuuuuucguugguguaaagccaacacccugucuaaaaaacauaaauuucuuuaaucauuuugccucuuuucucugugcuucaauuaauaaaaaauggaaagaaccuagaucuaaaaaaaaaaaaaaaaaaaaaaaaaaaaaaaaaaaaaaaaaaaaaaaaaaaaaaaaaaaaaaaaugcaucccccccccccccccccccccccccccccccaaaggcucuuuucagagccaccagaauu

SEQ ID NO: 1410 - RNA, 1391 nt, Artificial Sequence
  mRNA Design i-2 (A64-N5-C30-hSL-N5) comprising derived and/or modified sequence from Pf(3D7)__XP_001351122.1__HsALB_Pf-CSP(82-397) (opt5)
aggagaggcgcugccuacggagguggcagccaucuccuucucggcaucaagcuuaccaugaagugggugaccuucaucagccugcucuuucuguucuccucugccuacagcgacaacgagaaacuuagaaagcccaaacacaagaaacugaagcagccugcugauggcaauccggaccccaacgccaauccuaacgucgaucccaaugcgaacccuaauguugaccccaacgcuaauccuaacguggauccgaaugccaaccccaaugccaacccuaaugcuaaccccaacgccaauccuaacgcuaaucccaacgccaauccgaacgcgaauccuaacgccaaucccaacgcuaauccuaacgccaaucccaacgcuaaucccaacgccaacccuaaugcgaacccgaaugccaaccccaaugcuaacccuaaugccaaccccaaugcuaacccuaauguggaccccaacgccaauccgaacgccaauccuaacgcuaaccccaaugcgaacccuaaugccaaccccaaugcuaacccuaaugccaaccccaaugccaacccgaaugcuaacccuaaugccaaccccaaugcgaaccccaacgcuaauccuaacgccaauccgaacgccaaucccaacgcuaauccuaacgccaaucccaacgcuaauccuaacgccaaucccaacaagaauaaccaagggaauggacagggccauaacaugccuaacgaucccaaucggaacgucgacgaaaaugcgaacgccaauuccgcugugaaaaacaauaacaaugaggaaccgucugauaagcacauuaaagaguaucucaacaagauccagaauagccuguccacagaauggucuccuugcagcguuacgugugggaacggcauucaggugcgcaucaaacccggauccgccaauaagccuaaggacgagcuugauuacgcuaacgacauugagaaaaagaucugcaaaauggaaaaguguagcucugucuuuaaugugguuaacuccagcaucgggcugauuauggugcucucuuuccuguuucugaacugaggacuagugcaucacauuuaaaagcaucucagccuaccaugagaauaagagaaagaaaaugaagaucaauagcuuauucaucucuuuuucuuuuucguugguguaaagccaacacccugucuaaaaaacauaaauuucuuuaaucauuuugccucuuuucucugugcuucaauuaauaaaaaauggaaagaaccuagaucuaaaaaaaaaaaaaaaaaaaaaaaaaaaaaaaaaaaaaaaaaaaaaaaaaaaaaaaaaaaaaaaaugcaucccccccccccccccccccccccccccccccaaaggcucuuuucagagccaccagaauu

SEQ ID NO: 1411 - RNA, 743 nt, Artificial Sequence
  mRNA Design i-2 (A64-N5-C30-hSL-N5) comprising derived and/or modified sequence from Pf(3D7)__XP_001351122.1__HsALB_Pf-CSP(93-192) (opt5)
aggagaggcgcugccuacggagguggcagccaucuccuucucggcaucaagcuuaccaugaagugggugaccuucaucagccugcucuuucuguucuccucugccuacagcaaacuuaagcagcccgcugacggcaacccugauccgaaugccaaccccaaugucgacccuaacgcgaaucccaacguugauccuaaugcuaaccccaauguggacccuaacgccaauccgaacgccaaucccaacgcuaauccuaacgccaaccccaaugcuaacccuaaugccaaccccaaugcgaacccgaaugccaacccuaaugcuaaccccaaugccaacccuaaugcuaaccccaaugccaaccccaacgcgaauccuaacgccaauccgaacgcuaaucccaacgccaauccuugaggacuagugcaucacauuuaaaagcaucucagccuaccaugagaauaagagaaagaaaaugaagaucaauagcuuauucaucucuuuuucuuuuucguugguguaaagccaacacccugucuaaaaaacauaaauuucuuuaaucauuuugccucuuuucucugugcuucaauuaauaaaaaauggaaagaaccuagaucuaaaaaaaaaaaaaaaaaaaaaaaaaaaaaaaaaaaaaaaaaaaaaaaaaaaaaaaaaaaaaaaaugcaucccccccccccccccccccccccccccccccaaaggcucuuuucagagccaccagaauu

SEQ ID NO: 1412 - RNA, 983 nt, Artificial Sequence
  mRNA Design i-2 (A64-N5-C30-hSL-N5) comprising derived and/or modified sequence from Pf(3D7)__XP_001351122.1__HsALB_Pf-CSP(93-272) (opt5)
aggagaggcgcugccuacggagguggcagccaucuccuucucggcaucaagcuuaccaugaagugggugaccuucaucagccugcucuuucuguucuccucugccuacagcaaacuuaagcagcccgcugacggcaacccugauccgaaugccaaccccaaugucgacccuaacgcgaaucccaacguugauccuaaugcuaaccccaauguggacccuaacgccaauccgaacgccaaucccaacgcuaauccuaacgccaaccccaaugcuaacccuaaugccaaccccaaugcgaacccgaaugccaacccuaaugcuaaccccaaugccaacccuaaugcuaaccccaaugccaaccccaacgcgaauccuaacgccaauccgaacgcuaaucccaacgccaauccuaacgcuaaucccaacguggauccuaaugccaaccccaaugccaacccgaaugcuaacccuaacgcgaaucccaacgccaauccuaacgcuaaucccaacgccaauccuaacgccaaucccaacgcuaauccgaacgccaauccuaacgcgaaucccaacgcuaaccccaaugccaacccuaaugccaacccgaaugcuaaccccaaugccaacccuaaugcuaaccccaaugccaacccuugaggacuagugcaucacauuuaaaagcaucucagccuaccaugagaauaagagaaagaaaaugaagaucaauagcuuauucaucucuuuuucuuuuucguugguguaaagccaacacccugucuaaaaaacauaaauuucuuuaaucauuuugccucuuuucucugugcuucaauuaauaaaaaauggaaagaaccuagaucuaaaaaaaaaaaaaaaaaaaaaaaaaaaaaaaaaaaaaaaaaaaaaaaaaaaaaaaaaaaaaaaaugcaucccccccccccccccccccccccccccccccaaaggcucuuuucagagccaccagaauu

SEQ ID NO: 1413 - RNA, 1358 nt, Artificial Sequence
  mRNA Design i-2 (A64-N5-C30-hSL-N5) comprising derived and/or modified sequence from Pf(3D7)__XP_001351122.1__HsALB_Pf-CSP(93-397) (opt5)
aggagaggcgcugccuacggagguggcagccaucuccuucucggcaucaagcuuaccaugaagugggugaccuucaucagccugcucuuucuguucuccucugccuacagcaaacuuaagcagcccgcugacggcaacccugauccgaaugccaaccccaaugucgacccuaacgcgaaucccaacguugauccuaaugcuaaccccaauguggacccuaacgccaauccgaacgccaaucccaacgcuaauccuaacgccaaccccaaugcuaacccuaaugccaaccccaaugcgaacccgaaugccaacccuaaugcuaaccccaaugccaacccuaaugcuaaccccaaugccaaccccaacgcgaauccuaacgccaauccgaacgcuaaucccaacgccaauccuaacgcuaaucccaacguggauccuaaugccaaccccaaugccaacccgaaugcuaacccuaacgcgaaucccaacgccaauccuaacgcuaaucccaacgccaauccuaacgccaaucccaacgcuaauccgaacgccaauccuaacgcgaaucccaacgcuaaccccaaugccaacccuaaugccaacccgaaugcuaaccccaaugccaacccuaaugcuaaccccaaugccaacccuaauaaaaacaaucaagggaacggacagggccacaauaugcccaacgacccuaacagaaaugucgaugagaacgcgaaugccaacuccgcugugaagaauaacaauaacgaggaacccucugacaaacauauuaaggaauaucugaauaagauccagaacagccucuccacagaguggucuccgugcagcguuacgugugggaauggcauucaggugcggaucaaaccuggauccgccaacaagcccaaagaugaacuggacuacgcuaaugauauugagaagaaaaucugcaagauggagaaguguagcucugucuuuaacgugguuaauuccagcaucgggcuuauuauggugcugucuuuccucuuucugaacugaggacuagugcaucacauuuaaaagcaucucagccuaccaugagaauaagagaaagaaaaugaagaucaauagcuuauucaucucuuuuucuuuuucguugguguaaagccaacacccugucuaaaaaacauaaauuucuuuaaucauuuugccucuuuucucugugcuucaauuaauaaaaaauggaaagaaccuagaucuaaaaaaaaaaaaaaaaaaaaaaaaaaaaaaaaaaaaaaaaaaaaaaaaaaaaaaaaaaaaaaaaugcaucccccccccccccccccccccccccccccccaaaggcucuuuucagagccaccagaauu

SEQ ID NO: 1414 - RNA, 728 nt, Artificial Sequence
  mRNA Design i-2 (A64-N5-C30-hSL-N5) comprising derived and/or modified sequence from Pf(3D7)__XP_001351122.1__HsALB_Pf-CSP(98-192) (opt5)
aggagaggcgcugccuacggagguggcagccaucuccuucucggcaucaagcuuaccaugaagugggugaccuucaucagccugcucuuucuguucuccucugccuacagcgcugacggcaaccccgauccuaaugccaacccgaaugucgaccccaacgcgaauccuaacguugaucccaaugcuaacccuaauguggaccccaacgccaauccuaacgccaauccgaacgcuaaucccaacgccaacccuaaugcuaaccccaaugccaacccuaaugcgaaccccaaugccaacccgaaugcuaacccuaaugccaaccccaaugcuaacccuaaugccaaccccaacgcgaaucccaacgccaauccuaacgcuaauccgaacgccaaucccugaggacuagugcaucacauuuaaaagcaucucagccuaccaugagaauaagagaaagaaaaugaagaucaauagcuuauucaucucuuuuucuuuuucguugguguaaagccaacacccugucuaaaaaacauaaauuucuuuaaucauuuugccucuuuucucugugcuucaauuaauaaaaaauggaaagaaccuagaucuaaaaaaaaaaaaaaaaaaaaaaaaaaaaaaaaaaaaaaaaaaaaaaaaaaaaaaaaaaaaaaaaugcaucccccccccccccccccccccccccccccccaaaggcucuuuucagagccaccagaauu

SEQ ID NO: 1415 - RNA, 968 nt, Artificial Sequence
  mRNA Design i-2 (A64-N5-C30-hSL-N5) comprising derived and/or modified sequence from Pf(3D7)__XP_001351122.1__HsALB_Pf-CSP(98-272) (opt5)
aggagaggcgcugccuacggagguggcagccaucuccuucucggcaucaagcuuaccaugaagugggugaccuucaucagccugcucuuucuguucuccucugccuacagcgcugacggcaaccccgauccuaaugccaacccgaaugucgaccccaacgcgaauccuaacguugaucccaaugcuaacccuaauguggaccccaacgccaauccuaacgccaauccgaacgcuaaucccaacgccaacccuaaugcuaaccccaaugccaacccuaaugcgaaccccaaugccaacccgaaugcuaacccuaaugccaaccccaaugcuaacccuaaugccaaccccaacgcgaaucccaacgccaauccuaacgcuaauccgaacgccaaucccaacgcuaauccuaacguggaucccaaugccaacccuaaugccaaccccaaugcuaacccgaacgcgaauccuaacgccaaucccaacgcuaauccuaacgccaaucccaacgccaauccuaacgcuaaucccaacgccaauccgaacgcgaauccuaacgcuaaccccaaugccaaccccaaugccaacccuaaugcuaacccgaaugccaaccccaaugcuaacccuaaugccaaccccugaggacuagugcaucacauuuaaaagcaucucagccuaccaugagaauaagagaaagaaaaugaagaucaauagcuuauucaucucuuuuucuuuuucguugguguaaagccaacacccugucuaaaaaacauaaauuucuuuaaucauuuugccucuuuucucugugcuucaauuaauaaaaaauggaaagaaccuagaucuaaaaaaaaaaaaaaaaaaaaaaaaaaaaaaaaaaaaaaaaaaaaaaaaaaaaaaaaaaaaaaaaugcaucccccccccccccccccccccccccccccccaaaggcucuuuucagagccaccagaauu

SEQ ID NO: 1416 - RNA, 1274 nt, Artificial Sequence
  mRNA Design i-2 (A64-N5-C30-hSL-N5) comprising derived and/or modified sequence from Pf(3D7)__XP_001351122.1__HsALB_Pf-CSP(98-374) (opt5)
aggagaggcgcugccuacggagguggcagccaucuccuucucggcaucaagcuuaccaugaagugggugaccuucaucagccugcucuuucuguucuccucugccuacagcgcugacggcaaccccgauccuaaugccaacccgaaugucgaccccaacgcgaauccuaacguugaucccaaugcuaacccuaauguggaccccaacgccaauccuaacgccaauccgaacgcuaaucccaacgccaacccuaaugcuaaccccaaugccaacccuaaugcgaaccccaaugccaacccgaaugcuaacccuaaugccaaccccaaugcuaacccuaaugccaaccccaacgcgaaucccaacgccaauccuaacgcuaauccgaacgccaaucccaacgcuaauccuaacguggaucccaaugccaacccuaaugccaaccccaaugcuaacccgaacgcgaauccuaacgccaaucccaacgcuaauccuaacgccaaucccaacgccaauccuaacgcuaaucccaacgccaauccgaacgcgaauccuaacgcuaaccccaaugccaaccccaaugccaacccuaaugcuaacccgaaugccaaccccaaugcuaacccuaaugccaaccccaauaaaaacaaucaggggaacggacaaggccacaauaugccuaacgaccccaacagaaaugucgaugagaacgcgaaugccaacuccgcugugaagaauaacaauaacgaggaaccuucugacaaacauauuaaggaauaucuuaauaaaauccagaacagccuguccacagaguggucucccugcagcguuacgugugggaauggcauucaggugcggaucaagccgggauccgccaacaagccuaaagaugaacucgacuacgcuaaugauauugagaagaaaaucugcaagauggagaaauguugaggacuagugcaucacauuuaaaagcaucucagccuaccaugagaauaagagaaagaaaaugaagaucaauagcuuauucaucucuuuuucuuuuucguugguguaaagccaacacccugucuaaaaaacauaaauuucuuuaaucauuuugccucuuuucucugugcuucaauuaauaaaaaauggaaagaaccuagaucuaaaaaaaaaaaaaaaaaaaaaaaaaaaaaaaaaaaaaaaaaaaaaaaaaaaaaaaaaaaaaaaaugcaucccccccccccccccccccccccccccccccaaaggcucuuuucagagccaccagaauu

SEQ ID NO: 1417 - RNA, 1343 nt, Artificial Sequence
  mRNA Design i-2 (A64-N5-C30-hSL-N5) comprising derived and/or modified sequence from Pf(3D7)__XP_001351122.1__HsALB_Pf-CSP(98-397) (opt5)
aggagaggcgcugccuacggagguggcagccaucuccuucucggcaucaagcuuaccaugaagugggugaccuucaucagccugcucuuucuguucuccucugccuacagcgcugacggcaaccccgauccuaaugccaacccgaaugucgaccccaacgcgaauccuaacguugaucccaaugcuaacccuaauguggaccccaacgccaauccuaacgccaauccgaacgcuaaucccaacgccaacccuaaugcuaaccccaaugccaacccuaaugcgaaccccaaugccaacccgaaugcuaacccuaaugccaaccccaaugcuaacccuaaugccaaccccaacgcgaaucccaacgccaauccuaacgcuaauccgaacgccaaucccaacgcuaauccuaacguggaucccaaugccaacccuaaugccaaccccaaugcuaacccgaacgcgaauccuaacgccaaucccaacgcuaauccuaacgccaaucccaacgccaauccuaacgcuaaucccaacgccaauccgaacgcgaauccuaacgcuaaccccaaugccaaccccaaugccaacccuaaugcuaacccgaaugccaaccccaaugcuaacccuaaugccaaccccaauaaaaacaaucaggggaacggacaaggccacaauaugccuaacgaccccaacagaaaugucgaugagaacgcgaaugccaacuccgcugugaagaauaacaauaacgaggaaccuucugacaaacauauuaaggaauaucuuaauaaaauccagaacagccuguccacagaguggucucccugcagcguuacgugugggaauggcauucaggugcggaucaagccgggauccgccaacaagccuaaagaugaacucgacuacgcuaaugauauugagaagaaaaucugcaagauggagaaauguagcucugucuuuaacgugguuaauuccagcaucgggcugauuauggugcuuucuuuccuguuucucaacugaggacuagugcaucacauuuaaaagcaucucagccuaccaugagaauaagagaaagaaaaugaagaucaauagcuuauucaucucuuuuucuuuuucguugguguaaagccaacacccugucuaaaaaacauaaauuucuuuaaucauuuugccucuuuucucugugcuucaauuaauaaaaaauggaaagaaccuagaucuaaaaaaaaaaaaaaaaaaaaaaaaaaaaaaaaaaaaaaaaaaaaaaaaaaaaaaaaaaaaaaaaugcaucccccccccccccccccccccccccccccccaaaggcucuuuucagagccaccagaauu

SEQ ID NO: 1418 - RNA, 1670 nt, Artificial Sequence
  mRNA Design i-2 (A64-N5-C30-hSL-N5) comprising derived and/or modified sequence from Pf(3D7)__XP_001351122.1__HsALB_Pf-CSP(199-377)_L(PVTN)_HBsAg (opt5)
aggagaggcgcugccuacggagguggcagccaucuccuucucggcaucaagcuuaccaugaagugggugaccuucaucagccugcucuuucuguucuccucugccuacagcgaccccaacgcuaauccuaacgccaauccgaacgcgaaucccaacgcuaauccuaacgccaaucccaacgccaauccuaacgcuaaucccaacgccaauccuaacgcuaacccgaaugccaaccccaaugcgaacccuaaugccaaccccaaugcuaacccuaaugccaaccccaaugcuaacccgaaugccaacccuaaugcgaaccccaacgccaauccuaacaaaaauaaccagggcaaugggcaaggacacaacaugcccaaugaucccaacagaaaugucgacgagaacgcuaaugccaacuccgcuguuaagaauaacaauaacgaggaaccuucugauaaacauauuaaggaauaucuuaacaaaauccagaauagccuguccacagaguggucuccgugcagcgugacguguggcaacgggauucaggugcggaucaagcccggauccgccaauaagccuaaagacgaacucgauuacgccaacgacauugagaagaaaaucugcaagauggagaaauguagcucuguccccgugaccaauauggaaaacaucacauccggcuuucuggggccucuucugguucuccaggcuggauucuuucugcugacccgcauucucacaaucccccaaagccuggauucuugguggaccucccuuaauuuccugggcggcagcccggugugccucgggcagaacucucaguccccuacaagcaaucacucccccaccucuuguccucccauuugcccuggauauagauggaugugucugcggcgcuuuaucauuuuccuuuuuauccugcuccugugccugauuuuccuccugguccuucuggacuaccagggcaugcuccccguguguccgcugaucccugggagcacgaccacaaacaccggacccugcaagacauguaccacgcccgcgcaaggcaauuccauguuuccuagcugcugcuguacaaagccgaccgaugggaacugcacauguauccccauuccuucuuccugggccuucgcuaaauaucuuugggagugggccagcguuagauuuucuuggcugagccuccuggugcccuucguccagugguucgugggacuguccccuaccguguggcucucugccaucuggaugaugugguacuggggccccagccuguauuccauugucagcccuuuuaucccccuucugccgauuuucuuuugccucuggguuuacaucugaggacuagugcaucacauuuaaaagcaucucagccuaccaugagaauaagagaaagaaaaugaagaucaauagcuuauucaucucuuuuucuuuuucguugguguaaagccaacacccugucuaaaaaacauaaauuucuuuaaucauuuugccucuuuucucugugcuucaauuaauaaaaaauggaaagaaccuagaucuaaaaaaaaaaaaaaaaaaaaaaaaaaaaaaaaaaaaaaaaaaaaaaaaaaaaaaaaaaaaaaaaugcaucccccccccccccccccccccccccccccccaaaggcucuuuucagagccaccagaauu

SEQ ID NO: 1419 - RNA, 1409 nt, Artificial Sequence
  mRNA Design i-2 (A64-N5-C30-hSL-N5) comprising derived and/or modified sequence from Pb(ANKA)__XP_022712148.1__Pb-CSP (opt5)
aggagaggcgcugccuacggagguggcagccaucuccuucucggcaucaagcuuaccaugaagaaaugcaccauccugguugucgccagccuccugcuuguuaacucccugcuccccggcuacgggcagaauaagucuauucaagcucagagaaaccugaaugagcuuuguuauaacgaaggaaaugacaacaaacuguaccacgugcucaauagcaagaacggcaaaaucuauaaucggaacacagugaaucgccugcuggccgaugcgccugaggggaagaagaacgaaaagaaaaaugagaaaauugaaagaaacaauaagcucaaacagccgcccccucccccuaaccccaacgacccuccgcccccuaaucccaacgauccucccccgccuaaucccaacgacccucccccucccaauccgaacgaucccccucccccuaaugcuaacgaucccccgccucccaaugccaacgacccugcucccccuaaugccaacgaccccgccccgccuaaugcuaacgaucccgcgcccccuaaugccaacgacccggcucccccuaacgccaaugaucccccucccccuaaccccaaugacccggccccucccaacgcuaaugauccucccccgccuaaccccaaugacccugccccuccccagggaaacaauaacccccaaccgcagccccggccucagccccagccucaaccccagccucagccgcagccccaaccucagccccagccucgcccccaaccgcagccucagcccggcgggaauaacaauaacaagaauaacaacaaugacgauuccuacauccccucugcggagaagauucuggaguucgucaaacagaucagagacagcaucacggaagaguggucccaaugcaacgugaccuguggaucuggcauucggguucgcaagagaaaaggcagcaauaagaaagccgaagaucuuacacuggaggacaucgauaccgagauuugcaagauggacaaauguuccagcaucuuuaacauugugucuaauucccucggguucgucauccugcuugugcugguguuuuucaacugaggacuagugcaucacauuuaaaagcaucucagccuaccaugagaauaagagaaagaaaaugaagaucaauagcuuauucaucucuuuuucuuuuucguugguguaaagccaacacccugucuaaaaaacauaaauuucuuuaaucauuuugccucuuuucucugugcuucaauuaauaaaaaauggaaagaaccuagaucuaaaaaaaaaaaaaaaaaaaaaaaaaaaaaaaaaaaaaaaaaaaaaaaaaaaaaaaaaaaaaaaaugcaucccccccccccccccccccccccccccccccaaaggcucuuuucagagccaccagaauu

SEQ ID NO: 1420 - RNA, 1574 nt, Artificial Sequence
  mRNA Design i-2 (A64-N5-C30-hSL-N5) comprising derived and/or modified sequence from Pb(ANKA)__XP_022712148.1__Pb-CSP_L(G4SG4)_TM domain HA (opt5)
aggagaggcgcugccuacggagguggcagccaucuccuucucggcaucaagcuuaccaugaagaaaugcaccauccugguggucgccagccuccugcuuguuaacucccugcuccccggcuacgggcagaauaagucuauucaagcucagagaaaccugaaugagcuuuguuauaacgaaggaaaugacaacaaacuguaccacgugcucaauagcaagaacggcaaaaucuauaaucggaacacagugaaucgccugcuggccgaugcgccugaggggaagaagaacgaaaagaaaaaugagaaaauugaaagaaacaauaagcucaaacagccgcccccucccccuaaccccaacgacccuccgcccccuaaucccaacgauccucccccgccuaaucccaacgacccucccccucccaauccgaacgaucccccucccccuaaugcuaacgaucccccgccucccaaugccaacgacccugcucccccuaaugccaacgaccccgccccgccuaaugcuaacgaucccgcgcccccuaaugccaacgacccggcucccccuaacgccaaugaucccccucccccuaaccccaaugacccggccccucccaacgcuaaugauccucccccgccuaaccccaaugacccugccccuccccagggaaacaauaacccccaaccgcagccccggccucagccccagccucaaccccagccucagccgcagccccaaccucagccccagccucgcccccaaccgcagccucagcccggcgggaauaacaauaacaagaauaacaacaaugacgauuccuacauccccucugcggagaagauucuggaguucgucaaacagaucagagacagcaucacggaagaguggucccaaugcaacgugaccuguggaucuggcauucggguucgcaagagaaaaggcagcaauaagaaagccgaagaucuuacacuggaggacaucgauaccgagauuugcaagauggacaaauguuccagcaucuuuaacauugugucuaauucccucggguucgucauccugcuugugcugguguuuuucaacggaggcgggggaagcggcgggggaggcaagcucgaaucuacacggauuuaucagauccuggcuaucuacuccaccguugccagcucucugguccucguggugucccugggcgcuauuagcuuuuggaugugcuccaaugggucucuucagugucgcaucugcauuugaggacuagugcaucacauuuaaaagcaucucagccuaccaugagaauaagagaaagaaaaugaagaucaauagcuuauucaucucuuuuucuuuuucguugguguaaagccaacacccugucuaaaaaacauaaauuucuuuaaucauuuugccucuuuucucugugcuucaauuaauaaaaaauggaaagaaccuagaucuaaaaaaaaaaaaaaaaaaaaaaaaaaaaaaaaaaaaaaaaaaaaaaaaaaaaaaaaaaaaaaaaugcaucccccccccccccccccccccccccccccccaaaggcucuuuucagagccaccagaauu

SEQ ID NO: 1421 - RNA, 1394 nt, Artificial Sequence
  mRNA Design i-2 (A64-N5-C30-hSL-N5) comprising derived and/or modified sequence from Pb(ANKA)__XP_022712148.1__HsALB_Pb-CSP(24-340) (opt5)
aggagaggcgcugccuacggagguggcagccaucuccuucucggcaucaagcuuaccaugaagugggugaccuucaucagccugcucuuucuguucuccucugccuacagccagaacaaauccauucaagcucagagaaaucuuaacgagcugugcuauaaugaaggcaacgacaauaagcucuaccacguccugaacucuaaaaaugggaagaucuauaaccggaauacaguuaaccgccuucuggccgaugcgcccgagggcaaaaagaaugaaaagaaaaacgagaagauugaaagaaauaacaaacucaagcagccuccgcccccucccaauccuaacgacccucccccgcccaacccuaaugaucccccucccccgaacccuaaugaucccccuccucccaaccccaaugacccgcccccucccaacgcuaaugacccucccccgccuaacgccaaugaucccgccccucccaacgcuaaugacccugcucccccgaacgccaaugauccugccccucccaacgcgaaugaccccgccccgcccaacgcuaacgauccucccccucccaauccuaacgaccccgccccgccuaaugcuaacgaucccccucccccgaauccuaacgaccccgccccuccccagggaaauaacaauccccaaccucagccgcggccccagccucagccccaaccucagccccagccucagccgcaaccccagccucagccccgcccucaaccccagccgcagccugggggaaacaauaacaauaaaaacaauaacaacgacgauagcuacauccccuccgcggagaagauucuggaguuugugaagcagaucagagacucuaucacggaagaguggagccaaugcaaugugaccugcggcuccgggauucggguccgcaaaagaaagggaagcaacaaaaaggccgaagaucugacacucgaggacaucgauaccgagauuuguaaaauggacaaguguucuuccaucuucaauauugugagcaacucucugggcuuuguuauccuucuggugcucgucuucuuuaauugaggacuagugcaucacauuuaaaagcaucucagccuaccaugagaauaagagaaagaaaaugaagaucaauagcuuauucaucucuuuuucuuuuucguugguguaaagccaacacccugucuaaaaaacauaaauuucuuuaaucauuuugccucuuuucucugugcuucaauuaauaaaaaauggaaagaaccuagaucuaaaaaaaaaaaaaaaaaaaaaaaaaaaaaaaaaaaaaaaaaaaaaaaaaaaaaaaaaaaaaaaaugcaucccccccccccccccccccccccccccccccaaaggcucuuuucagagccaccagaauu

SEQ ID NO: 1422 - RNA, 1412 nt, Artificial Sequence
  mRNA Design i-2 (A64-N5-C30-hSL-N5) comprising derived and/or modified sequence from Pb(ANKA)__XP_022712148.1__HsIns-iso1_Pb-CSP(24-340) (opt5)
aggagaggcgcugccuacggagguggcagccaucuccuucucggcaucaagcuuaccauggcccuguggaugagacuccugccccuucuggcucuccuggcccuuuggggcccugacccggcggcugcccagaacaagagcauccaagcccagcggaaucugaacgagcucugcuacaaugaagggaacgauaauaaacuguaucacgugcugaacuccaagaauggaaaaauuuacaaccgcaauaccgucaacagacuccuggcugacgcccccgagggcaagaaaaaugaaaagaagaacgagaaaaucgaacggaauaacaaacuuaagcagccucccccucccccuaauccgaacgaucccccucccccuaaccccaaugacccgccucccccuaaccccaaugaucccccuccgcccaacccuaaugaucccccucccccgaacgcuaaugacccucccccucccaacgccaaugacccugcgcccccgaacgccaaugauccugcuccucccaacgccaaugaccccgcuccgcccaacgccaaugauccugcgcccccuaacgccaacgaucccccucccccgaauccuaacgaccccgcuccucccaaugccaacgacccgccucccccuaaucccaacgaccccgcuccuccgcaggggaauaacaauccccaaccucagccccgcccucagccccagccucaaccgcagccccagccucagccccaaccucagccccagccgagaccucaaccccagccccagccuggaggcaacaauaacaauaagaacaauaacaacgaugacucuuauauucccagcgccgagaaaauccuggaguucguuaagcagauucgggauuccaucacagaagaguggucucaauguaaugugacgugcgggagcggaauccgcgugagaaagcggaaaggcuccaacaagaaagccgaagaccucacccuggaggauauugacacagagaucuguaagauggauaaaugcucuagcauuuuuaauaucgucuccaacagccuuggcuucgugauucugcucguucugguguuuuucaauugaggacuagugcaucacauuuaaaagcaucucagccuaccaugagaauaagagaaagaaaaugaagaucaauagcuuauucaucucuuuuucuuuuucguugguguaaagccaacacccugucuaaaaaacauaaauuucuuuaaucauuuugccucuuuucucugugcuucaauuaauaaaaaauggaaagaaccuagaucuaaaaaaaaaaaaaaaaaaaaaaaaaaaaaaaaaaaaaaaaaaaaaaaaaaaaaaaaaaaaaaaaugcaucccccccccccccccccccccccccccccccaaaggcucuuuucagagccaccagaauu

SEQ ID NO: 1423 - RNA, 1391 nt, Artificial Sequence
  mRNA Design i-2 (A64-N5-C30-hSL-N5) comprising derived and/or modified sequence from Pb(ANKA)__XP_022712148.1__HsSPARC_Pb-CSP(24-340) (opt5)
aggagaggcgcugccuacggagguggcagccaucuccuucucggcaucaagcuuaccaugagagccuggaucuucuuucugcucugccuggcuggccgggcccuugcgcagaacaagagcauucaagcucagcgcaaucugaacgagcucuguuacaaugaagggaacgacaauaaacuguaucacgugcuuaacuccaagaauggaaaaaucuacaacagaaauaccgucaaccggcugcucgccgaugcccccgagggcaagaaaaaugaaaagaagaacgagaaaauugaacgcaauaacaagcugaaacagccuccgcccccucccaauccuaacgacccucccccgcccaacccuaaugaucccccucccccgaacccuaaugaucccccuccucccaaccccaaugacccgcccccucccaacgcuaaugacccucccccgccuaacgccaaugaucccgcuccucccaacgccaaugacccugcgcccccgaacgccaaugauccugcuccucccaacgccaaugaccccgcuccgcccaacgccaacgauccucccccucccaauccuaacgaccccgcgccgccuaaugccaacgaucccccucccccgaauccuaacgaccccgcuccuccccaggggaauaacaauccccaaccucagccgagaccccagccucagccccaaccucagccccagccucagccgcaaccccagccucagccccggccucaaccccagccgcagccuggaggcaacaauaacaauaagaacaauaacaacgacgauucuuauauccccagcgccgagaaaauucuggaguucguuaagcagauccgcgacuccaucacagaagaguggucucaaugcaaugugacgugugggagcggaauuagagugcggaagcgcaaaggcuccaacaagaaagcugaagaucucacccuggaggacaucgauacagagauuugcaagauggacaaauguucuagcaucuuuaauauugucuccaacagccuuggcuucgugauccugcucguucugguguuuuucaauugaggacuagugcaucacauuuaaaagcaucucagccuaccaugagaauaagagaaagaaaaugaagaucaauagcuuauucaucucuuuuucuuuuucguugguguaaagccaacacccugucuaaaaaacauaaauuucuuuaaucauuuugccucuuuucucugugcuucaauuaauaaaaaauggaaagaaccuagaucuaaaaaaaaaaaaaaaaaaaaaaaaaaaaaaaaaaaaaaaaaaaaaaaaaaaaaaaaaaaaaaaaugcaucccccccccccccccccccccccccccccccaaaggcucuuuucagagccaccagaauu

SEQ ID NO: 1424 - RNA, 1394 nt, Artificial Sequence
  mRNA Design i-2 (A64-N5-C30-hSL-N5) comprising derived and/or modified sequence from Pb(ANKA)__XP_022712148.1__IgE_Pb-CSP(24-340) (opt5)
aggagaggcgcugccuacggagguggcagccaucuccuucucggcaucaagcuuaccauggacuggaccuggauccuguuccucguggccgcugccacaagaguccacagccagaacaaguccauucaagcgcagcggaaucugaacgagcuuugcuacaaugaaggcaacgauaauaaacuguaucauguucucaacucuaagaaugggaaaaucuacaaccgcaauacggugaacagacugcuugcugacgcccccgagggaaagaaaaaugaaaagaagaacgagaaaauugaacggaauaacaagcugaaacagccuccgcccccucccaauccuaacgaucccccuccgcccaacccuaaugacccgccucccccgaacccuaaugaucccccuccucccaaccccaaugacccgcccccucccaacgccaaugauccucccccgccuaacgcuaaugaccccgccccucccaacgcuaaugauccugccccucccaacgcgaaugaccccgccccucccaacgcuaaugaucccgccccgcccaacgcuaacgacccucccccucccaauccuaacgaucccgccccgccuaaugcgaacgaucccccucccccgaauccuaacgaccccgccccuccccagggcaauaacaauccccaaccucagccgcgcccccagccucagccccaaccucagccccagccucagccgcaaccccagccucagcccagaccucaaccccagccgcagccugggggaaacaauaacaauaagaacaauaacaacgacgacagcuauauccccuccgcugagaaaauucucgaguuugugaagcagauccgggauucuaucaccgaagaguggagccaauguaaugucacaugcggcuccgggauucgcgugagaaagcggaaaggaucuaacaagaaagccgaagaccugacccuggaggauaucgacacagagauuuguaagauggauaaaugcagcuccaucuucaauauuguuagcaacucucucggcuuugugauccugcuuguccugguguucuuuaauugaggacuagugcaucacauuuaaaagcaucucagccuaccaugagaauaagagaaagaaaaugaagaucaauagcuuauucaucucuuuuucuuuuucguugguguaaagccaacacccugucuaaaaaacauaaauuucuuuaaucauuuugccucuuuucucugugcuucaauuaauaaaaaauggaaagaaccuagaucuaaaaaaaaaaaaaaaaaaaaaaaaaaaaaaaaaaaaaaaaaaaaaaaaaaaaaaaaaaaaaaaaugcaucccccccccccccccccccccccccccccccaaaggcucuuuucagagccaccagaauu

SEQ ID NO: 1425 - RNA, 1580 nt, Artificial Sequence
  mRNA Design i-2 (A64-N5-C30-hSL-N5) comprising derived and/or modified sequence from Pf(3D7)__XP_001351122.1__Pf-CSP (opt6)
aggagaggcgcugccuacggagguggcagccaucuccuucucggcaucaagcuuaccaugaugagaaaacuugcaauacuaagcguaucuucauuccuauucguagaagcacuauuccaagaauaucaaugcuauggaucaagcuccaacacaagaguacuuaacgaacuaaauuacgacaaugcaggaacaaaccuauacaaugaacuugaaaugaauuacuacggcaaacaagaaaacugguacucccuaaaaaaaaacucaaggucauuaggagaaaacgacgacggaaacaacgaagacaacgaaaaacuacgaaaacccaaacacaaaaaauuaaaacaaccagcagacggaaaccccgacccaaacgcaaacccaaacgucgacccaaacgcaaacccgaacguagacccaaacgcgaacccaaacguagacccaaacgcaaacccaaacgcaaacccaaacgcaaacccaaacgcaaacccaaaugcaaacccaaacgcaaacccaaacgccaauccaaacgccaacccaaacgcaaacccaaacgcaaacccaaacgcaaacccaaacgcaaaccccaacgcaaacccaaacgcuaacccaaacgcaaacccuaaugcaaacccuaacgcaaacccaaacgucgacccgaacgcaaacccaaaugcaaacccaaacgcaaacccaaacgcaaaccccaacgccaacccaaaugcaaacccaaaugcaaauccaaacgcaaacccaaacgcaaacccuaacgcaaacccaaacgcaaaccccaacgcaaacccaaacgcaaacccaaacgccaacccaaacgcaaaccccaaugcaaacccaaacgcaaacccaaacgcaaacccaaacaaaaacaaucaaggcaacggacaaggacacaacaugcccaacgacccaaaccgaaacgucgacgaaaacgccaacgcaaacagcgcaguaaaaaacaacaacaacgaagaacccucagacaaacacauaaaagaauacuuaaacaaaauacaaaacucacuaucuacagaauggucacccuguagcguaaccugcggcaacggaauacaaguaagaauaaaaccaggcucagcaaacaaaccaaaagaugaacuagacuacgccaaugauauagaaaaaaaaauauguaaaauggaaaaauguagcucagucuucaacguagucaacucaucaauaggacuaauaaugguacucuccuuccucuuccuaaauuaaggacuagugcaucacauuuaaaagcaucucagccuaccaugagaauaagagaaagaaaaugaagaucaauagcuuauucaucucuuuuucuuuuucguugguguaaagccaacacccugucuaaaaaacauaaauuucuuuaaucauuuugccucuuuucucugugcuucaauuaauaaaaaauggaaagaaccuagaucuaaaaaaaaaaaaaaaaaaaaaaaaaaaaaaaaaaaaaaaaaaaaaaaaaaaaaaaaaaaaaaaaugcaucccccccccccccccccccccccccccccccaaaggcucuuuucagagccaccagaauu

SEQ ID NO: 1426 - RNA, 1511 nt, Artificial Sequence
  mRNA Design i-2 (A64-N5-C30-hSL-N5) comprising derived and/or modified sequence from Pf(3D7)__XP_001351122.1__Pf-CSP(1-374) (opt6)
aggagaggcgcugccuacggagguggcagccaucuccuucucggcaucaagcuuaccaugaugagaaaacuagcaauauuaagcguaagcucauuccuauucguugaagcauuauuccaagaauaccaaugcuacggcucaagcucaaacacaagaguauuaaacgaauuaaacuacgacaaugcaggaaccaaccucuacaacgaacuagaaaugaauuauuacggcaaacaagaaaacugguacucacucaaaaaaaacucacgaucccuaggagaaaacgaugacggaaacaaugaagauaacgaaaaauuaagaaaaccaaaacacaaaaaauuaaaacaaccugcagacggaaacccagacccaaacgcaaauccaaauguagacccaaacgcaaaccccaacguagacccaaaugcaaacccaaacguagacccaaacgcaaacccaaaugcaaacccaaacgcaaacccaaacgcaaacccaaacgcaaaccccaacgcaaacccaaacgcaaacccaaacgccaaccccaacgcaaacccaaacgcaaacccgaaugcaaacccaaacgcaaacccaaacgcaaacccaaacgcaaacccaaacgcaaacccaaacgcaaacccaaaugcaaacccaaacguggauccaaacgcaaauccaaacgcaaacccaaacgcaaacccaaacgcaaaccccaacgcaaauccaaacgcaaaccccaaugcaaauccaaacgcaaacccaaacgccaacccaaacgcaaacccgaacgccaauccaaacgcaaacccaaacgcaaacccaaacgcaaacccaaacgccaacccaaacgcaaacccaaacgcaaacccaaacgcaaaccccaacaaaaacaaccaaggaaacggacaaggacacaacaugccaaacgauccaaacagaaacgucgacgaaaacgccaacgcuaacagcgcaguaaaaaacaauaacaacgaagaaccaucagacaaacauauaaaagaauacuuaaacaaaauccaaaacucacuaucaacagaauggucccccuguuccguaacaugcggaaacggaauacaaguacgaaucaaaccaggaucagccaacaaaccgaaagacgaacuagacuaugccaacgauauagaaaaaaaaauaugcaaaauggaaaaaugcugaggacuagugcaucacauuuaaaagcaucucagccuaccaugagaauaagagaaagaaaaugaagaucaauagcuuauucaucucuuuuucuuuuucguugguguaaagccaacacccugucuaaaaaacauaaauuucuuuaaucauuuugccucuuuucucugugcuucaauuaauaaaaaauggaaagaaccuagaucuaaaaaaaaaaaaaaaaaaaaaaaaaaaaaaaaaaaaaaaaaaaaaaaaaaaaaaaaaaaaaaaaugcaucccccccccccccccccccccccccccccccaaaggcucuuuucagagccaccagaauu

SEQ ID NO: 1427 - RNA, 1364 nt, Artificial Sequence
  mRNA Design i-2 (A64-N5-C30-hSL-N5) comprising derived and/or modified sequence from Pf(3D7)__XP_001351122.1__Pf-CSP(1-325) (opt6)
aggagaggcgcugccuacggagguggcagccaucuccuucucggcaucaagcuuaccaugaugcgaaaauuagcaauacuaagcguaagcucauucuuauucguagaagcacucuuccaagaauaccaaugcuacggaucaagcucaaacacaagaguccuaaacgaauuaaacuaugacaacgcaggaacaaaccuauacaacgaacuagaaaugaacuacuacggaaaacaagaaaacugguacucacucaaaaaaaacagcagaagucuaggagaaaacgacgacggaaacaacgaagacaacgaaaaacuacgaaaaccaaaacacaaaaaacuaaaacaaccagcagacgggaacccagacccaaacgcaaacccaaacguagauccaaacgcaaacccaaauguagacccuaacgcaaacccaaauguagacccaaacgcaaacccuaacgcaaacccaaaugcaaacccaaacgcaaauccaaacgcaaacccaaacgcaaacccaaacgcgaacccaaacgcaaacccaaacgcaaacccaaaugcaaaccccaacgcaaauccaaaugcaaacccaaaugcaaauccaaacgcaaacccaaacgcaaacccaaaugcaaauccaaacgcaaauccaaacguggauccaaacgcaaacccaaacgcaaacccaaacgcaaacccaaacgcaaacccaaacgcaaacccaaacgcaaauccaaacgccaauccaaacgcaaauccaaaugcaaacccaaacgcaaacccaaacgcaaacccaaacgcaaacccaaacgcaaacccaaacgcaaacccaaacgcaaacccaaacgcaaacccaaacgcaaacccaaacgcaaacccaaacaaaaacaaccaaggaaacggacaaggacacaacaugccaaacgacccaaacagaaacguagacgaaaacgccaacgcaaauagcgcagucaaaaacaacaauaacgaagaaccaucggacaaacacauaaaagaauacuuaaacaaaauacaaaacugaggacuagugcaucacauuuaaaagcaucucagccuaccaugagaauaagagaaagaaaaugaagaucaauagcuuauucaucucuuuuucuuuuucguugguguaaagccaacacccugucuaaaaaacauaaauuucuuuaaucauuuugccucuuuucucugugcuucaauuaauaaaaaauggaaagaaccuagaucuaaaaaaaaaaaaaaaaaaaaaaaaaaaaaaaaaaaaaaaaaaaaaaaaaaaaaaaaaaaaaaaaugcaucccccccccccccccccccccccccccccccaaaggcucuuuucagagccaccagaauu

SEQ ID NO: 1428 - RNA, 1580 nt, Artificial Sequence
  mRNA Design i-2 (A64-N5-C30-hSL-N5) comprising derived and/or modified sequence from Pf(3D7)__XP_001351122.1__HsALB_Pf-CSP(19-397) (opt6)
aggagaggcgcugccuacggagguggcagccaucuccuucucggcaucaagcuuaccaugaaaugggucacauuuauuucacuacuauucuuauucucaagcgcauacucacuauuucaagaauaccaaugcuacggcucauccucaaauacacgaguacuaaaugaacucaacuacgacaacgcaggaaccaaucucuacaacgaauuagaaaugaacuacuacggcaaacaagaaaacugguauucacuaaaaaaaaacaguagaucacuaggagaaaaugacgacggaaacaaugaagacaacgaaaaacuaagaaaaccaaaacacaaaaaauuaaaacaaccagcagacggaaacccagacccaaacgcaaacccuaacguagaucccaaugccaacccaaauguagacccaaacgcaaaccccaacgucgauccaaacgcaaacccaaacgcaaacccaaacgcaaacccaaacgcaaacccaaacgcaaacccaaaugcaaaccccaacgcaaacccaaacgcuaacccaaacgcaaacccaaacgcaaacccaaacgcaaacccaaacgcaaacccaaacgccaacccaaacgccaacccaaacgcaaauccaaacgcaaacccaaaugccaauccaaacguugacccaaacgcaaacccaaacgcaaaccccaacgcaaacccaaacgcaaauccaaacgcgaaccccaacgcaaacccaaacgcaaacccaaaugcaaacccaaacgcuaacccaaaugcaaacccaaacgccaacccaaacgccaacccaaacgcaaaccccaacgcaaacccaaacgcaaacccaaacgccaauccaaacgcaaacccaaaugcaaacccaaacaaaaacaaccaaggaaacggacaaggacacaacaugccaaacgaccccaacagaaacguagaugaaaaugcaaaugcuaacucagccguaaaaaacaauaacaacgaagaaccaucagacaaacacauaaaagaauaccuaaauaaaauacaaaauuccuuaucaacagaaugguccccaugcucaguaacuugcgguaacggcauacaaguaagaauaaaaccaggaucagcaaacaaaccaaaagacgaauuagacuaugcaaacgacauagaaaaaaaaauauguaaaauggaaaaaugcagcucaguauucaacguaguaaauuccucaaucggacucaucaugguauuaucauuccuauuuuuaaauuaaggacuagugcaucacauuuaaaagcaucucagccuaccaugagaauaagagaaagaaaaugaagaucaauagcuuauucaucucuuuuucuuuuucguugguguaaagccaacacccugucuaaaaaacauaaauuucuuuaaucauuuugccucuuuucucugugcuucaauuaauaaaaaauggaaagaaccuagaucuaaaaaaaaaaaaaaaaaaaaaaaaaaaaaaaaaaaaaaaaaaaaaaaaaaaaaaaaaaaaaaaaugcaucccccccccccccccccccccccccccccccaaaggcucuuuucagagccaccagaauu

SEQ ID NO: 1429 - RNA, 1598 nt, Artificial Sequence
  mRNA Design i-2 (A64-N5-C30-hSL-N5) comprising derived and/or modified sequence from Pf(3D7)__XP_001351122.1__HsIns-iso1_Pf-CSP(19-397) (opt6)
aggagaggcgcugccuacggagguggcagccaucuccuucucggcaucaagcuuaccauggcacuauggaugagacuacuaccacuacuagcacuccuagccuuauggggacccgauccagccgcagcacucuuccaagaauaccaaugcuauggaucauccuccaacacaagaguccuaaacgaauuaaauuacgacaacgcuggaacaaaccuauacaaugaacuagaaaugaauuauuacggaaaacaagaaaauugguacucacuaaaaaaaaacucuagaagccuaggagaaaacgacgacggaaacaacgaagauaacgaaaaacuaagaaaaccaaaacacaaaaaauuaaaacaacccgcagacggcaacccagacccaaaugcaaauccaaacguagacccaaacgcaaauccaaacguagacccaaacgcaaacccaaauguagacccaaacgcaaauccaaacgcaaacccaaaugcaaacccaaaugcaaacccaaacgcaaauccaaacgcaaaucccaacgccaacccaaacgcaaacccaaacgcaaauccaaacgcaaacccaaacgcaaacccaaacgcaaacccaaacgcaaacccaaaugcaaacccaaaugccaauccaaacgccaacccaaacgcaaacccaaacguagacccaaacgcaaacccaaacgccaacccaaacgcaaaccccaaugcaaacccaaacgcaaacccaaacgcaaaccccaacgcaaauccaaacgcaaacccaaacgcaaauccaaacgcaaauccaaacgccaacccaaacgcaaacccaaacgcaaauccaaacgcaaaccccaacgcaaacccaaacgccaacccaaaugcaaacccaaacgcaaaucccaauaaaaacaaccaaggaaacggacaaggacacaacaugccaaacgauccaaacagaaacguagacgaaaacgcaaacgcaaacucagcagucaaaaacaauaacaacgaagaaccaucagacaaacacauaaaagaauaccuaaacaaaauacaaaacucacuauccacagaauggucaccaugcucaguaaccugcggaaacggaauacaaguaagaauaaaaccaggaucagccaacaaaccaaaagacgaacuagacuaugcuaaugacauagaaaaaaaaauaugcaaaauggaaaaaugcuccucaguauucaacgucguaaacucuucaauaggacuaauaaugguacuauccuucuuauuucuaaacuaaggacuagugcaucacauuuaaaagcaucucagccuaccaugagaauaagagaaagaaaaugaagaucaauagcuuauucaucucuuuuucuuuuucguugguguaaagccaacacccugucuaaaaaacauaaauuucuuuaaucauuuugccucuuuucucugugcuucaauuaauaaaaaauggaaagaaccuagaucuaaaaaaaaaaaaaaaaaaaaaaaaaaaaaaaaaaaaaaaaaaaaaaaaaaaaaaaaaaaaaaaaugcaucccccccccccccccccccccccccccccccaaaggcucuuuucagagccaccagaauu

SEQ ID NO: 1430 - RNA, 1577 nt, Artificial Sequence
  mRNA Design i-2 (A64-N5-C30-hSL-N5) comprising derived and/or modified sequence from Pf(3D7)__XP_001351122.1__HsSPARC_Pf-CSP(19-397) (opt6)
aggagaggcgcugccuacggagguggcagccaucuccuucucggcaucaagcuuaccaugcgcgcauggauauucuuccuccuaugucuagcaggucgagcacuugcacucuuccaagaauaccaauguuacggauccucaagcaacacacgaguacuaaacgaacuaaacuacgauaacgcaggaaccaacuuauacaacgaacuagaaaugaacuacuacggcaaacaagaaaacugguacucacucaaaaaaaacagcagaagccuaggagaaaaugacgacggaaacaacgaagauaacgaaaaauuacgaaaacccaaacacaaaaaauuaaaacaacccgcagauggaaauccagacccgaacgcaaacccaaacguagacccaaacgcaaacccaaacguugacccaaacgcaaacccaaacguagacccaaacgcaaacccuaacgccaacccaaacgcaaacccaaacgcaaacccaaaugcgaacccaaaugcaaacccaaacgccaacccaaaugcaaaccccaacgcaaauccaaacgcaaacccaaaugcaaacccaaacgcaaacccaaacgcaaacccaaacgcaaacccaaacgccaaccccaaugcaaacccaaacgcaaacccaaacgucgacccaaacgcaaacccaaacgcaaacccaaacgcaaauccaaacgcaaauccaaacgcaaacccuaacgcaaacccaaacgcaaacccaaaugcaaauccaaacgcaaacccaaacgcaaacccaaacgcaaauccaaacgcaaacccaaacgcaaacccaaacgcaaacccuaaugcaaacccaaaugcaaauccaaacgcaaacccaaaugcaaaccccaacaaaaacaaccaaggaaacggacaaggacacaauaugccaaacgacccaaacagaaacguagacgaaaacgcaaacgccaacagcgcaguaaaaaacaacaacaacgaagaaccaucagacaaacacauaaaagaauaccuaaacaaaauacaaaacucacuaucaacagaauggucucccugcuccguaacaugcggaaacggcauacaaguacgaauaaaaccuggaucagccaacaaaccaaaagacgaacuagacuaugcaaaugacauagaaaaaaaaauaugcaaaauggaaaaaugcaguucagucuucaacguagucaacagcucaauaggccuaauaaugguacucucauuccuauucuuaaacuaaggacuagugcaucacauuuaaaagcaucucagccuaccaugagaauaagagaaagaaaaugaagaucaauagcuuauucaucucuuuuucuuuuucguugguguaaagccaacacccugucuaaaaaacauaaauuucuuuaaucauuuugccucuuuucucugugcuucaauuaauaaaaaauggaaagaaccuagaucuaaaaaaaaaaaaaaaaaaaaaaaaaaaaaaaaaaaaaaaaaaaaaaaaaaaaaaaaaaaaaaaaugcaucccccccccccccccccccccccccccccccaaaggcucuuuucagagccaccagaauu

SEQ ID NO: 1431 - RNA, 1580 nt, Artificial Sequence
  mRNA Design i-2 (A64-N5-C30-hSL-N5) comprising derived and/or modified sequence from Pf(3D7)__XP_001351122.1__IgE_Pf-CSP(19-397) (opt6)
aggagaggcgcugccuacggagguggcagccaucuccuucucggcaucaagcuuaccauggauuggacauggauucucuuccucguagcagcagccacaagaguacacucuuuauuucaagaauaccaaugcuacggaucaagcucaaacacacgcguacuaaacgaacuaaacuacgacaacgcaggaacaaacuuauacaacgaacuagaaaugaacuauuauggcaaacaagaaaacugguacucacuaaaaaaaaacuccagaagcuuaggagaaaacgacgacggaaacaacgaagacaacgaaaaacuacgcaaaccuaaacacaaaaaacuaaaacaaccugcagacggaaacccagacccaaacgcgaacccaaacguagauccaaacgcaaacccaaacguagaucccaacgcaaacccgaacguagacccuaacgcaaauccaaacgcaaaccccaacgcaaacccgaacgcaaacccaaacgcaaacccaaacgcaaacccaaacgcaaacccaaacgcaaacccaaacgccaacccaaacgcaaauccaaacgcuaacccaaaugcaaacccuaacgcaaacccaaacgccaacccaaacgcaaacccaaacgcaaacccaaacgcaaaucccaauguagacccaaacgcaaacccaaacgcaaacccaaacgcuaacccaaaugcaaacccaaacgcaaacccaaacgcaaacccaaacgcuaaccccaacgcaaacccgaacgcaaacccaaaugcaaacccaaacgcaaacccaaaugcaaacccaaacgcaaacccaaacgcaaaccccaaugccaacccaaacgcaaauccaaaugccaauccaaacgcaaacccaaacaaaaacaaccaaggaaauggacaaggacauaacaugccaaacgaccccaaccgaaauguagacgaaaacgccaacgcaaauagugcagucaaaaacaauaacaaugaagaacccucagauaaacauauaaaagaauacuuaaacaaaauacaaaacucacuaucaaccgaguggucuccuugcucaguaacauguggaaacggaauacaaguacgaauaaaaccaggaucagcaaacaaaccgaaagacgaacuagacuacgccaacgacauagaaaagaaaauauguaaaauggagaaauguaguucaguauucaacgugguaaacagcucaauaggccuaauaaugguacucucuuuccuauuccuaaacuaaggacuagugcaucacauuuaaaagcaucucagccuaccaugagaauaagagaaagaaaaugaagaucaauagcuuauucaucucuuuuucuuuuucguugguguaaagccaacacccugucuaaaaaacauaaauuucuuuaaucauuuugccucuuuucucugugcuucaauuaauaaaaaauggaaagaaccuagaucuaaaaaaaaaaaaaaaaaaaaaaaaaaaaaaaaaaaaaaaaaaaaaaaaaaaaaaaaaaaaaaaaugcaucccccccccccccccccccccccccccccccaaaggcucuuuucagagccaccagaauu

SEQ ID NO: 1432 - RNA, 1745 nt, Artificial Sequence
  mRNA Design i-2 (A64-N5-C30-hSL-N5) comprising derived and/or modified sequence from Pf(3D7)__XP_001351122.1__Pf-CSP_L(G4SG4)_TM domain HA (opt6)
aggagaggcgcugccuacggagguggcagccaucuccuucucggcaucaagcuuaccaugaugcguaaacuagcaauacuaucugucaguucauucuuauucguagaagcacuauuccaagaauaccaauguuacggaucuucaucaaacacaagaguacucaacgaauuaaacuacgauaacgcuggaaccaauuuauacaacgaacuagaaaugaacuacuauggaaaacaagaaaacugguauucacuaaaaaaaaacagcagaaguuuaggagaaaaugacgacggaaacaaugaagacaaugaaaaauuacgaaaaccaaaacacaaaaaauuaaaacaacccgccgacggaaauccagacccaaacgcaaacccaaauguagacccaaacgcaaacccaaauguagaucccaacgcaaacccaaacguagaucccaaugcaaacccaaacgcaaacccaaaugcaaaccccaacgcaaacccaaaugcaaacccuaacgcaaacccgaacgcaaacccaaacgcaaaucccaaugcaaaccccaacgcaaauccaaaugcaaacccuaacgcaaauccgaacgcaaauccaaacgcaaacccaaacgcaaacccaaacgcaaacccaaacgcaaacccaaacgucgacccaaacgccaauccaaacgcaaaccccaaugcaaacccaaaugcaaacccaaacgcaaacccaaaugccaacccaaacgcaaacccaaacgcaaacccaaacgcaaacccaaacgcaaacccaaaugcaaacccaaaugcaaacccaaacgccaacccaaacgcaaacccaaacgcaaacccaaacgccaacccaaacgcaaacccuaacgcaaauccaaacaaaaacaaccaagggaacggacaaggacacaacaugccaaacgacccaaacagaaacguagacgaaaacgccaacgcaaacucagcugucaaaaacaauaacaacgaagaacccuccgauaaacacauaaaagaauaccuaaacaaaauccaaaacucccuuucuacagaauggucacccugcucaguaacaugcggcaacggcauacaaguuagaaucaaaccaggaucagcaaauaaaccaaaagacgaauuagacuaugccaacgacauagaaaaaaaaauauguaaaauggaaaaaugcucaucaguuuucaacguaguaaacagcucaaucggauuaauaaugguacuaucauucuuauuuuuaaacggaggaggaggcuccggcggagguggaaaacuagaaucaacuagaauauaccaaauauuagcaauauacucaacaguagcaucaucacucguauuaguaguaucgcuaggagcaauaaguuucuggaugugcucuaacggaagccuacaaugccgaauaugcauauaaggacuagugcaucacauuuaaaagcaucucagccuaccaugagaauaagagaaagaaaaugaagaucaauagcuuauucaucucuuuuucuuuuucguugguguaaagccaacacccugucuaaaaaacauaaauuucuuuaaucauuuugccucuuuucucugugcuucaauuaauaaaaaauggaaagaaccuagaucuaaaaaaaaaaaaaaaaaaaaaaaaaaaaaaaaaaaaaaaaaaaaaaaaaaaaaaaaaaaaaaaaugcaucccccccccccccccccccccccccccccccaaaggcucuuuucagagccaccagaauu

SEQ ID NO: 1433 - RNA, 1619 nt, Artificial Sequence
  mRNA Design i-2 (A64-N5-C30-hSL-N5) comprising derived and/or modified sequence from Pf(3D7)__XP_001351122.1__Pf-CSP(199-377)_L(PVTN)_HBsAg (opt6)
aggagaggcgcugccuacggagguggcagccaucuccuucucggcaucaagcuuaccauggacccaaacgccaaccccaacgcaaacccaaaugcaaacccaaacgcuaaccccaacgcaaacccaaacgcuaacccuaacgcaaauccaaacgcaaaucccaacgcaaauccaaacgcaaacccaaacgcaaacccaaaugccaacccaaacgcaaacccuaacgcaaaucccaacgcaaauccaaaugcaaaccccaaugcaaacccaaacgcaaauccaaacaaaaauaaucaaggaaauggacaaggacauaacaugccaaacgacccuaaccgaaacgucgacgaaaaugcaaacgcaaacuccgcaguaaaaaacaacaacaacgaagaaccuuccgacaaacacauaaaagaauaccuaaacaaaauacaaaacucucuauccacugaauggucaccaugcucaguaaccugcggaaauggcauacaaguaagaauaaaaccaggaucugcaaauaaaccuaaagacgaacuagauuacgcaaaugacauagaaaaaaaaauaugcaaaauggaaaaaugcucaucagucccaguaacaaacauggaaaacaucacaucaggauucuuaggaccacuacucguauuacaagcaggauucuuucuuuuaacaagaauauuaacaauaccacaaucccuagacucaugguggacaucauuaaacuuccuagguggaucaccagucugccucggacaaaacucacaaucaccaacaucaaaccacucaccaacauccugcccaccaauuuguccaggauacagauggaugugccuacgaagauucauaauauucuuauuuauauuacuacuaugucucauauuuuuacucguacuauuagacuaucagggcauguuacccguauguccacuaauaccaggcucaaccaccacaaacacagguccaugcaaaaccugcaccacaccagcacaaggaaacuccauguuucccucauguugcugcaccaaacccaccgauggaaacugcaccugcauaccaaucccaucuucaugggcauucgcaaaauaucuaugggaaugggcauccguaagauuuucauggcuaucacuauuaguaccauucguacaaugguucguaggauuaucaccaacaguaugguuaucagcaauauggaugaugugguacuggggaccaucacuauacucaauaguauccccuuucauaccauuacucccaauauuuuucugccuuuggguauacauauaaggacuagugcaucacauuuaaaagcaucucagccuaccaugagaauaagagaaagaaaaugaagaucaauagcuuauucaucucuuuuucuuuuucguugguguaaagccaacacccugucuaaaaaacauaaauuucuuuaaucauuuugccucuuuucucugugcuucaauuaauaaaaaauggaaagaaccuagaucuaaaaaaaaaaaaaaaaaaaaaaaaaaaaaaaaaaaaaaaaaaaaaaaaaaaaaaaaaaaaaaaaugcaucccccccccccccccccccccccccccccccaaaggcucuuuucagagccaccagaauu

SEQ ID NO: 1434 - RNA, 1661 nt, Artificial Sequence
  mRNA Design i-2 (A64-N5-C30-hSL-N5) comprising derived and/or modified sequence from Pf(3D7)__XP_001351122.1__Pf-CSP(199-387)_L(PVTN)_HBsAg (opt6)
aggagaggcgcugccuacggagguggcagccaucuccuucucggcaucaagcuuaccaugauggcaccagauccaaacgcaaacccaaacgcaaacccaaacgcaaauccaaaugcaaacccaaacgcaaaucccaaugcaaacccuaacgcaaacccaaacgccaacccaaaugccaacccaaacgcaaacccaaacgcaaauccaaacgcaaacccaaacgcuaacccaaaugcaaaccccaacgcaaauccaaacgcaaacccaaacgcaaauccaaacgcuaacccaaacaaaaauaaccaaggaaacggacaaggacacaauaugccaaaugacccaaauagaaacguagacgaaaacgcaaacgcaaauucagcagucaaaaacaauaacaacgaagaaccauccgauaaacacauaaaagaauacuuaaacaaaauccaaaacucacuaucaacugaauggucaccuuguucaguaacauguggcaacggaauacaaguaagaauaaaaccagguucagccaacaaaccuaaagacgaacuagacuacgcaaacgacauagaaaaaaaaaucugcaaaauggaaaaaugcucaucaguauuuaauguaguaaacucaucaauaggacuaggcccuguaacaaacauggaaaacauaaccucaggauucuuaggcccacuacuaguacuccaagcaggauucuuucuucuaacaagaauauuaaccauuccucaaucauuagacucaugguggacaucccuuaacuuucuaggaggaagccccguaugcuuaggacaaaacagccaauccccaacauccaaccacuccccaacaucaugccccccaauaugcccaggauacagauggaugugccuaagaagauucaucauauuccuauuuauucucuuacucugcuuaauauucuuacucguauuacucgacuaccaaggaauguuaccaguaugcccacuaauaccaggauccacaacaacaaacacgggaccaugcaaaacaugcacaacaccugcccaaggaaauuccauguucccaucaugcugcugcacaaaaccaaccgacggcaacugcacaugcauaccaauaccaucaagcugggccuucgcaaaauaccuaugggaaugggcaucagugagauucucauggcucucauuacuagucccauucguacaaugguuuguaggauuaucaccaacaguuuggcucagcgcaauauggaugaugugguacuggggccccucuuuauauucaauaguauccccauuuauaccacuacucccaauauucuucuguuuauggguauacauauaaggacuagugcaucacauuuaaaagcaucucagccuaccaugagaauaagagaaagaaaaugaagaucaauagcuuauucaucucuuuuucuuuuucguugguguaaagccaacacccugucuaaaaaacauaaauuucuuuaaucauuuugccucuuuucucugugcuucaauuaauaaaaaauggaaagaaccuagaucuaaaaaaaaaaaaaaaaaaaaaaaaaaaaaaaaaaaaaaaaaaaaaaaaaaaaaaaaaaaaaaaaugcaucccccccccccccccccccccccccccccccaaaggcucuuuucagagccaccagaauu

SEQ ID NO: 1435 - RNA, 845 nt, Artificial Sequence
  mRNA Design i-2 (A64-N5-C30-hSL-N5) comprising derived and/or modified sequence from Pf(3D7)__XP_001351122.1__HsALB_Pf-CSP(19-152) (opt6)
aggagaggcgcugccuacggagguggcagccaucuccuucucggcaucaagcuuaccaugaaauggguaacauucauaucacuacuauuccuauucuccagcgcauacucacuauuccaagaauaccaaugcuacggaucaagcucaaacacacgaguacuaaacgaacuaaacuacgacaacgcaggaaccaaccuauacaacgaacuagaaaugaacuacuacggaaaacaagaaaacugguacucacuaaaaaaaaacagcagaucacuaggagaaaacgacgacggaaacaacgaagacaacgaaaaacuaagaaaaccaaaacacaaaaaacuaaaacaacccgcagacggaaacccagacccaaacgcaaacccaaacguagacccaaaugcaaacccaaacguagacccaaacgcaaacccaaacguagacccaaacgcaaacccaaacgcaaacccaaacgcaaacccaaacgcaaacccaaacgcaaacccaaacgcaaacccauaaggacuagugcaucacauuuaaaagcaucucagccuaccaugagaauaagagaaagaaaaugaagaucaauagcuuauucaucucuuuuucuuuuucguugguguaaagccaacacccugucuaaaaaacauaaauuucuuuaaucauuuugccucuuuucucugugcuucaauuaauaaaaaauggaaagaaccuagaucuaaaaaaaaaaaaaaaaaaaaaaaaaaaaaaaaaaaaaaaaaaaaaaaaaaaaaaaaaaaaaaaaugcaucccccccccccccccccccccccccccccccaaaggcucuuuucagagccaccagaauu

SEQ ID NO: 1436 - RNA, 965 nt, Artificial Sequence
  mRNA Design i-2 (A64-N5-C30-hSL-N5) comprising derived and/or modified sequence from Pf(3D7)__XP_001351122.1__HsALB_Pf-CSP(19-192) (opt6)
aggagaggcgcugccuacggagguggcagccaucuccuucucggcaucaagcuuaccaugaaauggguaacauucaucucacuacuauucuuauucucaucagcauacucacuauuccaagaauaccaaugcuacggaucaucaucaaacacacgaguacucaacgaacuaaacuacgacaacgcaggaacaaaccuauacaacgaacuagaaaugaacuacuacggaaaacaagaaaacugguauucacuaaaaaaaaacucaagaucacuaggagaaaacgacgacggaaacaacgaagacaacgaaaaacuaagaaaaccaaaacacaaaaaacuaaaacaaccagcagacggaaacccagacccaaacgcaaacccaaacguagacccaaacgccaacccaaacguagacccaaacgcaaacccaaacguagacccaaacgcaaacccaaacgcaaacccaaacgcaaacccaaacgcaaacccaaacgcaaacccaaacgcaaacccaaacgcaaacccaaacgcaaacccaaacgcaaacccaaacgcaaacccaaacgcaaacccaaacgcaaauccaaacgcaaacccaaacgcaaacccaaacgcaaacccaaacgcaaaccccuaaggacuagugcaucacauuuaaaagcaucucagccuaccaugagaauaagagaaagaaaaugaagaucaauagcuuauucaucucuuuuucuuuuucguugguguaaagccaacacccugucuaaaaaacauaaauuucuuuaaucauuuugccucuuuucucugugcuucaauuaauaaaaaauggaaagaaccuagaucuaaaaaaaaaaaaaaaaaaaaaaaaaaaaaaaaaaaaaaaaaaaaaaaaaaaaaaaaaaaaaaaaugcaucccccccccccccccccccccccccccccccaaaggcucuuuucagagccaccagaauu

SEQ ID NO: 1437 - RNA, 1205 nt, Artificial Sequence
  mRNA Design i-2 (A64-N5-C30-hSL-N5) comprising derived and/or modified sequence from Pf(3D7)__XP_001351122.1__HsALB_Pf-CSP(19-272) (opt6)
aggagaggcgcugccuacggagguggcagccaucuccuucucggcaucaagcuuaccaugaaauggguaacauucauaucacuacuauuccuauucucaagcgcauauucacuauuccaagaauaccaaugcuacggaucaagcucaaacacaagaguacuuaacgaacuaaacuacgacaacgcaggaacaaaccuauacaacgaacuugaaaugaacuacuacggaaaacaagaaaacugguacucacuaaaaaaaaauagcagaagcuuaggagaaaacgacgacggaaacaacgaagacaacgaaaaauuaagaaaaccuaaacacaaaaaacuaaaacaacccgcagacggaaacccagacccuaacgccaacccaaauguagacccaaacgcaaacccaaacguagacccaaacgcaaaccccaacguagacccaaacgcaaacccaaacgcaaacccaaacgcaaacccaaacgcaaaccccaacgcaaacccaaacgcaaacccaaacgcaaacccaaacgcaaacccaaacgcaaacccaaacgcaaacccaaacgcaaacccaaacgcaaacccaaacgcgaacccaaacgcaaacccaaacgcaaacccaaacgcaaacccaaacgcaaacccaaacguagacccaaaugcaaaccccaacgcaaacccaaacgcaaacccaaaugcaaaccccaacgcaaacccaaacgcaaacccaaacgcaaacccaaacgcaaacccaaaugcaaacccaaacgcaaacccaaacgccaacccaaacgcaaacccaaacgcaaacccaaacgcaaacccaaacgcaaacccgaacgcaaacccaaacgcaaacccaaacgcaaacccauaaggacuagugcaucacauuuaaaagcaucucagccuaccaugagaauaagagaaagaaaaugaagaucaauagcuuauucaucucuuuuucuuuuucguugguguaaagccaacacccugucuaaaaaacauaaauuucuuuaaucauuuugccucuuuucucugugcuucaauuaauaaaaaauggaaagaaccuagaucuaaaaaaaaaaaaaaaaaaaaaaaaaaaaaaaaaaaaaaaaaaaaaaaaaaaaaaaaaaaaaaaaugcaucccccccccccccccccccccccccccccccaaaggcucuuuucagagccaccagaauu

SEQ ID NO: 1438 - RNA, 1367 nt, Artificial Sequence
  mRNA Design i-2 (A64-N5-C30-hSL-N5) comprising derived and/or modified sequence from Pf(3D7)__XP_001351122.1__HsALB_Pf-CSP(19-272)_L(AAY)_Pf-CSP(310-3 27)_L(AAY)_Pf-CSP(346-375) (opt6)
aggagaggcgcugccuacggagguggcagccaucuccuucucggcaucaagcuuaccaugaaauggguaacauuuauaucacuccuauuccuuuuuucgucagcauacucacuauuccaagaauaucaaugcuacggaucaagcuccaacacaagaguacuaaacgaacuaaacuacgacaacgcaggaacaaaccuauacaacgaacuagaaaugaacuacuacggaaaacaagaaaacugguacucacuaaaaaaaaacagccgaagcuuaggagaaaaugacgacggaaacaacgaagacaacgaaaaauuacgcaaacccaaacacaaaaaacugaaacaaccagcagacggaaacccagacccaaacgcaaacccaaacguagacccaaacgcaaacccaaacguagacccaaacgcaaacccaaacguagacccaaacgcaaacccaaacgcgaacccaaacgccaacccaaacgcaaacccaaacgcaaacccaaacgcaaacccaaacgcaaacccaaacgcaaacccaaacgccaacccgaacgcaaacccaaacgcaaacccaaacgcaaauccaaacgcaaacccaaacgcaaacccaaacgccaacccaaacgcaaacccaaacgcaaacccaaauguggacccaaacgcaaacccaaacgcaaacccaaacgcaaacccaaaugcaaacccaaacgcaaacccaaacgcaaacccaaacgcaaacccaaacgcaaacccaaaugcaaacccaaacgcaaauccaaacgcaaacccaaacgcaaacccaaacgcaaacccaaacgcaaacccuaacgcaaacccaaacgcaaacccaaacgccaaccccaaugcaaacccagcagcauacgaaccaucagacaaacacauaaaagaauaccuaaacaaaauacaaaacucacucgcagcauauauaaagccaggaagcgccaacaaaccaaaagacgaacuagauuacgcaaacgacauagaaaaaaaaaucuguaaaauggaaaaaugcucauaaggacuagugcaucacauuuaaaagcaucucagccuaccaugagaauaagagaaagaaaaugaagaucaauagcuuauucaucucuuuuucuuuuucguugguguaaagccaacacccugucuaaaaaacauaaauuucuuuaaucauuuugccucuuuucucugugcuucaauuaauaaaaaauggaaagaaccuagaucuaaaaaaaaaaaaaaaaaaaaaaaaaaaaaaaaaaaaaaaaaaaaaaaaaaaaaaaaaaaaaaaaugcaucccccccccccccccccccccccccccccccaaaggcucuuuucagagccaccagaauu

SEQ ID NO: 1439 - RNA, 1328 nt, Artificial Sequence
  mRNA Design i-2 (A64-N5-C30-hSL-N5) comprising derived and/or modified sequence from Pf(3D7)__XP_001351122.1__HsALB_Pf-CSP(19-272)_L(AAY)_Pf-CSP(346-3 65)_L(AAY)_P2 (opt6)
aggagaggcgcugccuacggagguggcagccaucuccuucucggcaucaagcuuaccaugaaauggguaacauucauaucacuauuauuccuuuucucaucagcuuacucacuauuccaagaauaccaaugcuacggaucauccucaaacacaagaguacuaaacgaacuaaacuacgacaacgccggaaccaaccuauacaacgaacucgaaaugaacuacuacggaaaacaagaaaacugguacucacuaaaaaaaaacagccgaucccuaggagaaaacgacgacggaaauaacgaagacaaugaaaaauuaagaaaaccaaaacacaaaaaacuaaaacaaccagcagacggaaacccagacccaaacgcaaacccaaacguagauccaaacgcaaacccaaacguagacccaaacgcaaacccaaacguagacccaaacgcuaacccaaacgcaaacccaaacgcaaacccaaacgcaaacccaaacgcaaacccaaacgcaaacccgaacgcaaaccccaacgcaaacccaaacgcaaacccaaacgcaaaccccaacgcaaacccaaacgcaaacccgaacgcaaacccaaacgcaaacccaaacgcaaacccaaacgcaaacccaaacgcaaacccaaacguagacccaaacgccaacccaaacgcaaacccaaacgcaaacccaaacgcaaacccaaacgcaaacccaaacgcaaacccaaacgcaaacccaaacgcaaacccaaacgcaaacccaaacgcaaaccccaacgcaaacccaaaugcaaacccaaacgcaaacccaaaugcaaaccccaacgcaaacccaaaugccaauccaaacgcaaacccaaacgcaaacccagccgcauacauaaaaccaggauccgcaaacaaaccaaaagacgaacuagacuacgcaaacgacauagaagcagcauaccaauauauaaaagccaacuccaaauucauagguauaacagaacucuaaggacuagugcaucacauuuaaaagcaucucagccuaccaugagaauaagagaaagaaaaugaagaucaauagcuuauucaucucuuuuucuuuuucguugguguaaagccaacacccugucuaaaaaacauaaauuucuuuaaucauuuugccucuuuucucugugcuucaauuaauaaaaaauggaaagaaccuagaucuaaaaaaaaaaaaaaaaaaaaaaaaaaaaaaaaaaaaaaaaaaaaaaaaaaaaaaaaaaaaaaaaugcaucccccccccccccccccccccccccccccccaaaggcucuuuucagagccaccagaauu

SEQ ID NO: 1440 - RNA, 1322 nt, Artificial Sequence
  mRNA Design i-2 (A64-N5-C30-hSL-N5) comprising derived and/or modified sequence from Pf(3D7)__XP_001351122.1__HsALB_Pf-CSP(19-272)_L(AAY)_Pf-CSP(346-3 65)_L(AAY)_PADRE (opt6)
aggagaggcgcugccuacggagguggcagccaucuccuucucggcaucaagcuuaccaugaaauggguaaccuucauaucacuacuauucuuauucucaucagcauacucacucuuccaagaauaccaaugcuacggcucaagcucaaacacaagaguacuaaacgaauuaaacuaugacaacgccggaacaaaccuauacaaugaauuagaaaugaacuacuacggcaaacaagaaaacugguacucacucaaaaaaaacuccagaaguuuaggagaaaaugacgacggaaacaaugaagacaaugaaaaauuacgaaaaccaaaacacaaaaaacuaaaacaacccgccgacggaaaccccgacccgaacgcaaacccaaacguagacccaaacgcaaacccaaacguagacccaaaugcaaacccaaacguagacccaaacgcaaacccaaacgcaaacccaaacgcaaauccaaacgcaaacccaaaugcaaacccaaaugcaaauccaaacgcaaaccccaacgcaaacccaaacgcaaacccaaaugcaaauccaaacgccaacccaaaugcaaacccaaacgcaaauccaaacgcaaacccaaacgcaaauccaaacgcaaacccaaaugcaaacccaaacguagauccaaacgcaaacccaaacgccaacccaaacgcaaacccgaacgcaaacccaaacgcaaacccaaacgccaacccaaacgccaacccaaacgccaacccaaacgcaaacccaaacgcaaacccaaacgcaaacccaaacgcaaacccaaaugcaaacccuaacgcaaacccaaacgcaaacccaaacgcaaacccaaacgccaacccaaacgcaaauccagcagcauacauaaaaccaggaucagcaaacaaaccaaaagaugaacuagacuacgcaaaugacaucgaagcagccuacgcuaaauucguagcagccuggacacuaaaagcagcagccuaaggacuagugcaucacauuuaaaagcaucucagccuaccaugagaauaagagaaagaaaaugaagaucaauagcuuauucaucucuuuuucuuuuucguugguguaaagccaacacccugucuaaaaaacauaaauuucuuuaaucauuuugccucuuuucucugugcuucaauuaauaaaaaauggaaagaaccuagaucuaaaaaaaaaaaaaaaaaaaaaaaaaaaaaaaaaaaaaaaaaaaaaaaaaaaaaaaaaaaaaaaaugcaucccccccccccccccccccccccccccccccaaaggcucuuuucagagccaccagaauu

SEQ ID NO: 1441 - RNA, 1379 nt, Artificial Sequence
  mRNA Design i-2 (A64-N5-C30-hSL-N5) comprising derived and/or modified sequence from Pf(3D7)__XP_001351122.1__HsALB_Pf-CSP(19-272)_L(G4S)_Pf-CSP(310-3 27)_L(G4S)_Pf-CSP(346-375) (opt6)
aggagaggcgcugccuacggagguggcagccaucuccuucucggcaucaagcuuaccaugaaauggguaaccuucaucucacuacuauuccuauucucaagcgcauacucacucuuucaagaauaccaaugcuacggcucaagcucaaacacacgaguacuaaacgaacuaaacuacgacaacgcaggaacaaaccuauauaacgaacucgaaaugaacuacuacggcaaacaagaaaauugguacucacuaaaaaaaaacagcagaagcuuaggagaaaacgacgacggaaacaacgaagauaacgaaaaacuaagaaaaccaaaacacaaaaaacuaaaacaacccgcagacggaaacccagacccaaacgcaaauccaaauguagacccgaacgcaaacccaaacguagacccaaaugcgaacccaaacgucgacccaaacgcaaacccaaaugcaaacccaaaugcgaacccaaacgcaaacccaaacgcaaauccaaacgcaaauccaaaugcaaacccaaacgcgaauccaaacgcaaacccaaacgcaaacccaaacgcaaacccaaacgcaaacccaaacgcaaacccaaacgcaaacccgaacgcuaacccaaacgcaaacccaaacgcaaacccaaacguagauccaaacgcgaacccaaacgcaaacccaaaugcaaacccaaacgcaaacccaaacgcaaacccaaacgcaaacccaaacgcaaacccaaacgcaaacccaaacgcgaacccaaacgcaaauccaaaugcaaacccaaacgcaaacccaaacgcaaacccaaacgcaaacccaaaugcaaacccaaacgcaaacccaaaugcaaacccaaacgcaaacccaggaggaggaggaucagaacccucagacaaacacauaaaagaauaccuaaacaaaauacaaaacucacuaggaggaggaggaucgaucaaaccaggaagcgcaaacaaaccaaaagacgaacucgacuacgcaaacgauauagaaaaaaaaauaugcaaaauggaaaaaugcucguaaggacuagugcaucacauuuaaaagcaucucagccuaccaugagaauaagagaaagaaaaugaagaucaauagcuuauucaucucuuuuucuuuuucguugguguaaagccaacacccugucuaaaaaacauaaauuucuuuaaucauuuugccucuuuucucugugcuucaauuaauaaaaaauggaaagaaccuagaucuaaaaaaaaaaaaaaaaaaaaaaaaaaaaaaaaaaaaaaaaaaaaaaaaaaaaaaaaaaaaaaaaugcaucccccccccccccccccccccccccccccccaaaggcucuuuucagagccaccagaauu

SEQ ID NO: 1442 - RNA, 1364 nt, Artificial Sequence
  mRNA Design i-2 (A64-N5-C30-hSL-N5) comprising derived and/or modified sequence from Pf(3D7)__XP_001351122.1__HsALB_Pf-CSP(19-272)_L(G4S)_Pf-CSP(310-3 27)_Pf-CSP(346-375) (opt6)
aggagaggcgcugccuacggagguggcagccaucuccuucucggcaucaagcuuaccaugaaauggguaacauucauaucacuccuauuccuauucuccucagcauacucccucuuccaagaauaccaaugcuacggcucaagcucaaacacacgaguacuaaacgaacuaaauuacgacaacgccggaacaaaccuauauaaugaacuagaaaugaauuacuacggaaaacaagaaaacugguacucacuuaaaaaaaacucaagaucauuaggagaaaacgacgacggcaacaacgaagacaacgaaaaacuaagaaaaccaaaacacaaaaaacuaaaacaacccgcagacggaaauccagauccaaacgcaaacccaaacguagacccaaacgcaaacccaaacguagacccaaacgcaaacccaaacgucgacccaaacgccaacccaaacgcaaacccaaacgcaaacccaaacgcaaacccaaacgccaacccaaacgcaaacccaaacgcaaacccaaacgcaaacccaaacgcaaacccaaacgcaaacccaaacgcaaacccgaacgcaaacccaaacgcaaauccuaacgcaaacccaaacgcaaacccaaacgcaaauccgaacgcaaacccaaacguagacccaaacgcaaacccaaacgcaaacccaaacgcaaacccaaacgcaaacccaaacgcaaacccuaacgcaaacccaaaugcaaacccaaacgcgaacccaaaugcaaacccaaaugcaaacccaaacgcaaacccaaacgcaaacccaaacgcaaauccaaacgcaaauccaaacgcaaacccaaacgcaaacccaaacgcaaacccaaacgccaacccaggaggagguggaagcgaaccauccgacaaacacauaaaagaauaccuaaacaaaauacaaaacucacuaauaaaacccggcucagcaaacaaaccaaaagacgaacuagacuacgccaacgacauagaaaaaaaaauauguaaaauggaaaaaugcucauaaggacuagugcaucacauuuaaaagcaucucagccuaccaugagaauaagagaaagaaaaugaagaucaauagcuuauucaucucuuuuucuuuuucguugguguaaagccaacacccugucuaaaaaacauaaauuucuuuaaucauuuugccucuuuucucugugcuucaauuaauaaaaaauggaaagaaccuagaucuaaaaaaaaaaaaaaaaaaaaaaaaaaaaaaaaaaaaaaaaaaaaaaaaaaaaaaaaaaaaaaaaugcaucccccccccccccccccccccccccccccccaaaggcucuuuucagagccaccagaauu

SEQ ID NO: 1443 - RNA, 1364 nt, Artificial Sequence
  mRNA Design i-2 (A64-N5-C30-hSL-N5) comprising derived and/or modified sequence from Pf(3D7)__XP_001351122.1__HsALB_Pf-CSP(19-325) (opt6)
aggagaggcgcugccuacggagguggcagccaucuccuucucggcaucaagcuuaccaugaaauggguaacauucauaucacuccuauuccuauucucaagcgcauacucauuauuccaagaauaccaaugcuacggaucaucaucuaacacaagaguacucaacgaacuaaacuacgacaacgcaggaacuaaucucuacaacgaacuagaaaugaacuacuacggaaaacaagaaaacugguauucacuaaaaaaaaacagccgaucauuaggagaaaacgacgacggcaacaacgaagacaacgaaaaacuacgaaaaccaaaacacaaaaaauuaaaacagccagccgacggaaacccagacccaaacgcaaacccaaacguagacccaaacgcaaacccaaacguagacccaaacgcaaacccaaacguagacccaaacgcaaacccaaacgcaaacccaaacgcaaauccaaacgcaaacccaaacgccaacccaaacgcaaacccaaacgcaaaccccaacgcaaacccaaacgcaaacccaaacgcaaacccaaaugccaacccaaacgcaaacccaaacgcaaacccaaacgcaaacccaaacgcaaacccaaaugcaaacccaaacgcaaacccaaacguagacccaaacgcaaacccaaaugcaaacccaaacgcaaaccccaacgcaaacccaaacgcaaacccaaacgcaaacccaaacgcaaacccaaacgccaacccaaacgcaaacccaaacgcaaacccaaacgcaaacccaaacgcaaacccaaacgcaaauccaaacgcaaacccaaacgcaaacccaaacgcaaacccaaacgcaaacccaaacgcaaacccaaauaaaaacaaucaaggaaacggacaaggacacaacaugccaaacgauccaaaucgcaacguagacgaaaacgcaaacgcaaacagcgcagucaaaaacaacaacaacgaagaaccaucagacaaacacauaaaagaauaccuaaauaaaauacaaaacuagggacuagugcaucacauuuaaaagcaucucagccuaccaugagaauaagagaaagaaaaugaagaucaauagcuuauucaucucuuuuucuuuuucguugguguaaagccaacacccugucuaaaaaacauaaauuucuuuaaucauuuugccucuuuucucugugcuucaauuaauaaaaaauggaaagaaccuagaucuaaaaaaaaaaaaaaaaaaaaaaaaaaaaaaaaaaaaaaaaaaaaaaaaaaaaaaaaaaaaaaaaugcaucccccccccccccccccccccccccccccccaaaggcucuuuucagagccaccagaauu

SEQ ID NO: 1444 - RNA, 1541 nt, Artificial Sequence
  mRNA Design i-2 (A64-N5-C30-hSL-N5) comprising derived and/or modified sequence from Pf(3D7)__XP_001351122.1__HsALB_Pf-CSP(19-384) (opt6)
aggagaggcgcugccuacggagguggcagccaucuccuucucggcaucaagcuuaccaugaaauggguaaccuuuauaucacucuuauuccuauuuucaucagcauacucacucuuccaagaauaucaaugcuacggaucaucaucaaacacaagaguccucaaugaauuaaacuaugacaaugcaggaaccaaccuauacaacgaauuagaaaugaacuacuacggcaaacaagaaaacugguacucacucaaaaaaaacucaagauccuuaggagaaaaugaugacggaaacaacgaagacaacgaaaaacuccgaaaaccaaaacacaaaaaacuaaaacaacccgccgacggaaacccagaccccaacgcaaacccaaauguagaccccaacgcaaacccaaacguagacccaaacgcaaacccaaacguagacccaaacgcaaauccaaacgccaacccaaacgcaaacccaaacgccaacccaaacgcaaacccaaacgcaaacccaaacgcaaacccaaacgcaaacccaaaugcaaacccaaaugcaaacccaaacgcaaacccaaacgcaaacccaaacgcaaacccaaacgcaaacccaaaugcaaacccaaacgcaaacccaaacgcaaacccaaacguagacccaaaugcaaacccaaacgcaaacccaaacgcaaauccaaaugcaaauccaaacgcaaauccaaacgcaaacccaaacgcaaacccaaacgcaaacccaaacgcaaauccaaaugcaaacccaaacgcaaacccaaacgcaaacccaaacgcuaacccaaacgccaauccaaacgcaaacccaaacgcaaacccuaaugcaaacccaaacgccaacccaaauaaaaauaaccaaggaaacggacaaggacacaacaugccaaacgacccaaacagaaacgucgaugaaaacgcaaacgcaaauuccgcagucaaaaacaacaacaacgaagaaccaucagacaaacacauaaaagaauaccucaacaaaauacaaaacucccuaucaacagaauggucacccugcuccguuacaugcgguaacggcauacaaguaagaauaaaaccaggaucagcuaacaaacccaaagacgaacuagacuacgccaacgacauagaaaaaaaaauaugcaaaauggaaaaaugcuccucaguauucaacguaguaaacucaucauaaggacuagugcaucacauuuaaaagcaucucagccuaccaugagaauaagagaaagaaaaugaagaucaauagcuuauucaucucuuuuucuuuuucguugguguaaagccaacacccugucuaaaaaacauaaauuucuuuaaucauuuugccucuuuucucugugcuucaauuaauaaaaaauggaaagaaccuagaucuaaaaaaaaaaaaaaaaaaaaaaaaaaaaaaaaaaaaaaaaaaaaaaaaaaaaaaaaaaaaaaaaugcaucccccccccccccccccccccccccccccccaaaggcucuuuucagagccaccagaauu

SEQ ID NO: 1445 - RNA, 1679 nt, Artificial Sequence
  mRNA Design i-2 (A64-N5-C30-hSL-N5) comprising derived and/or modified sequence from Pf(3D7)__XP_001351122.1__HsALB_Pf-CSP(19-384)_TM domain HA (opt6)
aggagaggcgcugccuacggagguggcagccaucuccuucucggcaucaagcuuaccaugaaauggguaacauuuauaucacuacuuuuccuauucucaucagcauacucacucuuccaagaauaucaaugcuauggauccucaucaaacacaagaguacucaacgaauuaaacuacgauaaugccggaacaaaccuauauaacgaacuagaaaugaacuacuacggaaaacaagaaaauugguacucauuaaaaaaaaacuccagaucccuuggagaaaacgacgauggaaacaacgaagauaacgaaaaauuaagaaaaccaaaacacaaaaaauugaaacaaccagcagacgguaacccagacccaaacgccaacccaaacguagacccaaacgcgaauccaaacgucgacccaaacgcaaaucccaacguagacccaaaugcaaauccaaaugccaauccaaacgcaaacccaaacgcaaacccaaaugcaaacccaaacgccaacccaaacgcaaauccaaacgcaaacccaaacgcaaacccaaacgccaacccaaacgccaaccccaaugcaaacccaaaugcaaacccaaacgcaaacccaaacgcaaauccaaacgcaaacccaaacgccaacccaaacguagacccaaacgcaaauccaaacgcaaacccaaacgccaauccaaacgcaaacccaaacgccaacccaaaugcaaaucccaacgcaaacccaaacgcaaauccaaaugcaaaccccaacgcaaauccaaacgcaaacccaaacgcaaauccaaacgcaaauccaaaugcaaacccaaacgcaaacccuaaugcaaacccaaacgcaaacccaaacgccaacccaaacaaaaacaaccaaggaaacggacaaggucacaauaugccaaaugacccaaaccgaaacguagacgaaaacgcaaaugccaauagcgcaguaaaaaacaauaacaacgaagaaccuucagauaaacacauaaaagaauaccuaaacaaaauacaaaacucccuaucaacagaauggucaccuuguucagucacauguggaaacggaauacaaguaagaauaaaaccaggaucagcaaacaaaccaaaagacgaacuagauuacgcaaacgauauagaaaaaaaaauauguaaaauggaaaaaugcuccucagucuucaacguagucaacaguuccaaacuagaaucaaccagaaucuaccaaauacuagcaauauauuccacaguagcaagcucacucguauuaguagucucccuaggagcaauaucauucuggaugugcucaaacggaagcuuacaaugccgaauauguauauaaggacuagugcaucacauuuaaaagcaucucagccuaccaugagaauaagagaaagaaaaugaagaucaauagcuuauucaucucuuuuucuuuuucguugguguaaagccaacacccugucuaaaaaacauaaauuucuuuaaucauuuugccucuuuucucugugcuucaauuaauaaaaaauggaaagaaccuagaucuaaaaaaaaaaaaaaaaaaaaaaaaaaaaaaaaaaaaaaaaaaaaaaaaaaaaaaaaaaaaaaaaugcaucccccccccccccccccccccccccccccccaaaggcucuuuucagagccaccagaauu

SEQ ID NO: 1446 - RNA, 1391 nt, Artificial Sequence
  mRNA Design i-2 (A64-N5-C30-hSL-N5) comprising derived and/or modified sequence from Pf(3D7)__XP_001351122.1__HsALB_Pf-CSP(82-397) (opt6)
aggagaggcgcugccuacggagguggcagccaucuccuucucggcaucaagcuuaccaugaaauggguaacauucauaucacuacuauuccucuucaguucagccuauagcgauaacgaaaaacuaagaaaaccaaaacacaaaaaacucaaacaaccagcagacggaaacccagacccaaacgcaaacccaaacguagacccaaacgcaaacccaaacguagacccaaacgcaaauccaaacguagacccaaaugcaaaccccaacgcaaacccaaacgcaaacccaaacgcaaacccaaacgcaaacccaaaugcgaacccaaaugcaaauccaaacgcaaacccaaacgcaaacccaaacgcaaacccaaacgcuaacccaaacgcaaacccaaacgcaaacccaaaugcaaacccaaacgcaaacccaaacgcaaaccccaacgcaaacccaaacguagacccaaacgcaaacccaaacgcaaacccaaacgcaaacccaaacgccaacccaaaugccaacccaaacgcaaacccaaaugcaaaccccaacgcaaacccaaacgccaacccaaacgcaaacccaaacgcaaacccaaacgcaaaccccaaugcaaacccaaacgcaaacccaaaugcaaauccaaacgcaaacccaaacgcaaacccaaacgcaaacccaaacaaaaacaaccaaggaaacggacaaggacacaacaugccaaacgacccaaaucgaaacgucgaugaaaacgccaacgcaaacucagcaguaaaaaacaacaacaacgaagaaccaucugacaaacacauaaaagaauaccuaaacaaaauacaaaacucauuauccaccgaauggucaccauguucaguaacaugcggcaacggaauacaagucagaauaaaaccaggcucagcaaauaaaccaaaagacgaacuagacuacgcaaacgacauagaaaaaaaaauaugcaaaauggaaaaauguucaucagucuucaacguaguaaacucaucaauaggacucauaaugguacuaucauuccuauucuuaaacuaaggacuagugcaucacauuuaaaagcaucucagccuaccaugagaauaagagaaagaaaaugaagaucaauagcuuauucaucucuuuuucuuuuucguugguguaaagccaacacccugucuaaaaaacauaaauuucuuuaaucauuuugccucuuuucucugugcuucaauuaauaaaaaauggaaagaaccuagaucuaaaaaaaaaaaaaaaaaaaaaaaaaaaaaaaaaaaaaaaaaaaaaaaaaaaaaaaaaaaaaaaaugcaucccccccccccccccccccccccccccccccaaaggcucuuuucagagccaccagaauu

SEQ ID NO: 1447 - RNA, 743 nt, Artificial Sequence
  mRNA Design i-2 (A64-N5-C30-hSL-N5) comprising derived and/or modified sequence from Pf(3D7)__XP_001351122.1__HsALB_Pf-CSP(93-192) (opt6)
aggagaggcgcugccuacggagguggcagccaucuccuucucggcaucaagcuuaccaugaaauggguaacauucaucucacuacuauuccuauucucaagcgcauacucaaaacuaaaacaaccagcagacggaaacccagacccaaacgcaaacccaaacguagacccaaacgcaaacccaaacguagacccaaacgcaaacccaaacguagacccaaacgcaaacccaaacgcaaacccaaacgcaaacccaaacgcaaacccaaacgcaaacccaaacgcaaacccaaacgcaaacccaaacgcaaacccaaacgcaaacccaaacgcaaacccaaacgcaaacccaaacgcaaacccaaacgcaaacccaaacgcaaacccaaacgcaaacccaaacgcaaacccauaaggacuagugcaucacauuuaaaagcaucucagccuaccaugagaauaagagaaagaaaaugaagaucaauagcuuauucaucucuuuuucuuuuucguugguguaaagccaacacccugucuaaaaaacauaaauuucuuuaaucauuuugccucuuuucucugugcuucaauuaauaaaaaauggaaagaaccuagaucuaaaaaaaaaaaaaaaaaaaaaaaaaaaaaaaaaaaaaaaaaaaaaaaaaaaaaaaaaaaaaaaaugcaucccccccccccccccccccccccccccccccaaaggcucuuuucagagccaccagaauu

SEQ ID NO: 1448 - RNA, 983 nt, Artificial Sequence
  mRNA Design i-2 (A64-N5-C30-hSL-N5) comprising derived and/or modified sequence from Pf(3D7)__XP_001351122.1__HsALB_Pf-CSP(93-272) (opt6)
aggagaggcgcugccuacggagguggcagccaucuccuucucggcaucaagcuuaccaugaaaugggucacauucauaucacuccuauuccuauucucaagcgcauacucaaaacuaaaacaaccagcagacggaaacccagacccaaacgcaaacccaaacguagacccaaacgcaaacccaaacguagacccaaacgcaaacccaaacguagacccaaacgcaaacccaaacgcaaacccaaacgccaacccaaacgcaaacccaaacgcaaacccaaacgcaaacccaaacgcaaacccaaacgcaaacccaaacgcaaacccaaacgcaaacccaaacgcaaacccaaacgcaaacccaaacgcaaauccaaacgcaaacccaaacgccaacccaaacgcaaacccaaacgcaaacccaaacguagacccaaacgcaaacccaaacgcaaacccaaacgcaaacccaaacgcaaacccaaacgcaaacccaaacgcaaacccaaacgcaaacccaaacgcaaacccaaacgcaaauccaaacgcaaacccaaacgcaaacccaaacgcaaacccaaacgcaaacccaaacgcaaacccaaacgcaaacccaaacgcaaacccaaacgcaaacccaaacgcaaacccauaaggacuagugcaucacauuuaaaagcaucucagccuaccaugagaauaagagaaagaaaaugaagaucaauagcuuauucaucucuuuuucuuuuucguugguguaaagccaacacccugucuaaaaaacauaaauuucuuuaaucauuuugccucuuuucucugugcuucaauuaauaaaaaauggaaagaaccuagaucuaaaaaaaaaaaaaaaaaaaaaaaaaaaaaaaaaaaaaaaaaaaaaaaaaaaaaaaaaaaaaaaaugcaucccccccccccccccccccccccccccccccaaaggcucuuuucagagccaccagaauu

SEQ ID NO: 1449 - RNA, 1358 nt, Artificial Sequence
  mRNA Design i-2 (A64-N5-C30-hSL-N5) comprising derived and/or modified sequence from Pf(3D7)__XP_001351122.1__HsALB_Pf-CSP(93-397) (opt6)
aggagaggcgcugccuacggagguggcagccaucuccuucucggcaucaagcuuaccaugaaauggguaacauucauaucacuccuauuccuauucucaucagcauacucaaaacuaaaacaacccgcagacggaaacccagacccaaacgccaacccaaacguagacccaaacgcaaacccgaacguagacccaaacgcaaaccccaacguagacccaaacgcaaacccaaaugcaaacccaaacgcaaacccaaacgcaaacccaaacgcaaacccaaacgcaaacccaaacgcaaacccaaacgcaaacccaaacgcaaacccaaacgcgaaucccaacgcaaauccaaacgcaaacccaaacgcaaauccaaacgcaaacccgaacgcaaacccaaacgcaaacccaaacgcaaacccaaacguagauccaaacgcaaauccaaacgcaaacccaaacgcaaauccaaacgcaaacccaaacgcaaacccaaacgcaaaccccaacgcaaacccaaacgcaaacccaaacgcaaacccaaacgcaaauccaaacgccaacccaaacgcaaacccaaacgcaaacccaaacgcgaacccaaacgcgaacccaaacgcaaacccaaacgcaaacccaaacgcaaacccaaacaaaaacaaccaagggaacggacaaggacacaacaugccaaacgauccaaacagaaacguagacgaaaacgcaaacgcaaacucagcaguaaaaaacaacaacaacgaagaaccaucagacaaacacauaaaagaauaccuaaacaaaauacaaaacucacucucaacagaauggucaccaugcaguguaacaugcggaaauggaauacaaguacguauaaaaccaggaucagcaaacaaaccaaaagacgaauuagacuacgccaacgauauagaaaaaaaaauaugcaaaauggaaaaaugcagcucagucuucaacguagucaacagcucaauaggacuaauaaugguccucucauucuuauuucuaaacugaggacuagugcaucacauuuaaaagcaucucagccuaccaugagaauaagagaaagaaaaugaagaucaauagcuuauucaucucuuuuucuuuuucguugguguaaagccaacacccugucuaaaaaacauaaauuucuuuaaucauuuugccucuuuucucugugcuucaauuaauaaaaaauggaaagaaccuagaucuaaaaaaaaaaaaaaaaaaaaaaaaaaaaaaaaaaaaaaaaaaaaaaaaaaaaaaaaaaaaaaaaugcaucccccccccccccccccccccccccccccccaaaggcucuuuucagagccaccagaauu

SEQ ID NO: 1450 - RNA, 728 nt, Artificial Sequence
  mRNA Design i-2 (A64-N5-C30-hSL-N5) comprising derived and/or modified sequence from Pf(3D7)__XP_001351122.1__HsALB_Pf-CSP(98-192) (opt6)
aggagaggcgcugccuacggagguggcagccaucuccuucucggcaucaagcuuaccaugaaauggguaacauucauaagccuacuauuccuauucagcucagcauacagcgcagacggaaacccagacccaaacgcaaacccaaacguagacccaaacgcaaacccaaacguagacccaaacgcaaacccaaacguagacccaaacgcaaacccaaacgcaaacccaaacgcaaacccaaacgcaaacccaaacgcaaacccaaacgcaaacccaaacgcaaacccaaacgcaaacccaaacgcaaacccaaacgcaaacccaaacgcaaacccaaacgcaaacccaaacgcaaacccaaacgcaaacccaaacgcaaacccaaacgcaaacccauaaggacuagugcaucacauuuaaaagcaucucagccuaccaugagaauaagagaaagaaaaugaagaucaauagcuuauucaucucuuuuucuuuuucguugguguaaagccaacacccugucuaaaaaacauaaauuucuuuaaucauuuugccucuuuucucugugcuucaauuaauaaaaaauggaaagaaccuagaucuaaaaaaaaaaaaaaaaaaaaaaaaaaaaaaaaaaaaaaaaaaaaaaaaaaaaaaaaaaaaaaaaugcaucccccccccccccccccccccccccccccccaaaggcucuuuucagagccaccagaauu

SEQ ID NO: 1451 - RNA, 968 nt, Artificial Sequence
  mRNA Design i-2 (A64-N5-C30-hSL-N5) comprising derived and/or modified sequence from Pf(3D7)__XP_001351122.1__HsALB_Pf-CSP(98-272) (opt6)
aggagaggcgcugccuacggagguggcagccaucuccuucucggcaucaagcuuaccaugaaauggguaacauucauaucacuacuauuccuauucagcucagccuacagcgcagacggaaacccagacccaaacgcaaacccaaacguagacccaaacgcaaacccaaacgucgacccaaacgcaaacccaaacguagacccaaacgcaaacccaaacgcaaacccaaacgcaaacccaaacgcaaacccaaacgcaaacccaaacgcaaacccaaacgcaaacccaaacgcaaacccaaacgcaaacccaaacgcaaacccaaacgcaaacccaaacgcaaacccaaacgcaaacccaaacgcaaacccaaacgcaaacccaaacgcaaacccaaacgcaaacccaaacguagacccaaaugcaaacccaaacgcaaacccaaacgcaaacccaaacgcaaacccaaacgcaaacccaaacgcaaacccaaacgcaaacccaaacgcaaacccaaacgcaaacccaaacgcaaacccaaacgcaaacccaaacgcgaacccaaacgcaaacccaaacgcaaacccaaacgcaaacccaaacgcaaacccaaaugcaaacccaaacgcaaacccauaaggacuagugcaucacauuuaaaagcaucucagccuaccaugagaauaagagaaagaaaaugaagaucaauagcuuauucaucucuuuuucuuuuucguugguguaaagccaacacccugucuaaaaaacauaaauuucuuuaaucauuuugccucuuuucucugugcuucaauuaauaaaaaauggaaagaaccuagaucuaaaaaaaaaaaaaaaaaaaaaaaaaaaaaaaaaaaaaaaaaaaaaaaaaaaaaaaaaaaaaaaaugcaucccccccccccccccccccccccccccccccaaaggcucuuuucagagccaccagaauu

SEQ ID NO: 1452 - RNA, 1274 nt, Artificial Sequence
  mRNA Design i-2 (A64-N5-C30-hSL-N5) comprising derived and/or modified sequence from Pf(3D7)__XP_001351122.1__HsALB_Pf-CSP(98-374) (opt6)
aggagaggcgcugccuacggagguggcagccaucuccuucucggcaucaagcuuaccaugaaaugggucacauucauaucccuacuauuccuauucucaucagcauauucagcagauggaaacccagacccaaacgccaacccaaacguagacccaaacgcaaacccaaacguagacccaaacgcaaacccaaacguagacccaaacgcaaacccaaacgcaaacccaaacgcaaacccaaacgcaaacccaaacgcaaacccaaacgcaaacccaaacgcaaacccaaacgcaaacccaaacgcaaacccaaacgcaaacccaaacgcaaacccaaaugcaaauccaaacgcaaauccaaacgcaaacccaaacgccaacccaaacgcaaauccaaacgcaaacccaaacguagacccgaacgcaaacccgaacgcaaacccaaacgcaaacccaaaugcaaacccaaacgcaaacccaaacgccaacccaaacgcaaacccaaacgcaaacccaaaugcaaacccaaacgcaaacccaaacgccaacccaaacgcaaacccaaacgcaaacccaaacgcaaacccaaacgcaaacccaaaugcaaacccaaacgcaaacccaaacgcaaacccaaacaaaaacaaccaaggaaauggacaaggccacaacaugccaaacgacccaaacagaaacguagacgaaaacgcaaacgcaaacuccgcagucaaaaacaacaacaacgaagaaccauccgacaaacacauaaaagaauaccucaauaaaauacaaaacucacuaucaacagaaugguccccaugcucaguaacaugcggaaacggaauacaaguaagaauaaaaccaggauccgcaaacaaaccaaaagacgaacuagacuacgcaaacgauauagaaaaaaaaauaugcaaaauggaaaaaugcuaaggacuagugcaucacauuuaaaagcaucucagccuaccaugagaauaagagaaagaaaaugaagaucaauagcuuauucaucucuuuuucuuuuucguugguguaaagccaacacccugucuaaaaaacauaaauuucuuuaaucauuuugccucuuuucucugugcuucaauuaauaaaaaauggaaagaaccuagaucuaaaaaaaaaaaaaaaaaaaaaaaaaaaaaaaaaaaaaaaaaaaaaaaaaaaaaaaaaaaaaaaaugcaucccccccccccccccccccccccccccccccaaaggcucuuuucagagccaccagaauu

SEQ ID NO: 1453 - RNA, 1343 nt, Artificial Sequence
  mRNA Design i-2 (A64-N5-C30-hSL-N5) comprising derived and/or modified sequence from Pf(3D7)__XP_001351122.1__HsALB_Pf-CSP(98-397) (opt6)
aggagaggcgcugccuacggagguggcagccaucuccuucucggcaucaagcuuaccaugaaauggguaaccuucauaucauuacuauuccuuuucagcucggcauacucagcagacggcaacccagacccaaacgcaaacccaaacgucgacccaaaugcgaacccaaacguagacccaaacgcaaacccaaacguagauccaaacgcaaacccaaacgcaaacccaaacgcaaacccaaacgcaaacccaaacgccaacccaaaugcaaacccaaacgcaaaccccaacgcaaacccaaacgcaaacccaaacgcaaacccaaacgcaaaucccaacgcaaauccaaacgcaaacccaaaugcaaacccaaacgccaacccaaacgcaaacccaaacgcaaaccccaaugucgacccaaacgcaaacccaaacgcaaacccaaacgcaaacccaaacgcaaauccaaacgcaaaccccaacgcaaacccaaacgcaaacccaaacgcaaacccaaacgcaaacccaaacgcaaacccaaacgcaaacccaaacgcaaacccaaacgcaaacccaaacgcaaacccaaacgcaaauccaaacgcaaacccaaacgcaaacccaaacgcaaacccaaacaaaaacaaccaaggaaauggacaaggacacaacaugccaaaugaccccaacagaaacgucgacgaaaacgccaacgcaaacagcgcaguaaaaaacaacaacaaugaagaaccaucagacaaacacauaaaagaauaccuaaacaaaauucaaaacucacuaucaaccgaaugguccccaugcucaguaacaugcggaaacgguauacaaguacgaauaaaaccaggaucagcaaacaaaccaaaagacgaacuagacuacgcaaacgacauagaaaaaaaaauaugcaaaauggaaaaaugcucaucaguuuuuaacguagucaauagcucaaucggacucauaaugguacuaucauuucucuuccuaaauuaaggacuagugcaucacauuuaaaagcaucucagccuaccaugagaauaagagaaagaaaaugaagaucaauagcuuauucaucucuuuuucuuuuucguugguguaaagccaacacccugucuaaaaaacauaaauuucuuuaaucauuuugccucuuuucucugugcuucaauuaauaaaaaauggaaagaaccuagaucuaaaaaaaaaaaaaaaaaaaaaaaaaaaaaaaaaaaaaaaaaaaaaaaaaaaaaaaaaaaaaaaaugcaucccccccccccccccccccccccccccccccaaaggcucuuuucagagccaccagaauu

SEQ ID NO: 1454 - RNA, 1670 nt, Artificial Sequence
  mRNA Design i-2 (A64-N5-C30-hSL-N5) comprising derived and/or modified sequence from Pf(3D7)__XP_001351122.1__HsALB_Pf-CSP(199-377)_L(PVTN)_HBsAg (opt6)
aggagaggcgcugccuacggagguggcagccaucuccuucucggcaucaagcuuaccaugaaauggguaacauuuauauccuuacuauuucucuucuccucagcuuacucugacccaaacgcaaaucccaacgcaaacccaaaugcaaacccaaacgcaaauccaaacgcaaacccaaaugcuaaucccaacgcaaacccaaacgcaaaccccaaugccaacccaaacgcuaacccaaacgcaaacccaaacgccaacccaaaugcaaacccaaacgcaaacccaaacgcaaauccaaaugcaaacccaaacgcaaauccaaacgcaaacccaaacaaaaacaaccaaggaaacggacaaggccauaauaugccuaaugaccccaacagaaacguagacgaaaaugcuaacgccaacucagcaguaaaaaacaacaauaacgaagaaccaucagauaaacacauaaaagaauacuuaaacaaaauacaaaauucauuaucaacagaauggucaccaugcucagucaccugcggaaacgguauacaaguacgcauaaaaccaggcucagcaaauaaaccaaaagacgaacuagauuacgcuaacgacauagaaaaaaaaauaugcaaaauggaaaaaugcucaucaguaccaguaacaaauauggaaaacauaacaucaggauuccuaggcccacucuuaguacuacaagcaggauuuuuucuucuaacaagaaucuuaacuauaccccaaucacucgacucaugguggaccucacuaaauuuccucggaggaucuccaguaugccucggacaaaauucacaaucaccaacauccaaucacucacccaccuccugcccaccaaucugcccaggauacagauggaugugcuuacgaagauucauaauauuccuauucauacuacuucuaugcuuaauauuccuucucguccuacucgacuaucaaggaaugcucccuguaugcccacucauaccaggauccacaacaacuaacacaggacccuguaaaacaugcacaacacccgcccaaggaaauucaauguuccccucuugcugcugcacaaaaccaacagacggaaauugcacaugcauuccaauuccaucaucuugggcauuugcaaaauacuuaugggaaugggcaucaguccgauucucgugguuaucuuuacuaguaccauucguucaaugguuuguaggacuuucaccuacaguaugguuaucugcaauauggaugaugugguacuggggaccaucauuauacucaaucguaucaccauuuauaccacuacuacccauauuuuucugccuauggguauacauauaaggacuagugcaucacauuuaaaagcaucucagccuaccaugagaauaagagaaagaaaaugaagaucaauagcuuauucaucucuuuuucuuuuucguugguguaaagccaacacccugucuaaaaaacauaaauuucuuuaaucauuuugccucuuuucucugugcuucaauuaauaaaaaauggaaagaaccuagaucuaaaaaaaaaaaaaaaaaaaaaaaaaaaaaaaaaaaaaaaaaaaaaaaaaaaaaaaaaaaaaaaaugcaucccccccccccccccccccccccccccccccaaaggcucuuuucagagccaccagaauu

SEQ ID NO: 1455 - RNA, 1409 nt, Artificial Sequence
  mRNA Design i-2 (A64-N5-C30-hSL-N5) comprising derived and/or modified sequence from Pb(ANKA)__XP_022712148.1__Pb-CSP (opt6)
aggagaggcgcugccuacggagguggcagccaucuccuucucggcaucaagcuuaccaugaaaaaaugcacaaucuuaguaguagcaucacuccuacuagucaacucucuccuaccaggauacggccaaaacaaauccauacaagcccaacgcaaccuaaacgaauuaugcuauaacgaaggcaacgacaacaaauuauaccauguauuaaacucaaaaaacggaaaaauauacaacagaaacacaguaaacagacuacucgcagacgcacccgaaggaaaaaaaaaugaaaaaaaaaacgaaaaaauagaacgcaacaacaaacuuaaacaaccaccaccacccccaaaccccaacgacccaccacccccaaaccccaacgauccaccccccccaaaccccaacgacccaccacccccaaacccaaacgaccccccaccaccaaaugcaaacgacccaccaccaccaaacgcaaacgacccagcaccacccaacgccaacgaccccgcaccaccaaacgcaaacgauccagcucccccaaacgcaaacgauccagcaccaccaaacgccaacgacccaccaccaccaaacccaaacgacccagcaccaccaaacgcaaaugacccaccaccccccaacccaaacgaccccgccccaccacaagguaacaacaacccacaaccacaaccacgcccacaaccacaaccacaaccacaaccacaaccccaaccacaaccacaaccacaaccacgcccacaaccccaaccucaaccaggaggcaauaacaacaacaaaaacaauaauaacgaugacuccuacauaccaucugccgaaaaaauccucgaauucguaaaacaaauaagagacucaauaacagaagaauggucacaauguaacguaacaugcggaucaggcauacgaguaagaaaacgcaaaggaucaaacaaaaaagcagaagaccuaacacucgaagacauugacacagaaaucugcaaaauggacaaaugcucaucaauauucaacauagucucaaacucauuaggauucguaauccuacuaguacucguauucuucaacuaaggacuagugcaucacauuuaaaagcaucucagccuaccaugagaauaagagaaagaaaaugaagaucaauagcuuauucaucucuuuuucuuuuucguugguguaaagccaacacccugucuaaaaaacauaaauuucuuuaaucauuuugccucuuuucucugugcuucaauuaauaaaaaauggaaagaaccuagaucuaaaaaaaaaaaaaaaaaaaaaaaaaaaaaaaaaaaaaaaaaaaaaaaaaaaaaaaaaaaaaaaaugcaucccccccccccccccccccccccccccccccaaaggcucuuuucagagccaccagaauu

SEQ ID NO: 1456 - RNA, 1574 nt, Artificial Sequence
  mRNA Design i-2 (A64-N5-C30-hSL-N5) comprising derived and/or modified sequence from Pb(ANKA)__XP_022712148.1__Pb-CSP_L(G4SG4)_TM domain HA (opt6)
aggagaggcgcugccuacggagguggcagccaucuccuucucggcaucaagcuuaccaugaaaaaaugcaccauacuagucguagccucacuacuacuagucaauucauuauuaccaggauacggccaaaauaaauccauacaagcacaaagaaaucucaaugaauuaugcuacaacgaaggaaacgacaauaaacuauaccacguauuaaacucaaaaaauggaaaaauauacaaccgaaacaccguaaaccguuuauuagcagacgcaccagaaggaaaaaaaaacgaaaaaaaaaacgaaaaaauugaaagaaacaauaaacucaaacaaccaccucccccacccaacccaaacgacccacccccacccaacccaaacgacccaccacccccaaaccccaacgauccccccccacccaauccaaacgauccaccaccaccaaacgcaaacgacccaccaccaccaaacgcaaacgacccagcaccaccaaacgcaaacgaccccgcaccaccaaacgcaaacgauccagcaccacccaacgcaaacgacccagcacccccaaacgccaacgaccccccaccaccaaacccaaacgaccccgcaccuccaaacgcaaacgacccaccaccaccaaacccuaacgacccagcccccccacaaggaaacaacaauccucaaccacaaccacgcccucaaccacaaccccaaccucaaccacaaccacaaccacaaccccaaccacaaccacgaccacaaccucaaccucaaccaggaggcaacaacaacaacaaaaacaacaacaacgacgacucauacauaccaucagcagaaaaaauacuagaauucgucaaacaaauaagagacucuauaacugaagaauggucccaaugcaauguaacuugcggaucaggcaucagagucagaaaacgcaaaggauccaacaaaaaagccgaagaccuaacccucgaagauauagacacagaaaucugcaaaauggacaaaugcucaucaauuuucaauauagucucaaauucacuaggauucgucaucuuacuaguacuaguauucuuuaauggaggaggaggaucaggaggaggaggaaaacuagaaucaacccgaauauaccaaauacuagcaauauacucaaccguagcaucaucacucguacuagugguauccuuaggagcaauaagcuuuuggaugugcuccaacggcucucuacaaugucgaauaugcauaugaggacuagugcaucacauuuaaaagcaucucagccuaccaugagaauaagagaaagaaaaugaagaucaauagcuuauucaucucuuuuucuuuuucguugguguaaagccaacacccugucuaaaaaacauaaauuucuuuaaucauuuugccucuuuucucugugcuucaauuaauaaaaaauggaaagaaccuagaucuaaaaaaaaaaaaaaaaaaaaaaaaaaaaaaaaaaaaaaaaaaaaaaaaaaaaaaaaaaaaaaaaugcaucccccccccccccccccccccccccccccccaaaggcucuuuucagagccaccagaauu

SEQ ID NO: 1457 - RNA, 1394 nt, Artificial Sequence
  mRNA Design i-2 (A64-N5-C30-hSL-N5) comprising derived and/or modified sequence from Pb(ANKA)__XP_022712148.1__HsALB_Pb-CSP(24-340) (opt6)
aggagaggcgcugccuacggagguggcagccaucuccuucucggcaucaagcuuaccaugaaaugggucacauucauaucacuccuauuccuauucucaucagcauacucacaaaacaaaucaauccaagcccaacgaaaccuaaacgaacuaugcuacaacgaaggaaacgauaacaaacuauaccacguacuaaacucaaaaaacggaaaaauauacaaucgaaacacaguaaacagacucuuagcagacgcaccagaaggaaaaaaaaacgaaaaaaaaaacgaaaaaaucgaaagaaacaacaaacucaaacaaccaccaccaccaccaaacccaaacgauccaccaccccccaacccaaacgacccacccccacccaacccaaacgaccccccaccaccaaacccaaacgaccccccaccaccaaacgcaaacgauccaccaccccccaacgcaaacgauccagcaccacccaacgccaacgacccagcaccacccaaugcaaacgacccagcacccccaaacgcaaacgacccagcacccccaaacgccaacgacccaccaccaccaaacccaaaugacccagcaccaccaaacgccaacgauccaccacccccaaacccaaacgacccugcaccuccccaaggaaacaacaacccacaaccacaaccaagaccacaaccucaaccacaaccacaaccacaaccacaaccacaaccacaaccccaaccaagaccacaaccacaaccccaaccaggaggcaacaacaauaacaaaaauaacaacaacgacgacucauacaucccauccgcagaaaaaauauuagaauuuguaaaacaaauaagagacucaauaacagaagaauggucccaaugcaacguaacaugcgguucaggaauccguguacgaaaacgcaaaggcucaaacaaaaaagcagaagaccucacacucgaagacauugacacagaaauaugcaaaauggacaaaugcuccucaaucuucaacauugucucaaacucauuaggauucguaaucuuacucguacucguauucuucaacuaaggacuagugcaucacauuuaaaagcaucucagccuaccaugagaauaagagaaagaaaaugaagaucaauagcuuauucaucucuuuuucuuuuucguugguguaaagccaacacccugucuaaaaaacauaaauuucuuuaaucauuuugccucuuuucucugugcuucaauuaauaaaaaauggaaagaaccuagaucuaaaaaaaaaaaaaaaaaaaaaaaaaaaaaaaaaaaaaaaaaaaaaaaaaaaaaaaaaaaaaaaaugcaucccccccccccccccccccccccccccccccaaaggcucuuuucagagccaccagaauu

SEQ ID NO: 1458 - RNA, 1412 nt, Artificial Sequence
  mRNA Design i-2 (A64-N5-C30-hSL-N5) comprising derived and/or modified sequence from Pb(ANKA)__XP_022712148.1__HsIns-iso1_Pb-CSP(24-340) (opt6)
aggagaggcgcugccuacggagguggcagccaucuccuucucggcaucaagcuuaccauggcacuauggaugagacuacuaccacuauuagcacuacucgcacuauggggacccgacccagcagcagcacaaaacaaaucaauacaagcccaaagaaaccuaaaugaacuaugcuacaacgaaggaaacgacaacaaauuauaccacguacuaaacuccaaaaacggaaaaauuuacaacagaaacaccguaaaccgacuacuagcagacgcaccagaaggaaaaaaaaacgaaaaaaaaaacgaaaaaauagaaagaaacaauaaacuaaaacaaccaccacccccaccaaaccccaacgacccaccaccaccaaacccaaacgacccuccaccaccaaaccccaacgaccccccucccccaaacccaaacgaccccccaccaccaaacgcaaaugaccccccccccccaaaugcaaacgaccccgcaccaccaaacgcaaacgacccagccccaccaaacgccaacgauccugcaccaccaaaugcaaacgacccagcccccccaaacgcaaaugacccaccaccaccaaacccaaacgacccugcaccaccaaaugcuaacgaccccccaccaccaaauccaaacgaccccgcccccccacaaggaaacaauaacccacaaccccaacccagaccacaaccacaaccucaaccacaaccccaaccacaaccccaaccacaaccacaaccacgcccacaaccacaaccacaaccaggaggaaacaacaauaauaaaaacaacaauaacgacgacucauacauucccuccgcagaaaaaauacucgaauucguaaaacaaauaagagacucuauaacagaagaauggucccaaugcaacgucacaugcggauccggaauaagagucagaaaaagaaaaggaucaaacaaaaaagcagaagaccucacacuagaagacauagauacagaaauaugcaaaauggacaaauguucaucaauauuuaacauaguaucaaacucuuuaggauucgucauauuacucguacuaguauucuucaacuaaggacuagugcaucacauuuaaaagcaucucagccuaccaugagaauaagagaaagaaaaugaagaucaauagcuuauucaucucuuuuucuuuuucguugguguaaagccaacacccugucuaaaaaacauaaauuucuuuaaucauuuugccucuuuucucugugcuucaauuaauaaaaaauggaaagaaccuagaucuaaaaaaaaaaaaaaaaaaaaaaaaaaaaaaaaaaaaaaaaaaaaaaaaaaaaaaaaaaaaaaaaugcaucccccccccccccccccccccccccccccccaaaggcucuuuucagagccaccagaauu

SEQ ID NO: 1459 - RNA, 1391 nt, Artificial Sequence
  mRNA Design i-2 (A64-N5-C30-hSL-N5) comprising derived and/or modified sequence from Pb(ANKA)__XP_022712148.1__HsSPARC_Pb-CSP(24-340) (opt6)
aggagaggcgcugccuacggagguggcagccaucuccuucucggcaucaagcuuaccaugcgagcauggauauucuucuuacuuugucucgcaggacgcgcccuagcacaaaacaaaucaauacaagcacaaagaaaccucaacgaacuaugcuacaacgaaggaaacgacaacaaacuauaccacgucuuaaacucaaaaaacggaaaaauauacaauagaaacacaguaaaccgacuauuagcagacgcacccgaaggaaaaaaaaacgaaaaaaaaaaugaaaaaaucgaaagaaacaacaaacucaaacaaccacccccacccccaaacccuaacgacccaccaccaccaaaccccaacgauccaccaccaccaaacccaaacgacccaccaccccccaacccaaacgacccacccccacccaacgccaacgauccaccacccccaaaugcaaacgacccagccccaccaaacgcaaacgauccagcuccaccaaacgcaaacgaccccgccccaccaaacgccaacgacccagcuccaccaaacgcaaaugauccaccaccacccaacccaaacgacccugcacccccaaacgcaaacgacccaccaccaccaaacccaaacgacccagcacccccacaaggcaacaauaacccacaaccacaacccagaccacaaccccaaccgcaaccccaaccacaaccacaaccacaaccacaaccacaaccaagaccacaaccacaaccucaaccuggcggaaacaauaacaauaaaaacaacaacaacgacgacucauauauaccaucagccgaaaaaauucuagaauucguaaaacaaaucagagacucaauaacagaagaauggucacaaugcaacguaacauguggauccggaauaagaguaagaaaaagaaaaggaucaaacaaaaaagcagaagaucuaacacuagaagauauagacacagaaauaugcaaaauggacaaaugcucaucaauauucaacauagucuccaacucacucggauucguaauccuacucguacucguauucuucaacuaaggacuagugcaucacauuuaaaagcaucucagccuaccaugagaauaagagaaagaaaaugaagaucaauagcuuauucaucucuuuuucuuuuucguugguguaaagccaacacccugucuaaaaaacauaaauuucuuuaaucauuuugccucuuuucucugugcuucaauuaauaaaaaauggaaagaaccuagaucuaaaaaaaaaaaaaaaaaaaaaaaaaaaaaaaaaaaaaaaaaaaaaaaaaaaaaaaaaaaaaaaaugcaucccccccccccccccccccccccccccccccaaaggcucuuuucagagccaccagaauu

SEQ ID NO: 1460 - RNA, 1394 nt, Artificial Sequence
  mRNA Design i-2 (A64-N5-C30-hSL-N5) comprising derived and/or modified sequence from Pb(ANKA)__XP_022712148.1__IgE_Pb-CSP(24-340) (opt6)
aggagaggcgcugccuacggagguggcagccaucuccuucucggcaucaagcuuaccauggacuggacguggauauuauuuuuagucgccgcagccaccagaguacacucucaaaacaaaucaauacaagcccaaagaaaucuaaacgaauuaugcuacaacgaaggaaacgacaacaaacuauaccacguccucaacucuaaaaauggaaaaauauacaacagaaacaccguaaacagacuacuagcagacgcaccagaaggaaaaaaaaaugaaaaaaaaaacgaaaaaauagaaagaaauaacaaacucaaacaaccaccaccaccucccaacccaaacgacccaccacccccaaacccaaaugacccaccaccaccaaacccaaacgacccaccacccccaaacccaaaugacccaccaccaccaaacgcaaacgacccaccaccaccaaacgcaaacgacccagccccaccaaacgcaaacgacccagcaccaccaaacgcaaacgacccagcaccacccaaugccaaugacccagcaccaccaaacgcaaacgaccccccaccaccaaacccuaaugaccccgcaccaccaaacgcaaacgaccccccaccaccuaaccccaacgaccccgccccaccacaaggaaacaacaacccacaaccacaaccacguccacaaccacaaccacaaccccaaccacaaccccaaccacaaccacaaccacaaccccgaccacaaccacaaccacaacccggagguaacaacaacaauaaaaacaacaauaacgacgacuccuacauacccuccgcagaaaaaauacuagaauucguaaaacaaauaagagacucaauaacugaagaauggucacaauguaacguaacaugcgguucaggaauaagagucagaaaaagaaaaggaucaaacaaaaaagcagaagauuuaacacuagaagacauagacaccgaaauaugcaaaauggacaaaugcagcuccaucuucaacauaguaucaaacucacuaggauuuguaauacuacucguacuaguauucuucaauuaaggacuagugcaucacauuuaaaagcaucucagccuaccaugagaauaagagaaagaaaaugaagaucaauagcuuauucaucucuuuuucuuuuucguugguguaaagccaacacccugucuaaaaaacauaaauuucuuuaaucauuuugccucuuuucucugugcuucaauuaauaaaaaauggaaagaaccuagaucuaaaaaaaaaaaaaaaaaaaaaaaaaaaaaaaaaaaaaaaaaaaaaaaaaaaaaaaaaaaaaaaaugcaucccccccccccccccccccccccccccccccaaaggcucuuuucagagccaccagaauu

SEQ ID NO: 1461 - RNA, 1580 nt, Artificial Sequence
  mRNA Design i-2 (A64-N5-C30-hSL-N5) comprising derived and/or modified sequence from Pf(3D7)__XP_001351122.1__Pf-CSP (opt11)
aggagaggcgcugccuacggagguggcagccaucuccuucucggcaucaagcuuaccaugaugcgaaagcuugcgauccucagcgucuccucauuccuauucguagaagcacuauuccaagaauaccaaugcuacggcucauccucaaacacacgcguacucaacgaacucaacuacgacaacgcaggaacaaaccucuacaacgaacuagagaugaacuacuacggcaaacaagaaaacugguacucucucaaaaaaaacucacgaagccucggcgagaacgacgacggaaacaacgaagacaacgaaaaacuccgcaaaccaaaacacaaaaaacucaaacaacccgccgacggaaacccagacccaaacgcaaacccaaacguagacccaaacgccaaccccaacguagaccccaacgccaacccuaacgucgaccccaaugcaaaccccaacgcgaacccaaacgcaaaccccaacgcaaaccccaacgcaaacccaaacgccaaccccaacgcaaacccaaacgcaaacccuaacgccaacccaaacgccaacccaaacgccaacccaaacgcaaacccgaacgccaaccccaacgccaacccaaacgcaaacccaaacgcaaaccccaacgccaaccccaacguagaccccaacgcaaaccccaacgcaaacccaaacgccaaccccaacgccaaccccaacgccaaccccaacgccaaccccaaugccaacccaaacgcgaaccccaacgcaaacccgaacgcaaacccaaacgcgaacccaaacgcgaacccaaacgccaaccccaacgccaaccccaacgcaaacccaaacgcgaacccaaacgcaaaccccaacgccaacccaaacaaaaacaaccaaggaaacggacaaggccacaacaugccaaacgaccccaaccgcaacguagacgaaaacgccaacgccaacuccgcugucaagaacaacaacaacgaagaaccauccgacaaacacauaaaagaauaccuaaacaaaauccaaaacucccucucaaccgaauggucccccugcuccgucacaugcggaaacggcauccaaguccgaaucaaaccaggcuccgccaacaaacccaaagacgaacuggacuacgccaacgacaucgaaaaaaaaaucugcaaaauggaaaaaugcucauccgucuucaacguggucaacuccuccaucggacuaauaaugguccucuccuuccuauuccuaaacuaaggacuagugcaucacauuuaaaagcaucucagccuaccaugagaauaagagaaagaaaaugaagaucaauagcuuauucaucucuuuuucuuuuucguugguguaaagccaacacccugucuaaaaaacauaaauuucuuuaaucauuuugccucuuuucucugugcuucaauuaauaaaaaauggaaagaaccuagaucuaaaaaaaaaaaaaaaaaaaaaaaaaaaaaaaaaaaaaaaaaaaaaaaaaaaaaaaaaaaaaaaaugcaucccccccccccccccccccccccccccccccaaaggcucuuuucagagccaccagaauu

SEQ ID NO: 1462 - RNA, 1511 nt, Artificial Sequence
  mRNA Design i-2 (A64-N5-C30-hSL-N5) comprising derived and/or modified sequence from Pf(3D7)__XP_001351122.1__Pf-CSP(1-374) (opt11)
aggagaggcgcugccuacggagguggcagccaucuccuucucggcaucaagcuuaccaugaugcgcaaacucgcaauccucuccgucucaucguuccuauucguagaagcacucuuccaagaauaccaaugcuacggcucaagcuccaacacaagaguacucaacgaacucaacuacgacaaugccggaacaaaccuauacaacgagcuagaaaugaacuacuacggcaaacaagaaaacugguacucgcuaaaaaaaaacagcagaagccuaggugaaaacgacgacggaaacaacgaagacaacgaaaaacugcgcaaaccaaaacacaaaaaacuaaaacaacccgcagacggcaacccagacccaaacgcaaacccaaacguagaccccaacgccaacccaaacguagacccaaacgccaacccaaacguagacccaaacgcaaacccgaacgcaaacccaaacgcaaacccaaacgcaaacccaaacgcaaacccaaacgccaaccccaacgcaaauccaaacgcaaaccccaacgcaaaccccaacgccaacccaaacgcaaaccccaacgcgaacccaaacgccaaccccaacgccaacccaaacgcaaacccaaacgcaaacccaaacgccaaccccaacgucgacccaaacgccaacccaaacgcaaaccccaacgccaaccccaacgcaaacccaaacgccaacccgaacgcaaacccgaacgcaaacccaaacgcaaaccccaacgcaaaccccaacgcaaacccaaacgcaaaccccaacgccaaccccaacgccaaccccaacgcaaacccaaacgcaaacccgaacgcaaaccccaacgcaaaccccaacgccaaucccaacaaaaacaaccaaggcaacggacaaggacacaacaugccaaacgaccccaaccgcaacgucgacgaaaacgccaacgccaacuccgcggucaaaaacaacaacaacgaagagcccucagacaaacacauaaaagaauaccuaaacaaaauccaaaacucccucucgacagaauggucccccugcagcgucaccugcggaaacggcauacaaguacgaauaaaacccggcucagccaacaaaccaaaagacgaacuagacuacgccaacgacauagaaaaaaaaauaugcaaaauggaaaaaugcugaggacuagugcaucacauuuaaaagcaucucagccuaccaugagaauaagagaaagaaaaugaagaucaauagcuuauucaucucuuuuucuuuuucguugguguaaagccaacacccugucuaaaaaacauaaauuucuuuaaucauuuugccucuuuucucugugcuucaauuaauaaaaaauggaaagaaccuagaucuaaaaaaaaaaaaaaaaaaaaaaaaaaaaaaaaaaaaaaaaaaaaaaaaaaaaaaaaaaaaaaaaugcaucccccccccccccccccccccccccccccccaaaggcucuuuucagagccaccagaauu

SEQ ID NO: 1463 - RNA, 1364 nt, Artificial Sequence
  mRNA Design i-2 (A64-N5-C30-hSL-N5) comprising derived and/or modified sequence from Pf(3D7)__XP_001351122.1__Pf-CSP(1-325) (opt11)
aggagaggcgcugccuacggagguggcagccaucuccuucucggcaucaagcuuaccaugaugcgcaaacucgcaauccuaucaguaagcucauuccuguucguagaagcacuauuccaagaauaccaaugcuacggcucauccucaaacacaagaguacuaaacgaacuaaacuacgacaacgccggaaccaaccuauacaacgaacucgaaaugaacuacuacggcaaacaagaaaacugguacucacuaaagaaaaacagcagaagccucggcgaaaacgacgacggcaacaacgaagacaacgagaaacugagaaaaccaaaacacaagaaacuaaaacaacccgcggacgggaacccagacccaaaugcaaacccaaacgucgacccaaacgcaaacccaaacguagacccaaacgcaaaccccaacguagaccccaacgcaaacccaaacgcaaacccaaacgcaaacccaaacgcaaacccaaacgcaaaccccaacgcaaacccaaacgcaaacccaaacgcaaaccccaacgccaacccaaacgccaaccccaacgcaaacccaaacgcaaacccaaacgcaaaccccaacgccaacccgaacgcaaacccaaacgcaaacccaaacgcaaaccccaacguagacccaaacgcaaacccaaacgccaaccccaacgcaaacccaaacgcaaacccgaacgcaaaccccaacgcaaaccccaacgcaaacccaaacgcaaaccccaacgcaaauccaaacgcaaacccaaacgcaaacccaaacgccaacccaaacgcaaaucccaacgcaaacccaaacgcaaaccccaacgcaaacccaaacgcaaacccaaacgcaaacccaaacaaaaacaaccaaggaaacggccaaggacacaacaugccaaacgacccaaaccgaaacguagacgaaaacgccaacgccaacagcgcagucaaaaacaacaauaaugaagaacccuccgacaaacacauaaaagaauaccuaaacaaaauccaaaacugaggacuagugcaucacauuuaaaagcaucucagccuaccaugagaauaagagaaagaaaaugaagaucaauagcuuauucaucucuuuuucuuuuucguugguguaaagccaacacccugucuaaaaaacauaaauuucuuuaaucauuuugccucuuuucucugugcuucaauuaauaaaaaauggaaagaaccuagaucuaaaaaaaaaaaaaaaaaaaaaaaaaaaaaaaaaaaaaaaaaaaaaaaaaaaaaaaaaaaaaaaaugcaucccccccccccccccccccccccccccccccaaaggcucuuuucagagccaccagaauu

SEQ ID NO: 1464 - RNA, 1580 nt, Artificial Sequence
  mRNA Design i-2 (A64-N5-C30-hSL-N5) comprising derived and/or modified sequence from Pf(3D7)__XP_001351122.1__HsALB_Pf-CSP(19-397) (opt11)
aggagaggcgcugccuacggagguggcagccaucuccuucucggcaucaagcuuaccaugaaaugggucaccuucauaucccuccuauuccucuucucaucagccuacucccucuuccaggaauaccaaugcuacggaucguccucaaacacuagaguacucaaugaauuaaacuacgacaacgccggcaccaaccucuacaacgaacucgaaaugaacuacuacggaaaacaagaaaacugguacucacucaaaaaaaacucucgaucccucggcgaaaacgacgacggcaacaacgaagacaacgagaaacuacgcaaaccaaaacacaaaaaauuaaaacaacccgccgacggcaaccccgaccccaacgccaaccccaacguagaccccaacgcgaaccccaacgucgacccaaacgccaaccccaacguggaccccaacgccaacccaaacgccaaccccaacgccaacccaaacgcaaaccccaacgccaacccaaacgccaaccccaacgcaaacccaaacgcgaacccaaacgcaaacccaaacgccaacccaaacgcaaacccaaacgcgaacccaaacgccaacccaaacgccaaccccaacgcaaacccaaacgccaacccaaacgccaacccaaacguagacccaaacgcgaaccccaacgcuaacccaaacgcaaacccaaacgccaacccaaacgccaacccuaacgcaaacccaaacgccaaccccaacgccaaccccaacgccaaccccaacgcaaacccaaacgccaacccaaacgccaaccccaacgccaacccaaacgcaaacccaaacgcaaacccaaacgcaaaccccaacgccaacccaaacgccaacccaaacaaaaauaaccaaggcaaugggcaaggccacaacaugccaaacgaccccaaccgcaaugucgacgaaaacgccaacgccaacucugcaguaaaaaacaauaacaacgaagaacccucagacaaacacaucaaagaauaccucaacaagauccaaaauucccucuccacagaauggucccccugcagcguaaccugcggcaacggcauccaaguccgcaucaaacccggcuccgccaacaaaccgaaagacgaacuagacuacgccaacgacauagaaaaaaaaaucugcaaaauggaaaaaugcagcuccgucuucaacgucgucaacagcuccaucggccucaucaugguccucuccuuccuguuccucaacuaaggacuagugcaucacauuuaaaagcaucucagccuaccaugagaauaagagaaagaaaaugaagaucaauagcuuauucaucucuuuuucuuuuucguugguguaaagccaacacccugucuaaaaaacauaaauuucuuuaaucauuuugccucuuuucucugugcuucaauuaauaaaaaauggaaagaaccuagaucuaaaaaaaaaaaaaaaaaaaaaaaaaaaaaaaaaaaaaaaaaaaaaaaaaaaaaaaaaaaaaaaaugcaucccccccccccccccccccccccccccccccaaaggcucuuuucagagccaccagaauu

SEQ ID NO: 1465 - RNA, 1598 nt, Artificial Sequence
  mRNA Design i-2 (A64-N5-C30-hSL-N5) comprising derived and/or modified sequence from Pf(3D7)__XP_001351122.1__HsIns-iso1_Pf-CSP(19-397) (opt11)
aggagaggcgcugccuacggagguggcagccaucuccuucucggcaucaagcuuaccauggcacucuggaugagacuccucccccuccucgcacuccucgcccuauggggcccagacccagcggcagcccucuuccaagaauaccaaugcuacggcucauccuccaacacccgaguccucaaugaacuaaacuacgacaacgccggcaccaaccuauacaacgaacuagaaaugaacuacuacggcaaacaagaaaacugguacucccucaaaaaaaauucacgcucccuaggugagaacgacgacggaaacaacgaagacaacgaaaaacuccgaaaacccaaacacaaaaaacuaaaacaaccagcagacggcaaccccgaccccaacgcaaaccccaacguagacccaaacgcgaaccccaacgucgauccaaacgccaacccaaacguugaccccaacgcgaaccccaacgcaaacccaaacgcaaacccuaacgcgaaccccaacgcaaaccccaacgccaaccccaacgccaaccccaacgccaacccaaacgcaaaccccaacgccaaccccaacgcaaacccaaacgcaaacccgaacgcaaaccccaacgccaacccaaacgcaaacccaaacgccaacccaaacgcaaaccccaacguagacccaaacgccaaucccaacgcgaaccccaacgcaaacccaaacgcgaacccaaacgccaacccaaacgcaaacccgaacgccaacccaaacgccaaccccaacgcaaaccccaacgcaaacccaaacgccaacccaaacgcaaacccaaacgcaaaccccaacgccaaccccaacgcaaacccaaaugccaaccccaacgccaaccccaacgcaaacccaaacaaaaacaaccaaggaaacggccaaggccacaacaugccgaacgaccccaaccgaaacgucgacgaaaacgcaaacgccaacucagcggucaaaaacaacaacaacgaagaacccucagacaaacacaucaaagaauaccuaaacaagauccagaacucucucucaacagaauggucccccugcuccguaacaugcggcaacggcauccaaguacgaaucaaaccgggaucagccaauaaacccaaagacgaacucgacuacgccaacgacaucgaaaaaaaaauaugcaaaauggaaaaaugcagcucagucuucaacguagucaacagcuccauaggccucaucaugguacucuccuuccuguuccuaaacuaaggacuagugcaucacauuuaaaagcaucucagccuaccaugagaauaagagaaagaaaaugaagaucaauagcuuauucaucucuuuuucuuuuucguugguguaaagccaacacccugucuaaaaaacauaaauuucuuuaaucauuuugccucuuuucucugugcuucaauuaauaaaaaauggaaagaaccuagaucuaaaaaaaaaaaaaaaaaaaaaaaaaaaaaaaaaaaaaaaaaaaaaaaaaaaaaaaaaaaaaaaaugcaucccccccccccccccccccccccccccccccaaaggcucuuuucagagccaccagaauu

SEQ ID NO: 1466 - RNA, 1577 nt, Artificial Sequence
  mRNA Design i-2 (A64-N5-C30-hSL-N5) comprising derived and/or modified sequence from Pf(3D7)__XP_001351122.1__HsSPARC_Pf-CSP(19-397) (opt11)
aggagaggcgcugccuacggagguggcagccaucuccuucucggcaucaagcuuaccaugcgcgccuggauauucuuccuccuaugccuagcaggacgcgcccucgcacucuuccaagaauaccaaugcuacggcucauccucaaacacccgcguacuuaacgaacuaaacuacgacaacgccggaaccaaccuauacaacgaacucgaaaugaacuacuacgguaaacaagaaaacugguacucccucaaaaaaaacagccgaagccuaggagaaaacgacgacggaaacaacgaagacaacgaaaaacugcgcaaacccaaacacaaaaaacucaaacaacccgcagacgggaacccagacccaaacgcaaacccaaacguggacccaaacgccaacccuaacguagaccccaacgcaaaccccaacgucgacccuaaugcaaacccaaacgccaaccccaacgcgaacccaaacgcaaaccccaacgcuaacccgaacgccaaccccaacgccaacccgaacgcaaacccaaacgcaaacccaaacgcgaacccaaacgcaaacccaaacgccaaccccaacgcgaacccaaacgccaauccaaacgccaacccaaacgcaaacccaaacgccaaccccaacguagacccaaacgccaacccaaacgcgaacccaaacgcaaaccccaacgcaaacccaaacgcaaacccaaacgccaacccuaacgcaaacccaaacgccaaccccaacgccaacccaaacgcaaacccaaacgccaacccaaacgccaaccccaacgcaaacccgaacgcaaaccccaacgcaaacccaaacgcaaacccaaacgcgaacccgaacgccaacccaaauaagaacaaccaaggaaacggacaaggccacaacaugccaaacgaccccaaccgcaacgucgacgaaaacgcaaaugccaacuccgcagucaaaaacaacaauaacgaagaacccucggacaaacacaucaaagaauaccucaacaagauccaaaacucacucuccaccgaauggucacccugcagcguaacuugcggcaacggcauccaaguccgcauaaaaccaggcuccgcaaacaaacccaaagacgaacucgacuaugccaacgacaucgaaaaaaaaauaugcaaaauggaaaaaugcagcucagucuucaacguagucaacagcucuaucggacuaauaaugguacucuccuuccuauucuuaaacuaaggacuagugcaucacauuuaaaagcaucucagccuaccaugagaauaagagaaagaaaaugaagaucaauagcuuauucaucucuuuuucuuuuucguugguguaaagccaacacccugucuaaaaaacauaaauuucuuuaaucauuuugccucuuuucucugugcuucaauuaauaaaaaauggaaagaaccuagaucuaaaaaaaaaaaaaaaaaaaaaaaaaaaaaaaaaaaaaaaaaaaaaaaaaaaaaaaaaaaaaaaaugcaucccccccccccccccccccccccccccccccaaaggcucuuuucagagccaccagaauu

SEQ ID NO: 1467 - RNA, 1580 nt, Artificial Sequence
  mRNA Design i-2 (A64-N5-C30-hSL-N5) comprising derived and/or modified sequence from Pf(3D7)__XP_001351122.1__IgE_Pf-CSP(19-397) (opt11)
aggagaggcgcugccuacggagguggcagccaucuccuucucggcaucaagcuuaccauggacuggacauggauccucuuccucgucgccgcggccacacgcguacacucacucuuccaagaauaucaaugcuacggcucaagcucgaacacgcgcguacucaacgaacuaaacuacgacaacgccggcaccaaccuauacaacgaacucgaaaugaacuacuacggcaaacaagaaaacugguacucacuuaagaaaaauucacgaucccucggagaaaacgacgaugggaacaacgaagacaacgaaaaacuacgcaaacccaaacacaagaaacuuaaacaacccgcagacggcaacccagacccaaacgcaaaccccaacguagaccccaacgcaaacccaaacguagacccaaacgccaacccaaacguagacccaaacgcgaacccaaacgccaacccaaacgccaaccccaacgcaaacccaaacgcaaauccaaacgcaaacccaaaugcaaacccgaacgccaauccaaacgcaaaccccaacgcaaacccaaacgcaaaccccaaugccaacccaaacgcaaaccccaacgcaaaccccaacgcaaaccccaacgcaaacccaaacgcgaacccaaacguagaccccaacgccaaccccaacgccaacccaaacgcaaacccaaacgccaacccaaacgccaaccccaacgcaaaccccaacgcaaacccgaacgcaaacccaaacgcaaacccaaacgcaaacccgaacgcaaacccuaacgcgaaccccaacgccaaccccaacgcaaacccaaacgcaaacccaaacgccaacccaaacgcaaacccaaacgcaaacccaaacaaaaacaaccaaggaaacgggcaaggacauaacaugccgaacgaccccaaccgcaacguagacgaaaacgccaacgccaacagcgcagucaaaaacaacaacaacgaagaacccuccgacaaacacaucaaagaauaccuaaacaaaauccagaacucacuauccaccgaauggucccccugcagcgugaccugcggcaacggcauacaaguccgcauaaaaccaggcuccgccaacaaacccaaagacgaacuagacuacgccaacgacauagaaaagaaaauaugcaaaauggaaaaaugcagcucagucuucaauguagucaacuccuccaucggacucauaaugguccuaucauuccucuuccuaaacuaaggacuagugcaucacauuuaaaagcaucucagccuaccaugagaauaagagaaagaaaaugaagaucaauagcuuauucaucucuuuuucuuuuucguugguguaaagccaacacccugucuaaaaaacauaaauuucuuuaaucauuuugccucuuuucucugugcuucaauuaauaaaaaauggaaagaaccuagaucuaaaaaaaaaaaaaaaaaaaaaaaaaaaaaaaaaaaaaaaaaaaaaaaaaaaaaaaaaaaaaaaaugcaucccccccccccccccccccccccccccccccaaaggcucuuuucagagccaccagaauu

SEQ ID NO: 1468 - RNA, 1745 nt, Artificial Sequence
  mRNA Design i-2 (A64-N5-C30-hSL-N5) comprising derived and/or modified sequence from Pf(3D7)__XP_001351122.1__Pf-CSP_L(G4SG4)_TM domain HA (opt11)
aggagaggcgcugccuacggagguggcagccaucuccuucucggcaucaagcuuaccaugaugcgcaaacucgccauccucagcgucagcucguuccucuucgucgaagcacuauuccaagaauaccaguguuacggcucauccucaaacacacgcgugcucaacgaacuaaacuacgacaacgccggcaccaaccucuacaacgaacuagaaaugaacuauuacggcaagcaagaaaacugguacucacucaaaaaaaacagccgaagccuaggcgagaacgacgacgggaacaacgaagacaacgaaaaacuacgcaaacccaagcacaaaaaacugaaacaaccagccgacggaaauccagaccccaacgcaaacccgaacguagaccccaacgcgaaccccaacguggacccgaacgcaaacccgaacguagacccaaacgcaaacccaaacgcgaacccaaacgcaaacccaaacgcuaacccaaacgcaaaccccaacgccaaccccaacgcgaacccaaacgcaaacccaaacgcaaacccaaacgcaaacccgaacgcaaacccaaacgccaacccaaacgcgaacccaaacgccaacccaaacgcaaacccaaacgcaaacccaaacgcaaacccaaacguagacccgaacgccaacccgaaugcaaacccaaacgcaaacccgaacgcaaacccaaacgcgaacccgaacgccaacccaaacgcaaacccgaacgcaaaccccaacgccaacccaaacgcaaaccccaacgcaaaccccaacgcaaacccgaacgcaaacccaaacgcaaacccaaacgccaaccccaacgccaaccccaacgcaaacccgaacgccaacccaaacaaaaacaaccaaggcaacgggcaaggacacaacaugccaaacgaccccaaccgaaacgucgacgaaaacgccaacgccaacuccgcagucaaaaacaacaacaacgaagaacccucagacaaacacauaaaagaauaccucaacaaaauccaaaacucacucucaaccgaguggucacccugcagugugaccuguggcaacggaauacaaguacgcauaaaacccggaucagccaacaaaccgaaagacgaacuagacuacgccaacgacauagaaaaaaaaauaugcaaaauggagaaaugcagcucugucuucaacgucgucaacagcucaaucggacucauaaugguccucuccuuccuauuccucaacggcggagggggcucaggcggcggaggaaaauuagaauccaccagaaucuaucagauucucgccauauacagcacagucgcaagcucgcuuguccuugucguaucacuaggcgcaaucucauucuggaugugcuccaacggaagccugcaaugccgcauuugcauauaaggacuagugcaucacauuuaaaagcaucucagccuaccaugagaauaagagaaagaaaaugaagaucaauagcuuauucaucucuuuuucuuuuucguugguguaaagccaacacccugucuaaaaaacauaaauuucuuuaaucauuuugccucuuuucucugugcuucaauuaauaaaaaauggaaagaaccuagaucuaaaaaaaaaaaaaaaaaaaaaaaaaaaaaaaaaaaaaaaaaaaaaaaaaaaaaaaaaaaaaaaaugcaucccccccccccccccccccccccccccccccaaaggcucuuuucagagccaccagaauu

SEQ ID NO: 1469 - RNA, 1619 nt, Artificial Sequence
  mRNA Design i-2 (A64-N5-C30-hSL-N5) comprising derived and/or modified sequence from Pf(3D7)__XP_001351122.1__Pf-CSP(199-377)_L(PVTN)_HBsAg (opt11)
aggagaggcgcugccuacggagguggcagccaucuccuucucggcaucaagcuuaccauggaccccaacgccaaccccaacgccaaccccaacgccaaucccaacgcuaaccccaacgccaaccccaacgcaaaccccaacgccaacccaaacgccaaccccaacgcaaaccccaacgccaaucccaaugccaaccccaacgccaaccccaacgcgaaccccaacgccaaccccaacgcaaacccaaacgccaaccccaacgccaaccccaacgccaaccccaacaaaaacaaccaaggcaacggccaaggccacaacaugcccaacgaccccaaccgcaacguagacgagaacgccaacgccaacagcgcugucaaaaacaacaacaacgaggaacccuccgacaaacacaucaaagaauaccuuaacaaaauccaaaacucucucuccaccgaguggucccccugcucagucacaugcggcaacggcauacaaguucguaucaaacccggcucagcaaacaaacccaaagacgaacucgacuacgcaaacgacauagaaaagaaaaucugcaaaauggaaaaauguucauccguccccgucaccaacauggaaaacaucacuuccggauuccucgguccccuacucguacuccaagccggcuucuuccuccucacccgcauccucaccaucccccaaucacuugacuccugguggaccucccucaacuuccucggcggcucccccgucugccuaggccaaaacagccaaucccccacuagcaaccacucccccacauccugcccacccaucugccccggauaucgauggaugugccuucgccgauucauaaucuuccucuucauccuccuacucugccucaucuuccuccucguccuucuagauuaccaaggcaugcuccccgucugcccccuuauccccggcuccaccaccacaaacaccggccccugcaaaaccugcacaacccccgcccaaggcaauagcauguuccccuccugcugcugcacuaaaccaacagacggcaacuguaccugcaucccaaucccaucaucaugggccuucgccaaauaccucugggaaugggcaucuguacgauucuccuggcucucccuucucguacccuucguccagugguucgucggccucucccccaccguauggcuauccgccaucuggaugaugugguacuggggccccucccuauacuccaucgucuccccauucauaccacuccuacccaucuucuucugccucugggucuacaucugaggacuagugcaucacauuuaaaagcaucucagccuaccaugagaauaagagaaagaaaaugaagaucaauagcuuauucaucucuuuuucuuuuucguugguguaaagccaacacccugucuaaaaaacauaaauuucuuuaaucauuuugccucuuuucucugugcuucaauuaauaaaaaauggaaagaaccuagaucuaaaaaaaaaaaaaaaaaaaaaaaaaaaaaaaaaaaaaaaaaaaaaaaaaaaaaaaaaaaaaaaaugcaucccccccccccccccccccccccccccccccaaaggcucuuuucagagccaccagaauu

SEQ ID NO: 1470 - RNA, 1661 nt, Artificial Sequence
  mRNA Design i-2 (A64-N5-C30-hSL-N5) comprising derived and/or modified sequence from Pf(3D7)__XP_001351122.1__Pf-CSP(199-387)_L(PVTN)_HBsAg (opt11)
aggagaggcgcugccuacggagguggcagccaucuccuucucggcaucaagcuuaccaugauggcccccgaccccaacgcaaauccaaacgcaaaccccaacgccaacccuaacgcaaaccccaacgccaacccaaacgccaaucccaacgccaacccuaacgccaaccccaacgcaaaccccaacgccaaccccaacgccaacccuaacgcaaaccccaacgccaacccaaacgcaaaccccaacgccaaccccaacgccaaccccaacgcaaacccaaacgcaaaccccaacaaaaacaaccaaggaaacggacaaggccacaacaugccuaacgaccccaaucgcaacgucgacgaaaacgcaaacgccaacuccgccgucaaaaacaacaacaacgaagaacccucugacaaacacaucaaagaauaccucaacaagauccaaaacucccuauccaccgaauggucccccugcuccgucacuugcgguaauggcauccaaguccgcauaaaaccaggauccgcaaacaaacccaaagacgaacuagacuacgccaacgacauagaaaagaaaaucugcaaaauggaaaaaugcuccucagucuucaaugucguaaacuccuccauuggccuaggccccgucaccaacauggaaaacauuaccuccggauuccucgguccucuccucguccuccaagccggauucuuucuccucacacgaauccucacuaucccucaaucccuggacucaugguggaccucccucaacuuccugggcggcucccccgucugccucggccaaaacagccaauccccaaccuccaaucacucccccacaagcugcccucccauaugccccggcuaccgcuggaugugccuccgucgcuucaucauauuccucuucauacuucuccucugccucaucuuccuccuuguccugcuagacuaccaaggcaugcuccccgucugcccacucauccccgguuccaccacaacaaacaccggccccugcaaaacaugcaccacacccgcccaagguaacuccauguuccccuccugcugcugcaccaaaccaaccgacggcaacugcacuugcauucccauccccucauccugggccuucgccaaauaccucugggaaugggcauccguccguuucucauggcuaucucuccuaguaccauucguacaaugguucguuggccucucccccaccguauggcucuccgccauauggaugaugugguacuggggcccuucacuuuacuccaucgucucacccuucaucccacuccuacccaucuucuucugccuuuggguauacaucuaaggacuagugcaucacauuuaaaagcaucucagccuaccaugagaauaagagaaagaaaaugaagaucaauagcuuauucaucucuuuuucuuuuucguugguguaaagccaacacccugucuaaaaaacauaaauuucuuuaaucauuuugccucuuuucucugugcuucaauuaauaaaaaauggaaagaaccuagaucuaaaaaaaaaaaaaaaaaaaaaaaaaaaaaaaaaaaaaaaaaaaaaaaaaaaaaaaaaaaaaaaaugcaucccccccccccccccccccccccccccccccaaaggcucuuuucagagccaccagaauu

SEQ ID NO: 1471 - RNA, 845 nt, Artificial Sequence
  mRNA Design i-2 (A64-N5-C30-hSL-N5) comprising derived and/or modified sequence from Pf(3D7)__XP_001351122.1__HsALB_Pf-CSP(19-152) (opt11)
aggagaggcgcugccuacggagguggcagccaucuccuucucggcaucaagcuuaccaugaaaugggucaccuucaucucccuccucuuccucuucuccagcgcauacucccucuuccaagaauaccaaugcuacggcuccuccuccaacacccgcguccucaacgaacucaacuacgacaacgccggcaccaaccucuacaacgaacucgaaaugaacuacuacggcaaacaagaaaacugguacucccucaaaaaaaacucccgcucccuaggcgaaaacgacgacggaaacaacgaagacaacgaaaaacuccgcaaacccaaacacaaaaaacucaaacaacccgccgacggaaaccccgaccccaacgccaacccaaacgucgaccccaacgccaaccccaacgucgaccccaacgccaaccccaacgucgaccccaacgccaaccccaacgcaaacccaaacgcaaacccaaacgccaaccccaacgccaaccccaacgccaaccccuaaggacuagugcaucacauuuaaaagcaucucagccuaccaugagaauaagagaaagaaaaugaagaucaauagcuuauucaucucuuuuucuuuuucguugguguaaagccaacacccugucuaaaaaacauaaauuucuuuaaucauuuugccucuuuucucugugcuucaauuaauaaaaaauggaaagaaccuagaucuaaaaaaaaaaaaaaaaaaaaaaaaaaaaaaaaaaaaaaaaaaaaaaaaaaaaaaaaaaaaaaaaugcaucccccccccccccccccccccccccccccccaaaggcucuuuucagagccaccagaauu

SEQ ID NO: 1472 - RNA, 965 nt, Artificial Sequence
  mRNA Design i-2 (A64-N5-C30-hSL-N5) comprising derived and/or modified sequence from Pf(3D7)__XP_001351122.1__HsALB_Pf-CSP(19-192) (opt11)
aggagaggcgcugccuacggagguggcagccaucuccuucucggcaucaagcuuaccaugaaauggguaaccuucauaucccuccucuuccuauucucgagcgccuacucccucuuccaagaauaccaaugcuacggcucauccuccaacacccgcguccucaacgaacucaacuacgacaacgccggcaccaaccucuacaacgaacuagagaugaacuacuacggcaaacaagaaaacugguacucacucaaaaaaaacucccgaucccuaggagaaaacgacgacggcaacaacgaagacaacgaaaaacuacgaaaacccaaacacaaaaaacucaaacaacccgccgacggcaaccccgaccccaacgccaaccccaacgucgaccccaacgccaacccaaacguagaccccaacgccaaccccaacgucgacccaaacgccaaccccaacgccaaccccaacgccaacccaaacgcaaacccaaacgcaaacccaaacgccaacccaaacgccaaccccaacgccaaccccaacgcaaaccccaacgcaaaccccaacgccaacccaaacgcaaaccccaacgccaacccaaacgccaacccaaacgccaaccccaacgcaaaccccuaaggacuagugcaucacauuuaaaagcaucucagccuaccaugagaauaagagaaagaaaaugaagaucaauagcuuauucaucucuuuuucuuuuucguugguguaaagccaacacccugucuaaaaaacauaaauuucuuuaaucauuuugccucuuuucucugugcuucaauuaauaaaaaauggaaagaaccuagaucuaaaaaaaaaaaaaaaaaaaaaaaaaaaaaaaaaaaaaaaaaaaaaaaaaaaaaaaaaaaaaaaaugcaucccccccccccccccccccccccccccccccaaaggcucuuuucagagccaccagaauu

SEQ ID NO: 1473 - RNA, 1205 nt, Artificial Sequence
  mRNA Design i-2 (A64-N5-C30-hSL-N5) comprising derived and/or modified sequence from Pf(3D7)__XP_001351122.1__HsALB_Pf-CSP(19-272) (opt11)
aggagaggcgcugccuacggagguggcagccaucuccuucucggcaucaagcuuaccaugaaauggguaaccuucaucucccuccucuuccuauucucaucagcauacucacucuuccaagaauaccaaugcuacggcucgagcucaaacacacgcguacucaacgaacugaacuacgacaacgccggaaccaaccucuacaaugaacucgaaaugaacuacuacggcaaacaagagaacugguacucacucaaaaaaaacagcagaagccucggagaaaacgacgacggaaacaacgaagacaacgaaaaacuccgcaaacccaagcacaaaaaacuaaaacaacccgcagacggaaaccccgaccccaacgcaaacccgaacgucgacccaaacgccaacccaaacguagaccccaacgcgaacccaaacguagacccaaacgccaacccaaacgcaaaccccaacgccaaccccaacgcaaacccaaacgccaacccaaacgcaaaccccaaugcaaaccccaacgcaaacccaaacgccaaccccaacgcaaacccaaacgcaaacccaaacgcaaacccaaacgcaaacccaaacgcgaacccaaacgcaaacccaaacgcaaacccgaacgcaaacccaaacguagacccaaacgcaaaccccaacgccaacccaaacgcaaacccaaacgcaaacccaaacgcaaacccaaacgcgaacccaaacgccaacccaaacgcaaacccaaacgcaaacccaaacgcaaacccaaacgcaaacccaaacgcaaacccaaacgcaaacccgaacgcgaacccaaacgcaaacccaaacgcgaacccgaacgcaaaccccaacgcaaacccauaaggacuagugcaucacauuuaaaagcaucucagccuaccaugagaauaagagaaagaaaaugaagaucaauagcuuauucaucucuuuuucuuuuucguugguguaaagccaacacccugucuaaaaaacauaaauuucuuuaaucauuuugccucuuuucucugugcuucaauuaauaaaaaauggaaagaaccuagaucuaaaaaaaaaaaaaaaaaaaaaaaaaaaaaaaaaaaaaaaaaaaaaaaaaaaaaaaaaaaaaaaaugcaucccccccccccccccccccccccccccccccaaaggcucuuuucagagccaccagaauu

SEQ ID NO: 1474 - RNA, 1367 nt, Artificial Sequence
  mRNA Design i-2 (A64-N5-C30-hSL-N5) comprising derived and/or modified sequence from Pf(3D7)__XP_001351122.1__HsALB_Pf-CSP(19-272)_L(AAY)_Pf-CSP(310-3 27)_L(AAY)_Pf-CSP(346-375) (opt11)
aggagaggcgcugccuacggagguggcagccaucuccuucucggcaucaagcuuaccaugaaaugggucaccuucaucucacuccuauuccuauucuccuccgcauacucacucuuccaagaauaccagugcuacggaucaagcuccaacacacgcguacuaaacgaacugaacuacgacaacgccggaaccaaccucuacaacgaacucgaaaugaauuacuacggcaaacaagagaacugguacucacucaaaaaaaacagcagaucccuaggcgaaaacgacgacggaaacaacgaagacaacgaaaaacuacgcaaacccaaacacaaaaaacuaaaacaacccgcagacggaaacccagauccaaacgcaaacccaaacguagacccaaacgccaacccaaacguagacccaaacgcaaacccaaacguagaccccaacgcaaacccaaacgcaaacccgaacgccaacccaaacgcaaaccccaacgccaacccaaacgcaaacccaaacgcaaacccaaacgcaaacccaaacgccaaccccaacgcgaacccaaacgcaaacccuaacgccaacccaaacgcaaacccaaacgcaaacccgaacgcaaacccaaacgcaaacccaaacgcaaacccgaacguagacccaaacgcaaacccaaacgcaaacccaaacgcaaacccaaacgccaacccaaacgccaacccaaacgcaaaccccaacgcaaaccccaacgcgaacccaaacgccaaccccaacgcaaacccaaacgccaacccaaacgccaacccgaacgcaaacccaaacgccaacccaaacgccaacccgaacgcaaacccaaacgccaacccaaacgccaacccagccgcguacgaacccucagauaaacacauaaaagaauaccucaacaaaauccaaaacucacuagcagccuacaucaaaccaggauccgccaacaaacccaaggacgaacucgacuacgcaaacgacaucgaaaaaaaaaucugcaaaauggaaaaaugcucaugaggacuagugcaucacauuuaaaagcaucucagccuaccaugagaauaagagaaagaaaaugaagaucaauagcuuauucaucucuuuuucuuuuucguugguguaaagccaacacccugucuaaaaaacauaaauuucuuuaaucauuuugccucuuuucucugugcuucaauuaauaaaaaauggaaagaaccuagaucuaaaaaaaaaaaaaaaaaaaaaaaaaaaaaaaaaaaaaaaaaaaaaaaaaaaaaaaaaaaaaaaaugcaucccccccccccccccccccccccccccccccaaaggcucuuuucagagccaccagaauu

SEQ ID NO: 1475 - RNA, 1328 nt, Artificial Sequence
  mRNA Design i-2 (A64-N5-C30-hSL-N5) comprising derived and/or modified sequence from Pf(3D7)__XP_001351122.1__HsALB_Pf-CSP(19-272)_L(AAY)_Pf-CSP(346-3 65)_L(AAY)_P2 (opt11)
aggagaggcgcugccuacggagguggcagccaucuccuucucggcaucaagcuuaccaugaaaugggucaccuucaucucacuccuauuccuauucucgagcgcauacucacucuuccaagaauaccaaugcuauggcuccagcucaaacacacgcguccuaaacgaacucaacuacgacaacgccggaacaaaccucuacaacgaacucgaaaugaacuacuacggcaaacaagaaaacugguacucgcucaaaaaaaacucccgaagucuaggcgaaaacgacgacggaaacaacgaagacaacgaaaaacuacgcaaacccaaacacaaaaaacuaaaacaacccgcagacggaaaccccgacccaaacgcaaaccccaacguagacccaaacgcaaaccccaacguagacccaaacgcaaacccgaacguagacccaaacgccaacccaaacgccaaccccaacgcaaacccaaacgccaaccccaacgcaaacccaaacgcaaacccaaacgcaaacccaaacgcaaacccaaacgccaaccccaacgccaacccaaacgccaaccccaacgcgaaccccaacgcgaacccaaacgccaacccaaacgcaaaccccaacgcaaacccaaacgcaaacccaaacgucgacccaaacgcaaacccaaacgcaaacccgaacgcaaacccaaacgcaaaccccaacgccaacccaaacgcgaacccaaacgccaacccaaacgccaacccaaacgcaaacccaaacgccaacccaaacgcaaacccaaacgcaaaccccaacgcaaaccccaacgcaaacccaaacgccaaccccaacgcaaaccccaacgcaaacccaaacgccaacccagccgcauacauaaaacccggcuccgccaacaaaccaaaagacgaacuagacuacgccaacgacauagaagcagccuaccaauacaucaaagccaacagcaaauucauaggaauaaccgagcuauaaggacuagugcaucacauuuaaaagcaucucagccuaccaugagaauaagagaaagaaaaugaagaucaauagcuuauucaucucuuuuucuuuuucguugguguaaagccaacacccugucuaaaaaacauaaauuucuuuaaucauuuugccucuuuucucugugcuucaauuaauaaaaaauggaaagaaccuagaucuaaaaaaaaaaaaaaaaaaaaaaaaaaaaaaaaaaaaaaaaaaaaaaaaaaaaaaaaaaaaaaaaugcaucccccccccccccccccccccccccccccccaaaggcucuuuucagagccaccagaauu

SEQ ID NO: 1476 - RNA, 1322 nt, Artificial Sequence
  mRNA Design i-2 (A64-N5-C30-hSL-N5) comprising derived and/or modified sequence from Pf(3D7)__XP_001351122.1__HsALB_Pf-CSP(19-272)_L(AAY)_Pf-CSP(346-3 65)_L(AAY)_PADRE (opt11)
aggagaggcgcugccuacggagguggcagccaucuccuucucggcaucaagcuuaccaugaaauggguaaccuucaucucgcuacuguuccucuucucauccgcauacucccucuuccaagaauaccaaugcuacggcucauccucaaacacacgaguacuaaacgaacucaacuacgacaacgccggaaccaaccuauacaacgaacucgaaaugaacuacuacggcaaacaagaaaacugguacucacucaaaaaaaacucccgaucccucggcgaaaacgacgacggaaacaacgaagacaacgaaaaacugagaaaacccaaacacaaaaaacuaaaacaaccagccgacggcaacccagaccccaacgcaaaccccaacguagacccaaacgccaaccccaacguagacccaaacgcaaacccaaacguagaccccaacgccaacccaaacgccaacccaaacgccaaccccaacgcaaacccaaacgcaaacccaaacgcaaacccaaacgccaacccaaacgcaaacccaaacgccaacccgaacgcaaaccccaacgcaaacccaaacgcaaaccccaacgccaacccaaacgcaaacccaaacgcaaaccccaacgcaaacccaaaugcgaacccaaacguggacccgaacgcaaaccccaacgccaacccaaacgcaaaccccaacgccaaccccaacgccaaccccaacgcaaaccccaacgccaaccccaacgccaacccaaacgccaacccaaacgcgaacccaaacgcaaaccccaacgcaaacccaaacgcaaacccaaacgcaaacccaaacgcaaaccccaacgcaaacccaaacgcaaacccaaacgcaaaccccgcagccuacauuaaaccaggcuccgccaacaaacccaaagacgaacucgacuacgccaacgacauagaagcagccuacgccaaauucguagccgcauggacacucaaagccgcagccuaaggacuagugcaucacauuuaaaagcaucucagccuaccaugagaauaagagaaagaaaaugaagaucaauagcuuauucaucucuuuuucuuuuucguugguguaaagccaacacccugucuaaaaaacauaaauuucuuuaaucauuuugccucuuuucucugugcuucaauuaauaaaaaauggaaagaaccuagaucuaaaaaaaaaaaaaaaaaaaaaaaaaaaaaaaaaaaaaaaaaaaaaaaaaaaaaaaaaaaaaaaaugcaucccccccccccccccccccccccccccccccaaaggcucuuuucagagccaccagaauu

SEQ ID NO: 1477 - RNA, 1379 nt, Artificial Sequence
  mRNA Design i-2 (A64-N5-C30-hSL-N5) comprising derived and/or modified sequence from Pf(3D7)__XP_001351122.1__HsALB_Pf-CSP(19-272)_L(G4S)_Pf-CSP(310-3 27)_L(G4S)_Pf-CSP(346-375) (opt11)
aggagaggcgcugccuacggagguggcagccaucuccuucucggcaucaagcuuaccaugaaaugggucaccuucaucucccuacuauuccucuucucaucagccuacucacucuuccaagaguaccaaugcuacggcucaagcucaaacacacgcguacucaacgaacuaaacuacgacaacgcaggcaccaaccucuacaacgaacucgagaugaacuacuacggcaaacaagaaaacugguacucacucaaaaaaaacucccgcagccucggcgaaaacgacgacggcaacaacgaagauaacgagaaacuacgcaaacccaaacacaaaaaacuaaaacaacccgccgacggaaacccagacccaaacgccaacccaaacguagacccaaacgcaaacccaaacguagacccaaacgccaaccccaacguagacccaaacgccaacccaaacgccaacccaaacgcaaacccaaacgcaaacccaaacgcgaacccaaacgcaaaccccaacgccaacccaaacgcaaacccaaacgccaaccccaacgcaaacccaaacgcaaaccccaacgcaaacccaaacgccaaccccaacgcaaaccccaacgcaaacccaaacgcaaacccaaacgcaaacccaaacgucgacccaaacgcaaaccccaacgcaaacccaaacgcaaacccaaacgccaacccaaacgcaaacccaaacgccaacccaaacgcaaaccccaacgcaaaccccaacgccaacccaaacgcaaaccccaacgcgaacccaaacgcaaacccaaacgcaaacccaaacgcaaaccccaacgcaaaccccaacgcaaacccaaacgcaaacccaaacgcaaacccaggcggcggcggaagcgaacccucggacaaacacauaaaagaauaccucaacaaaauccaaaacucccucggaggcggaggcuccaucaaacccggaagcgcaaacaaacccaaagacgaacucgacuacgcaaacgacaucgagaaaaaaauaugcaaaauggaaaaaugcucauaaggacuagugcaucacauuuaaaagcaucucagccuaccaugagaauaagagaaagaaaaugaagaucaauagcuuauucaucucuuuuucuuuuucguugguguaaagccaacacccugucuaaaaaacauaaauuucuuuaaucauuuugccucuuuucucugugcuucaauuaauaaaaaauggaaagaaccuagaucuaaaaaaaaaaaaaaaaaaaaaaaaaaaaaaaaaaaaaaaaaaaaaaaaaaaaaaaaaaaaaaaaugcaucccccccccccccccccccccccccccccccaaaggcucuuuucagagccaccagaauu

SEQ ID NO: 1478 - RNA, 1364 nt, Artificial Sequence
  mRNA Design i-2 (A64-N5-C30-hSL-N5) comprising derived and/or modified sequence from Pf(3D7)__XP_001351122.1__HsALB_Pf-CSP(19-272)_L(G4S)_Pf-CSP(310-3 27)_Pf-CSP(346-375) (opt11)
aggagaggcgcugccuacggagguggcagccaucuccuucucggcaucaagcuuaccaugaaauggguaaccuucaucucacuccuauuccucuucuccuccgcauacucgcucuuccaagaauaccaaugcuacggcucaagcucaaacacccgcguccucaacgaacucaacuacgacaacgccgguaccaaccuauacaacgaacucgaaaugaacuacuacggcaaacaagaaaacugguacucacucaaaaaaaacuccaggucccuaggagaaaacgacgauggcaacaacgaagacaacgaaaaacuccgaaagccaaaacacaaaaaacuaaaacagcccgcagacggcaacccagacccaaacgcaaacccaaacguagacccaaacgcgaaccccaacguagacccaaacgcaaacccaaacguagacccaaacgcaaaccccaacgcaaacccaaacgcaaaccccaacgcaaaccccaacgcaaacccaaacgcaaacccaaacgcaaacccaaacgcaaacccaaacgcaaaccccaacgccaaccccaacgcaaacccaaacgcaaacccaaacgcaaacccaaacgcaaacccaaacgcaaaccccaacgccaacccaaacgcaaacccaaacguagacccaaacgcaaacccaaacgcaaacccaaacgcaaaccccaacgccaacccaaacgcaaacccaaacgcaaacccaaacgcaaacccaaacgcaaauccaaacgcuaacccaaacgcaaacccgaacgcaaaccccaaugcaaaccccaacgcaaacccaaacgccaacccaaacgcaaacccaaacgcgaacccaaacgcaaacccaaacgcaaacccaggcggaggcggauccgaacccuccgacaaacacauaaaagaauaccuaaacaaaauccaaaacucucucauaaaacccggaucagccaacaaaccaaaagacgaacuagacuacgccaaugacauagaaaaaaaaauaugcaagauggaaaaaugcagcuaaggacuagugcaucacauuuaaaagcaucucagccuaccaugagaauaagagaaagaaaaugaagaucaauagcuuauucaucucuuuuucuuuuucguugguguaaagccaacacccugucuaaaaaacauaaauuucuuuaaucauuuugccucuuuucucugugcuucaauuaauaaaaaauggaaagaaccuagaucuaaaaaaaaaaaaaaaaaaaaaaaaaaaaaaaaaaaaaaaaaaaaaaaaaaaaaaaaaaaaaaaaugcaucccccccccccccccccccccccccccccccaaaggcucuuuucagagccaccagaauu

SEQ ID NO: 1479 - RNA, 1364 nt, Artificial Sequence
  mRNA Design i-2 (A64-N5-C30-hSL-N5) comprising derived and/or modified sequence from Pf(3D7)__XP_001351122.1__HsALB_Pf-CSP(19-325) (opt11)
aggagaggcgcugccuacggagguggcagccaucuccuucucggcaucaagcuuaccaugaaauggguaaccuucaucucacuccuguuccuauucucauccgcauacucacucuuccaagaauaccaaugcuacggcucgucuucaaacacccgcguacucaacgaacucaacuacgacaacgccggaaccaaccucuacaacgaacucgaaaugaacuacuacggcaaacaagaaaacugguacucacucaaaaaaaacagccgaagccuaggcgaaaacgacgacggaaacaaugaagacaacgaaaaacuccgcaaacccaaacacaaaaaacucaaacaaccagcagacggaaaccccgacccgaacgcaaacccaaacguagacccaaacgcaaacccaaacguagacccaaacgcgaacccaaacguagaccccaacgcaaacccaaacgcaaacccaaacgcaaacccaaacgccaaccccaacgccaacccaaacgccaacccaaacgcaaacccgaacgcgaacccaaacgcaaaccccaacgcaaacccaaacgcaaacccaaacgcgaacccaaacgccaacccaaacgccaacccaaacgcaaacccaaacgccaacccaaacgcaaaccccaacguggaccccaacgcaaacccaaacgcaaacccaaacgccaaccccaacgcaaacccaaacgcaaacccuaacgcaaacccaaacgcaaaccccaacgcgaacccaaacgcaaacccaaacgcaaacccaaacgcaaaccccaacgcaaacccaaacgccaacccaaacgccaacccaaacgcgaauccaaacgcaaaccccaacgcaaacccaaacgcaaacccgaacaaaaacaaccaagggaacggacaaggacacaacaugccaaacgaccccaaccgcaacgucgacgaaaacgccaacgccaacuccgcaguaaaaaacaacaacaacgaagaacccuccgacaaacacauaaaagaauaccucaacaagauacaaaacuagggacuagugcaucacauuuaaaagcaucucagccuaccaugagaauaagagaaagaaaaugaagaucaauagcuuauucaucucuuuuucuuuuucguugguguaaagccaacacccugucuaaaaaacauaaauuucuuuaaucauuuugccucuuuucucugugcuucaauuaauaaaaaauggaaagaaccuagaucuaaaaaaaaaaaaaaaaaaaaaaaaaaaaaaaaaaaaaaaaaaaaaaaaaaaaaaaaaaaaaaaaugcaucccccccccccccccccccccccccccccccaaaggcucuuuucagagccaccagaauu

SEQ ID NO: 1480 - RNA, 1541 nt, Artificial Sequence
  mRNA Design i-2 (A64-N5-C30-hSL-N5) comprising derived and/or modified sequence from Pf(3D7)__XP_001351122.1__HsALB_Pf-CSP(19-384) (opt11)
aggagaggcgcugccuacggagguggcagccaucuccuucucggcaucaagcuuaccaugaaauggguaaccuucaucucacuacucuuccuauucucaagcgcguacucacucuuccaagaauaccaaugcuacggcucgagcucaaacacccgcguucucaacgaacuaaacuacgacaacgccggaaccaaccuauacaacgaacuugaaaugaacuacuacggcaaacaagaaaacugguacucgcucaaaaaaaacuccaggagccuaggcgaaaacgacgacggaaacaacgaagacaacgagaaacuaagaaaacccaaacacaaaaaacucaaacagcccgcggacggaaaccccgacccaaacgcaaaccccaacguagacccgaacgccaacccaaacguagacccaaacgcaaacccaaacguagaccccaacgcaaacccgaacgccaacccaaacgcaaacccaaaugcgaaccccaacgcgaacccaaacgcaaacccgaacgcaaaccccaacgccaacccaaacgcaaacccaaacgcaaaccccaacgcaaacccaaacgcgaacccaaacgcaaacccaaacgcgaacccgaacgcaaacccaaacgcaaacccgaacgcaaacccaaacguagacccaaacgccaacccaaacgcaaacccaaacgcaaaccccaacgcaaacccaaacgcaaacccgaacgcaaacccaaacgcaaacccaaacgcgaacccaaacgcaaaccccaacgcaaacccaaacgcaaacccuaacgcaaacccgaacgcaaacccaaacgccaacccaaacgcgaaccccaacgcaaacccaaacgccaacccaaacgccaacccgaacaaaaacaaccaaggaaacggacaaggacacaacaugccaaacgaccccaaccgaaacgucgacgaaaacgcaaacgccaacagugccgucaaaaacaacaacaaugaagaacccucagacaaacacauaaaagaauaccuaaacaaaauccagaacucgcucucaaccgaauggucacccugcagcgucaccugcggcaacggaauacaaguacgcaucaaaccaggcucggccaacaaaccaaaagacgaauuagacuacgcaaacgacaucgaaaaaaaaauaugcaaaauggaaaaaugcagcucagucuucaacguagucaauagcucauaaggacuagugcaucacauuuaaaagcaucucagccuaccaugagaauaagagaaagaaaaugaagaucaauagcuuauucaucucuuuuucuuuuucguugguguaaagccaacacccugucuaaaaaacauaaauuucuuuaaucauuuugccucuuuucucugugcuucaauuaauaaaaaauggaaagaaccuagaucuaaaaaaaaaaaaaaaaaaaaaaaaaaaaaaaaaaaaaaaaaaaaaaaaaaaaaaaaaaaaaaaaugcaucccccccccccccccccccccccccccccccaaaggcucuuuucagagccaccagaauu

SEQ ID NO: 1481 - RNA, 1679 nt, Artificial Sequence
  mRNA Design i-2 (A64-N5-C30-hSL-N5) comprising derived and/or modified sequence from Pf(3D7)__XP_001351122.1__HsALB_Pf-CSP(19-384)_TM domain HA (opt11)
aggagaggcgcugccuacggagguggcagccaucuccuucucggcaucaagcuuaccaugaagugggucaccuucaucucccuccuauuccucuucucuagcgcguacucacucuuccaagaauaccaaugcuacggauccagcucaaacacacgcguccucaaugaacugaacuacgauaacgccggaaccaaccucuacaacgaacucgaaaugaacuacuacggcaaacaagaaaacugguacucacuaaagaaaaauagcaggucccucggcgaaaacgacgacgggaacaacgaagauaacgaaaaacuacgcaaacccaagcacaagaaacuaaaacagccagcagacggaaacccagaccccaacgccaacccaaacgucgaccccaacgcaaacccaaacguagauccgaacgcaaacccaaacgucgauccaaacgcaaacccaaacgcaaacccaaacgcuaaccccaacgccaacccaaacgcaaacccgaacgcaaaccccaacgcgaacccgaacgcaaacccaaacgcaaacccaaacgccaacccaaacgcaaacccaaacgcaaacccaaacgccaacccaaacgcaaaccccaacgcgaaccccaacgcaaaccccaacgcaaacccaaacgucgacccaaacgcaaaccccaacgcaaaccccaacgcaaaccccaaugcaaacccaaacgcgaaccccaacgcaaacccaaacgcgaacccaaaugcaaaccccaacgccaaccccaacgccaacccgaacgcaaacccaaacgccaacccaaacgccaacccaaacgcaaaucccaacgccaacccaaacgcgaacccgaacgcaaacccaaacgcaaacccgaacaaaaacaaccaaggaaacggucaaggacacaacaugccaaacgaccccaaccgcaacgucgacgaaaacgccaaugccaacagcgccgucaaaaacaacaacaacgaagaacccucagacaaacacaucaaagaguaccuaaacaagauccaaaacucccucuccaccgaauggucccccugcagcguaaccugcggaaacggcauccaaguccgcauaaaaccaggcucagccaacaaaccaaaagaugaacucgacuacgcaaacgacauagaaaagaaaaucugcaaaauggaaaaaugcagcuccguauucaacgugguuaacuccucaaaacuagaauccacccgcaucuaccaaauacucgcaauauacagcacaguagccagcucacucguccuagucgucucccucggagccaucagcuucuggaugugcuccaacggaaguuuacaaugucgcauaugcauauaaggacuagugcaucacauuuaaaagcaucucagccuaccaugagaauaagagaaagaaaaugaagaucaauagcuuauucaucucuuuuucuuuuucguugguguaaagccaacacccugucuaaaaaacauaaauuucuuuaaucauuuugccucuuuucucugugcuucaauuaauaaaaaauggaaagaaccuagaucuaaaaaaaaaaaaaaaaaaaaaaaaaaaaaaaaaaaaaaaaaaaaaaaaaaaaaaaaaaaaaaaaugcaucccccccccccccccccccccccccccccccaaaggcucuuuucagagccaccagaauu

SEQ ID NO: 1482 - RNA, 1391 nt, Artificial Sequence
  mRNA Design i-2 (A64-N5-C30-hSL-N5) comprising derived and/or modified sequence from Pf(3D7)__XP_001351122.1__HsALB_Pf-CSP(82-397) (opt11)
aggagaggcgcugccuacggagguggcagccaucuccuucucggcaucaagcuuaccaugaaaugggucaccuucaucucacuccuguuccucuucucauccgccuacagcgacaacgaaaaacugcgcaaacccaaacacaagaaacucaaacaaccagccgacggcaaccccgaccccaacgccaacccaaacguagaccccaacgccaaccccaacguagacccaaacgccaacccaaacguggaccccaacgcaaacccaaacgccaacccaaacgccaauccaaacgccaacccaaacgcaaacccaaacgcaaaccccaacgccaacccuaacgccaaccccaacgcaaacccaaacgccaaccccaacgccaaccccaacgcaaaccccaacgcaaacccuaacgccaaccccaacgccaaccccaacgcaaacccaaacgccaaccccaacguagacccaaacgccaaccccaacgcaaaccccaacgccaacccaaacgcaaacccaaacgccaaccccaacgccaaccccaacgcaaacccaaacgcaaacccaaaugcaaaccccaacgccaaccccaacgccaaccccaacgcaaaccccaacgcaaaccccaacgcaaacccgaacgccaacccaaacgccaacccaaacgccaaccccaacgcaaaccccaacaaaaacaaccaaggcaacggacaaggacacaacaugcccaacgaccccaaccgcaacgucgacgaaaacgccaacgccaacuccgccgucaaaaacaacaacaacgaagaacccuccgacaaacacaucaaagaauaccucaacaaaauccaaaacucccucucaaccgaauggucacccugcuccguaaccugcggcaacggcauccaaguccgcaucaaacccggcucagccaacaaacccaaagacgaacucgacuacgccaaugacaucgaaaagaaaauaugcaaaauggaaaaaugcuccuccgucuucaacgucgucaacuccuccaucggccucaucaugguccucucguuccuauuccuaaacuaaggacuagugcaucacauuuaaaagcaucucagccuaccaugagaauaagagaaagaaaaugaagaucaauagcuuauucaucucuuuuucuuuuucguugguguaaagccaacacccugucuaaaaaacauaaauuucuuuaaucauuuugccucuuuucucugugcuucaauuaauaaaaaauggaaagaaccuagaucuaaaaaaaaaaaaaaaaaaaaaaaaaaaaaaaaaaaaaaaaaaaaaaaaaaaaaaaaaaaaaaaaugcaucccccccccccccccccccccccccccccccaaaggcucuuuucagagccaccagaauu

SEQ ID NO: 1483 - RNA, 743 nt, Artificial Sequence
  mRNA Design i-2 (A64-N5-C30-hSL-N5) comprising derived and/or modified sequence from Pf(3D7)__XP_001351122.1__HsALB_Pf-CSP(93-192) (opt11)
aggagaggcgcugccuacggagguggcagccaucuccuucucggcaucaagcuuaccaugaaauggguaaccuucaucucacuccuauuccuauucucaagcgcauacucaaaacuaaaacaacccgcagacggaaacccagacccaaacgcaaacccaaacguagacccaaacgcaaacccaaacguagacccaaacgcaaacccaaacguagacccaaacgcaaacccaaacgcaaacccaaacgcaaacccaaacgcaaacccaaacgcaaaccccaacgcaaacccaaacgcaaacccaaacgcaaacccaaacgcaaacccaaacgcaaacccaaacgcaaacccaaacgcaaacccaaacgcaaacccaaacgcaaacccaaacgccaacccaaacgcaaacccauaaggacuagugcaucacauuuaaaagcaucucagccuaccaugagaauaagagaaagaaaaugaagaucaauagcuuauucaucucuuuuucuuuuucguugguguaaagccaacacccugucuaaaaaacauaaauuucuuuaaucauuuugccucuuuucucugugcuucaauuaauaaaaaauggaaagaaccuagaucuaaaaaaaaaaaaaaaaaaaaaaaaaaaaaaaaaaaaaaaaaaaaaaaaaaaaaaaaaaaaaaaaugcaucccccccccccccccccccccccccccccccaaaggcucuuuucagagccaccagaauu

SEQ ID NO: 1484 - RNA, 983 nt, Artificial Sequence
  mRNA Design i-2 (A64-N5-C30-hSL-N5) comprising derived and/or modified sequence from Pf(3D7)__XP_001351122.1__HsALB_Pf-CSP(93-272) (opt11)
aggagaggcgcugccuacggagguggcagccaucuccuucucggcaucaagcuuaccaugaaaugggucaccuucaucucacuccuauuccuauucucauccgcauacucaaaacuaaaacaacccgccgacggaaacccagacccaaacgcaaacccaaacguagacccaaacgcaaacccaaacguagacccaaacgcaaacccaaacguagacccaaacgcaaacccaaacgccaacccaaacgcaaauccaaacgcaaacccaaacgcaaacccaaacgcaaacccaaacgcaaacccaaacgccaacccaaacgccaacccaaacgcaaacccaaacgcaaacccaaacgcaaacccaaacgcaaacccaaacgcaaacccaaacgccaaccccaacgcaaacccaaacgcaaaccccaacguagacccaaacgcaaacccaaacgccaaccccaacgcaaaccccaacgccaaccccaacgccaacccaaacgccaacccaaacgcaaacccaaacgcaaacccaaacgcaaacccaaacgcaaacccaaacgcaaacccaaacgcaaacccaaacgcaaacccaaacgcaaacccaaacgccaacccaaacgcaaacccaaacgcaaacccgaacgcaaacccauaaggacuagugcaucacauuuaaaagcaucucagccuaccaugagaauaagagaaagaaaaugaagaucaauagcuuauucaucucuuuuucuuuuucguugguguaaagccaacacccugucuaaaaaacauaaauuucuuuaaucauuuugccucuuuucucugugcuucaauuaauaaaaaauggaaagaaccuagaucuaaaaaaaaaaaaaaaaaaaaaaaaaaaaaaaaaaaaaaaaaaaaaaaaaaaaaaaaaaaaaaaaugcaucccccccccccccccccccccccccccccccaaaggcucuuuucagagccaccagaauu

SEQ ID NO: 1485 - RNA, 1358 nt, Artificial Sequence
  mRNA Design i-2 (A64-N5-C30-hSL-N5) comprising derived and/or modified sequence from Pf(3D7)__XP_001351122.1__HsALB_Pf-CSP(93-397) (opt11)
aggagaggcgcugccuacggagguggcagccaucuccuucucggcaucaagcuuaccaugaaaugggucacauucaucucacuccuauuccuauucucaagcgccuacuccaaacucaaacaacccgccgacggcaacccagacccaaacgccaaccccaacgucgacccaaacgccaacccaaacgucgacccaaacgcaaacccaaacgucgaccccaacgccaaccccaacgccaaccccaacgccaacccaaacgccaaucccaacgccaaccccaacgccaacccaaacgcaaaccccaacgccaauccaaacgccaaccccaacgcaaaccccaacgccaaccccaacgcaaacccaaacgcaaacccaaacgcaaaccccaacgccaaccccaacgcaaaccccaacgccaaccccaacgucgaccccaacgccaacccaaacgccaacccaaacgccaaccccaacgccaaccccaacgcaaacccaaacgcgaaccccaacgcaaaccccaacgccaacccgaacgccaacccgaacgcaaacccaaacgccaaccccaacgcaaaccccaacgcaaacccaaacgcgaaccccaacgccaacccaaacgccaacccaaacgcgaacccaaacgccaaccccaacaaaaacaaccaagggaacggacaaggccacaacaugcccaacgaccccaaccgcaacgucgacgaaaacgccaacgccaacuccgccgucaaaaacaacaacaacgaagaacccuccgacaaacacauaaaagaauaccuaaacaaaauccaaaacucacucucuacugaauggucccccugcucagucaccugcggcaacggcauacaaguccgcauaaaacccggcucggccaacaaaccaaaagacgaacuagacuacgcaaacgacaucgaaaaaaaaauaugcaaaauggaaaaaugcuccucagucuucaacguaguaaacuccuccaucggccucauaaugguccucuccuuccuauuccucaacuaaggacuagugcaucacauuuaaaagcaucucagccuaccaugagaauaagagaaagaaaaugaagaucaauagcuuauucaucucuuuuucuuuuucguugguguaaagccaacacccugucuaaaaaacauaaauuucuuuaaucauuuugccucuuuucucugugcuucaauuaauaaaaaauggaaagaaccuagaucuaaaaaaaaaaaaaaaaaaaaaaaaaaaaaaaaaaaaaaaaaaaaaaaaaaaaaaaaaaaaaaaaugcaucccccccccccccccccccccccccccccccaaaggcucuuuucagagccaccagaauu

SEQ ID NO: 1486 - RNA, 728 nt, Artificial Sequence
  mRNA Design i-2 (A64-N5-C30-hSL-N5) comprising derived and/or modified sequence from Pf(3D7)__XP_001351122.1__HsALB_Pf-CSP(98-192) (opt11)
aggagaggcgcugccuacggagguggcagccaucuccuucucggcaucaagcuuaccaugaaaugggucacauucauaagccuacucuuccucuucagcucagccuacuccgcagacggaaacccagacccaaacgcaaacccaaacguagacccaaacgcaaacccaaacguagacccaaacgcaaacccaaacguagacccaaacgcaaacccaaacgcaaacccaaacgcaaacccaaacgcaaacccaaacgcaaacccaaacgcaaacccaaacgcaaacccaaacgcaaacccaaacgcaaacccaaacgcaaaccccaacgcaaacccaaacgcaaacccaaacgcaaacccaaacgcaaacccaaacgcaaacccaaacgcaaacccauaaggacuagugcaucacauuuaaaagcaucucagccuaccaugagaauaagagaaagaaaaugaagaucaauagcuuauucaucucuuuuucuuuuucguugguguaaagccaacacccugucuaaaaaacauaaauuucuuuaaucauuuugccucuuuucucugugcuucaauuaauaaaaaauggaaagaaccuagaucuaaaaaaaaaaaaaaaaaaaaaaaaaaaaaaaaaaaaaaaaaaaaaaaaaaaaaaaaaaaaaaaaugcaucccccccccccccccccccccccccccccccaaaggcucuuuucagagccaccagaauu

SEQ ID NO: 1487 - RNA, 968 nt, Artificial Sequence
  mRNA Design i-2 (A64-N5-C30-hSL-N5) comprising derived and/or modified sequence from Pf(3D7)__XP_001351122.1__HsALB_Pf-CSP(98-272) (opt11)
aggagaggcgcugccuacggagguggcagccaucuccuucucggcaucaagcuuaccaugaaauggguaaccuucauaagccuacucuuccuauucucaucagccuacagcgcagacggaaacccagaccccaacgcaaacccaaacguagacccaaacgcaaacccaaacguagaccccaacgcaaacccaaacguagacccaaacgccaacccaaacgcaaacccaaacgcaaacccaaacgccaacccaaacgcaaacccaaacgccaacccaaacgcaaacccaaacgcaaacccaaacgcaaacccaaacgcaaacccaaacgcaaacccaaacgcaaacccaaacgccaacccaaacgcaaacccaaacgcaaacccaaacgcaaacccaaacgccaaccccaacguagacccaaacgccaaccccaacgcaaacccaaacgcaaacccaaacgcaaacccaaacgcaaacccaaacgcaaacccaaacgcaaacccaaacgcaaacccaaacgcaaacccgaacgccaacccaaacgcaaacccaaacgcaaacccaaacgcaaacccaaacgcaaacccaaacgcaaaccccaacgcaaacccaaacgcaaacccaaacgcaaacccauaaggacuagugcaucacauuuaaaagcaucucagccuaccaugagaauaagagaaagaaaaugaagaucaauagcuuauucaucucuuuuucuuuuucguugguguaaagccaacacccugucuaaaaaacauaaauuucuuuaaucauuuugccucuuuucucugugcuucaauuaauaaaaaauggaaagaaccuagaucuaaaaaaaaaaaaaaaaaaaaaaaaaaaaaaaaaaaaaaaaaaaaaaaaaaaaaaaaaaaaaaaaugcaucccccccccccccccccccccccccccccccaaaggcucuuuucagagccaccagaauu

SEQ ID NO: 1488 - RNA, 1274 nt, Artificial Sequence
  mRNA Design i-2 (A64-N5-C30-hSL-N5) comprising derived and/or modified sequence from Pf(3D7)__XP_001351122.1__HsALB_Pf-CSP(98-374) (opt11)
aggagaggcgcugccuacggagguggcagccaucuccuucucggcaucaagcuuaccaugaaauggguaaccuucauaucccuacucuuccuuuucuccucggccuacuccgcagacggaaacccagacccaaacgcaaaccccaacguagacccaaacgcaaacccaaauguagacccaaacgcaaacccaaacguggacccaaacgcgaaccccaacgcaaaccccaacgcaaacccaaacgccaacccaaacgcaaacccaaacgccaacccaaacgcaaaccccaacgccaaccccaacgccaacccaaacgcaaacccaaacgcaaaccccaacgcaaacccaaacgccaacccaaacgccaacccaaacgccaaccccaacgcaaacccaaacgccaacccaaacguagacccaaacgcaaacccaaacgcaaacccaaacgcaaaccccaacgcaaaccccaacgcaaacccaaacgcaaacccaaacgcaaacccaaacgcaaacccaaacgccaacccaaacgcgaaccccaacgccaacccaaacgcaaacccaaacgccaacccaaacgccaacccaaacgcaaaccccaacgcaaacccaaacgcaaacccaaacgccaacccgaacaaaaacaaccaaggcaacggccaaggacacaacaugccaaacgaccccaaccgcaacguagacgaaaacgccaacgcaaacuccgcagucaaaaacaacaacaacgaagaacccuccgacaaacacauaaaagaauaccuaaacaaaauccaaaacucgcucucaaccgaauggucccccugcuccgucaccugcggcaacggcauccaaguacgcaucaaaccaggcucagcaaacaaaccaaaagacgaacucgacuacgccaacgacauagaaaaaaaaauaugcaaaauggagaaaugcuaaggacuagugcaucacauuuaaaagcaucucagccuaccaugagaauaagagaaagaaaaugaagaucaauagcuuauucaucucuuuuucuuuuucguugguguaaagccaacacccugucuaaaaaacauaaauuucuuuaaucauuuugccucuuuucucugugcuucaauuaauaaaaaauggaaagaaccuagaucuaaaaaaaaaaaaaaaaaaaaaaaaaaaaaaaaaaaaaaaaaaaaaaaaaaaaaaaaaaaaaaaaugcaucccccccccccccccccccccccccccccccaaaggcucuuuucagagccaccagaauu

SEQ ID NO: 1489 - RNA, 1343 nt, Artificial Sequence
  mRNA Design i-2 (A64-N5-C30-hSL-N5) comprising derived and/or modified sequence from Pf(3D7)__XP_001351122.1__HsALB_Pf-CSP(98-397) (opt11)
aggagaggcgcugccuacggagguggcagccaucuccuucucggcaucaagcuuaccaugaaauggguaaccuucaucagccuacuauuccuauucagcuccgccuacagcgccgacggaaacccagacccaaacgccaaccccaacgucgacccaaacgccaaccccaacguagacccaaacgccaaccccaacgucgaccccaacgccaaccccaacgccaacccaaacgccaacccuaacgccaacccaaacgccaacccgaacgccaaccccaacgcgaacccaaacgccaacccaaacgcaaaccccaacgccaaccccaacgccaaccccaacgcaaaccccaacgcaaacccaaacgccaacccaaacgccaaccccaacgccaaccccaaugcaaacccaaacgucgaccccaacgccaacccaaacgccaaccccaacgccaaccccaacgccaaccccaacgcaaaccccaacgccaaccccaacgcgaaccccaacgccaaccccaacgccaacccaaacgccaaccccaacgccaaccccaacgccaaccccaacgcuaaccccaacgcaaacccaaacgccaacccaaacgccaacccaaacgccaaccccaacgccaacccaaacaaaaacaaccaaggcaacggacaaggacacaacaugccaaacgaccccaaccgcaacgucgacgaaaaugccaacgccaacuccgccgucaaaaacaacaacaacgaagaacccuccgacaaacacaucaaagaauaccuaaacaaaauacaaaacucucucucaaccgaauggucccccugcuccgucacaugcggcaacggcauccaaguccgcaucaaaccaggaucagccaauaaacccaaagacgaacucgacuacgccaacgacauagaaaaaaaaaucugcaaaauggaaaaaugcagcucagucuucaacgucgucaacuccucaaucggacuuauaaugguccuauccuuccucuuccuuaacuaaggacuagugcaucacauuuaaaagcaucucagccuaccaugagaauaagagaaagaaaaugaagaucaauagcuuauucaucucuuuuucuuuuucguugguguaaagccaacacccugucuaaaaaacauaaauuucuuuaaucauuuugccucuuuucucugugcuucaauuaauaaaaaauggaaagaaccuagaucuaaaaaaaaaaaaaaaaaaaaaaaaaaaaaaaaaaaaaaaaaaaaaaaaaaaaaaaaaaaaaaaaugcaucccccccccccccccccccccccccccccccaaaggcucuuuucagagccaccagaauu

SEQ ID NO: 1490 - RNA, 1670 nt, Artificial Sequence
  mRNA Design i-2 (A64-N5-C30-hSL-N5) comprising derived and/or modified sequence from Pf(3D7)__XP_001351122.1__HsALB_Pf-CSP(199-377)_L(PVTN)_HBsAg (opt11)
aggagaggcgcugccuacggagguggcagccaucuccuucucggcaucaagcuuaccaugaaaugggucacauucaucucgcuccucuuccuauucuccuccgccuacuccgacccuaacgccaaucccaacgccaaccccaacgccaaccccaacgccaaccccaacgccaaccccaaugcaaacccaaacgcaaaccccaacgccaaccccaacgcaaacccaaaugcaaaccccaacgcaaaccccaacgccaaccccaaugccaaccccaacgcuaaccccaacgccaauccaaacgccaaccccaacgcaaaccccaacgccaacccuaacaaaaauaaccaaggcaacggccaaggacacaacaugcccaacgaccccaaccgaaaugucgacgaaaacgcuaacgcuaacagcgccgucaaaaacaacaacaacgaagaacccuccgacaaacacauuaaagaauaccucaacaaaauccaaaacucccucuccaccgaauggucccccugcucuguaacuugcggcaacggcauccaaguccgcauaaaacccggaucagcaaacaaacccaaagacgaacucgacuacgcaaacgacauugagaagaaaaucugcaaaauggaaaaaugcucaucaguacccgucacuaacauggaaaacaucaccuccggcuuccucggcccccuccuaguccuacaagccgguuucuuccuucuuacacgcauccuaaccaucccacaaucccuagacuccugguggacaucuuuaaacuuccuuggaggauccccugucugccucggccaaaacucccaauccccaaccucuaaccacucucccacauccugcccucccauaugccccgguuaccgcuggaugugccuccgccgcuucaucaucuuccucuucauacuccucuuaugccucaucuuccuccucguacuacucgacuaccaagguaugcuacccguaugcccucucauccccggcuccaccacaaccaacaccggccccugcaaaacaugcaccacccccgcacagggcaauuccauguuccccuccugcuguugcaccaaacccacagacggcaacuguaccugcauccccauccccuccucuugggcauuugccaaauaccucugggaaugggccuccguccgauucucuuggcuuucacuccucguucccuucguacaaugguucgucggccuaucacccaccgucuggcucuccgccaucuggaugaugugguacuggggcccuucacuuuacuccauagucagccccuucauaccacuccuccccaucuucuucugccuauggguauacaucuaaggacuagugcaucacauuuaaaagcaucucagccuaccaugagaauaagagaaagaaaaugaagaucaauagcuuauucaucucuuuuucuuuuucguugguguaaagccaacacccugucuaaaaaacauaaauuucuuuaaucauuuugccucuuuucucugugcuucaauuaauaaaaaauggaaagaaccuagaucuaaaaaaaaaaaaaaaaaaaaaaaaaaaaaaaaaaaaaaaaaaaaaaaaaaaaaaaaaaaaaaaaugcaucccccccccccccccccccccccccccccccaaaggcucuuuucagagccaccagaauu

SEQ ID NO: 1491 - RNA, 1409 nt, Artificial Sequence
  mRNA Design i-2 (A64-N5-C30-hSL-N5) comprising derived and/or modified sequence from Pb(ANKA)__XP_022712148.1__Pb-CSP (opt11)
aggagaggcgcugccuacggagguggcagccaucuccuucucggcaucaagcuuaccaugaaaaaaugcaccauccucgucguagccucccuccuccuagucaacucccuccuccccggauacgggcaaaacaaaucaauucaagcccaacgcaaccucaacgaacucugcuacaacgaaggcaacgacaacaaacuauaccacguacucaacuccaaaaacgguaaaaucuacaaccgcaacacugucaaccgccuacucgccgacgcccccgaaggcaaaaaaaacgaaaaaaaaaacgaaaaaaucgaacgcaacaacaaacucaaacaacccccacccccaccaaaccccaacgacccccccccccccaaucccaaugaccccccaccccccaaccccaacgaccccccccccccaaaccccaacgacccccccccccccaacgccaacgauccaccuccucccaacgcaaacgacccagcaccuccaaacgccaacgaccccgcccccccaaacgcaaacgacccagcccccccaaacgcaaacgaccccgccccccccaacgccaacgacccacccccccccaaccccaacgacccagccccccccaaugccaacgacccccccccucccaaccccaacgaccccgcccccccacaaggaaacaacaacccacaaccccaaccacgaccccaaccccaaccccaaccccaaccacaaccacaaccccaaccccaaccacaaccccgaccacaaccccaaccccaacccggcggcaacaacaacaacaaaaacaacaacaacgacgacuccuacaucccauccgccgaaaaaauccucgaauucgucaaacaaauacgcgacuccauaaccgaagaauggucccaaugcaacgugaccugcggcucaggcauccgaguccgcaaacgcaaaggaucuaacaaaaaagccgaagaccucacccuagaagacaucgacaccgaaaucugcaaaauggacaaaugcuccuccauauucaacaucgucucaaacucacucggcuuugucauccuccucguacucgucuucuucaacuaaggacuagugcaucacauuuaaaagcaucucagccuaccaugagaauaagagaaagaaaaugaagaucaauagcuuauucaucucuuuuucuuuuucguugguguaaagccaacacccugucuaaaaaacauaaauuucuuuaaucauuuugccucuuuucucugugcuucaauuaauaaaaaauggaaagaaccuagaucuaaaaaaaaaaaaaaaaaaaaaaaaaaaaaaaaaaaaaaaaaaaaaaaaaaaaaaaaaaaaaaaaugcaucccccccccccccccccccccccccccccccaaaggcucuuuucagagccaccagaauu

SEQ ID NO: 1492 - RNA, 1574 nt, Artificial Sequence
  mRNA Design i-2 (A64-N5-C30-hSL-N5) comprising derived and/or modified sequence from Pb(ANKA)__XP_022712148.1__Pb-CSP_L(G4SG4)_TM domain HA (opt11)
aggagaggcgcugccuacggagguggcagccaucuccuucucggcaucaagcuuaccaugaaaaaaugcacaauccuugucguagccucccuacuacucguaaacucacuccuacccggauacggccaaaacaaaucuauccaagcccaacguaaccuuaaugaacuaugcuacaacgaaggcaacgacaacaaacuuuaccacguccugaacuccaaaaacggcaaaaucuacaaccggaacaccguaaaucgccugcucgcugacgcaccagaaggaaaaaaaaacgaaaaaaaaaacgaaaaaauagagcguaacaacaagcucaaacaaccgcccccccccccaaaccccaacgaccccccccccccuaaccccaacgacccaccgccacccaacccaaacgacccccccccaccaaaccccaacgacccaccaccaccgaacgccaacgacccaccuccccccaacgccaacgacccugcaccccccaacgccaacgaucccgccccccccaacgccaacgacccagcacccccaaacgccaacgauccagcuccccccaacgccaacgaccccccaccccccaaccccaacgacccagcccccccaaacgcuaacgacccccccccccccaacccaaacgacccagcccccccccaaggcaacaacaacccucaaccccaaccccgcccgcaaccccaaccccaaccacaaccacaaccucaaccacaaccacaaccccaaccccgcccacaaccacaaccccaaccaggcggcaacaacaacaacaaaaacaacaacaacgacgacuccuacauccccucagcagaaaaaauccucgaguucgucaaacaaauccgcgacucuaucacagaagaauggucccaaugcaacguaaccugcggcucaggcauccgcguccgaaaacgaaaaggcucaaacaaaaaagccgaagaccucacacucgaagacaucgacaccgaaauaugcaaaauggacaaaugcuccuccauauucaacaucgucucaaacucucucgguuucgucaucuuacucguccucguauucuucaacggcggcggaggcuccggcggaggaggcaaacuagaauccaccagaaucuaccaaauccucgccauauacucuaccgucgccagcucccuuguccucguggucucccucggagcaaucuccuucuggaugugcucuaacggcucacuccaaugccguaucugcauuuaaggacuagugcaucacauuuaaaagcaucucagccuaccaugagaauaagagaaagaaaaugaagaucaauagcuuauucaucucuuuuucuuuuucguugguguaaagccaacacccugucuaaaaaacauaaauuucuuuaaucauuuugccucuuuucucugugcuucaauuaauaaaaaauggaaagaaccuagaucuaaaaaaaaaaaaaaaaaaaaaaaaaaaaaaaaaaaaaaaaaaaaaaaaaaaaaaaaaaaaaaaaugcaucccccccccccccccccccccccccccccccaaaggcucuuuucagagccaccagaauu

SEQ ID NO: 1493 - RNA, 1394 nt, Artificial Sequence
  mRNA Design i-2 (A64-N5-C30-hSL-N5) comprising derived and/or modified sequence from Pb(ANKA)__XP_022712148.1__HsALB_Pb-CSP(24-340) (opt11)
aggagaggcgcugccuacggagguggcagccaucuccuucucggcaucaagcuuaccaugaaaugggucaccuucaucucccuacuauuccucuuuucauccgcuuacucacaaaacaaauccauccaagcccaacgcaaccucaaugaacuaugcuacaacgaaggcaacgacaacaaacucuaccacguccucaacucaaaaaacggaaaaauauacaaccgcaacaccguaaaccgccuacuagccgacgcccccgaaggcaaaaaaaacgaaaaaaaaaacgaaaaaaucgaacgcaacaacaaacuaaaacaacccccccccccccccaaccccaacgacccccccccccccaaccccaacgaccccccacccccaaacccaaacgaccccccuccccccaacccaaacgaccccccaccccccaacgcaaacgacccccccccacccaacgccaacgaccccgccccccccaacgccaacgaucccgccccccccaacgccaacgaccccgccccccccaacgccaacgacccagccccccccaacgcaaacgacccccccccccccaaccccaacgaccccgcaccccccaacgccaacgacccacccccacccaaccccaacgaccccgcacccccacaaggaaacaacaacccccaaccccaaccccgaccccaaccccaaccccaaccccaaccccaaccgcaaccccagccacaaccacaaccccgcccucaaccucaaccccaacccggaggaaacaacaacaacaaaaauaacaacaacgaugacuccuacauccccuccgcagaaaaaauacucgaauucguaaaacaaauccgcgacucaaucaccgaagaauggucccaaugcaacguaaccugcggcuccggcauccgcguccgcaaacgcaaaggcuccaacaagaaagccgaagaccucacacuggaagacauagacaccgaaauaugcaaaauggauaaaugcuccuccaucuucaacaucgucuccaacucucucggcuucguaauacuucucguucucguauucuucaacuaaggacuagugcaucacauuuaaaagcaucucagccuaccaugagaauaagagaaagaaaaugaagaucaauagcuuauucaucucuuuuucuuuuucguugguguaaagccaacacccugucuaaaaaacauaaauuucuuuaaucauuuugccucuuuucucugugcuucaauuaauaaaaaauggaaagaaccuagaucuaaaaaaaaaaaaaaaaaaaaaaaaaaaaaaaaaaaaaaaaaaaaaaaaaaaaaaaaaaaaaaaaugcaucccccccccccccccccccccccccccccccaaaggcucuuuucagagccaccagaauu

SEQ ID NO: 1494 - RNA, 1412 nt, Artificial Sequence
  mRNA Design i-2 (A64-N5-C30-hSL-N5) comprising derived and/or modified sequence from Pb(ANKA)__XP_022712148.1__HsIns-iso1_Pb-CSP(24-340) (opt11)
aggagaggcgcugccuacggagguggcagccaucuccuucucggcaucaagcuuaccauggcccucuggaugcgacuacucccccuccucgcacuccuagcccucuggggccccgaccccgccgccgcacaaaacaaauccauccaagcccaacgcaaccucaaugaacucugcuacaacgaaggcaacgacaacaaacucuaccacguccucaacucaaaaaacggaaaaaucuacaaccgaaacaccgucaaccgccuccuugccgacgccccagaaggcaaaaaaaacgagaaaaaaaaugaaaaaaucgaacgcaacaacaaacucaaacaaccccccccccccccgaacccuaacgacccccccccccccaaccccaaugaccccccacccccaaacccgaacgaccccccaccccccaaccccaacgaccccccucccccuaacgcaaacgacccuccaccccccaacgccaacgaccccgccccaccaaacgccaaugaccccgccccaccaaacgcaaacgauccagcccccccaaacgcaaacgaccccgcaccacccaacgcaaacgacccccccccccccaaccccaacgaccccgcccccccaaacgccaacgaccccccaccacccaaccccaacgaccccgcacccccacaaggcaacaacaacccacaaccacaaccccgcccccaaccccaaccacaaccccaaccccaaccccaaccacaaccacaaccacaaccccgcccccaaccccaaccccaacccggcggcaacaacaacaacaaaaacaacaauaacgacgacucuuacauccccucagccgaaaaaauacucgaauucgucaaacaaauccgcgacuccaucaccgaagaauggucacaaugcaacgucaccugcggaucaggcauccgaguacgcaaacgcaaaggcuccaacaaaaaagccgaagaccucacccucgaagacaucgacaccgaaauuugcaaaauggacaagugcuccuccauauucaacaucguuucaaacucauuaggauucgucauccuccucguccucgucuucuucaacuaaggacuagugcaucacauuuaaaagcaucucagccuaccaugagaauaagagaaagaaaaugaagaucaauagcuuauucaucucuuuuucuuuuucguugguguaaagccaacacccugucuaaaaaacauaaauuucuuuaaucauuuugccucuuuucucugugcuucaauuaauaaaaaauggaaagaaccuagaucuaaaaaaaaaaaaaaaaaaaaaaaaaaaaaaaaaaaaaaaaaaaaaaaaaaaaaaaaaaaaaaaaugcaucccccccccccccccccccccccccccccccaaaggcucuuuucagagccaccagaauu

SEQ ID NO: 1495 - RNA, 1391 nt, Artificial Sequence
  mRNA Design i-2 (A64-N5-C30-hSL-N5) comprising derived and/or modified sequence from Pb(ANKA)__XP_022712148.1__HsSPARC_Pb-CSP(24-340) (opt11)
aggagaggcgcugccuacggagguggcagccaucuccuucucggcaucaagcuuaccaugcgcgccuggaucuucuuccuccucugccuugccggccgcgcacuagcccaaaacaaaucuauccaagcccaacgcaaccucaacgaacucugcuacaacgaaggaaacgacaacaaacucuaccauguacucaacuccaaaaacggaaaaaucuacaaccgcaacaccguaaaccgccuacucgcugacgccccugaaggcaaaaaaaacgaaaaaaaaaacgaaaaaaucgaacgcaacaacaaacucaaacaaccuccccccccccccaacccaaacgacccccccccucccaacccaaacgaccccccacccccaaaccccaacgacccccccccccccaacccaaacgacccccccccccccaacgccaacgacccccccccccccaacgccaacgaccccgccccaccaaacgcaaacgauccagcaccccccaacgccaacgaccccgcaccccccaacgcaaacgaccccgccccccccaacgccaacgaccccccgccaccuaacccaaacgacccagcaccccccaacgccaacgaucccccaccccccaaccccaacgacccagcccccccccaaggaaacaacaacccacaaccccaaccccgcccucaaccacaaccacaaccccaaccucaaccccaaccucaaccccaaccccaaccacgaccacaaccccaaccacaaccuggcggcaacaacaacaacaaaaacaacaacaacgacgacucauacaucccauccgcagaaaaaauacucgaauucguaaaacaaaucagagacuccauaacagaagaauggucccaaugcaacgucacuugcggcucaggcauacgcguccgcaaacgcaagggcuccaacaaaaaagccgaagaccuaacacucgaagacaucgacacagaaaucugcaaaauggacaaaugcucaucaaucuucaacaucguauccaacucacucggcuucguaauccuccucguccucgucuucuucaacuaaggacuagugcaucacauuuaaaagcaucucagccuaccaugagaauaagagaaagaaaaugaagaucaauagcuuauucaucucuuuuucuuuuucguugguguaaagccaacacccugucuaaaaaacauaaauuucuuuaaucauuuugccucuuuucucugugcuucaauuaauaaaaaauggaaagaaccuagaucuaaaaaaaaaaaaaaaaaaaaaaaaaaaaaaaaaaaaaaaaaaaaaaaaaaaaaaaaaaaaaaaaugcaucccccccccccccccccccccccccccccccaaaggcucuuuucagagccaccagaauu

SEQ ID NO: 1496 - RNA, 1394 nt, Artificial Sequence
  mRNA Design i-2 (A64-N5-C30-hSL-N5) comprising derived and/or modified sequence from Pb(ANKA)__XP_022712148.1__IgE_Pb-CSP(24-340) (opt11)
aggagaggcgcugccuacggagguggcagccaucuccuucucggcaucaagcuuaccauggacuggaccuggauccuuuuccuaguagccgccgcaacccgcguccacucacaaaacaaauccauccaagcacagcguaaccucaacgaacucuguuacaacgagggcaacgacaacaaacuauaccacguccugaacuccaaaaacggcaaaaucuacaaccgcaacaccguaaaccgucuccucgccgacgccccagaaggcaaaaaaaaugaaaaaaaaaacgaaaaaaucgaacgaaacaacaaacuaaaacaacccccccccccccccaaccccaacgacccccccccccccaaccccaacgauccccccccccccaaccccaacgacccccccccccccaaucccaacgacccccccccccccaacgcaaacgaccccccccccccuaaugccaacgacccagcaccccccaacgccaacgaccccgccccccccaacgcaaacgaccccgccccccccaacgccaacgaccccgccccaccuaacgcaaacgacccacccccccccaaccccaacgaccccgccccccccaacgcuaacgacccccccccccccaacccaaacgacccagcacccccacaaggcaacaacaacccacaaccccaaccccgcccccaaccucaaccacaaccccaaccacaaccccaaccccaaccccaaccccaaccccgcccacaaccccaaccucaacccggcggcaacaacaacaacaaaaacaacaacaacgacgacuccuacauaccauccgccgaaaaaauccucgaauucgucaaacaaauccgcgacucaaucaccgaagaauggucacaaugcaacgucaccugcggcuccgguauccgcguaagaaaacgcaaaggaucaaacaaaaaagccgaagaccucacccucgaagacauagacaccgaaaucugcaaaauggacaaauguucauccaucuuuaacaucgucuccaacucacucggauucguaauacuacuaguccuaguauucuucaacuaaggacuagugcaucacauuuaaaagcaucucagccuaccaugagaauaagagaaagaaaaugaagaucaauagcuuauucaucucuuuuucuuuuucguugguguaaagccaacacccugucuaaaaaacauaaauuucuuuaaucauuuugccucuuuucucugugcuucaauuaauaaaaaauggaaagaaccuagaucuaaaaaaaaaaaaaaaaaaaaaaaaaaaaaaaaaaaaaaaaaaaaaaaaaaaaaaaaaaaaaaaaugcaucccccccccccccccccccccccccccccccaaaggcucuuuucagagccaccagaauu

SEQ ID NO: 1497 - RNA, 1411 nt, Artificial Sequence
  mRNA Design i-3 (A64-N5-C30-hSL-N5) comprising derived and/or modified sequence from Pf(3D7)__XP_001351122.1__Pf-CSP (wt)
gggagaaagcuuaccaugaugagaaaauuagcuauuuuaucuguuucuuccuuuuuauuuguugaggccuuauuccaggaauaccagugcuauggaaguucgucaaacacaaggguucuaaaugaauuaaauuaugauaaugcaggcacuaauuuauauaaugaauuagaaaugaauuauuaugggaaacaggaaaauugguauagucuuaaaaaaaauaguagaucacuuggagaaaaugaugauggaaauaacgaagacaacgagaaauuaaggaaaccaaaacauaaaaaauuaaagcaaccagcggaugguaauccugauccaaaugcaaacccaaauguagaucccaaugccaacccaaauguagauccaaaugcaaacccaaauguagauccaaaugcaaacccaaaugcaaacccaaaugcaaacccaaaugcaaacccaaaugcaaacccaaaugcaaacccaaaugcaaacccaaaugcaaacccaaaugcaaacccaaaugcaaacccaaaugcaaacccaaaugcaaacccaaaugcaaacccaaaugcaaaccccaaugcaaauccuaaugcaaacccaaaugcaaacccaaacguagauccuaaugcaaauccaaaugcaaacccaaacgcaaaccccaaugcaaauccuaaugcaaaccccaaugcaaauccuaaugcaaauccuaaugccaauccaaaugcaaauccaaaugcaaacccaaacgcaaaccccaaugcaaauccuaaugccaauccaaaugcaaauccaaaugcaaacccaaaugcaaacccaaaugcaaaccccaaugcaaauccuaauaaaaacaaucaagguaauggacaaggucacaauaugccaaaugacccaaaccgaaauguagaugaaaaugcuaaugccaacagugcuguaaaaaauaauaauaacgaagaaccaagugauaagcacauaaaagaauauuuaaacaaaauacaaaauucucuuucaacugaaugguccccauguaguguaacuuguggaaaugguauucaaguuagaauaaagccuggcucugcuaauaaaccuaaagacgaauuagauuaugcaaaugauauugaaaaaaaaauuuguaaaauggaaaaauguuccaguguguuuaaugucguaaauaguucaauaggauuaauaaugguauuauccuucuuguuccuuaauuagggacuaguuauaagacugacuagcccgaugggccucccaacgggcccuccuccccuccuugcaccgagauuaauaaaaaaaaaaaaaaaaaaaaaaaaaaaaaaaaaaaaaaaaaaaaaaaaaaaaaaaaaaaaaaaaugcaucccccccccccccccccccccccccccccccaaaggcucuuuucagagccaccagaauu

SEQ ID NO: 1498 - RNA, 1342 nt, Artificial Sequence
  mRNA Design i-3 (A64-N5-C30-hSL-N5) comprising derived and/or modified sequence from Pf(3D7)__XP_001351122.1__Pf-CSP(1-374) (wt)
gggagaaagcuuaccaugaugagaaaauuagcuauuuuaucuguuucuuccuuuuuauuuguugaggccuuauuccaggaauaccagugcuauggaaguucgucaaacacaaggguucuaaaugaauuaaauuaugauaaugcaggcacuaauuuauauaaugaauuagaaaugaauuauuaugggaaacaggaaaauugguauagucuuaaaaaaaauaguagaucacuuggagaaaaugaugauggaaauaacgaagacaacgagaaauuaaggaaaccaaaacauaaaaaauuaaagcaaccagcggaugguaauccugauccaaaugcaaacccaaauguagaucccaaugccaacccaaauguagauccaaaugcaaacccaaauguagauccaaaugcaaacccaaaugcaaacccaaaugcaaacccaaaugcaaacccaaaugcaaacccaaaugcaaacccaaaugcaaacccaaaugcaaacccaaaugcaaacccaaaugcaaacccaaaugcaaacccaaaugcaaacccaaaugcaaacccaaaugcaaaccccaaugcaaauccuaaugcaaacccaaaugcaaacccaaacguagauccuaaugcaaauccaaaugcaaacccaaacgcaaaccccaaugcaaauccuaaugcaaaccccaaugcaaauccuaaugcaaauccuaaugccaauccaaaugcaaauccaaaugcaaacccaaacgcaaaccccaaugcaaauccuaaugccaauccaaaugcaaauccaaaugcaaacccaaaugcaaacccaaaugcaaaccccaaugcaaauccuaauaaaaacaaucaagguaauggacaaggucacaauaugccaaaugacccaaaccgaaauguagaugaaaaugcuaaugccaacagugcuguaaaaaauaauaauaacgaagaaccaagugauaagcacauaaaagaauauuuaaacaaaauacaaaauucucuuucaacugaaugguccccauguaguguaacuuguggaaaugguauucaaguuagaauaaagccuggcucugcuaauaaaccuaaagacgaauuagauuaugcaaaugauauugaaaaaaaaauuuguaaaauggaaaaauguugaggacuaguuauaagacugacuagcccgaugggccucccaacgggcccuccuccccuccuugcaccgagauuaauaaaaaaaaaaaaaaaaaaaaaaaaaaaaaaaaaaaaaaaaaaaaaaaaaaaaaaaaaaaaaaaaugcaucccccccccccccccccccccccccccccccaaaggcucuuuucagagccaccagaauu

SEQ ID NO: 1499 - RNA, 1195 nt, Artificial Sequence
  mRNA Design i-3 (A64-N5-C30-hSL-N5) comprising derived and/or modified sequence from Pf(3D7)__XP_001351122.1__Pf-CSP(1-325) (wt)
gggagaaagcuuaccaugaugagaaaauuagcuauuuuaucuguuucuuccuuuuuauuuguugaggccuuauuccaggaauaccagugcuauggaaguucgucaaacacaaggguucuaaaugaauuaaauuaugauaaugcaggcacuaauuuauauaaugaauuagaaaugaauuauuaugggaaacaggaaaauugguauagucuuaaaaaaaauaguagaucacuuggagaaaaugaugauggaaauaacgaagacaacgagaaauuaaggaaaccaaaacauaaaaaauuaaagcaaccagcggaugguaauccugauccaaaugcaaacccaaauguagaucccaaugccaacccaaauguagauccaaaugcaaacccaaauguagauccaaaugcaaacccaaaugcaaacccaaaugcaaacccaaaugcaaacccaaaugcaaacccaaaugcaaacccaaaugcaaacccaaaugcaaacccaaaugcaaacccaaaugcaaacccaaaugcaaacccaaaugcaaacccaaaugcaaacccaaaugcaaaccccaaugcaaauccuaaugcaaacccaaaugcaaacccaaacguagauccuaaugcaaauccaaaugcaaacccaaacgcaaaccccaaugcaaauccuaaugcaaaccccaaugcaaauccuaaugcaaauccuaaugccaauccaaaugcaaauccaaaugcaaacccaaacgcaaaccccaaugcaaauccuaaugccaauccaaaugcaaauccaaaugcaaacccaaaugcaaacccaaaugcaaaccccaaugcaaauccuaauaaaaacaaucaagguaauggacaaggucacaauaugccaaaugacccaaaccgaaauguagaugaaaaugcuaaugccaacagugcuguaaaaaauaauaauaacgaagaaccaagugauaagcacauaaaagaauauuuaaacaaaauacaaaauugaggacuaguuauaagacugacuagcccgaugggccucccaacgggcccuccuccccuccuugcaccgagauuaauaaaaaaaaaaaaaaaaaaaaaaaaaaaaaaaaaaaaaaaaaaaaaaaaaaaaaaaaaaaaaaaaugcaucccccccccccccccccccccccccccccccaaaggcucuuuucagagccaccagaauu

SEQ ID NO: 1500 - RNA, 1240 nt, Artificial Sequence
  mRNA Design i-3 (A64-N5-C30-hSL-N5) comprising derived and/or modified sequence from Pb(ANKA)__XP_022712148.1__Pb-CSP (wt)
gggagaaagcuuaccaugaagaaguguaccauuuuaguuguagcgucacuuuuauuaguuaauucucuacuuccaggauauggacaaaauaaaagcauccaagcccaaaggaacuuaaacgagcuauguuacaaugaaggaaaugauaauaaauuguaucacgugcuuaacucuaagaauggaaaaauauacaaucgaaauacagucaacagauuacuugccgaugcucccgaaggaaaaaaaaaugagaaaaaaaacgaaaaaauagagcguaauaauaaauugaaacaaccaccaccaccaccaaacccaaaugacccaccaccaccaaacccaaaugacccaccaccaccaaacccaaaugacccaccaccaccaaacccaaaugacccaccaccaccaaacgcaaaugacccaccaccaccaaacgcaaaugacccagcaccaccaaacgcaaaugacccagcaccaccaaacgcaaaugacccagcaccaccaaacgcaaaugacccagcaccaccaaacgcaaaugacccaccaccaccaaacccaaaugacccagcaccaccaaacgcaaaugacccaccaccaccaaacccaaaugacccagcaccaccacaaggaaauaacaauccacaaccacagccacggccgcagccacaaccacagccacagccacaaccacagccacagccacaaccacagccacgaccacagccacaaccacagccaggugguaauaacaauaacaaaaauaauaauaaugacgauucuuauaucccaagcgcggaaaaaauacuagaauuuguuaaacagaucagggauaguaucacagaggaauggucucaauguaacguaacaugugguucugguauaagaguuagaaaacgaaaagguucaaauaagaaagcagaagauuugaccuuagaagauauugauacugaaauuuguaaaauggauaaauguucaaguauauuuaauauuguaagcaauucauuaggauuuguaauauuauuaguauuaguauucuuuaauuaaggacuaguuauaagacugacuagcccgaugggccucccaacgggcccuccuccccuccuugcaccgagauuaauaaaaaaaaaaaaaaaaaaaaaaaaaaaaaaaaaaaaaaaaaaaaaaaaaaaaaaaaaaaaaaaaugcaucccccccccccccccccccccccccccccccaaaggcucuuuucagagccaccagaauu

SEQ ID NO: 1501 - RNA, 1411 nt, Artificial Sequence
  mRNA Design i-3 (A64-N5-C30-hSL-N5) comprising derived and/or modified sequence from Pf(3D7)__XP_001351122.1__Pf-CSP (opt1)
gggagaaagcuuaccaugaugcgcaagcuggccauccucagcguguccagcuuccuguucgucgaggcccuguuccaggaguaccagugcuacggcuccagcuccaacacccgggugcucaacgagcugaacuacgacaacgcggggaccaaccuguacaacgagcucgagaugaacuacuacggcaagcaggagaacugguacagccugaagaagaacucccgcagccugggggagaacgacgacggcaacaacgaggacaacgagaagcuccggaagcccaagcacaagaagcugaagcagccggccgacgggaaccccgaccccaacgccaaccccaacguggacccgaacgccaaccccaacgucgaccccaacgccaaccccaacguggacccgaacgcgaaccccaacgccaaccccaacgccaaccccaacgccaacccgaacgcgaaccccaacgccaaccccaacgccaaccccaacgccaacccgaacgccaaccccaacgcgaaccccaacgccaaccccaacgccaacccgaacgccaaccccaacgccaaccccaacgcgaaccccaacgccaacccgaacgccaaccccaacguggaccccaacgccaaccccaacgccaacccgaacgcgaaccccaacgccaaccccaacgccaacccgaacgccaaccccaacgccaaccccaacgcgaaccccaacgccaacccgaacgccaaccccaacgccaaccccaacgcgaaccccaacgccaacccgaacgccaaccccaacgccaaccccaacgccaaccccaacgcgaacccgaacgccaaccccaacaagaacaaccagggcaacggccaggggcacaacaugcccaacgaccccaaccgcaacgucgacgagaacgccaacgccaacuccgccgugaagaacaacaacaacgaggagccgagcgacaagcacaucaaggaguaccugaacaagauccagaacucccucagcacggaguggucccccugcagcgugaccugcggcaacgggauccagguccggaucaagcccggcuccgcgaacaagcccaaggacgagcuggacuacgccaacgacaucgagaagaagaucugcaagauggagaagugcagcuccguguucaacguggucaacagcuccaucgggcugaucauggugcucagcuuccuguuccugaacugaggacuaguuauaagacugacuagcccgaugggccucccaacgggcccuccuccccuccuugcaccgagauuaauaaaaaaaaaaaaaaaaaaaaaaaaaaaaaaaaaaaaaaaaaaaaaaaaaaaaaaaaaaaaaaaaugcaucccccccccccccccccccccccccccccccaaaggcucuuuucagagccaccagaauu

SEQ ID NO: 1502 - RNA, 1342 nt, Artificial Sequence
  mRNA Design i-3 (A64-N5-C30-hSL-N5) comprising derived and/or modified sequence from Pf(3D7)__XP_001351122.1__Pf-CSP(1-374) (opt1)
gggagaaagcuuaccaugaugcgcaagcuggccauccucagcguguccagcuuccuguucgucgaggcccuguuccaggaguaccagugcuacggcuccagcuccaacacccgggugcucaacgagcugaacuacgacaacgcggggaccaaccuguacaacgagcucgagaugaacuacuacggcaagcaggagaacugguacagccugaagaagaacucccgcagccugggggagaacgacgacggcaacaacgaggacaacgagaagcuccggaagcccaagcacaagaagcugaagcagccggccgacgggaaccccgaccccaacgccaaccccaacguggacccgaacgccaaccccaacgucgaccccaacgccaaccccaacguggacccgaacgcgaaccccaacgccaaccccaacgccaaccccaacgccaacccgaacgcgaaccccaacgccaaccccaacgccaaccccaacgccaacccgaacgccaaccccaacgcgaaccccaacgccaaccccaacgccaacccgaacgccaaccccaacgccaaccccaacgcgaaccccaacgccaacccgaacgccaaccccaacguggaccccaacgccaaccccaacgccaacccgaacgcgaaccccaacgccaaccccaacgccaacccgaacgccaaccccaacgccaaccccaacgcgaaccccaacgccaacccgaacgccaaccccaacgccaaccccaacgcgaaccccaacgccaacccgaacgccaaccccaacgccaaccccaacgccaaccccaacgcgaacccgaacgccaaccccaacaagaacaaccagggcaacggccaggggcacaacaugcccaacgaccccaaccgcaacgucgacgagaacgccaacgccaacuccgccgugaagaacaacaacaacgaggagccgagcgacaagcacaucaaggaguaccugaacaagauccagaacucccucagcacggaguggucccccugcagcgugaccugcggcaacgggauccagguccggaucaagcccggcuccgcgaacaagcccaaggacgagcuggacuacgccaacgacaucgagaagaagaucugcaagauggagaagugcugaggacuaguuauaagacugacuagcccgaugggccucccaacgggcccuccuccccuccuugcaccgagauuaauaaaaaaaaaaaaaaaaaaaaaaaaaaaaaaaaaaaaaaaaaaaaaaaaaaaaaaaaaaaaaaaaugcaucccccccccccccccccccccccccccccccaaaggcucuuuucagagccaccagaauu

SEQ ID NO: 1503 - RNA, 1195 nt, Artificial Sequence
  mRNA Design i-3 (A64-N5-C30-hSL-N5) comprising derived and/or modified sequence from Pf(3D7)__XP_001351122.1__Pf-CSP(1-325) (opt1)
gggagaaagcuuaccaugaugcgcaagcuggccauccucagcguguccagcuuccuguucgucgaggcccuguuccaggaguaccagugcuacggcuccagcuccaacacccgggugcucaacgagcugaacuacgacaacgcggggaccaaccuguacaacgagcucgagaugaacuacuacggcaagcaggagaacugguacagccugaagaagaacucccgcagccugggggagaacgacgacggcaacaacgaggacaacgagaagcuccggaagcccaagcacaagaagcugaagcagccggccgacgggaaccccgaccccaacgccaaccccaacguggacccgaacgccaaccccaacgucgaccccaacgccaaccccaacguggacccgaacgcgaaccccaacgccaaccccaacgccaaccccaacgccaacccgaacgcgaaccccaacgccaaccccaacgccaaccccaacgccaacccgaacgccaaccccaacgcgaaccccaacgccaaccccaacgccaacccgaacgccaaccccaacgccaaccccaacgcgaaccccaacgccaacccgaacgccaaccccaacguggaccccaacgccaaccccaacgccaacccgaacgcgaaccccaacgccaaccccaacgccaacccgaacgccaaccccaacgccaaccccaacgcgaaccccaacgccaacccgaacgccaaccccaacgccaaccccaacgcgaaccccaacgccaacccgaacgccaaccccaacgccaaccccaacgccaaccccaacgcgaacccgaacgccaaccccaacaagaacaaccagggcaacggccaggggcacaacaugcccaacgaccccaaccgcaacgucgacgagaacgccaacgccaacuccgccgugaagaacaacaacaacgaggagccgagcgacaagcacaucaaggaguaccugaacaagauccagaacugaggacuaguuauaagacugacuagcccgaugggccucccaacgggcccuccuccccuccuugcaccgagauuaauaaaaaaaaaaaaaaaaaaaaaaaaaaaaaaaaaaaaaaaaaaaaaaaaaaaaaaaaaaaaaaaaugcaucccccccccccccccccccccccccccccccaaaggcucuuuucagagccaccagaauu

SEQ ID NO: 1504 - RNA, 1411 nt, Artificial Sequence
  mRNA Design i-3 (A64-N5-C30-hSL-N5) comprising derived and/or modified sequence from Pf(3D7)__XP_001351122.1__HsALB_Pf-CSP(19-397) (opt1)
gggagaaagcuuaccaugaagugggugaccuucaucagccugcucuuccuguucuccagcgccuacucccuguuccaggaguaccagugcuacggcuccagcuccaacacccgggugcucaacgagcugaacuacgacaacgcggggaccaaccuguacaacgagcucgagaugaacuacuacggcaagcaggagaacugguacagccugaagaagaacucccgcagccugggggagaacgacgacggcaacaacgaggacaacgagaagcuccggaagcccaagcacaagaagcugaagcagccggccgacgggaaccccgaccccaacgccaaccccaacguggacccgaacgccaaccccaacgucgaccccaacgccaaccccaacguggacccgaacgcgaaccccaacgccaaccccaacgccaaccccaacgccaacccgaacgcgaaccccaacgccaaccccaacgccaaccccaacgccaacccgaacgccaaccccaacgcgaaccccaacgccaaccccaacgccaacccgaacgccaaccccaacgccaaccccaacgcgaaccccaacgccaacccgaacgccaaccccaacguggaccccaacgccaaccccaacgccaacccgaacgcgaaccccaacgccaaccccaacgccaacccgaacgccaaccccaacgccaaccccaacgcgaaccccaacgccaacccgaacgccaaccccaacgccaaccccaacgcgaaccccaacgccaacccgaacgccaaccccaacgccaaccccaacgccaaccccaacgcgaacccgaacgccaaccccaacaagaacaaccagggcaacggccaggggcacaacaugcccaacgaccccaaccgcaacgucgacgagaacgccaacgccaacuccgccgugaagaacaacaacaacgaggagccgagcgacaagcacaucaaggaguaccugaacaagauccagaacucccucagcacggaguggucccccugcagcgugaccugcggcaacgggauccagguccggaucaagcccggcuccgcgaacaagcccaaggacgagcuggacuacgccaacgacaucgagaagaagaucugcaagauggagaagugcagcuccguguucaacguggucaacagcuccaucgggcugaucauggugcucagcuuccuguuccugaacugaggacuaguuauaagacugacuagcccgaugggccucccaacgggcccuccuccccuccuugcaccgagauuaauaaaaaaaaaaaaaaaaaaaaaaaaaaaaaaaaaaaaaaaaaaaaaaaaaaaaaaaaaaaaaaaaugcaucccccccccccccccccccccccccccccccaaaggcucuuuucagagccaccagaauu

SEQ ID NO: 1505 - RNA, 1429 nt, Artificial Sequence
  mRNA Design i-3 (A64-N5-C30-hSL-N5) comprising derived and/or modified sequence from Pf(3D7)__XP_001351122.1__HsIns-iso1_Pf-CSP(19-397) (opt1)
gggagaaagcuuaccauggcccuguggaugcgccuccugccccugcucgcccugcuggcgcucuggggcccggaccccgccgccgcccuguuccaggaguaccagugcuacggcuccagcuccaacacccgggugcucaacgagcugaacuacgacaacgcggggaccaaccuguacaacgagcucgagaugaacuacuacggcaagcaggagaacugguacagccugaagaagaacucccgcagccugggggagaacgacgacggcaacaacgaggacaacgagaagcuccggaagcccaagcacaagaagcugaagcagccggccgacgggaaccccgaccccaacgccaaccccaacguggacccgaacgccaaccccaacgucgaccccaacgccaaccccaacguggacccgaacgcgaaccccaacgccaaccccaacgccaaccccaacgccaacccgaacgcgaaccccaacgccaaccccaacgccaaccccaacgccaacccgaacgccaaccccaacgcgaaccccaacgccaaccccaacgccaacccgaacgccaaccccaacgccaaccccaacgcgaaccccaacgccaacccgaacgccaaccccaacguggaccccaacgccaaccccaacgccaacccgaacgcgaaccccaacgccaaccccaacgccaacccgaacgccaaccccaacgccaaccccaacgcgaaccccaacgccaacccgaacgccaaccccaacgccaaccccaacgcgaaccccaacgccaacccgaacgccaaccccaacgccaaccccaacgccaaccccaacgcgaacccgaacgccaaccccaacaagaacaaccagggcaacggccaggggcacaacaugcccaacgaccccaaccgcaacgucgacgagaacgccaacgccaacuccgccgugaagaacaacaacaacgaggagccgagcgacaagcacaucaaggaguaccugaacaagauccagaacucccucagcacggaguggucccccugcagcgugaccugcggcaacgggauccagguccggaucaagcccggcuccgcgaacaagcccaaggacgagcuggacuacgccaacgacaucgagaagaagaucugcaagauggagaagugcagcuccguguucaacguggucaacagcuccaucgggcugaucauggugcucagcuuccuguuccugaacugaggacuaguuauaagacugacuagcccgaugggccucccaacgggcccuccuccccuccuugcaccgagauuaauaaaaaaaaaaaaaaaaaaaaaaaaaaaaaaaaaaaaaaaaaaaaaaaaaaaaaaaaaaaaaaaaugcaucccccccccccccccccccccccccccccccaaaggcucuuuucagagccaccagaauu

SEQ ID NO: 1506 - RNA, 1408 nt, Artificial Sequence
  mRNA Design i-3 (A64-N5-C30-hSL-N5) comprising derived and/or modified sequence from Pf(3D7)__XP_001351122.1__HsSPARC_Pf-CSP(19-397) (opt1)
gggagaaagcuuaccaugcgcgccuggaucuucuuccugcucugccuggccggccgggcccuggcccuguuccaggaguaccagugcuacggcuccagcuccaacacccgggugcucaacgagcugaacuacgacaacgcggggaccaaccuguacaacgagcucgagaugaacuacuacggcaagcaggagaacugguacagccugaagaagaacucccgcagccugggggagaacgacgacggcaacaacgaggacaacgagaagcuccggaagcccaagcacaagaagcugaagcagccggccgacgggaaccccgaccccaacgccaaccccaacguggacccgaacgccaaccccaacgucgaccccaacgccaaccccaacguggacccgaacgcgaaccccaacgccaaccccaacgccaaccccaacgccaacccgaacgcgaaccccaacgccaaccccaacgccaaccccaacgccaacccgaacgccaaccccaacgcgaaccccaacgccaaccccaacgccaacccgaacgccaaccccaacgccaaccccaacgcgaaccccaacgccaacccgaacgccaaccccaacguggaccccaacgccaaccccaacgccaacccgaacgcgaaccccaacgccaaccccaacgccaacccgaacgccaaccccaacgccaaccccaacgcgaaccccaacgccaacccgaacgccaaccccaacgccaaccccaacgcgaaccccaacgccaacccgaacgccaaccccaacgccaaccccaacgccaaccccaacgcgaacccgaacgccaaccccaacaagaacaaccagggcaacggccaggggcacaacaugcccaacgaccccaaccgcaacgucgacgagaacgccaacgccaacuccgccgugaagaacaacaacaacgaggagccgagcgacaagcacaucaaggaguaccugaacaagauccagaacucccucagcacggaguggucccccugcagcgugaccugcggcaacgggauccagguccggaucaagcccggcuccgcgaacaagcccaaggacgagcuggacuacgccaacgacaucgagaagaagaucugcaagauggagaagugcagcuccguguucaacguggucaacagcuccaucgggcugaucauggugcucagcuuccuguuccugaacugaggacuaguuauaagacugacuagcccgaugggccucccaacgggcccuccuccccuccuugcaccgagauuaauaaaaaaaaaaaaaaaaaaaaaaaaaaaaaaaaaaaaaaaaaaaaaaaaaaaaaaaaaaaaaaaaugcaucccccccccccccccccccccccccccccccaaaggcucuuuucagagccaccagaauu

SEQ ID NO: 1507 - RNA, 1411 nt, Artificial Sequence
  mRNA Design i-3 (A64-N5-C30-hSL-N5) comprising derived and/or modified sequence from Pf(3D7)__XP_001351122.1__IgE_Pf-CSP(19-397) (opt1)
gggagaaagcuuaccauggacuggaccuggauccuguuccucguggccgccgcgacccgcguccacagccuguuccaggaguaccagugcuacggcuccagcuccaacacccgggugcucaacgagcugaacuacgacaacgcggggaccaaccuguacaacgagcucgagaugaacuacuacggcaagcaggagaacugguacagccugaagaagaacucccgcagccugggggagaacgacgacggcaacaacgaggacaacgagaagcuccggaagcccaagcacaagaagcugaagcagccggccgacgggaaccccgaccccaacgccaaccccaacguggacccgaacgccaaccccaacgucgaccccaacgccaaccccaacguggacccgaacgcgaaccccaacgccaaccccaacgccaaccccaacgccaacccgaacgcgaaccccaacgccaaccccaacgccaaccccaacgccaacccgaacgccaaccccaacgcgaaccccaacgccaaccccaacgccaacccgaacgccaaccccaacgccaaccccaacgcgaaccccaacgccaacccgaacgccaaccccaacguggaccccaacgccaaccccaacgccaacccgaacgcgaaccccaacgccaaccccaacgccaacccgaacgccaaccccaacgccaaccccaacgcgaaccccaacgccaacccgaacgccaaccccaacgccaaccccaacgcgaaccccaacgccaacccgaacgccaaccccaacgccaaccccaacgccaaccccaacgcgaacccgaacgccaaccccaacaagaacaaccagggcaacggccaggggcacaacaugcccaacgaccccaaccgcaacgucgacgagaacgccaacgccaacuccgccgugaagaacaacaacaacgaggagccgagcgacaagcacaucaaggaguaccugaacaagauccagaacucccucagcacggaguggucccccugcagcgugaccugcggcaacgggauccagguccggaucaagcccggcuccgcgaacaagcccaaggacgagcuggacuacgccaacgacaucgagaagaagaucugcaagauggagaagugcagcuccguguucaacguggucaacagcuccaucgggcugaucauggugcucagcuuccuguuccugaacugaggacuaguuauaagacugacuagcccgaugggccucccaacgggcccuccuccccuccuugcaccgagauuaauaaaaaaaaaaaaaaaaaaaaaaaaaaaaaaaaaaaaaaaaaaaaaaaaaaaaaaaaaaaaaaaaugcaucccccccccccccccccccccccccccccccaaaggcucuuuucagagccaccagaauu

SEQ ID NO: 1508 - RNA, 1576 nt, Artificial Sequence
  mRNA Design i-3 (A64-N5-C30-hSL-N5) comprising derived and/or modified sequence from Pf(3D7)__XP_001351122.1__Pf-CSP_L(G4SG4)_TM domain HA (opt1)
gggagaaagcuuaccaugaugcgcaagcuggccauccucagcguguccagcuuccuguucgucgaggcccuguuccaggaguaccagugcuacggcuccagcuccaacacccgggugcucaacgagcugaacuacgacaacgcggggaccaaccuguacaacgagcucgagaugaacuacuacggcaagcaggagaacugguacagccugaagaagaacucccgcagccugggggagaacgacgacggcaacaacgaggacaacgagaagcuccggaagcccaagcacaagaagcugaagcagccggccgacgggaaccccgaccccaacgccaaccccaacguggacccgaacgccaaccccaacgucgaccccaacgccaaccccaacguggacccgaacgcgaaccccaacgccaaccccaacgccaaccccaacgccaacccgaacgcgaaccccaacgccaaccccaacgccaaccccaacgccaacccgaacgccaaccccaacgcgaaccccaacgccaaccccaacgccaacccgaacgccaaccccaacgccaaccccaacgcgaaccccaacgccaacccgaacgccaaccccaacguggaccccaacgccaaccccaacgccaacccgaacgcgaaccccaacgccaaccccaacgccaacccgaacgccaaccccaacgccaaccccaacgcgaaccccaacgccaacccgaacgccaaccccaacgccaaccccaacgcgaaccccaacgccaacccgaacgccaaccccaacgccaaccccaacgccaaccccaacgcgaacccgaacgccaaccccaacaagaacaaccagggcaacggccaggggcacaacaugcccaacgaccccaaccgcaacgucgacgagaacgccaacgccaacuccgccgugaagaacaacaacaacgaggagccgagcgacaagcacaucaaggaguaccugaacaagauccagaacucccucagcacggaguggucccccugcagcgugaccugcggcaacgggauccagguccggaucaagcccggcuccgcgaacaagcccaaggacgagcuggacuacgccaacgacaucgagaagaagaucugcaagauggagaagugcagcuccguguucaacguggucaacagcuccaucgggcugaucauggugcucagcuuccuguuccugaacggcgggggcgggagcggcgggggcggcaagcucgaguccacgcggaucuaccagauccuggcgaucuacagcaccgucgccagcucccuggugcucguggucagccugggggccaucuccuucuggaugugcagcaacggcucccugcagugccgcaucugcaucugaggacuaguuauaagacugacuagcccgaugggccucccaacgggcccuccuccccuccuugcaccgagauuaauaaaaaaaaaaaaaaaaaaaaaaaaaaaaaaaaaaaaaaaaaaaaaaaaaaaaaaaaaaaaaaaaugcaucccccccccccccccccccccccccccccccaaaggcucuuuucagagccaccagaauu

SEQ ID NO: 1509 - RNA, 1450 nt, Artificial Sequence
  mRNA Design i-3 (A64-N5-C30-hSL-N5) comprising derived and/or modified sequence from Pf(3D7)__XP_001351122.1__Pf-CSP(199-377)_L(PVTN)_HBsAg (opt1)
gggagaaagcuuaccauggaccccaacgccaaccccaacgccaacccgaacgcgaaccccaacgccaaccccaacgccaacccgaacgccaaccccaacgccaaccccaacgcgaaccccaacgccaacccgaacgccaaccccaacgccaaccccaacgcgaaccccaacgccaacccgaacgccaaccccaacgccaaccccaacgccaaccccaacgcgaacccgaacgccaaccccaacaagaacaaccagggcaacggccaggggcacaacaugcccaacgaccccaaccgcaacgucgacgagaacgccaacgccaacuccgccgugaagaacaacaacaacgaggagccgagcgacaagcacaucaaggaguaccugaacaagauccagaacucccucagcacggaguggucccccugcagcgugaccugcggcaacgggauccagguccggaucaagcccggcuccgcgaacaagcccaaggacgagcuggacuacgccaacgacaucgagaagaagaucugcaagauggagaagugcagcuccgugccggugacgaacauggagaacaucaccagcggcuuccuggggccccuccuggugcugcaggccggcuucuuccuccugacccgcauccugaccaucccgcagucccucgacagcugguggaccucccugaacuuccucgggggcagccccgucugccuggggcagaacucccagagccccaccuccaaccacagccccaccuccugcccgcccaucugccccggcuaccgguggaugugccugcgccgguucaucaucuuccuguucauccuccugcugugccucaucuuccugcuggugcuccuggacuaccagggcaugcugcccgugugcccgcucauccccgggagcacgaccaccaacaccggccccugcaagacgugcaccacccccgcccaggggaacuccauguucccgagcugcugcugcaccaagcccacggacggcaacugcacgugcauccccauccccuccagcugggcguucgccaaguaccugugggagugggccuccguccgcuucagcuggcugucccuccuggugccguucgugcagugguucgucgggcugagccccaccguguggcucuccgccaucuggaugaugugguacuggggccccagccuguacagcaucgugucccccuucaucccgcugcuccccaucuucuucugccugugggucuacaucugaggacuaguuauaagacugacuagcccgaugggccucccaacgggcccuccuccccuccuugcaccgagauuaauaaaaaaaaaaaaaaaaaaaaaaaaaaaaaaaaaaaaaaaaaaaaaaaaaaaaaaaaaaaaaaaaugcaucccccccccccccccccccccccccccccccaaaggcucuuuucagagccaccagaauu

SEQ ID NO: 1510 - RNA, 1492 nt, Artificial Sequence
  mRNA Design i-3 (A64-N5-C30-hSL-N5) comprising derived and/or modified sequence from Pf(3D7)__XP_001351122.1__Pf-CSP(199-387)_L(PVTN)_HBsAg (opt1)
gggagaaagcuuaccaugauggccccggaccccaacgccaaccccaacgccaacccgaacgcgaaccccaacgccaaccccaacgccaacccgaacgccaaccccaacgccaaccccaacgcgaaccccaacgccaacccgaacgccaaccccaacgccaaccccaacgcgaaccccaacgccaacccgaacgccaaccccaacgccaaccccaacgccaaccccaacgcgaacccgaacgccaaccccaacaagaacaaccagggcaacggccaggggcacaacaugcccaacgaccccaaccgcaacgucgacgagaacgccaacgccaacuccgccgugaagaacaacaacaacgaggagccgagcgacaagcacaucaaggaguaccugaacaagauccagaacucccucagcacggaguggucccccugcagcgugaccugcggcaacgggauccagguccggaucaagcccggcuccgcgaacaagcccaaggacgagcuggacuacgccaacgacaucgagaagaagaucugcaagauggagaagugcagcuccguguucaacguggucaacagcuccaucgggcuggggccggugacgaacauggagaacaucaccagcggcuuccuggggccccuccuggugcugcaggccggcuucuuccuccugacccgcauccugaccaucccgcagucccucgacagcugguggaccucccugaacuuccucgggggcagccccgucugccuggggcagaacucccagagccccaccuccaaccacagccccaccuccugcccgcccaucugccccggcuaccgguggaugugccugcgccgguucaucaucuuccuguucauccuccugcugugccucaucuuccugcuggugcuccuggacuaccagggcaugcugcccgugugcccgcucauccccgggagcacgaccaccaacaccggccccugcaagacgugcaccacccccgcccaggggaacuccauguucccgagcugcugcugcaccaagcccacggacggcaacugcacgugcauccccauccccuccagcugggcguucgccaaguaccugugggagugggccuccguccgcuucagcuggcugucccuccuggugccguucgugcagugguucgucgggcugagccccaccguguggcucuccgccaucuggaugaugugguacuggggccccagccuguacagcaucgugucccccuucaucccgcugcuccccaucuucuucugccugugggucuacaucugaggacuaguuauaagacugacuagcccgaugggccucccaacgggcccuccuccccuccuugcaccgagauuaauaaaaaaaaaaaaaaaaaaaaaaaaaaaaaaaaaaaaaaaaaaaaaaaaaaaaaaaaaaaaaaaaugcaucccccccccccccccccccccccccccccccaaaggcucuuuucagagccaccagaauu

SEQ ID NO: 1511 - RNA, 676 nt, Artificial Sequence
  mRNA Design i-3 (A64-N5-C30-hSL-N5) comprising derived and/or modified sequence from Pf(3D7)__XP_001351122.1__HsALB_Pf-CSP(19-152) (opt1)
gggagaaagcuuaccaugaagugggugaccuucaucagccugcucuuccuguucuccagcgccuacucccuguuccaggaguaccagugcuacggcuccagcuccaacacccgggugcucaacgagcugaacuacgacaacgcggggaccaaccuguacaacgagcucgagaugaacuacuacggcaagcaggagaacugguacagccugaagaagaacucccgcagccugggggagaacgacgacggcaacaacgaggacaacgagaagcuccggaagcccaagcacaagaagcugaagcagccggccgacgggaaccccgaccccaacgccaaccccaacguggacccgaacgccaaccccaacgucgaccccaacgccaaccccaacguggacccgaacgcgaaccccaacgccaaccccaacgccaaccccaacgccaacccgaacgcgaaccccaacgccaaccccugaggacuaguuauaagacugacuagcccgaugggccucccaacgggcccuccuccccuccuugcaccgagauuaauaaaaaaaaaaaaaaaaaaaaaaaaaaaaaaaaaaaaaaaaaaaaaaaaaaaaaaaaaaaaaaaaugcaucccccccccccccccccccccccccccccccaaaggcucuuuucagagccaccagaauu

SEQ ID NO: 1512 - RNA, 796 nt, Artificial Sequence
  mRNA Design i-3 (A64-N5-C30-hSL-N5) comprising derived and/or modified sequence from Pf(3D7)__XP_001351122.1__HsALB_Pf-CSP(19-192) (opt1)
gggagaaagcuuaccaugaagugggugaccuucaucagccugcucuuccuguucuccagcgccuacucccuguuccaggaguaccagugcuacggcuccagcuccaacacccgggugcucaacgagcugaacuacgacaacgcggggaccaaccuguacaacgagcucgagaugaacuacuacggcaagcaggagaacugguacagccugaagaagaacucccgcagccugggggagaacgacgacggcaacaacgaggacaacgagaagcuccggaagcccaagcacaagaagcugaagcagccggccgacgggaaccccgaccccaacgccaaccccaacguggacccgaacgccaaccccaacgucgaccccaacgccaaccccaacguggacccgaacgcgaaccccaacgccaaccccaacgccaaccccaacgccaacccgaacgcgaaccccaacgccaaccccaacgccaaccccaacgccaacccgaacgccaaccccaacgcgaaccccaacgccaaccccaacgccaacccgaacgccaaccccaacgccaaccccaacgcgaaccccaacgccaacccgugaggacuaguuauaagacugacuagcccgaugggccucccaacgggcccuccuccccuccuugcaccgagauuaauaaaaaaaaaaaaaaaaaaaaaaaaaaaaaaaaaaaaaaaaaaaaaaaaaaaaaaaaaaaaaaaaugcaucccccccccccccccccccccccccccccccaaaggcucuuuucagagccaccagaauu

SEQ ID NO: 1513 - RNA, 1036 nt, Artificial Sequence
  mRNA Design i-3 (A64-N5-C30-hSL-N5) comprising derived and/or modified sequence from Pf(3D7)__XP_001351122.1__HsALB_Pf-CSP(19-272) (opt1)
gggagaaagcuuaccaugaagugggugaccuucaucagccugcucuuccuguucuccagcgccuacucccuguuccaggaguaccagugcuacggcuccagcuccaacacccgggugcucaacgagcugaacuacgacaacgcggggaccaaccuguacaacgagcucgagaugaacuacuacggcaagcaggagaacugguacagccugaagaagaacucccgcagccugggggagaacgacgacggcaacaacgaggacaacgagaagcuccggaagcccaagcacaagaagcugaagcagccggccgacgggaaccccgaccccaacgccaaccccaacguggacccgaacgccaaccccaacgucgaccccaacgccaaccccaacguggacccgaacgcgaaccccaacgccaaccccaacgccaaccccaacgccaacccgaacgcgaaccccaacgccaaccccaacgccaaccccaacgccaacccgaacgccaaccccaacgcgaaccccaacgccaaccccaacgccaacccgaacgccaaccccaacgccaaccccaacgcgaaccccaacgccaacccgaacgccaaccccaacguggaccccaacgccaaccccaacgccaacccgaacgcgaaccccaacgccaaccccaacgccaacccgaacgccaaccccaacgccaaccccaacgcgaaccccaacgccaacccgaacgccaaccccaacgccaaccccaacgcgaaccccaacgccaacccgaacgccaaccccaacgccaaccccaacgccaaccccaacgcgaacccgaacgccaaccccugaggacuaguuauaagacugacuagcccgaugggccucccaacgggcccuccuccccuccuugcaccgagauuaauaaaaaaaaaaaaaaaaaaaaaaaaaaaaaaaaaaaaaaaaaaaaaaaaaaaaaaaaaaaaaaaaugcaucccccccccccccccccccccccccccccccaaaggcucuuuucagagccaccagaauu

SEQ ID NO: 1514 - RNA, 1198 nt, Artificial Sequence
  mRNA Design i-3 (A64-N5-C30-hSL-N5) comprising derived and/or modified sequence from Pf(3D7)__XP_001351122.1__HsALB_Pf-CSP(19-272)_L(AAY)_Pf-CSP(310-3 27)_L(AAY)_Pf-CSP(346-375) (opt1)
gggagaaagcuuaccaugaagugggugaccuucaucagccugcucuuccuguucuccagcgccuacucccuguuccaggaguaccagugcuacggcuccagcuccaacacccgggugcucaacgagcugaacuacgacaacgcggggaccaaccuguacaacgagcucgagaugaacuacuacggcaagcaggagaacugguacagccugaagaagaacucccgcagccugggggagaacgacgacggcaacaacgaggacaacgagaagcuccggaagcccaagcacaagaagcugaagcagccggccgacgggaaccccgaccccaacgccaaccccaacguggacccgaacgccaaccccaacgucgaccccaacgccaaccccaacguggacccgaacgcgaaccccaacgccaaccccaacgccaaccccaacgccaacccgaacgcgaaccccaacgccaaccccaacgccaaccccaacgccaacccgaacgccaaccccaacgcgaaccccaacgccaaccccaacgccaacccgaacgccaaccccaacgccaaccccaacgcgaaccccaacgccaacccgaacgccaaccccaacguggaccccaacgccaaccccaacgccaacccgaacgcgaaccccaacgccaaccccaacgccaacccgaacgccaaccccaacgccaaccccaacgcgaaccccaacgccaacccgaacgccaaccccaacgccaaccccaacgcgaaccccaacgccaacccgaacgccaaccccaacgccaaccccaacgccaaccccaacgcgaacccgaacgccaaccccgccgcguaugagccgagcgacaagcacaucaaggaguaccugaacaagauccagaacucccucgcggccuacaucaagcccggcuccgcgaacaagcccaaggacgagcuggacuacgccaacgacaucgagaagaagaucugcaagauggagaagugcagcugaggacuaguuauaagacugacuagcccgaugggccucccaacgggcccuccuccccuccuugcaccgagauuaauaaaaaaaaaaaaaaaaaaaaaaaaaaaaaaaaaaaaaaaaaaaaaaaaaaaaaaaaaaaaaaaaugcaucccccccccccccccccccccccccccccccaaaggcucuuuucagagccaccagaauu

SEQ ID NO: 1515 - RNA, 1159 nt, Artificial Sequence
  mRNA Design i-3 (A64-N5-C30-hSL-N5) comprising derived and/or modified sequence from Pf(3D7)__XP_001351122.1__HsALB_Pf-CSP(19-272)_L(AAY)_Pf-CSP(346-3 65)_L(AAY)_P2 (opt1)
gggagaaagcuuaccaugaagugggugaccuucaucagccugcucuuccuguucuccagcgccuacucccuguuccaggaguaccagugcuacggcuccagcuccaacacccgggugcucaacgagcugaacuacgacaacgcggggaccaaccuguacaacgagcucgagaugaacuacuacggcaagcaggagaacugguacagccugaagaagaacucccgcagccugggggagaacgacgacggcaacaacgaggacaacgagaagcuccggaagcccaagcacaagaagcugaagcagccggccgacgggaaccccgaccccaacgccaaccccaacguggacccgaacgccaaccccaacgucgaccccaacgccaaccccaacguggacccgaacgcgaaccccaacgccaaccccaacgccaaccccaacgccaacccgaacgcgaaccccaacgccaaccccaacgccaaccccaacgccaacccgaacgccaaccccaacgcgaaccccaacgccaaccccaacgccaacccgaacgccaaccccaacgccaaccccaacgcgaaccccaacgccaacccgaacgccaaccccaacguggaccccaacgccaaccccaacgccaacccgaacgcgaaccccaacgccaaccccaacgccaacccgaacgccaaccccaacgccaaccccaacgcgaaccccaacgccaacccgaacgccaaccccaacgccaaccccaacgcgaaccccaacgccaacccgaacgccaaccccaacgccaaccccaacgccaaccccaacgcgaacccgaacgccaaccccgccgcguauaucaagcccggcuccgcgaacaagcccaaggacgagcuggacuacgccaacgacaucgaggcggccuaccaguacaucaaggccaacagcaaguucaucggcaucaccgagcugugaggacuaguuauaagacugacuagcccgaugggccucccaacgggcccuccuccccuccuugcaccgagauuaauaaaaaaaaaaaaaaaaaaaaaaaaaaaaaaaaaaaaaaaaaaaaaaaaaaaaaaaaaaaaaaaaugcaucccccccccccccccccccccccccccccccaaaggcucuuuucagagccaccagaauu

SEQ ID NO: 1516 - RNA, 1153 nt, Artificial Sequence
  mRNA Design i-3 (A64-N5-C30-hSL-N5) comprising derived and/or modified sequence from Pf(3D7)__XP_001351122.1__HsALB_Pf-CSP(19-272)_L(AAY)_Pf-CSP(346-3 65)_L(AAY)_PADRE (opt1)
gggagaaagcuuaccaugaagugggugaccuucaucagccugcucuuccuguucuccagcgccuacucccuguuccaggaguaccagugcuacggcuccagcuccaacacccgggugcucaacgagcugaacuacgacaacgcggggaccaaccuguacaacgagcucgagaugaacuacuacggcaagcaggagaacugguacagccugaagaagaacucccgcagccugggggagaacgacgacggcaacaacgaggacaacgagaagcuccggaagcccaagcacaagaagcugaagcagccggccgacgggaaccccgaccccaacgccaaccccaacguggacccgaacgccaaccccaacgucgaccccaacgccaaccccaacguggacccgaacgcgaaccccaacgccaaccccaacgccaaccccaacgccaacccgaacgcgaaccccaacgccaaccccaacgccaaccccaacgccaacccgaacgccaaccccaacgcgaaccccaacgccaaccccaacgccaacccgaacgccaaccccaacgccaaccccaacgcgaaccccaacgccaacccgaacgccaaccccaacguggaccccaacgccaaccccaacgccaacccgaacgcgaaccccaacgccaaccccaacgccaacccgaacgccaaccccaacgccaaccccaacgcgaaccccaacgccaacccgaacgccaaccccaacgccaaccccaacgcgaaccccaacgccaacccgaacgccaaccccaacgccaaccccaacgccaaccccaacgcgaacccgaacgccaaccccgccgcguauaucaagcccggcuccgcgaacaagcccaaggacgagcuggacuacgccaacgacaucgaggcggccuacgccaaguucguggccgccuggacccugaaggcggccgccugaggacuaguuauaagacugacuagcccgaugggccucccaacgggcccuccuccccuccuugcaccgagauuaauaaaaaaaaaaaaaaaaaaaaaaaaaaaaaaaaaaaaaaaaaaaaaaaaaaaaaaaaaaaaaaaaugcaucccccccccccccccccccccccccccccccaaaggcucuuuucagagccaccagaauu

SEQ ID NO: 1517 - RNA, 1210 nt, Artificial Sequence
  mRNA Design i-3 (A64-N5-C30-hSL-N5) comprising derived and/or modified sequence from Pf(3D7)__XP_001351122.1__HsALB_Pf-CSP(19-272)_L(G4S)_Pf-CSP(310-3 27)_L(G4S)_Pf-CSP(346-375) (opt1)
gggagaaagcuuaccaugaagugggugaccuucaucagccugcucuuccuguucuccagcgccuacucccuguuccaggaguaccagugcuacggcuccagcuccaacacccgggugcucaacgagcugaacuacgacaacgcggggaccaaccuguacaacgagcucgagaugaacuacuacggcaagcaggagaacugguacagccugaagaagaacucccgcagccugggggagaacgacgacggcaacaacgaggacaacgagaagcuccggaagcccaagcacaagaagcugaagcagccggccgacgggaaccccgaccccaacgccaaccccaacguggacccgaacgccaaccccaacgucgaccccaacgccaaccccaacguggacccgaacgcgaaccccaacgccaaccccaacgccaaccccaacgccaacccgaacgcgaaccccaacgccaaccccaacgccaaccccaacgccaacccgaacgccaaccccaacgcgaaccccaacgccaaccccaacgccaacccgaacgccaaccccaacgccaaccccaacgcgaaccccaacgccaacccgaacgccaaccccaacguggaccccaacgccaaccccaacgccaacccgaacgcgaaccccaacgccaaccccaacgccaacccgaacgccaaccccaacgccaaccccaacgcgaaccccaacgccaacccgaacgccaaccccaacgccaaccccaacgcgaaccccaacgccaacccgaacgccaaccccaacgccaaccccaacgccaaccccaacgcgaacccgaacgccaaccccggaggcggaggaucugagccgagcgacaagcacaucaaggaguaccugaacaagauccagaacucccucggcggagguggaaguaucaagcccggcuccgcgaacaagcccaaggacgagcuggacuacgccaacgacaucgagaagaagaucugcaagauggagaagugcagcugaggacuaguuauaagacugacuagcccgaugggccucccaacgggcccuccuccccuccuugcaccgagauuaauaaaaaaaaaaaaaaaaaaaaaaaaaaaaaaaaaaaaaaaaaaaaaaaaaaaaaaaaaaaaaaaaugcaucccccccccccccccccccccccccccccccaaaggcucuuuucagagccaccagaauu

SEQ ID NO: 1518 - RNA, 1195 nt, Artificial Sequence
  mRNA Design i-3 (A64-N5-C30-hSL-N5) comprising derived and/or modified sequence from Pf(3D7)__XP_001351122.1__HsALB_Pf-CSP(19-272)_L(G4S)_Pf-CSP(310-3 27)_Pf-CSP(346-375) (opt1)
gggagaaagcuuaccaugaagugggugaccuucaucagccugcucuuccuguucuccagcgccuacucccuguuccaggaguaccagugcuacggcuccagcuccaacacccgggugcucaacgagcugaacuacgacaacgcggggaccaaccuguacaacgagcucgagaugaacuacuacggcaagcaggagaacugguacagccugaagaagaacucccgcagccugggggagaacgacgacggcaacaacgaggacaacgagaagcuccggaagcccaagcacaagaagcugaagcagccggccgacgggaaccccgaccccaacgccaaccccaacguggacccgaacgccaaccccaacgucgaccccaacgccaaccccaacguggacccgaacgcgaaccccaacgccaaccccaacgccaaccccaacgccaacccgaacgcgaaccccaacgccaaccccaacgccaaccccaacgccaacccgaacgccaaccccaacgcgaaccccaacgccaaccccaacgccaacccgaacgccaaccccaacgccaaccccaacgcgaaccccaacgccaacccgaacgccaaccccaacguggaccccaacgccaaccccaacgccaacccgaacgcgaaccccaacgccaaccccaacgccaacccgaacgccaaccccaacgccaaccccaacgcgaaccccaacgccaacccgaacgccaaccccaacgccaaccccaacgcgaaccccaacgccaacccgaacgccaaccccaacgccaaccccaacgccaaccccaacgcgaacccgaacgccaaccccggaggcggaggaucugagccgagcgacaagcacaucaaggaguaccugaacaagauccagaacucccucaucaagcccggcuccgcgaacaagcccaaggacgagcuggacuacgccaacgacaucgagaagaagaucugcaagauggagaagugcagcugaggacuaguuauaagacugacuagcccgaugggccucccaacgggcccuccuccccuccuugcaccgagauuaauaaaaaaaaaaaaaaaaaaaaaaaaaaaaaaaaaaaaaaaaaaaaaaaaaaaaaaaaaaaaaaaaugcaucccccccccccccccccccccccccccccccaaaggcucuuuucagagccaccagaauu

SEQ ID NO: 1519 - RNA, 1195 nt, Artificial Sequence
  mRNA Design i-3 (A64-N5-C30-hSL-N5) comprising derived and/or modified sequence from Pf(3D7)__XP_001351122.1__HsALB_Pf-CSP(19-325) (opt1)
gggagaaagcuuaccaugaagugggugaccuucaucagccugcucuuccuguucuccagcgccuacucccuguuccaggaguaccagugcuacggcuccagcuccaacacccgggugcucaacgagcugaacuacgacaacgcggggaccaaccuguacaacgagcucgagaugaacuacuacggcaagcaggagaacugguacagccugaagaagaacucccgcagccugggggagaacgacgacggcaacaacgaggacaacgagaagcuccggaagcccaagcacaagaagcugaagcagccggccgacgggaaccccgaccccaacgccaaccccaacguggacccgaacgccaaccccaacgucgaccccaacgccaaccccaacguggacccgaacgcgaaccccaacgccaaccccaacgccaaccccaacgccaacccgaacgcgaaccccaacgccaaccccaacgccaaccccaacgccaacccgaacgccaaccccaacgcgaaccccaacgccaaccccaacgccaacccgaacgccaaccccaacgccaaccccaacgcgaaccccaacgccaacccgaacgccaaccccaacguggaccccaacgccaaccccaacgccaacccgaacgcgaaccccaacgccaaccccaacgccaacccgaacgccaaccccaacgccaaccccaacgcgaaccccaacgccaacccgaacgccaaccccaacgccaaccccaacgcgaaccccaacgccaacccgaacgccaaccccaacgccaaccccaacgccaaccccaacgcgaacccgaacgccaaccccaacaagaacaaccagggcaacggccaggggcacaacaugcccaacgaccccaaccgcaacgucgacgagaacgccaacgccaacuccgccgugaagaacaacaacaacgaggagccgagcgacaagcacaucaaggaguaccugaacaagauccagaacugaggacuaguuauaagacugacuagcccgaugggccucccaacgggcccuccuccccuccuugcaccgagauuaauaaaaaaaaaaaaaaaaaaaaaaaaaaaaaaaaaaaaaaaaaaaaaaaaaaaaaaaaaaaaaaaaugcaucccccccccccccccccccccccccccccccaaaggcucuuuucagagccaccagaauu

SEQ ID NO: 1520 - RNA, 1372 nt, Artificial Sequence
  mRNA Design i-3 (A64-N5-C30-hSL-N5) comprising derived and/or modified sequence from Pf(3D7)__XP_001351122.1__HsALB_Pf-CSP(19-384) (opt1)
gggagaaagcuuaccaugaagugggugaccuucaucagccugcucuuccuguucuccagcgccuacucccuguuccaggaguaccagugcuacggcuccagcuccaacacccgggugcucaacgagcugaacuacgacaacgcggggaccaaccuguacaacgagcucgagaugaacuacuacggcaagcaggagaacugguacagccugaagaagaacucccgcagccugggggagaacgacgacggcaacaacgaggacaacgagaagcuccggaagcccaagcacaagaagcugaagcagccggccgacgggaaccccgaccccaacgccaaccccaacguggacccgaacgccaaccccaacgucgaccccaacgccaaccccaacguggacccgaacgcgaaccccaacgccaaccccaacgccaaccccaacgccaacccgaacgcgaaccccaacgccaaccccaacgccaaccccaacgccaacccgaacgccaaccccaacgcgaaccccaacgccaaccccaacgccaacccgaacgccaaccccaacgccaaccccaacgcgaaccccaacgccaacccgaacgccaaccccaacguggaccccaacgccaaccccaacgccaacccgaacgcgaaccccaacgccaaccccaacgccaacccgaacgccaaccccaacgccaaccccaacgcgaaccccaacgccaacccgaacgccaaccccaacgccaaccccaacgcgaaccccaacgccaacccgaacgccaaccccaacgccaaccccaacgccaaccccaacgcgaacccgaacgccaaccccaacaagaacaaccagggcaacggccaggggcacaacaugcccaacgaccccaaccgcaacgucgacgagaacgccaacgccaacuccgccgugaagaacaacaacaacgaggagccgagcgacaagcacaucaaggaguaccugaacaagauccagaacucccucagcacggaguggucccccugcagcgugaccugcggcaacgggauccagguccggaucaagcccggcuccgcgaacaagcccaaggacgagcuggacuacgccaacgacaucgagaagaagaucugcaagauggagaagugcagcuccguguucaacguggucaacagcuccugaggacuaguuauaagacugacuagcccgaugggccucccaacgggcccuccuccccuccuugcaccgagauuaauaaaaaaaaaaaaaaaaaaaaaaaaaaaaaaaaaaaaaaaaaaaaaaaaaaaaaaaaaaaaaaaaugcaucccccccccccccccccccccccccccccccaaaggcucuuuucagagccaccagaauu

SEQ ID NO: 1521 - RNA, 1510 nt, Artificial Sequence
  mRNA Design i-3 (A64-N5-C30-hSL-N5) comprising derived and/or modified sequence from Pf(3D7)__XP_001351122.1__HsALB_Pf-CSP(19-384)_TM domain HA (opt1)
gggagaaagcuuaccaugaagugggugaccuucaucagccugcucuuccuguucuccagcgccuacucccuguuccaggaguaccagugcuacggcuccagcuccaacacccgggugcucaacgagcugaacuacgacaacgcggggaccaaccuguacaacgagcucgagaugaacuacuacggcaagcaggagaacugguacagccugaagaagaacucccgcagccugggggagaacgacgacggcaacaacgaggacaacgagaagcuccggaagcccaagcacaagaagcugaagcagccggccgacgggaaccccgaccccaacgccaaccccaacguggacccgaacgccaaccccaacgucgaccccaacgccaaccccaacguggacccgaacgcgaaccccaacgccaaccccaacgccaaccccaacgccaacccgaacgcgaaccccaacgccaaccccaacgccaaccccaacgccaacccgaacgccaaccccaacgcgaaccccaacgccaaccccaacgccaacccgaacgccaaccccaacgccaaccccaacgcgaaccccaacgccaacccgaacgccaaccccaacguggaccccaacgccaaccccaacgccaacccgaacgcgaaccccaacgccaaccccaacgccaacccgaacgccaaccccaacgccaaccccaacgcgaaccccaacgccaacccgaacgccaaccccaacgccaaccccaacgcgaaccccaacgccaacccgaacgccaaccccaacgccaaccccaacgccaaccccaacgcgaacccgaacgccaaccccaacaagaacaaccagggcaacggccaggggcacaacaugcccaacgaccccaaccgcaacgucgacgagaacgccaacgccaacuccgccgugaagaacaacaacaacgaggagccgagcgacaagcacaucaaggaguaccugaacaagauccagaacucccucagcacggaguggucccccugcagcgugaccugcggcaacgggauccagguccggaucaagcccggcuccgcgaacaagcccaaggacgagcuggacuacgccaacgacaucgagaagaagaucugcaagauggagaagugcagcuccguguucaacguggucaacagcuccaagcucgaguccacgcggaucuaccagauccuggcgaucuacagcaccgucgccagcucccuggugcucguggucagccugggggccaucuccuucuggaugugcagcaacggcucccugcagugccgcaucugcaucugaggacuaguuauaagacugacuagcccgaugggccucccaacgggcccuccuccccuccuugcaccgagauuaauaaaaaaaaaaaaaaaaaaaaaaaaaaaaaaaaaaaaaaaaaaaaaaaaaaaaaaaaaaaaaaaaugcaucccccccccccccccccccccccccccccccaaaggcucuuuucagagccaccagaauu

SEQ ID NO: 1522 - RNA, 1222 nt, Artificial Sequence
  mRNA Design i-3 (A64-N5-C30-hSL-N5) comprising derived and/or modified sequence from Pf(3D7)__XP_001351122.1__HsALB_Pf-CSP(82-397) (opt1)
gggagaaagcuuaccaugaagugggugaccuucaucagccugcucuuccuguucuccagcgccuacuccgacaacgagaagcuccggaagcccaagcacaagaagcugaagcagccggccgacgggaaccccgaccccaacgccaaccccaacguggacccgaacgccaaccccaacgucgaccccaacgccaaccccaacguggacccgaacgcgaaccccaacgccaaccccaacgccaaccccaacgccaacccgaacgcgaaccccaacgccaaccccaacgccaaccccaacgccaacccgaacgccaaccccaacgcgaaccccaacgccaaccccaacgccaacccgaacgccaaccccaacgccaaccccaacgcgaaccccaacgccaacccgaacgccaaccccaacguggaccccaacgccaaccccaacgccaacccgaacgcgaaccccaacgccaaccccaacgccaacccgaacgccaaccccaacgccaaccccaacgcgaaccccaacgccaacccgaacgccaaccccaacgccaaccccaacgcgaaccccaacgccaacccgaacgccaaccccaacgccaaccccaacgccaaccccaacgcgaacccgaacgccaaccccaacaagaacaaccagggcaacggccaggggcacaacaugcccaacgaccccaaccgcaacgucgacgagaacgccaacgccaacuccgccgugaagaacaacaacaacgaggagccgagcgacaagcacaucaaggaguaccugaacaagauccagaacucccucagcacggaguggucccccugcagcgugaccugcggcaacgggauccagguccggaucaagcccggcuccgcgaacaagcccaaggacgagcuggacuacgccaacgacaucgagaagaagaucugcaagauggagaagugcagcuccguguucaacguggucaacagcuccaucgggcugaucauggugcucagcuuccuguuccugaacugaggacuaguuauaagacugacuagcccgaugggccucccaacgggcccuccuccccuccuugcaccgagauuaauaaaaaaaaaaaaaaaaaaaaaaaaaaaaaaaaaaaaaaaaaaaaaaaaaaaaaaaaaaaaaaaaugcaucccccccccccccccccccccccccccccccaaaggcucuuuucagagccaccagaauu

SEQ ID NO: 1523 - RNA, 574 nt, Artificial Sequence
  mRNA Design i-3 (A64-N5-C30-hSL-N5) comprising derived and/or modified sequence from Pf(3D7)__XP_001351122.1__HsALB_Pf-CSP(93-192) (opt1)
gggagaaagcuuaccaugaagugggugaccuucaucagccugcucuuccuguucuccagcgccuacuccaagcugaagcagccggccgacgggaaccccgaccccaacgccaaccccaacguggacccgaacgccaaccccaacgucgaccccaacgccaaccccaacguggacccgaacgcgaaccccaacgccaaccccaacgccaaccccaacgccaacccgaacgcgaaccccaacgccaaccccaacgccaaccccaacgccaacccgaacgccaaccccaacgcgaaccccaacgccaaccccaacgccaacccgaacgccaaccccaacgccaaccccaacgcgaaccccaacgccaacccgugaggacuaguuauaagacugacuagcccgaugggccucccaacgggcccuccuccccuccuugcaccgagauuaauaaaaaaaaaaaaaaaaaaaaaaaaaaaaaaaaaaaaaaaaaaaaaaaaaaaaaaaaaaaaaaaaugcaucccccccccccccccccccccccccccccccaaaggcucuuuucagagccaccagaauu

SEQ ID NO: 1524 - RNA, 814 nt, Artificial Sequence
  mRNA Design i-3 (A64-N5-C30-hSL-N5) comprising derived and/or modified sequence from Pf(3D7)__XP_001351122.1__HsALB_Pf-CSP(93-272) (opt1)
gggagaaagcuuaccaugaagugggugaccuucaucagccugcucuuccuguucuccagcgccuacuccaagcugaagcagccggccgacgggaaccccgaccccaacgccaaccccaacguggacccgaacgccaaccccaacgucgaccccaacgccaaccccaacguggacccgaacgcgaaccccaacgccaaccccaacgccaaccccaacgccaacccgaacgcgaaccccaacgccaaccccaacgccaaccccaacgccaacccgaacgccaaccccaacgcgaaccccaacgccaaccccaacgccaacccgaacgccaaccccaacgccaaccccaacgcgaaccccaacgccaacccgaacgccaaccccaacguggaccccaacgccaaccccaacgccaacccgaacgcgaaccccaacgccaaccccaacgccaacccgaacgccaaccccaacgccaaccccaacgcgaaccccaacgccaacccgaacgccaaccccaacgccaaccccaacgcgaaccccaacgccaacccgaacgccaaccccaacgccaaccccaacgccaaccccaacgcgaacccgaacgccaaccccugaggacuaguuauaagacugacuagcccgaugggccucccaacgggcccuccuccccuccuugcaccgagauuaauaaaaaaaaaaaaaaaaaaaaaaaaaaaaaaaaaaaaaaaaaaaaaaaaaaaaaaaaaaaaaaaaugcaucccccccccccccccccccccccccccccccaaaggcucuuuucagagccaccagaauu

SEQ ID NO: 1525 - RNA, 1189 nt, Artificial Sequence
  mRNA Design i-3 (A64-N5-C30-hSL-N5) comprising derived and/or modified sequence from Pf(3D7)__XP_001351122.1__HsALB_Pf-CSP(93-397) (opt1)
gggagaaagcuuaccaugaagugggugaccuucaucagccugcucuuccuguucuccagcgccuacuccaagcugaagcagccggccgacgggaaccccgaccccaacgccaaccccaacguggacccgaacgccaaccccaacgucgaccccaacgccaaccccaacguggacccgaacgcgaaccccaacgccaaccccaacgccaaccccaacgccaacccgaacgcgaaccccaacgccaaccccaacgccaaccccaacgccaacccgaacgccaaccccaacgcgaaccccaacgccaaccccaacgccaacccgaacgccaaccccaacgccaaccccaacgcgaaccccaacgccaacccgaacgccaaccccaacguggaccccaacgccaaccccaacgccaacccgaacgcgaaccccaacgccaaccccaacgccaacccgaacgccaaccccaacgccaaccccaacgcgaaccccaacgccaacccgaacgccaaccccaacgccaaccccaacgcgaaccccaacgccaacccgaacgccaaccccaacgccaaccccaacgccaaccccaacgcgaacccgaacgccaaccccaacaagaacaaccagggcaacggccaggggcacaacaugcccaacgaccccaaccgcaacgucgacgagaacgccaacgccaacuccgccgugaagaacaacaacaacgaggagccgagcgacaagcacaucaaggaguaccugaacaagauccagaacucccucagcacggaguggucccccugcagcgugaccugcggcaacgggauccagguccggaucaagcccggcuccgcgaacaagcccaaggacgagcuggacuacgccaacgacaucgagaagaagaucugcaagauggagaagugcagcuccguguucaacguggucaacagcuccaucgggcugaucauggugcucagcuuccuguuccugaacugaggacuaguuauaagacugacuagcccgaugggccucccaacgggcccuccuccccuccuugcaccgagauuaauaaaaaaaaaaaaaaaaaaaaaaaaaaaaaaaaaaaaaaaaaaaaaaaaaaaaaaaaaaaaaaaaugcaucccccccccccccccccccccccccccccccaaaggcucuuuucagagccaccagaauu

SEQ ID NO: 1526 - RNA, 559 nt, Artificial Sequence
  mRNA Design i-3 (A64-N5-C30-hSL-N5) comprising derived and/or modified sequence from Pf(3D7)__XP_001351122.1__HsALB_Pf-CSP(98-192) (opt1)
gggagaaagcuuaccaugaagugggugaccuucaucagccugcucuuccuguucuccagcgccuacuccgccgacgggaaccccgaccccaacgccaaccccaacguggacccgaacgccaaccccaacgucgaccccaacgccaaccccaacguggacccgaacgcgaaccccaacgccaaccccaacgccaaccccaacgccaacccgaacgcgaaccccaacgccaaccccaacgccaaccccaacgccaacccgaacgccaaccccaacgcgaaccccaacgccaaccccaacgccaacccgaacgccaaccccaacgccaaccccaacgcgaaccccaacgccaacccgugaggacuaguuauaagacugacuagcccgaugggccucccaacgggcccuccuccccuccuugcaccgagauuaauaaaaaaaaaaaaaaaaaaaaaaaaaaaaaaaaaaaaaaaaaaaaaaaaaaaaaaaaaaaaaaaaugcaucccccccccccccccccccccccccccccccaaaggcucuuuucagagccaccagaauu

SEQ ID NO: 1527 - RNA, 799 nt, Artificial Sequence
  mRNA Design i-3 (A64-N5-C30-hSL-N5) comprising derived and/or modified sequence from Pf(3D7)__XP_001351122.1__HsALB_Pf-CSP(98-272) (opt1)
gggagaaagcuuaccaugaagugggugaccuucaucagccugcucuuccuguucuccagcgccuacuccgccgacgggaaccccgaccccaacgccaaccccaacguggacccgaacgccaaccccaacgucgaccccaacgccaaccccaacguggacccgaacgcgaaccccaacgccaaccccaacgccaaccccaacgccaacccgaacgcgaaccccaacgccaaccccaacgccaaccccaacgccaacccgaacgccaaccccaacgcgaaccccaacgccaaccccaacgccaacccgaacgccaaccccaacgccaaccccaacgcgaaccccaacgccaacccgaacgccaaccccaacguggaccccaacgccaaccccaacgccaacccgaacgcgaaccccaacgccaaccccaacgccaacccgaacgccaaccccaacgccaaccccaacgcgaaccccaacgccaacccgaacgccaaccccaacgccaaccccaacgcgaaccccaacgccaacccgaacgccaaccccaacgccaaccccaacgccaaccccaacgcgaacccgaacgccaaccccugaggacuaguuauaagacugacuagcccgaugggccucccaacgggcccuccuccccuccuugcaccgagauuaauaaaaaaaaaaaaaaaaaaaaaaaaaaaaaaaaaaaaaaaaaaaaaaaaaaaaaaaaaaaaaaaaugcaucccccccccccccccccccccccccccccccaaaggcucuuuucagagccaccagaauu

SEQ ID NO: 1528 - RNA, 1105 nt, Artificial Sequence
  mRNA Design i-3 (A64-N5-C30-hSL-N5) comprising derived and/or modified sequence from Pf(3D7)__XP_001351122.1__HsALB_Pf-CSP(98-374) (opt1)
gggagaaagcuuaccaugaagugggugaccuucaucagccugcucuuccuguucuccagcgccuacuccgccgacgggaaccccgaccccaacgccaaccccaacguggacccgaacgccaaccccaacgucgaccccaacgccaaccccaacguggacccgaacgcgaaccccaacgccaaccccaacgccaaccccaacgccaacccgaacgcgaaccccaacgccaaccccaacgccaaccccaacgccaacccgaacgccaaccccaacgcgaaccccaacgccaaccccaacgccaacccgaacgccaaccccaacgccaaccccaacgcgaaccccaacgccaacccgaacgccaaccccaacguggaccccaacgccaaccccaacgccaacccgaacgcgaaccccaacgccaaccccaacgccaacccgaacgccaaccccaacgccaaccccaacgcgaaccccaacgccaacccgaacgccaaccccaacgccaaccccaacgcgaaccccaacgccaacccgaacgccaaccccaacgccaaccccaacgccaaccccaacgcgaacccgaacgccaaccccaacaagaacaaccagggcaacggccaggggcacaacaugcccaacgaccccaaccgcaacgucgacgagaacgccaacgccaacuccgccgugaagaacaacaacaacgaggagccgagcgacaagcacaucaaggaguaccugaacaagauccagaacucccucagcacggaguggucccccugcagcgugaccugcggcaacgggauccagguccggaucaagcccggcuccgcgaacaagcccaaggacgagcuggacuacgccaacgacaucgagaagaagaucugcaagauggagaagugcugaggacuaguuauaagacugacuagcccgaugggccucccaacgggcccuccuccccuccuugcaccgagauuaauaaaaaaaaaaaaaaaaaaaaaaaaaaaaaaaaaaaaaaaaaaaaaaaaaaaaaaaaaaaaaaaaugcaucccccccccccccccccccccccccccccccaaaggcucuuuucagagccaccagaauu

SEQ ID NO: 1529 - RNA, 1174 nt, Artificial Sequence
  mRNA Design i-3 (A64-N5-C30-hSL-N5) comprising derived and/or modified sequence from Pf(3D7)__XP_001351122.1__HsALB_Pf-CSP(98-397) (opt1)
gggagaaagcuuaccaugaagugggugaccuucaucagccugcucuuccuguucuccagcgccuacuccgccgacgggaaccccgaccccaacgccaaccccaacguggacccgaacgccaaccccaacgucgaccccaacgccaaccccaacguggacccgaacgcgaaccccaacgccaaccccaacgccaaccccaacgccaacccgaacgcgaaccccaacgccaaccccaacgccaaccccaacgccaacccgaacgccaaccccaacgcgaaccccaacgccaaccccaacgccaacccgaacgccaaccccaacgccaaccccaacgcgaaccccaacgccaacccgaacgccaaccccaacguggaccccaacgccaaccccaacgccaacccgaacgcgaaccccaacgccaaccccaacgccaacccgaacgccaaccccaacgccaaccccaacgcgaaccccaacgccaacccgaacgccaaccccaacgccaaccccaacgcgaaccccaacgccaacccgaacgccaaccccaacgccaaccccaacgccaaccccaacgcgaacccgaacgccaaccccaacaagaacaaccagggcaacggccaggggcacaacaugcccaacgaccccaaccgcaacgucgacgagaacgccaacgccaacuccgccgugaagaacaacaacaacgaggagccgagcgacaagcacaucaaggaguaccugaacaagauccagaacucccucagcacggaguggucccccugcagcgugaccugcggcaacgggauccagguccggaucaagcccggcuccgcgaacaagcccaaggacgagcuggacuacgccaacgacaucgagaagaagaucugcaagauggagaagugcagcuccguguucaacguggucaacagcuccaucgggcugaucauggugcucagcuuccuguuccugaacugaggacuaguuauaagacugacuagcccgaugggccucccaacgggcccuccuccccuccuugcaccgagauuaauaaaaaaaaaaaaaaaaaaaaaaaaaaaaaaaaaaaaaaaaaaaaaaaaaaaaaaaaaaaaaaaaugcaucccccccccccccccccccccccccccccccaaaggcucuuuucagagccaccagaauu

SEQ ID NO: 1530 - RNA, 1501 nt, Artificial Sequence
  mRNA Design i-3 (A64-N5-C30-hSL-N5) comprising derived and/or modified sequence from Pf(3D7)__XP_001351122.1__HsALB_Pf-CSP(199-377)_L(PVTN)_HBsAg (opt1)
gggagaaagcuuaccaugaaguggguaaccuuuauuucccuucuuuuucucuuuagcucggcuuauuccgaccccaacgccaaccccaacgccaacccgaacgcgaaccccaacgccaaccccaacgccaacccgaacgccaaccccaacgccaaccccaacgcgaaccccaacgccaacccgaacgccaaccccaacgccaaccccaacgcgaaccccaacgccaacccgaacgccaaccccaacgccaaccccaacgccaaccccaacgcgaacccgaacgccaaccccaacaagaacaaccagggcaacggccaggggcacaacaugcccaacgaccccaaccgcaacgucgacgagaacgccaacgccaacuccgccgugaagaacaacaacaacgaggagccgagcgacaagcacaucaaggaguaccugaacaagauccagaacucccucagcacggaguggucccccugcagcgugaccugcggcaacgggauccagguccggaucaagcccggcuccgcgaacaagcccaaggacgagcuggacuacgccaacgacaucgagaagaagaucugcaagauggagaagugcagcuccgugccggugacgaacauggagaacaucaccagcggcuuccuggggccccuccuggugcugcaggccggcuucuuccuccugacccgcauccugaccaucccgcagucccucgacagcugguggaccucccugaacuuccucgggggcagccccgucugccuggggcagaacucccagagccccaccuccaaccacagccccaccuccugcccgcccaucugccccggcuaccgguggaugugccugcgccgguucaucaucuuccuguucauccuccugcugugccucaucuuccugcuggugcuccuggacuaccagggcaugcugcccgugugcccgcucauccccgggagcacgaccaccaacaccggccccugcaagacgugcaccacccccgcccaggggaacuccauguucccgagcugcugcugcaccaagcccacggacggcaacugcacgugcauccccauccccuccagcugggcguucgccaaguaccugugggagugggccuccguccgcuucagcuggcugucccuccuggugccguucgugcagugguucgucgggcugagccccaccguguggcucuccgccaucuggaugaugugguacuggggccccagccuguacagcaucgugucccccuucaucccgcugcuccccaucuucuucugccugugggucuacaucugaggacuaguuauaagacugacuagcccgaugggccucccaacgggcccuccuccccuccuugcaccgagauuaauaaaaaaaaaaaaaaaaaaaaaaaaaaaaaaaaaaaaaaaaaaaaaaaaaaaaaaaaaaaaaaaaugcaucccccccccccccccccccccccccccccccaaaggcucuuuucagagccaccagaauu

SEQ ID NO: 1531 - RNA, 1240 nt, Artificial Sequence
  mRNA Design i-3 (A64-N5-C30-hSL-N5) comprising derived and/or modified sequence from Pb(ANKA)__XP_022712148.1__Pb-CSP (opt1)
gggagaaagcuuaccaugaagaagugcaccauccugguggucgccagccuccugcuggugaacucccuccugcccggcuacgggcagaacaagagcauccaggcccagcgcaaccugaacgagcucugcuacaacgagggcaacgacaacaagcuguaccacgugcugaacuccaagaacgggaagaucuacaaccggaacaccgucaaccgccuccuggcggacgccccggagggcaagaagaacgagaagaagaacgagaagaucgagcggaacaacaagcugaagcagccgcccccgccgcccaaccccaacgacccgccgccgcccaaccccaacgacccgcccccgcccaacccgaacgacccgcccccgccgaaccccaacgacccgcccccgcccaacgccaacgacccgcccccgcccaacgccaacgaccccgccccgcccaacgcgaacgaccccgccccgccgaacgccaacgaccccgccccgcccaacgcgaacgacccggccccgcccaacgccaacgacccgccgccgcccaaccccaacgacccggccccgcccaacgccaacgacccgccgcccccgaaccccaacgacccggcgccgccccaggggaacaacaacccgcagccccagccccgcccccagccgcagccccagccccagccccagccgcagccccagccccagccccagccgcggccccagccccagccccagccgggcggcaacaacaacaacaagaacaacaacaacgacgacagcuacauccccuccgccgagaagauccucgaguucgugaagcagauccgcgacagcaucacggaggaguggucccagugcaacgugaccugcgggagcggcauccggguccgcaagcggaagggguccaacaagaaggccgaggaccugacccuggaggacaucgacaccgagaucugcaagauggacaagugcagcuccaucuucaacaucgugagcaacucccucggcuucgugauccugcugguccucguguucuucaacugaggacuaguuauaagacugacuagcccgaugggccucccaacgggcccuccuccccuccuugcaccgagauuaauaaaaaaaaaaaaaaaaaaaaaaaaaaaaaaaaaaaaaaaaaaaaaaaaaaaaaaaaaaaaaaaaugcaucccccccccccccccccccccccccccccccaaaggcucuuuucagagccaccagaauu

SEQ ID NO: 1532 - RNA, 1405 nt, Artificial Sequence
  mRNA Design i-3 (A64-N5-C30-hSL-N5) comprising derived and/or modified sequence from Pb(ANKA)__XP_022712148.1__Pb-CSP_L(G4SG4)_TM domain HA (opt1)
gggagaaagcuuaccaugaagaagugcaccauccugguggucgccagccuccugcuggugaacucccuccugcccggcuacgggcagaacaagagcauccaggcccagcgcaaccugaacgagcucugcuacaacgagggcaacgacaacaagcuguaccacgugcugaacuccaagaacgggaagaucuacaaccggaacaccgucaaccgccuccuggcggacgccccggagggcaagaagaacgagaagaagaacgagaagaucgagcggaacaacaagcugaagcagccgcccccgccgcccaaccccaacgacccgccgccgcccaaccccaacgacccgcccccgcccaacccgaacgacccgcccccgccgaaccccaacgacccgcccccgcccaacgccaacgacccgcccccgcccaacgccaacgaccccgccccgcccaacgcgaacgaccccgccccgccgaacgccaacgaccccgccccgcccaacgcgaacgacccggccccgcccaacgccaacgacccgccgccgcccaaccccaacgacccggccccgcccaacgccaacgacccgccgcccccgaaccccaacgacccggcgccgccccaggggaacaacaacccgcagccccagccccgcccccagccgcagccccagccccagccccagccgcagccccagccccagccccagccgcggccccagccccagccccagccgggcggcaacaacaacaacaagaacaacaacaacgacgacagcuacauccccuccgccgagaagauccucgaguucgugaagcagauccgcgacagcaucacggaggaguggucccagugcaacgugaccugcgggagcggcauccggguccgcaagcggaagggguccaacaagaaggccgaggaccugacccuggaggacaucgacaccgagaucugcaagauggacaagugcagcuccaucuucaacaucgugagcaacucccucggcuucgugauccugcugguccucguguucuucaacggcgggggcgggagcggcgggggcggcaagcucgaguccacgcggaucuaccagauccuggcgaucuacagcaccgucgccagcucccuggugcucguggucagccugggggccaucuccuucuggaugugcagcaacggcucccugcagugccgcaucugcaucugaggacuaguuauaagacugacuagcccgaugggccucccaacgggcccuccuccccuccuugcaccgagauuaauaaaaaaaaaaaaaaaaaaaaaaaaaaaaaaaaaaaaaaaaaaaaaaaaaaaaaaaaaaaaaaaaugcaucccccccccccccccccccccccccccccccaaaggcucuuuucagagccaccagaauu

SEQ ID NO: 1533 - RNA, 1225 nt, Artificial Sequence
  mRNA Design i-3 (A64-N5-C30-hSL-N5) comprising derived and/or modified sequence from Pb(ANKA)__XP_022712148.1__HsALB_Pb-CSP(24-340) (opt1)
gggagaaagcuuaccaugaagugggugaccuucaucagccugcucuuccuguucuccagcgccuacucccagaacaagagcauccaggcccagcgcaaccugaacgagcucugcuacaacgagggcaacgacaacaagcuguaccacgugcugaacuccaagaacgggaagaucuacaaccggaacaccgucaaccgccuccuggcggacgccccggagggcaagaagaacgagaagaagaacgagaagaucgagcggaacaacaagcugaagcagccgcccccgccgcccaaccccaacgacccgccgccgcccaaccccaacgacccgcccccgcccaacccgaacgacccgcccccgccgaaccccaacgacccgcccccgcccaacgccaacgacccgcccccgcccaacgccaacgaccccgccccgcccaacgcgaacgaccccgccccgccgaacgccaacgaccccgccccgcccaacgcgaacgacccggccccgcccaacgccaacgacccgccgccgcccaaccccaacgacccggccccgcccaacgccaacgacccgccgcccccgaaccccaacgacccggcgccgccccaggggaacaacaacccgcagccccagccccgcccccagccgcagccccagccccagccccagccgcagccccagccccagccccagccgcggccccagccccagccccagccgggcggcaacaacaacaacaagaacaacaacaacgacgacagcuacauccccuccgccgagaagauccucgaguucgugaagcagauccgcgacagcaucacggaggaguggucccagugcaacgugaccugcgggagcggcauccggguccgcaagcggaagggguccaacaagaaggccgaggaccugacccuggaggacaucgacaccgagaucugcaagauggacaagugcagcuccaucuucaacaucgugagcaacucccucggcuucgugauccugcugguccucguguucuucaacugaggacuaguuauaagacugacuagcccgaugggccucccaacgggcccuccuccccuccuugcaccgagauuaauaaaaaaaaaaaaaaaaaaaaaaaaaaaaaaaaaaaaaaaaaaaaaaaaaaaaaaaaaaaaaaaaugcaucccccccccccccccccccccccccccccccaaaggcucuuuucagagccaccagaauu

SEQ ID NO: 1534 - RNA, 1243 nt, Artificial Sequence
  mRNA Design i-3 (A64-N5-C30-hSL-N5) comprising derived and/or modified sequence from Pb(ANKA)__XP_022712148.1__HsIns-iso1_Pb-CSP(24-340) (opt1)
gggagaaagcuuaccauggcccuguggaugcgccuccugccccugcucgcccugcuggcgcucuggggcccggaccccgccgccgcccagaacaagagcauccaggcccagcgcaaccugaacgagcucugcuacaacgagggcaacgacaacaagcuguaccacgugcugaacuccaagaacgggaagaucuacaaccggaacaccgucaaccgccuccuggcggacgccccggagggcaagaagaacgagaagaagaacgagaagaucgagcggaacaacaagcugaagcagccgcccccgccgcccaaccccaacgacccgccgccgcccaaccccaacgacccgcccccgcccaacccgaacgacccgcccccgccgaaccccaacgacccgcccccgcccaacgccaacgacccgcccccgcccaacgccaacgaccccgccccgcccaacgcgaacgaccccgccccgccgaacgccaacgaccccgccccgcccaacgcgaacgacccggccccgcccaacgccaacgacccgccgccgcccaaccccaacgacccggccccgcccaacgccaacgacccgccgcccccgaaccccaacgacccggcgccgccccaggggaacaacaacccgcagccccagccccgcccccagccgcagccccagccccagccccagccgcagccccagccccagccccagccgcggccccagccccagccccagccgggcggcaacaacaacaacaagaacaacaacaacgacgacagcuacauccccuccgccgagaagauccucgaguucgugaagcagauccgcgacagcaucacggaggaguggucccagugcaacgugaccugcgggagcggcauccggguccgcaagcggaagggguccaacaagaaggccgaggaccugacccuggaggacaucgacaccgagaucugcaagauggacaagugcagcuccaucuucaacaucgugagcaacucccucggcuucgugauccugcugguccucguguucuucaacugaggacuaguuauaagacugacuagcccgaugggccucccaacgggcccuccuccccuccuugcaccgagauuaauaaaaaaaaaaaaaaaaaaaaaaaaaaaaaaaaaaaaaaaaaaaaaaaaaaaaaaaaaaaaaaaaugcaucccccccccccccccccccccccccccccccaaaggcucuuuucagagccaccagaauu

SEQ ID NO: 1535 - RNA, 1222 nt, Artificial Sequence
  mRNA Design i-3 (A64-N5-C30-hSL-N5) comprising derived and/or modified sequence from Pb(ANKA)__XP_022712148.1__HsSPARC_Pb-CSP(24-340) (opt1)
gggagaaagcuuaccaugcgcgccuggaucuucuuccugcucugccuggccggccgggcccuggcccagaacaagagcauccaggcccagcgcaaccugaacgagcucugcuacaacgagggcaacgacaacaagcuguaccacgugcugaacuccaagaacgggaagaucuacaaccggaacaccgucaaccgccuccuggcggacgccccggagggcaagaagaacgagaagaagaacgagaagaucgagcggaacaacaagcugaagcagccgcccccgccgcccaaccccaacgacccgccgccgcccaaccccaacgacccgcccccgcccaacccgaacgacccgcccccgccgaaccccaacgacccgcccccgcccaacgccaacgacccgcccccgcccaacgccaacgaccccgccccgcccaacgcgaacgaccccgccccgccgaacgccaacgaccccgccccgcccaacgcgaacgacccggccccgcccaacgccaacgacccgccgccgcccaaccccaacgacccggccccgcccaacgccaacgacccgccgcccccgaaccccaacgacccggcgccgccccaggggaacaacaacccgcagccccagccccgcccccagccgcagccccagccccagccccagccgcagccccagccccagccccagccgcggccccagccccagccccagccgggcggcaacaacaacaacaagaacaacaacaacgacgacagcuacauccccuccgccgagaagauccucgaguucgugaagcagauccgcgacagcaucacggaggaguggucccagugcaacgugaccugcgggagcggcauccggguccgcaagcggaagggguccaacaagaaggccgaggaccugacccuggaggacaucgacaccgagaucugcaagauggacaagugcagcuccaucuucaacaucgugagcaacucccucggcuucgugauccugcugguccucguguucuucaacugaggacuaguuauaagacugacuagcccgaugggccucccaacgggcccuccuccccuccuugcaccgagauuaauaaaaaaaaaaaaaaaaaaaaaaaaaaaaaaaaaaaaaaaaaaaaaaaaaaaaaaaaaaaaaaaaugcaucccccccccccccccccccccccccccccccaaaggcucuuuucagagccaccagaauu

SEQ ID NO: 1536 - RNA, 1225 nt, Artificial Sequence
  mRNA Design i-3 (A64-N5-C30-hSL-N5) comprising derived and/or modified sequence from Pb(ANKA)__XP_022712148.1__IgE_Pb-CSP(24-340) (opt1)
gggagaaagcuuaccauggacuggaccuggauccuguuccucguggccgccgcgacccgcguccacagccagaacaagagcauccaggcccagcgcaaccugaacgagcucugcuacaacgagggcaacgacaacaagcuguaccacgugcugaacuccaagaacgggaagaucuacaaccggaacaccgucaaccgccuccuggcggacgccccggagggcaagaagaacgagaagaagaacgagaagaucgagcggaacaacaagcugaagcagccgcccccgccgcccaaccccaacgacccgccgccgcccaaccccaacgacccgcccccgcccaacccgaacgacccgcccccgccgaaccccaacgacccgcccccgcccaacgccaacgacccgcccccgcccaacgccaacgaccccgccccgcccaacgcgaacgaccccgccccgccgaacgccaacgaccccgccccgcccaacgcgaacgacccggccccgcccaacgccaacgacccgccgccgcccaaccccaacgacccggccccgcccaacgccaacgacccgccgcccccgaaccccaacgacccggcgccgccccaggggaacaacaacccgcagccccagccccgcccccagccgcagccccagccccagccccagccgcagccccagccccagccccagccgcggccccagccccagccccagccgggcggcaacaacaacaacaagaacaacaacaacgacgacagcuacauccccuccgccgagaagauccucgaguucgugaagcagauccgcgacagcaucacggaggaguggucccagugcaacgugaccugcgggagcggcauccggguccgcaagcggaagggguccaacaagaaggccgaggaccugacccuggaggacaucgacaccgagaucugcaagauggacaagugcagcuccaucuucaacaucgugagcaacucccucggcuucgugauccugcugguccucguguucuucaacugaggacuaguuauaagacugacuagcccgaugggccucccaacgggcccuccuccccuccuugcaccgagauuaauaaaaaaaaaaaaaaaaaaaaaaaaaaaaaaaaaaaaaaaaaaaaaaaaaaaaaaaaaaaaaaaaugcaucccccccccccccccccccccccccccccccaaaggcucuuuucagagccaccagaauu

SEQ ID NO: 1537 - RNA, 1411 nt, Artificial Sequence; identical to SEQ ID NO: 1501
  mRNA Design i-3 (A64-N5-C30-hSL-N5) comprising derived and/or modified sequence from Pf(3D7)__XP_001351122.1__Pf-CSP (opt1)

SEQ ID NO: 1538 - RNA, 1342 nt, Artificial Sequence; identical to SEQ ID NO: 1502
  mRNA Design i-3 (A64-N5-C30-hSL-N5) comprising derived and/or modified sequence from Pf(3D7)__XP_001351122.1__Pf-CSP(1-374) (opt1)

SEQ ID NO: 1539 - RNA, 1195 nt, Artificial Sequence; identical to SEQ ID NO: 1503
  mRNA Design i-3 (A64-N5-C30-hSL-N5) comprising derived and/or modified sequence from Pf(3D7)__XP_001351122.1__Pf-CSP(1-325) (opt1)

SEQ ID NO: 1540 - RNA, 1411 nt, Artificial Sequence
  mRNA Design i-3 (A64-N5-C30-hSL-N5) comprising derived and/or modified sequence from Pf(3D7)__XP_001351122.1__HsALB_Pf-CSP(19-397) (opt1)
gggagaaagcuuaccaugaagugggugaccuucaucagccuccuguuccuguucuccagcgccuacucccuguuccaggaguaccagugcuacggcagcuccagcaacacccgcguccucaacgagcugaacuacgacaacgccgggacgaaccuguacaacgagcucgagaugaacuacuacggcaagcaggagaacugguacucccugaagaagaacagccggucccugggggagaacgacgacggcaacaacgaggacaacgagaagcuccgcaagcccaagcacaagaagcugaagcagccggcggacgggaaccccgaccccaacgccaaccccaacguggacccgaacgccaaccccaacguggaccccaacgccaaccccaacgucgacccgaacgccaaccccaacgcgaaccccaacgccaaccccaacgccaacccgaacgccaaccccaacgcgaaccccaacgccaaccccaacgccaacccgaacgccaaccccaacgccaaccccaacgcgaaccccaacgccaacccgaacgccaaccccaacgccaaccccaacgccaaccccaacgcgaacccgaacgccaaccccaacguggaccccaacgccaaccccaacgccaacccgaacgccaaccccaacgcgaaccccaacgccaacccgaacgccaaccccaacgccaaccccaacgccaaccccaacgcgaacccgaacgccaaccccaacgccaaccccaacgccaaccccaacgcgaacccgaacgccaaccccaacgccaaccccaacgccaaccccaacgccaacccgaacgcgaaccccaacaagaacaaccagggcaacggccaggggcacaacaugcccaacgaccccaaccggaacguggacgagaacgccaacgccaacagcgccgucaagaacaacaacaacgaggagccguccgacaagcacaucaaggaguaccugaacaagauccagaacagccucuccaccgaguggagccccugcuccgugaccugcggcaacgggauccaggugcgcaucaagcccggcagcgccaacaagcccaaggacgagcuggacuacgcgaacgacaucgagaagaagaucugcaagauggagaagugcuccagcgucuucaacguggugaacuccagcaucgggcugaucaugguccucagcuuccuguuccugaacugaggacuaguuauaagacugacuagcccgaugggccucccaacgggcccuccuccccuccuugcaccgagauuaauaaaaaaaaaaaaaaaaaaaaaaaaaaaaaaaaaaaaaaaaaaaaaaaaaaaaaaaaaaaaaaaaugcaucccccccccccccccccccccccccccccccaaaggcucuuuucagagccaccagaauu

SEQ ID NO: 1541 - RNA, 1429 nt, Artificial Sequence
  mRNA Design i-3 (A64-N5-C30-hSL-N5) comprising derived and/or modified sequence from Pf(3D7)__XP_001351122.1__HsIns-iso1_Pf-CSP(19-397) (opt1)
gggagaaagcuuaccauggcccuguggaugcgccuccugccccugcucgcccugcuggcgcucuggggcccggaccccgccgccgcccuguuccaggaguaccagugcuacgggagcuccagcaacacccgggugcugaacgagcucaacuacgacaacgccggcaccaaccuguacaacgagcuggagaugaacuacuacgggaagcaggagaacugguacucccucaagaagaacagccgcucccugggcgagaacgacgacgggaacaacgaggacaacgagaagcugcggaagcccaagcacaagaagcucaagcagcccgcggacggcaacccggaccccaacgccaaccccaacgucgaccccaacgccaacccgaacguggaccccaacgccaaccccaacguggaccccaacgcgaacccgaacgccaaccccaacgccaaccccaacgccaaccccaacgccaacccgaacgcgaaccccaacgccaaccccaacgccaaccccaacgccaacccgaacgccaaccccaacgcgaaccccaacgccaaccccaacgccaacccgaacgccaaccccaacgccaaccccaacgcgaaccccaacgccaacccgaacgucgaccccaacgccaaccccaacgccaacccgaacgccaaccccaacgcgaaccccaacgccaaccccaacgccaacccgaacgccaaccccaacgcgaaccccaacgccaaccccaacgccaacccgaacgccaaccccaacgccaaccccaacgcgaaccccaacgccaacccgaacgccaaccccaacgccaaccccaacgccaaccccaacgcgaacccgaacaagaacaaccagggcaacgggcagggccacaacaugcccaacgaccccaaccgcaacguggacgagaacgccaacgccaacagcgccgugaagaacaacaacaacgaggagcccuccgacaagcacaucaaggaguaccugaacaagauccagaacagccuguccacggaguggagcccgugcuccgugaccugcgggaacggcauccagguccggaucaagcccgggagcgccaacaagcccaaggacgagcucgacuacgcgaacgacaucgagaagaagaucugcaagauggagaagugcuccagcguguucaacgucgugaacuccagcaucggccugaucauggugcuguccuuccucuuccugaacugaggacuaguuauaagacugacuagcccgaugggccucccaacgggcccuccuccccuccuugcaccgagauuaauaaaaaaaaaaaaaaaaaaaaaaaaaaaaaaaaaaaaaaaaaaaaaaaaaaaaaaaaaaaaaaaaugcaucccccccccccccccccccccccccccccccaaaggcucuuuucagagccaccagaauu

SEQ ID NO: 1542 - RNA, 1408 nt, Artificial Sequence
  mRNA Design i-3 (A64-N5-C30-hSL-N5) comprising derived and/or modified sequence from Pf(3D7)__XP_001351122.1__HsSPARC_Pf-CSP(19-397) (opt1)
gggagaaagcuuaccaugcgcgccuggaucuucuuccugcucugccuggccggccgggcgcuggcccucuuccaggaguaccagugcuacgggagcuccagcaacacccgcgugcugaacgagcugaacuacgacaacgccggcaccaaccucuacaacgagcuggagaugaacuacuacgggaagcaggagaacugguacucccugaagaagaacagccggucccucggcgagaacgacgacgggaacaacgaggacaacgagaagcugcgcaagcccaagcacaagaagcugaagcagccggccgacggcaaccccgaccccaacgccaaccccaacgucgacccgaacgcgaaccccaacguggaccccaacgccaaccccaacguggacccgaacgccaaccccaacgccaaccccaacgcgaaccccaacgccaacccgaacgccaaccccaacgccaaccccaacgccaaccccaacgcgaacccgaacgccaaccccaacgccaaccccaacgccaaccccaacgccaacccgaacgcgaaccccaacgccaaccccaacgccaaccccaacgccaacccgaacgccaaccccaacgucgaccccaacgcgaaccccaacgccaacccgaacgccaaccccaacgccaaccccaacgccaacccgaacgcgaaccccaacgccaaccccaacgccaaccccaacgccaacccgaacgcgaaccccaacgccaaccccaacgccaaccccaacgccaacccgaacgccaaccccaacgcgaaccccaacgccaaccccaacgccaacccgaacgccaaccccaacaagaacaaccagggcaacgggcagggccacaacaugcccaacgaccccaaccggaacguggacgagaacgccaacgcgaacagcgccgugaagaacaacaacaacgaggagccguccgacaagcacaucaaggaguaccucaacaagauccagaacagccuguccacggaguggagccccugcuccgugaccugcgggaacggcauccagguccgcaucaagcccgggagcgccaacaagcccaaggacgagcuggacuacgccaacgacaucgagaagaagaucugcaagauggagaagugcuccagcguguucaacgucgugaacuccagcaucggccucaucauggugcuguccuuccuguuccucaacugaggacuaguuauaagacugacuagcccgaugggccucccaacgggcccuccuccccuccuugcaccgagauuaauaaaaaaaaaaaaaaaaaaaaaaaaaaaaaaaaaaaaaaaaaaaaaaaaaaaaaaaaaaaaaaaaugcaucccccccccccccccccccccccccccccccaaaggcucuuuucagagccaccagaauu

SEQ ID NO: 1543 - RNA, 1411 nt, Artificial Sequence
  mRNA Design i-3 (A64-N5-C30-hSL-N5) comprising derived and/or modified sequence from Pf(3D7)__XP_001351122.1__IgE_Pf-CSP(19-397) (opt1)
gggagaaagcuuaccauggacuggaccuggauccuguuccucguggccgccgcgacccgcguccacagccuguuccaggaguaccagugcuacggcuccagcuccaacacgcgggugcugaacgagcucaacuacgacaacgccgggaccaaccuguacaacgagcuggagaugaacuacuacggcaagcaggagaacugguacagccucaagaagaacucccgcagccugggggagaacgacgacggcaacaacgaggacaacgagaagcugcggaagcccaagcacaagaagcucaagcagccggccgacgggaaccccgaccccaacgccaaccccaacguggacccgaacgccaaccccaacgucgaccccaacgcgaaccccaacguggacccgaacgccaaccccaacgccaaccccaacgccaaccccaacgcgaacccgaacgccaaccccaacgccaaccccaacgccaaccccaacgccaacccgaacgcgaaccccaacgccaaccccaacgccaaccccaacgccaacccgaacgccaaccccaacgcgaaccccaacgccaaccccaacgccaacccgaacgccaaccccaacguggaccccaacgccaaccccaacgcgaacccgaacgccaaccccaacgccaaccccaacgccaacccgaacgccaaccccaacgcgaaccccaacgccaaccccaacgccaacccgaacgccaaccccaacgcgaaccccaacgccaaccccaacgccaacccgaacgccaaccccaacgccaaccccaacgcgaaccccaacgccaacccgaacgccaaccccaacaagaacaaccagggcaacggccaggggcacaacaugcccaacgaccccaaccgcaacgucgacgagaacgccaacgccaacuccgcggugaagaacaacaacaacgaggagccgagcgacaagcacaucaaggaguaccugaacaagauccagaacucccugagcaccgaguggucccccugcagcgugaccugcggcaacgggauccagguccggaucaagcccggcuccgccaacaagcccaaggacgagcucgacuacgccaacgacaucgagaagaagaucugcaagauggagaagugcagcuccguguucaacguggucaacagcuccaucgggcugaucauggugcugagcuuccucuuccugaacugaggacuaguuauaagacugacuagcccgaugggccucccaacgggcccuccuccccuccuugcaccgagauuaauaaaaaaaaaaaaaaaaaaaaaaaaaaaaaaaaaaaaaaaaaaaaaaaaaaaaaaaaaaaaaaaaugcaucccccccccccccccccccccccccccccccaaaggcucuuuucagagccaccagaauu

SEQ ID NO: 1544 - RNA, 1576 nt, Artificial Sequence
  mRNA Design i-3 (A64-N5-C30-hSL-N5) comprising derived and/or modified sequence from Pf(3D7)__XP_001351122.1__Pf-CSP_L(G4SG4)_TM domain HA (opt1)
gggagaaagcuuaccaugaugcgcaagcuggccauccucagcguguccagcuuccuguucgucgaggcccuguuccaggaguaccagugcuacggcuccagcuccaacacccgggugcucaacgagcugaacuacgacaacgcggggaccaaccuguacaacgagcucgagaugaacuacuacggcaagcaggagaacugguacagccugaagaagaacucccgcagccugggggagaacgacgacggcaacaacgaggacaacgagaagcuccggaagcccaagcacaagaagcugaagcagccggccgacgggaaccccgaccccaacgccaaccccaacguggacccgaacgccaaccccaacgucgaccccaacgccaaccccaacguggacccgaacgcgaaccccaacgccaaccccaacgccaaccccaacgccaacccgaacgcgaaccccaacgccaaccccaacgccaaccccaacgccaacccgaacgccaaccccaacgcgaaccccaacgccaaccccaacgccaacccgaacgccaaccccaacgccaaccccaacgcgaaccccaacgccaacccgaacgccaaccccaacguggaccccaacgccaaccccaacgccaacccgaacgcgaaccccaacgccaaccccaacgccaacccgaacgccaaccccaacgccaaccccaacgcgaaccccaacgccaacccgaacgccaaccccaacgccaaccccaacgcgaaccccaacgccaacccgaacgccaaccccaacgccaaccccaacgccaaccccaacgcgaacccgaacgccaaccccaacaagaacaaccagggcaacggccaggggcacaacaugcccaacgaccccaaccgcaacgucgacgagaacgccaacgccaacuccgccgugaagaacaacaacaacgaggagccgagcgacaagcacaucaaggaguaccugaacaagauccagaacucccucagcacggaguggucccccugcagcgugaccugcggcaacgggauccagguccggaucaagcccggcuccgcgaacaagcccaaggacgagcuggacuacgccaacgacaucgagaagaagaucugcaagauggagaagugcagcuccguguucaacguggucaacagcuccaucgggcugaucauggugcucagcuuccuguuccugaacggcggcgggggcagcgggggcggcgggaagcucgaguccacccgcaucuaccagauccuggccaucuacagcaccguggccuccagccugguccucguggugucccugggcgccaucagcuucuggaugugcuccaacgggagccugcagugccggaucugcaucugaggacuaguuauaagacugacuagcccgaugggccucccaacgggcccuccuccccuccuugcaccgagauuaauaaaaaaaaaaaaaaaaaaaaaaaaaaaaaaaaaaaaaaaaaaaaaaaaaaaaaaaaaaaaaaaaugcaucccccccccccccccccccccccccccccccaaaggcucuuuucagagccaccagaauu

SEQ ID NO: 1545 - RNA, 1450 nt, Artificial Sequence
  mRNA Design i-3 (A64-N5-C30-hSL-N5) comprising derived and/or modified sequence from Pf(3D7)__XP_001351122.1__Pf-CSP(199-377)_L(PVTN)_HBsAg (opt1)
gggagaaagcuuaccauggaccccaacgccaacccgaacgccaaccccaacgcgaaccccaacgccaaccccaacgccaacccgaacgccaaccccaacgccaaccccaacgcgaaccccaacgccaacccgaacgccaaccccaacgccaaccccaacgcgaaccccaacgccaacccgaacgccaaccccaacgccaaccccaacgccaaccccaacgcgaacccgaacgccaaccccaacaagaacaaccagggcaacgggcagggccacaacaugcccaacgaccccaaccgcaacguggacgagaacgccaacgccaacagcgccgucaagaacaacaacaacgaggagccguccgacaagcacaucaaggaguaccugaacaagauccagaacagccucuccaccgaguggagccccugcuccgugaccugcgggaacggcauccaggugcggaucaagcccgggagcgcgaacaagcccaaggacgagcuggacuacgccaacgacaucgagaagaagaucugcaagauggagaagugcuccagcgucccggugacgaacauggagaacaucaccuccggcuuccugggcccccuccuggugcugcaggccggguucuuccuccugacccgcauccugaccaucccccagagccucgacuccugguggacgagccugaacuuccugggcgggucccccgucugccucggccagaacagccaguccccgaccagcaaccacucccccaccagcugcccgcccaucugccccggguaccgguggaugugccugcgccgguucaucaucuuccuguucauccuccugcugugccucaucuuccugcuggugcuccuggacuaccagggcaugcugcccgugugcccccucaucccgggcuccaccacgaccaacaccgggcccugcaagaccugcacgacccccgcccagggcaacagcauguuccccagcugcugcugcaccaagccgaccgacgggaacugcacgugcauccccauccccuccagcugggccuucgcgaaguaccugugggagugggccuccguccgcuucagcuggcugucccuccuggugcccuucgugcagugguucgucggccugagcccgaccguguggcucuccgccaucuggaugaugugguacuggggccccagccuguacuccaucgugagccccuucaucccccugcucccgaucuucuucugccugugggucuacaucugaggacuaguuauaagacugacuagcccgaugggccucccaacgggcccuccuccccuccuugcaccgagauuaauaaaaaaaaaaaaaaaaaaaaaaaaaaaaaaaaaaaaaaaaaaaaaaaaaaaaaaaaaaaaaaaaugcaucccccccccccccccccccccccccccccccaaaggcucuuuucagagccaccagaauu

SEQ ID NO: 1546 - RNA, 1492 nt, Artificial Sequence
  mRNA Design i-3 (A64-N5-C30-hSL-N5) comprising derived and/or modified sequence from Pf(3D7)__XP_001351122.1__Pf-CSP(199-387)_L(PVTN)_HBsAg (opt1)
gggagaaagcuuaccaugauggcccccgacccgaacgccaaccccaacgcgaaccccaacgccaaccccaacgccaacccgaacgccaaccccaacgccaaccccaacgcgaaccccaacgccaacccgaacgccaaccccaacgccaaccccaacgcgaaccccaacgccaacccgaacgccaaccccaacgccaaccccaacgccaaccccaacgcgaacccgaacgccaaccccaacgccaaccccaacaagaacaaccagggcaacgggcagggccacaacaugcccaacgacccgaaccgcaacguggacgagaacgccaacgccaacagcgcggucaagaacaacaacaacgaggagcccuccgacaagcacaucaaggaguaccugaacaagauccagaacagccucuccaccgaguggagccccugcuccgugaccugcgggaacggcauccaggugcggaucaagcccgggagcgccaacaagccgaaggacgagcuggacuacgccaacgacaucgagaagaagaucugcaagauggagaagugcuccagcgucuucaacguggugaacuccagcaucggccugggccccgucacgaacauggagaacaucaccuccggguuccucggcccccugcuggugcuccaggccggguucuuccugcugacccgcauccucaccaucccccagagccuggacuccugguggacgagccugaacuuccucggcggguccccggugugccugggccagaacagccagucccccaccagcaaccacucccccaccagcugcccgcccaucugccccggcuaccgguggaugugccugcgccgguucaucaucuuccucuucauccugcugcucugccugaucuuccugcucguccugcuggacuaccaggggaugcuccccgugugcccgcugauccccggcagcaccacgaccaacaccgggcccugcaagaccugcacgacccccgcccagggcaacuccauguucccgagcugcugcugcaccaagcccaccgacggcaacugcacgugcauccccauccccuccagcugggcguucgccaaguaccugugggagugggccuccgugcgcuucagcuggcucucccugcuggucccguucgugcagugguucguggggcucagccccaccgucuggcuguccgccaucuggaugaugugguacuggggccccagccuguacuccaucgugagccccuucaucccgcuccugcccaucuucuucugccuguggguguacaucugaggacuaguuauaagacugacuagcccgaugggccucccaacgggcccuccuccccuccuugcaccgagauuaauaaaaaaaaaaaaaaaaaaaaaaaaaaaaaaaaaaaaaaaaaaaaaaaaaaaaaaaaaaaaaaaaugcaucccccccccccccccccccccccccccccccaaaggcucuuuucagagccaccagaauu

SEQ ID NO: 1547 - RNA, 676 nt, Artificial Sequence
  mRNA Design i-3 (A64-N5-C30-hSL-N5) comprising derived and/or modified sequence from Pf(3D7)__XP_001351122.1__HsALB_Pf-CSP(19-152) (opt1)
gggagaaagcuuaccaugaagugggugaccuucaucagccuccuguuccuguucuccagcgccuacucccuguuccaggaguaccagugcuacggcagcuccagcaacacccgcguccucaacgagcugaacuacgacaacgccgggacgaaccuguacaacgagcucgagaugaacuacuacggcaagcaggagaacugguacucccugaagaagaacagccggucccugggggagaacgacgacggcaacaacgaggacaacgagaagcuccgcaagcccaagcacaagaagcugaagcagccggcggacgggaaccccgaccccaacgccaaccccaacguggacccgaacgccaaccccaacguggaccccaacgccaaccccaacgucgacccgaacgccaaccccaacgcgaaccccaacgccaaccccaacgccaacccgaacgccaaccccaacgcgaaccccugaggacuaguuauaagacugacuagcccgaugggccucccaacgggcccuccuccccuccuugcaccgagauuaauaaaaaaaaaaaaaaaaaaaaaaaaaaaaaaaaaaaaaaaaaaaaaaaaaaaaaaaaaaaaaaaaugcaucccccccccccccccccccccccccccccccaaaggcucuuuucagagccaccagaauu

SEQ ID NO: 1548 - RNA, 796 nt, Artificial Sequence
  mRNA Design i-3 (A64-N5-C30-hSL-N5) comprising derived and/or modified sequence from Pf(3D7)__XP_001351122.1__HsALB_Pf-CSP(19-192) (opt1)
gggagaaagcuuaccaugaagugggugaccuucaucagccuccuguuccuguucuccagcgccuacucccuguuccaggaguaccagugcuacggcagcuccagcaacacccgcguccucaacgagcugaacuacgacaacgccgggacgaaccuguacaacgagcucgagaugaacuacuacggcaagcaggagaacugguacucccugaagaagaacagccggucccugggggagaacgacgacggcaacaacgaggacaacgagaagcuccgcaagcccaagcacaagaagcugaagcagccggcggacgggaaccccgaccccaacgccaaccccaacguggacccgaacgccaaccccaacguggaccccaacgccaaccccaacgucgacccgaacgccaaccccaacgcgaaccccaacgccaaccccaacgccaacccgaacgccaaccccaacgcgaaccccaacgccaaccccaacgccaacccgaacgccaaccccaacgccaaccccaacgcgaaccccaacgccaacccgaacgccaaccccaacgccaaccccaacgccaaccccaacgcgaacccgugaggacuaguuauaagacugacuagcccgaugggccucccaacgggcccuccuccccuccuugcaccgagauuaauaaaaaaaaaaaaaaaaaaaaaaaaaaaaaaaaaaaaaaaaaaaaaaaaaaaaaaaaaaaaaaaaugcaucccccccccccccccccccccccccccccccaaaggcucuuuucagagccaccagaauu

SEQ ID NO: 1549 - RNA, 1036 nt, Artificial Sequence
  mRNA Design i-3 (A64-N5-C30-hSL-N5) comprising derived and/or modified sequence from Pf(3D7)__XP_001351122.1__HsALB_Pf-CSP(19-272) (opt1)
gggagaaagcuuaccaugaagugggugaccuucaucagccuccuguuccuguucuccagcgccuacucccuguuccaggaguaccagugcuacggcagcuccagcaacacccgcguccucaacgagcugaacuacgacaacgccgggacgaaccuguacaacgagcucgagaugaacuacuacggcaagcaggagaacugguacucccugaagaagaacagccggucccugggggagaacgacgacggcaacaacgaggacaacgagaagcuccgcaagcccaagcacaagaagcugaagcagccggcggacgggaaccccgaccccaacgccaaccccaacguggacccgaacgccaaccccaacguggaccccaacgccaaccccaacgucgacccgaacgccaaccccaacgcgaaccccaacgccaaccccaacgccaacccgaacgccaaccccaacgcgaaccccaacgccaaccccaacgccaacccgaacgccaaccccaacgccaaccccaacgcgaaccccaacgccaacccgaacgccaaccccaacgccaaccccaacgccaaccccaacgcgaacccgaacgccaaccccaacguggaccccaacgccaaccccaacgccaacccgaacgccaaccccaacgcgaaccccaacgccaacccgaacgccaaccccaacgccaaccccaacgccaaccccaacgcgaacccgaacgccaaccccaacgccaaccccaacgccaaccccaacgcgaacccgaacgccaaccccaacgccaaccccaacgccaaccccaacgccaacccgaacgcgaaccccugaggacuaguuauaagacugacuagcccgaugggccucccaacgggcccuccuccccuccuugcaccgagauuaauaaaaaaaaaaaaaaaaaaaaaaaaaaaaaaaaaaaaaaaaaaaaaaaaaaaaaaaaaaaaaaaaugcaucccccccccccccccccccccccccccccccaaaggcucuuuucagagccaccagaauu

SEQ ID NO: 1550 - RNA, 1198 nt, Artificial Sequence
  mRNA Design i-3 (A64-N5-C30-hSL-N5) comprising derived and/or modified sequence from Pf(3D7)__XP_001351122.1__HsALB_Pf-CSP(19-272)_L(AAY)_Pf-CSP(310-3 27)_L(AAY)_Pf-CSP(346-375) (opt1)
gggagaaagcuuaccaugaagugggugaccuucaucagccuccuguuccuguucuccagcgccuacucccuguuccaggaguaccagugcuacggcagcuccagcaacacccgcguccucaacgagcugaacuacgacaacgccgggacgaaccuguacaacgagcucgagaugaacuacuacggcaagcaggagaacugguacucccugaagaagaacagccggucccugggggagaacgacgacggcaacaacgaggacaacgagaagcuccgcaagcccaagcacaagaagcugaagcagccggcggacgggaaccccgaccccaacgccaaccccaacguggacccgaacgccaaccccaacguggaccccaacgccaaccccaacgucgacccgaacgccaaccccaacgcgaaccccaacgccaaccccaacgccaacccgaacgccaaccccaacgcgaaccccaacgccaaccccaacgccaacccgaacgccaaccccaacgccaaccccaacgcgaaccccaacgccaacccgaacgccaaccccaacgccaaccccaacgccaaccccaacgcgaacccgaacgccaaccccaacguggaccccaacgccaaccccaacgccaacccgaacgccaaccccaacgcgaaccccaacgccaacccgaacgccaaccccaacgccaaccccaacgccaaccccaacgcgaacccgaacgccaaccccaacgccaaccccaacgccaaccccaacgcgaacccgaacgccaaccccaacgccaaccccaacgccaaccccaacgccaacccgaacgcgaaccccgccgccuacgagcccagcgacaagcacaucaaggaguaccugaacaagauccagaacucccucgccgccuacaucaagcccggcagcgcgaacaagccgaaggacgagcuggacuacgccaacgacaucgagaagaagaucugcaagauggagaagugcuccugaggacuaguuauaagacugacuagcccgaugggccucccaacgggcccuccuccccuccuugcaccgagauuaauaaaaaaaaaaaaaaaaaaaaaaaaaaaaaaaaaaaaaaaaaaaaaaaaaaaaaaaaaaaaaaaaugcaucccccccccccccccccccccccccccccccaaaggcucuuuucagagccaccagaauu

SEQ ID NO: 1551 - RNA, 1159 nt, Artificial Sequence
  mRNA Design i-3 (A64-N5-C30-hSL-N5) comprising derived and/or modified sequence from Pf(3D7)__XP_001351122.1__HsALB_Pf-CSP(19-272)_L(AAY)_Pf-CSP(346-3 65)_L(AAY)_P2 (opt1)
gggagaaagcuuaccaugaagugggugaccuucaucagccuccuguuccuguucuccagcgccuacucccuguuccaggaguaccagugcuacggcagcuccagcaacacccgcguccucaacgagcugaacuacgacaacgccgggacgaaccuguacaacgagcucgagaugaacuacuacggcaagcaggagaacugguacucccugaagaagaacagccggucccugggggagaacgacgacggcaacaacgaggacaacgagaagcuccgcaagcccaagcacaagaagcugaagcagccggcggacgggaaccccgaccccaacgccaaccccaacguggacccgaacgccaaccccaacguggaccccaacgccaaccccaacgucgacccgaacgccaaccccaacgcgaaccccaacgccaaccccaacgccaacccgaacgccaaccccaacgcgaaccccaacgccaaccccaacgccaacccgaacgccaaccccaacgccaaccccaacgcgaaccccaacgccaacccgaacgccaaccccaacgccaaccccaacgccaaccccaacgcgaacccgaacgccaaccccaacguggaccccaacgccaaccccaacgccaacccgaacgccaaccccaacgcgaaccccaacgccaacccgaacgccaaccccaacgccaaccccaacgccaaccccaacgcgaacccgaacgccaaccccaacgccaaccccaacgccaaccccaacgcgaacccgaacgccaaccccaacgccaaccccaacgccaaccccaacgccaacccgaacgcgaaccccgccgccuacaucaagcccggcagcgccaacaagcccaaggacgagcuggacuacgccaacgacaucgaggcggccuaccaguacaucaaggccaacuccaaguucaucggcaucaccgagcucugaggacuaguuauaagacugacuagcccgaugggccucccaacgggcccuccuccccuccuugcaccgagauuaauaaaaaaaaaaaaaaaaaaaaaaaaaaaaaaaaaaaaaaaaaaaaaaaaaaaaaaaaaaaaaaaaugcaucccccccccccccccccccccccccccccccaaaggcucuuuucagagccaccagaauu

SEQ ID NO: 1552 - RNA, 1153 nt, Artificial Sequence
  mRNA Design i-3 (A64-N5-C30-hSL-N5) comprising derived and/or modified sequence from Pf(3D7)__XP_001351122.1__HsALB_Pf-CSP(19-272)_L(AAY)_Pf-CSP(346-3 65)_L(AAY)_PADRE (opt1)
gggagaaagcuuaccaugaagugggugaccuucaucagccuccuguuccuguucuccagcgccuacucccuguuccaggaguaccagugcuacggcagcuccagcaacacccgcguccucaacgagcugaacuacgacaacgccgggacgaaccuguacaacgagcucgagaugaacuacuacggcaagcaggagaacugguacucccugaagaagaacagccggucccugggggagaacgacgacggcaacaacgaggacaacgagaagcuccgcaagcccaagcacaagaagcugaagcagccggcggacgggaaccccgaccccaacgccaaccccaacguggacccgaacgccaaccccaacguggaccccaacgccaaccccaacgucgacccgaacgccaaccccaacgcgaaccccaacgccaaccccaacgccaacccgaacgccaaccccaacgcgaaccccaacgccaaccccaacgccaacccgaacgccaaccccaacgccaaccccaacgcgaaccccaacgccaacccgaacgccaaccccaacgccaaccccaacgccaaccccaacgcgaacccgaacgccaaccccaacguggaccccaacgccaaccccaacgccaacccgaacgccaaccccaacgcgaaccccaacgccaacccgaacgccaaccccaacgccaaccccaacgccaaccccaacgcgaacccgaacgccaaccccaacgccaaccccaacgccaaccccaacgcgaacccgaacgccaaccccaacgccaaccccaacgccaaccccaacgccaacccgaacgcgaaccccgccgccuacaucaagcccggcagcgccaacaagcccaaggacgagcuggacuacgccaacgacaucgaggcggccuacgccaaguucguggccgccuggacccucaaggcggccgccugaggacuaguuauaagacugacuagcccgaugggccucccaacgggcccuccuccccuccuugcaccgagauuaauaaaaaaaaaaaaaaaaaaaaaaaaaaaaaaaaaaaaaaaaaaaaaaaaaaaaaaaaaaaaaaaaugcaucccccccccccccccccccccccccccccccaaaggcucuuuucagagccaccagaauu

SEQ ID NO: 1553 - RNA, 1210 nt, Artificial Sequence
  mRNA Design i-3 (A64-N5-C30-hSL-N5) comprising derived and/or modified sequence from Pf(3D7)__XP_001351122.1__HsALB_Pf-CSP(19-272)_L(G4S)_Pf-CSP(310-3 27)_L(G4S)_Pf-CSP(346-375) (opt1)
gggagaaagcuuaccaugaagugggugaccuucaucagccuccuguuccuguucuccagcgccuacucccuguuccaggaguaccagugcuacggcagcuccagcaacacccgcguccucaacgagcugaacuacgacaacgccgggacgaaccuguacaacgagcucgagaugaacuacuacggcaagcaggagaacugguacucccugaagaagaacagccggucccugggggagaacgacgacggcaacaacgaggacaacgagaagcuccgcaagcccaagcacaagaagcugaagcagccggcggacgggaaccccgaccccaacgccaaccccaacguggacccgaacgccaaccccaacguggaccccaacgccaaccccaacgucgacccgaacgccaaccccaacgcgaaccccaacgccaaccccaacgccaacccgaacgccaaccccaacgcgaaccccaacgccaaccccaacgccaacccgaacgccaaccccaacgccaaccccaacgcgaaccccaacgccaacccgaacgccaaccccaacgccaaccccaacgccaaccccaacgcgaacccgaacgccaaccccaacguggaccccaacgccaaccccaacgccaacccgaacgccaaccccaacgcgaaccccaacgccaacccgaacgccaaccccaacgccaaccccaacgccaaccccaacgcgaacccgaacgccaaccccaacgccaaccccaacgccaaccccaacgcgaacccgaacgccaaccccaacgccaaccccaacgccaaccccaacgccaacccgaacgcgaaccccggcggcgggggcagcgagcccuccgacaagcacaucaaggaguaccugaacaagauccagaacagccucgggggcgggggcuccaucaagcccggcagcgccaacaagccgaaggacgagcuggacuacgccaacgacaucgagaagaagaucugcaagauggagaagugcuccugaggacuaguuauaagacugacuagcccgaugggccucccaacgggcccuccuccccuccuugcaccgagauuaauaaaaaaaaaaaaaaaaaaaaaaaaaaaaaaaaaaaaaaaaaaaaaaaaaaaaaaaaaaaaaaaaugcaucccccccccccccccccccccccccccccccaaaggcucuuuucagagccaccagaauu

SEQ ID NO: 1554 - RNA, 1195 nt, Artificial Sequence
  mRNA Design i-3 (A64-N5-C30-hSL-N5) comprising derived and/or modified sequence from Pf(3D7)__XP_001351122.1__HsALB_Pf-CSP(19-272)_L(G4S)_Pf-CSP(310-3 27)_Pf-CSP(346-375) (opt1)
gggagaaagcuuaccaugaagugggugaccuucaucagccuccuguuccuguucuccagcgccuacucccuguuccaggaguaccagugcuacggcagcuccagcaacacccgcguccucaacgagcugaacuacgacaacgccgggacgaaccuguacaacgagcucgagaugaacuacuacggcaagcaggagaacugguacucccugaagaagaacagccggucccugggggagaacgacgacggcaacaacgaggacaacgagaagcuccgcaagcccaagcacaagaagcugaagcagccggcggacgggaaccccgaccccaacgccaaccccaacguggacccgaacgccaaccccaacguggaccccaacgccaaccccaacgucgacccgaacgccaaccccaacgcgaaccccaacgccaaccccaacgccaacccgaacgccaaccccaacgcgaaccccaacgccaaccccaacgccaacccgaacgccaaccccaacgccaaccccaacgcgaaccccaacgccaacccgaacgccaaccccaacgccaaccccaacgccaaccccaacgcgaacccgaacgccaaccccaacguggaccccaacgccaaccccaacgccaacccgaacgccaaccccaacgcgaaccccaacgccaacccgaacgccaaccccaacgccaaccccaacgccaaccccaacgcgaacccgaacgccaaccccaacgccaaccccaacgccaaccccaacgcgaacccgaacgccaaccccaacgccaaccccaacgccaaccccaacgccaacccgaacgcgaaccccggcggcgggggcagcgagcccuccgacaagcacaucaaggaguaccugaacaagauccagaacagccucaucaagcccggguccgccaacaagccgaaggacgagcuggacuacgccaacgacaucgagaagaagaucugcaagauggagaagugcagcugaggacuaguuauaagacugacuagcccgaugggccucccaacgggcccuccuccccuccuugcaccgagauuaauaaaaaaaaaaaaaaaaaaaaaaaaaaaaaaaaaaaaaaaaaaaaaaaaaaaaaaaaaaaaaaaaugcaucccccccccccccccccccccccccccccccaaaggcucuuuucagagccaccagaauu

SEQ ID NO: 1555 - RNA, 1195 nt, Artificial Sequence
  mRNA Design i-3 (A64-N5-C30-hSL-N5) comprising derived and/or modified sequence from Pf(3D7)__XP_001351122.1__HsALB_Pf-CSP(19-325) (opt1)
gggagaaagcuuaccaugaagugggugaccuucaucagccuccuguuccuguucuccagcgccuacucccuguuccaggaguaccagugcuacggcagcuccagcaacacccgcguccucaacgagcugaacuacgacaacgccgggacgaaccuguacaacgagcucgagaugaacuacuacggcaagcaggagaacugguacucccugaagaagaacagccggucccugggggagaacgacgacggcaacaacgaggacaacgagaagcuccgcaagcccaagcacaagaagcugaagcagccggcggacgggaaccccgaccccaacgccaaccccaacguggacccgaacgccaaccccaacguggaccccaacgccaaccccaacgucgacccgaacgccaaccccaacgcgaaccccaacgccaaccccaacgccaacccgaacgccaaccccaacgcgaaccccaacgccaaccccaacgccaacccgaacgccaaccccaacgccaaccccaacgcgaaccccaacgccaacccgaacgccaaccccaacgccaaccccaacgccaaccccaacgcgaacccgaacgccaaccccaacguggaccccaacgccaaccccaacgccaacccgaacgccaaccccaacgcgaaccccaacgccaacccgaacgccaaccccaacgccaaccccaacgccaaccccaacgcgaacccgaacgccaaccccaacgccaaccccaacgccaaccccaacgcgaacccgaacgccaaccccaacgccaaccccaacgccaaccccaacgccaacccgaacgcgaaccccaacaagaacaaccagggcaacggccaggggcacaacaugcccaacgaccccaaccggaacguggacgagaacgccaacgccaacagcgccgucaagaacaacaacaacgaggagccguccgacaagcacaucaaggaguaccugaacaagauccagaacugaggacuaguuauaagacugacuagcccgaugggccucccaacgggcccuccuccccuccuugcaccgagauuaauaaaaaaaaaaaaaaaaaaaaaaaaaaaaaaaaaaaaaaaaaaaaaaaaaaaaaaaaaaaaaaaaugcaucccccccccccccccccccccccccccccccaaaggcucuuuucagagccaccagaauu

SEQ ID NO: 1556 - RNA, 1372 nt, Artificial Sequence
  mRNA Design i-3 (A64-N5-C30-hSL-N5) comprising derived and/or modified sequence from Pf(3D7)__XP_001351122.1__HsALB_Pf-CSP(19-384) (opt1)
gggagaaagcuuaccaugaagugggugaccuucaucagccuccuguuccuguucuccagcgccuacucccuguuccaggaguaccagugcuacggcagcuccagcaacacccgcguccucaacgagcugaacuacgacaacgccgggacgaaccuguacaacgagcucgagaugaacuacuacggcaagcaggagaacugguacucccugaagaagaacagccggucccugggggagaacgacgacggcaacaacgaggacaacgagaagcuccgcaagcccaagcacaagaagcugaagcagccggcggacgggaaccccgaccccaacgccaaccccaacguggacccgaacgccaaccccaacguggaccccaacgccaaccccaacgucgacccgaacgccaaccccaacgcgaaccccaacgccaaccccaacgccaacccgaacgccaaccccaacgcgaaccccaacgccaaccccaacgccaacccgaacgccaaccccaacgccaaccccaacgcgaaccccaacgccaacccgaacgccaaccccaacgccaaccccaacgccaaccccaacgcgaacccgaacgccaaccccaacguggaccccaacgccaaccccaacgccaacccgaacgccaaccccaacgcgaaccccaacgccaacccgaacgccaaccccaacgccaaccccaacgccaaccccaacgcgaacccgaacgccaaccccaacgccaaccccaacgccaaccccaacgcgaacccgaacgccaaccccaacgccaaccccaacgccaaccccaacgccaacccgaacgcgaaccccaacaagaacaaccagggcaacggccaggggcacaacaugcccaacgaccccaaccggaacguggacgagaacgccaacgccaacagcgccgucaagaacaacaacaacgaggagccguccgacaagcacaucaaggaguaccugaacaagauccagaacagccucuccaccgaguggagccccugcuccgugaccugcggcaacgggauccaggugcgcaucaagcccggcagcgccaacaagcccaaggacgagcuggacuacgcgaacgacaucgagaagaagaucugcaagauggagaagugcuccagcgucuucaacguggugaacuccagcugaggacuaguuauaagacugacuagcccgaugggccucccaacgggcccuccuccccuccuugcaccgagauuaauaaaaaaaaaaaaaaaaaaaaaaaaaaaaaaaaaaaaaaaaaaaaaaaaaaaaaaaaaaaaaaaaugcaucccccccccccccccccccccccccccccccaaaggcucuuuucagagccaccagaauu

SEQ ID NO: 1557 - RNA, 1510 nt, Artificial Sequence
  mRNA Design i-3 (A64-N5-C30-hSL-N5) comprising derived and/or modified sequence from Pf(3D7)__XP_001351122.1__HsALB_Pf-CSP(19-384)_TM domain HA (opt1)
gggagaaagcuuaccaugaagugggugaccuucaucagccuccuguuccuguucuccagcgccuacucccuguuccaggaguaccagugcuacggcagcuccagcaacacccgcguccucaacgagcugaacuacgacaacgccgggacgaaccuguacaacgagcucgagaugaacuacuacggcaagcaggagaacugguacucccugaagaagaacagccggucccugggggagaacgacgacggcaacaacgaggacaacgagaagcuccgcaagcccaagcacaagaagcugaagcagccggcggacgggaaccccgaccccaacgccaaccccaacguggacccgaacgccaaccccaacguggaccccaacgccaaccccaacgucgacccgaacgccaaccccaacgcgaaccccaacgccaaccccaacgccaacccgaacgccaaccccaacgcgaaccccaacgccaaccccaacgccaacccgaacgccaaccccaacgccaaccccaacgcgaaccccaacgccaacccgaacgccaaccccaacgccaaccccaacgccaaccccaacgcgaacccgaacgccaaccccaacguggaccccaacgccaaccccaacgccaacccgaacgccaaccccaacgcgaaccccaacgccaacccgaacgccaaccccaacgccaaccccaacgccaaccccaacgcgaacccgaacgccaaccccaacgccaaccccaacgccaaccccaacgcgaacccgaacgccaaccccaacgccaaccccaacgccaaccccaacgccaacccgaacgcgaaccccaacaagaacaaccagggcaacggccaggggcacaacaugcccaacgaccccaaccggaacguggacgagaacgccaacgccaacagcgccgucaagaacaacaacaacgaggagccguccgacaagcacaucaaggaguaccugaacaagauccagaacagccucuccaccgaguggagccccugcuccgugaccugcggcaacgggauccaggugcgcaucaagcccggcagcgccaacaagcccaaggacgagcuggacuacgcgaacgacaucgagaagaagaucugcaagauggagaagugcuccagcgucuucaacguggugaacuccagcaagcuggagagcacccggaucuaccagauccucgccaucuacuccacggucgccagcucccuggugcugguggucagccucggggccaucuccuucuggaugugcagcaacggcucccugcagugccgcaucugcaucugaggacuaguuauaagacugacuagcccgaugggccucccaacgggcccuccuccccuccuugcaccgagauuaauaaaaaaaaaaaaaaaaaaaaaaaaaaaaaaaaaaaaaaaaaaaaaaaaaaaaaaaaaaaaaaaaugcaucccccccccccccccccccccccccccccccaaaggcucuuuucagagccaccagaauu

SEQ ID NO: 1558 - RNA, 1222 nt, Artificial Sequence
  mRNA Design i-3 (A64-N5-C30-hSL-N5) comprising derived and/or modified sequence from Pf(3D7)__XP_001351122.1__HsALB_Pf-CSP(82-397) (opt1)
gggagaaagcuuaccaugaagugggugaccuucaucagccuccuguuccuguucuccagcgccuacuccgacaacgagaagcugcgcaagcccaagcacaagaagcucaagcagccggccgacggcaaccccgaccccaacgcgaaccccaacgucgacccgaacgccaaccccaacguggaccccaacgccaaccccaacguggacccgaacgccaaccccaacgccaaccccaacgcgaaccccaacgccaacccgaacgccaaccccaacgccaaccccaacgcgaaccccaacgccaacccgaacgccaaccccaacgccaaccccaacgccaaccccaacgcgaacccgaacgccaaccccaacgccaaccccaacgccaaccccaacgccaacccgaacgcgaaccccaacgucgaccccaacgccaaccccaacgccaacccgaacgccaaccccaacgccaaccccaacgcgaacccgaacgccaaccccaacgccaaccccaacgccaaccccaacgccaacccgaacgcgaaccccaacgccaaccccaacgccaaccccaacgccaacccgaacgcgaaccccaacgccaaccccaacgccaaccccaacgccaacccgaacgccaaccccaacaagaacaaccaggggaacggccaggggcacaacaugcccaacgaccccaaccggaacguggacgagaacgcgaacgccaacagcgccgugaagaacaacaacaacgaggagccguccgacaagcacaucaaggaguaccugaacaagauccagaacagccuguccaccgaguggagccccugcuccgucacgugcggcaacgggauccaggugcgcaucaagcccggcagcgccaacaagcccaaggacgagcucgacuacgccaacgacaucgagaagaagaucugcaagauggagaagugcuccagcguguucaacgucgugaacuccagcaucggccugaucauggugcuguccuuccucuuccugaacugaggacuaguuauaagacugacuagcccgaugggccucccaacgggcccuccuccccuccuugcaccgagauuaauaaaaaaaaaaaaaaaaaaaaaaaaaaaaaaaaaaaaaaaaaaaaaaaaaaaaaaaaaaaaaaaaugcaucccccccccccccccccccccccccccccccaaaggcucuuuucagagccaccagaauu

SEQ ID NO: 1559 - RNA, 574 nt, Artificial Sequence
  mRNA Design i-3 (A64-N5-C30-hSL-N5) comprising derived and/or modified sequence from Pf(3D7)__XP_001351122.1__HsALB_Pf-CSP(93-192) (opt1)
gggagaaagcuuaccaugaagugggugaccuucaucagccuccuguuccuguucuccagcgccuacuccaagcugaagcagcccgccgacggcaacccggaccccaacgcgaaccccaacgucgaccccaacgccaacccgaacguggaccccaacgccaaccccaacguggaccccaacgccaacccgaacgccaaccccaacgcgaaccccaacgccaaccccaacgccaacccgaacgccaaccccaacgcgaaccccaacgccaaccccaacgccaacccgaacgccaaccccaacgccaaccccaacgcgaaccccaacgccaacccgaacgccaaccccaacgccaaccccaacgccaaccccugaggacuaguuauaagacugacuagcccgaugggccucccaacgggcccuccuccccuccuugcaccgagauuaauaaaaaaaaaaaaaaaaaaaaaaaaaaaaaaaaaaaaaaaaaaaaaaaaaaaaaaaaaaaaaaaaugcaucccccccccccccccccccccccccccccccaaaggcucuuuucagagccaccagaauu

SEQ ID NO: 1560 - RNA, 814 nt, Artificial Sequence
  mRNA Design i-3 (A64-N5-C30-hSL-N5) comprising derived and/or modified sequence from Pf(3D7)__XP_001351122.1__HsALB_Pf-CSP(93-272) (opt1)
gggagaaagcuuaccaugaagugggugaccuucaucagccuccuguuccuguucuccagcgccuacuccaagcugaagcagcccgccgacggcaacccggaccccaacgcgaaccccaacgucgaccccaacgccaacccgaacguggaccccaacgccaaccccaacguggaccccaacgccaacccgaacgccaaccccaacgcgaaccccaacgccaaccccaacgccaacccgaacgccaaccccaacgcgaaccccaacgccaaccccaacgccaacccgaacgccaaccccaacgccaaccccaacgcgaaccccaacgccaacccgaacgccaaccccaacgccaaccccaacgccaaccccaacgcgaacccgaacgucgaccccaacgccaaccccaacgccaaccccaacgccaacccgaacgccaaccccaacgcgaaccccaacgccaacccgaacgccaaccccaacgccaaccccaacgccaaccccaacgcgaacccgaacgccaaccccaacgccaaccccaacgccaaccccaacgcgaacccgaacgccaaccccaacgccaaccccaacgccaaccccaacgccaacccgugaggacuaguuauaagacugacuagcccgaugggccucccaacgggcccuccuccccuccuugcaccgagauuaauaaaaaaaaaaaaaaaaaaaaaaaaaaaaaaaaaaaaaaaaaaaaaaaaaaaaaaaaaaaaaaaaugcaucccccccccccccccccccccccccccccccaaaggcucuuuucagagccaccagaauu

SEQ ID NO: 1561 - RNA, 1189 nt, Artificial Sequence
  mRNA Design i-3 (A64-N5-C30-hSL-N5) comprising derived and/or modified sequence from Pf(3D7)__XP_001351122.1__HsALB_Pf-CSP(93-397) (opt1)
gggagaaagcuuaccaugaagugggugaccuucaucagccuccuguuccuguucuccagcgccuacuccaagcugaagcagcccgccgacggcaacccggaccccaacgcgaaccccaacgucgaccccaacgccaacccgaacguggaccccaacgccaaccccaacguggaccccaacgccaacccgaacgccaaccccaacgcgaaccccaacgccaaccccaacgccaacccgaacgccaaccccaacgcgaaccccaacgccaaccccaacgccaacccgaacgccaaccccaacgccaaccccaacgcgaaccccaacgccaacccgaacgccaaccccaacgccaaccccaacgccaaccccaacgcgaacccgaacgucgaccccaacgccaaccccaacgccaaccccaacgccaacccgaacgccaaccccaacgcgaaccccaacgccaacccgaacgccaaccccaacgccaaccccaacgccaaccccaacgcgaacccgaacgccaaccccaacgccaaccccaacgccaaccccaacgcgaacccgaacgccaaccccaacgccaaccccaacgccaaccccaacgccaacccgaacaagaacaaccaggggaacggccaggggcacaacaugcccaacgaccccaaccgcaacguggacgagaacgcgaacgccaacagcgccgugaagaacaacaacaacgaggagcccuccgacaagcacaucaaggaguaccucaacaagauccagaacagccuguccaccgaguggagcccgugcuccgucacgugcggcaacgggauccaggugcggaucaagcccggcagcgccaacaagcccaaggacgagcuggacuacgccaacgacaucgagaagaagaucugcaagauggagaagugcuccagcguguucaacgucgugaacuccagcaucggccucaucauggugcuguccuuccuguuccucaacugaggacuaguuauaagacugacuagcccgaugggccucccaacgggcccuccuccccuccuugcaccgagauuaauaaaaaaaaaaaaaaaaaaaaaaaaaaaaaaaaaaaaaaaaaaaaaaaaaaaaaaaaaaaaaaaaugcaucccccccccccccccccccccccccccccccaaaggcucuuuucagagccaccagaauu

SEQ ID NO: 1562 - RNA, 559 nt, Artificial Sequence
  mRNA Design i-3 (A64-N5-C30-hSL-N5) comprising derived and/or modified sequence from Pf(3D7)__XP_001351122.1__HsALB_Pf-CSP(98-192) (opt1)
gggagaaagcuuaccaugaagugggugaccuucaucagccuccuguuccuguucuccagcgccuacuccgccgacggcaaccccgacccgaacgcgaaccccaacgucgaccccaacgccaaccccaacguggacccgaacgccaaccccaacguggaccccaacgccaaccccaacgccaacccgaacgcgaaccccaacgccaaccccaacgccaaccccaacgccaacccgaacgcgaaccccaacgccaaccccaacgccaaccccaacgccaacccgaacgccaaccccaacgcgaaccccaacgccaaccccaacgccaacccgaacgccaaccccaacgccaaccccugaggacuaguuauaagacugacuagcccgaugggccucccaacgggcccuccuccccuccuugcaccgagauuaauaaaaaaaaaaaaaaaaaaaaaaaaaaaaaaaaaaaaaaaaaaaaaaaaaaaaaaaaaaaaaaaaugcaucccccccccccccccccccccccccccccccaaaggcucuuuucagagccaccagaauu

SEQ ID NO: 1563 - RNA, 799 nt, Artificial Sequence
  mRNA Design i-3 (A64-N5-C30-hSL-N5) comprising derived and/or modified sequence from Pf(3D7)__XP_001351122.1__HsALB_Pf-CSP(98-272) (opt1)
gggagaaagcuuaccaugaagugggugaccuucaucagccuccuguuccuguucuccagcgccuacuccgccgacggcaaccccgacccgaacgcgaaccccaacgucgaccccaacgccaaccccaacguggacccgaacgccaaccccaacguggaccccaacgccaaccccaacgccaacccgaacgcgaaccccaacgccaaccccaacgccaaccccaacgccaacccgaacgcgaaccccaacgccaaccccaacgccaaccccaacgccaacccgaacgccaaccccaacgcgaaccccaacgccaaccccaacgccaacccgaacgccaaccccaacgccaaccccaacgcgaaccccaacgucgacccgaacgccaaccccaacgccaaccccaacgccaaccccaacgccaacccgaacgcgaaccccaacgccaaccccaacgccaacccgaacgccaaccccaacgccaaccccaacgcgaaccccaacgccaacccgaacgccaaccccaacgccaaccccaacgcgaaccccaacgccaacccgaacgccaaccccaacgccaaccccaacgccaaccccugaggacuaguuauaagacugacuagcccgaugggccucccaacgggcccuccuccccuccuugcaccgagauuaauaaaaaaaaaaaaaaaaaaaaaaaaaaaaaaaaaaaaaaaaaaaaaaaaaaaaaaaaaaaaaaaaugcaucccccccccccccccccccccccccccccccaaaggcucuuuucagagccaccagaauu

SEQ ID NO: 1564 - RNA, 1105 nt, Artificial Sequence
  mRNA Design i-3 (A64-N5-C30-hSL-N5) comprising derived and/or modified sequence from Pf(3D7)__XP_001351122.1__HsALB_Pf-CSP(98-374) (opt1)
gggagaaagcuuaccaugaagugggugaccuucaucagccuccuguuccuguucuccagcgccuacuccgccgacggcaaccccgacccgaacgcgaaccccaacgucgaccccaacgccaaccccaacguggacccgaacgccaaccccaacguggaccccaacgccaaccccaacgccaacccgaacgcgaaccccaacgccaaccccaacgccaaccccaacgccaacccgaacgcgaaccccaacgccaaccccaacgccaaccccaacgccaacccgaacgccaaccccaacgcgaaccccaacgccaaccccaacgccaacccgaacgccaaccccaacgccaaccccaacgcgaaccccaacgucgacccgaacgccaaccccaacgccaaccccaacgccaaccccaacgccaacccgaacgcgaaccccaacgccaaccccaacgccaacccgaacgccaaccccaacgccaaccccaacgcgaaccccaacgccaacccgaacgccaaccccaacgccaaccccaacgcgaaccccaacgccaacccgaacgccaaccccaacgccaaccccaacgccaaccccaacaagaacaaccaggggaacggccaggggcacaacaugccgaacgaccccaaccgcaacguggacgagaacgcgaacgccaacagcgccgugaagaacaacaacaacgaggagcccuccgacaagcacaucaaggaguaccugaacaagauccagaacagccucuccaccgaguggagccccugcuccgucacgugcggcaacgggauccaggugcggaucaagccgggcagcgccaacaagcccaaggacgagcuggacuacgccaacgacaucgagaagaagaucugcaagauggagaagugcugaggacuaguuauaagacugacuagcccgaugggccucccaacgggcccuccuccccuccuugcaccgagauuaauaaaaaaaaaaaaaaaaaaaaaaaaaaaaaaaaaaaaaaaaaaaaaaaaaaaaaaaaaaaaaaaaugcaucccccccccccccccccccccccccccccccaaaggcucuuuucagagccaccagaauu

SEQ ID NO: 1565 - RNA, 1174 nt, Artificial Sequence
  mRNA Design i-3 (A64-N5-C30-hSL-N5) comprising derived and/or modified sequence from Pf(3D7)__XP_001351122.1__HsALB_Pf-CSP(98-397) (opt1)
gggagaaagcuuaccaugaagugggugaccuucaucagccuccuguuccuguucuccagcgccuacuccgccgacggcaaccccgacccgaacgcgaaccccaacgucgaccccaacgccaaccccaacguggacccgaacgccaaccccaacguggaccccaacgccaaccccaacgccaacccgaacgcgaaccccaacgccaaccccaacgccaaccccaacgccaacccgaacgcgaaccccaacgccaaccccaacgccaaccccaacgccaacccgaacgccaaccccaacgcgaaccccaacgccaaccccaacgccaacccgaacgccaaccccaacgccaaccccaacgcgaaccccaacgucgacccgaacgccaaccccaacgccaaccccaacgccaaccccaacgccaacccgaacgcgaaccccaacgccaaccccaacgccaacccgaacgccaaccccaacgccaaccccaacgcgaaccccaacgccaacccgaacgccaaccccaacgccaaccccaacgcgaaccccaacgccaacccgaacgccaaccccaacgccaaccccaacgccaaccccaacaagaacaaccaggggaacggccaggggcacaacaugccgaacgaccccaaccgcaacguggacgagaacgcgaacgccaacagcgccgugaagaacaacaacaacgaggagcccuccgacaagcacaucaaggaguaccugaacaagauccagaacagccucuccaccgaguggagccccugcuccgucacgugcggcaacgggauccaggugcggaucaagccgggcagcgccaacaagcccaaggacgagcuggacuacgccaacgacaucgagaagaagaucugcaagauggagaagugcuccagcguguucaacgucgugaacuccagcaucggccugaucauggugcucuccuuccuguuccugaacugaggacuaguuauaagacugacuagcccgaugggccucccaacgggcccuccuccccuccuugcaccgagauuaauaaaaaaaaaaaaaaaaaaaaaaaaaaaaaaaaaaaaaaaaaaaaaaaaaaaaaaaaaaaaaaaaugcaucccccccccccccccccccccccccccccccaaaggcucuuuucagagccaccagaauu

SEQ ID NO: 1566 - RNA, 1501 nt, Artificial Sequence
  mRNA Design i-3 (A64-N5-C30-hSL-N5) comprising derived and/or modified sequence from Pf(3D7)__XP_001351122.1__HsALB_Pf-CSP(199-377)_L(PVTN)_HBsAg (opt1)
gggagaaagcuuaccaugaagugggugaccuucaucagccuccuguuccuguucuccagcgccuacuccgaccccaacgccaacccgaacgcgaaccccaacgccaaccccaacgccaaccccaacgccaacccgaacgccaaccccaacgcgaaccccaacgccaaccccaacgccaacccgaacgccaaccccaacgcgaaccccaacgccaaccccaacgccaacccgaacgccaaccccaacgccaaccccaacgcgaaccccaacgccaacccgaacgccaaccccaacaagaacaaccagggcaacgggcagggccacaacaugcccaacgaccccaaccgcaacgucgacgagaacgccaacgccaacagcgcggugaagaacaacaacaacgaggagccguccgacaagcacaucaaggaguaccugaacaagauccagaacagccucuccaccgaguggagccccugcuccgugaccugcgggaacggcauccagguccggaucaagcccgggagcgccaacaagcccaaggacgagcuggacuacgccaacgacaucgagaagaagaucugcaagauggagaagugcuccagcgugccggugaccaacauggagaacaucaccuccggcuuccugggcccccuccugguccugcaggccggguucuuccuccugacccgcauccugacgaucccccagagccucgacuccugguggaccagccugaacuuccugggcgggucccccgugugccucggccagaacagccaguccccgaccagcaaccacagccccaccuccugcccgcccaucugccccggguaccgguggaugugccugcgccgguucaucaucuuccuguucauccuccugcugugccucaucuuccugcuggugcuccuggacuaccagggcaugcugcccgucugcccccucaucccgggcagcacgaccaccaacaccgggcccugcaagacgugcaccacccccgcccagggcaacuccauguuccccagcugcugcugcaccaagccgacggacgggaacugcacgugcauccccauccccuccagcugggcguucgccaaguaccugugggagugggccuccgugcgcuucagcuggcugucccuccuggugcccuucguccagugguucgugggccugagcccgaccguguggcucuccgccaucuggaugaugugguacuggggccccagccuguacuccaucgucagccccuucaucccccugcucccgaucuucuucugccuguggguguacaucugaggacuaguuauaagacugacuagcccgaugggccucccaacgggcccuccuccccuccuugcaccgagauuaauaaaaaaaaaaaaaaaaaaaaaaaaaaaaaaaaaaaaaaaaaaaaaaaaaaaaaaaaaaaaaaaaugcaucccccccccccccccccccccccccccccccaaaggcucuuuucagagccaccagaauu

SEQ ID NO: 1567 - RNA, 1240 nt, Artificial Sequence
  mRNA Design i-3 (A64-N5-C30-hSL-N5) comprising derived and/or modified sequence from Pb(ANKA)__XP_022712148.1__Pb-CSP (opt1)
gggagaaagcuuaccaugaagaagugcaccauccugguggucgccagccuccugcuggugaacucccuccugcccggcuacgggcagaacaagagcauccaggcccagcgcaaccugaacgagcucugcuacaacgagggcaacgacaacaagcuguaccacgugcugaacuccaagaacgggaagaucuacaaccggaacaccgucaaccgccuccuggcggacgccccggagggcaagaagaacgagaagaagaacgagaagaucgagcggaacaacaagcugaagcagcccccccccccgcccaaccccaacgaccccccgccccccaaccccaacgacccgcccccccccaacccgaacgaccccccccccccgaaccccaacgacccccccccgcccaacgccaacgacccccccccgcccaacgccaacgaccccgccccgcccaacgcgaacgaccccgcccccccgaacgccaacgaccccgccccccccaacgcgaacgacccggccccccccaacgccaacgaccccccgccccccaaccccaacgacccggccccccccaacgccaacgaccccccgccccccaaccccaacgacccggcgcccccccaggggaacaacaacccgcagccccagccccgcccccagccgcagccccagccccagccccagccgcagccccagccccagccccagccgcggccccagccccagccccagccgggcggcaacaacaacaacaagaacaacaacaacgacgacagcuacauccccuccgccgagaagauccucgaguucgugaagcagauccgcgacagcaucacggaggaguggucccagugcaacgugaccugcgggagcggcauccggguccgcaagcggaagggguccaacaagaaggccgaggaccugacccuggaggacaucgacaccgagaucugcaagauggacaagugcagcuccaucuucaacaucgugagcaacucccucggcuucgugauccugcugguccucguguucuucaacugaggacuaguuauaagacugacuagcccgaugggccucccaacgggcccuccuccccuccuugcaccgagauuaauaaaaaaaaaaaaaaaaaaaaaaaaaaaaaaaaaaaaaaaaaaaaaaaaaaaaaaaaaaaaaaaaugcaucccccccccccccccccccccccccccccccaaaggcucuuuucagagccaccagaauu

SEQ ID NO: 1568 - RNA, 1405 nt, Artificial Sequence
  mRNA Design i-3 (A64-N5-C30-hSL-N5) comprising derived and/or modified sequence from Pb(ANKA)__XP_022712148.1__Pb-CSP_L(G4SG4)_TM domain HA (opt1)
gggagaaagcuuaccaugaagaagugcaccauccugguggucgccagccuccugcuggugaacucccuccugcccggcuacgggcagaacaagagcauccaggcccagcgcaaccugaacgagcucugcuacaacgagggcaacgacaacaagcuguaccacgugcugaacuccaagaacgggaagaucuacaaccggaacaccgucaaccgccuccuggcggacgccccggagggcaagaagaacgagaagaagaacgagaagaucgagcggaacaacaagcugaagcagcccccccccccgcccaaccccaacgaccccccgccccccaaccccaacgacccgcccccccccaacccgaacgaccccccccccccgaaccccaacgacccccccccgcccaacgccaacgacccccccccgcccaacgccaacgaccccgccccgcccaacgcgaacgaccccgcccccccgaacgccaacgaccccgccccccccaacgcgaacgacccggccccccccaacgccaacgaccccccgccccccaaccccaacgacccggccccccccaacgccaacgaccccccgccccccaaccccaacgacccggcgcccccccaggggaacaacaacccgcagccccagccccgcccccagccgcagccccagccccagccccagccgcagccccagccccagccccagccgcggccccagccccagccccagccgggcggcaacaacaacaacaagaacaacaacaacgacgacagcuacauccccuccgccgagaagauccucgaguucgugaagcagauccgcgacagcaucacggaggaguggucccagugcaacgugaccugcgggagcggcauccggguccgcaagcggaagggguccaacaagaaggccgaggaccugacccuggaggacaucgacaccgagaucugcaagauggacaagugcagcuccaucuucaacaucgugagcaacucccucggcuucgugauccugcugguccucguguucuucaacgggggcggcgggagcggcgggggcggcaagcuggaguccacgcgcaucuaccagauccuggccaucuacagcaccguggccuccagccucguccugguggugucccugggggcgaucagcuucuggaugugcagcaacggcucccuccagugccggaucugcaucugaggacuaguuauaagacugacuagcccgaugggccucccaacgggcccuccuccccuccuugcaccgagauuaauaaaaaaaaaaaaaaaaaaaaaaaaaaaaaaaaaaaaaaaaaaaaaaaaaaaaaaaaaaaaaaaaugcaucccccccccccccccccccccccccccccccaaaggcucuuuucagagccaccagaauu

SEQ ID NO: 1569 - RNA, 1225 nt, Artificial Sequence
  mRNA Design i-3 (A64-N5-C30-hSL-N5) comprising derived and/or modified sequence from Pb(ANKA)__XP_022712148.1__HsALB_Pb-CSP(24-340) (opt1)
gggagaaagcuuaccaugaagugggugaccuucaucagccugcucuuccuguucuccagcgccuacucccagaacaagagcauccaggcccagcgcaaccugaacgagcucugcuacaacgagggcaacgacaacaagcuguaccacguccugaacuccaagaacgggaagaucuacaaccggaacaccgugaaccgccuccuggcggacgcccccgagggcaagaagaacgagaagaagaacgagaagaucgagcggaacaacaagcugaagcagccgcccccccccccgaaccccaacgacccccccccgcccaaccccaacgaccccccgccccccaaccccaacgacccgcccccccccaacccgaacgaccccccccccccgaacgccaacgaccccccccccccgaacgccaacgaccccgcccccccgaacgcgaacgaccccgccccccccaacgccaacgacccggccccccccaacgcgaacgaccccgccccgcccaacgccaacgacccccccccgcccaaccccaacgaccccgccccgcccaacgccaacgacccccccccgcccaaccccaacgaccccgcgccgccccaggggaacaacaacccccagccgcagccccgcccccagccccagccgcagccccagccccagccccagccgcagccccagccccagccccggccgcagccccagccccagcccggcgggaacaacaacaacaagaacaacaacaacgacgacagcuacaucccguccgccgagaagauccucgaguucgugaagcagauccgcgacagcaucacggaggaguggucccagugcaacgucaccugcggcagcggcauccgggugcgcaagcggaagggguccaacaagaaggccgaggaccugacccuggaggacaucgacaccgagaucugcaagauggacaagugcagcuccaucuucaacaucgugagcaacucccucggcuucgucauccugcuggugcucguguucuucaacugaggacuaguuauaagacugacuagcccgaugggccucccaacgggcccuccuccccuccuugcaccgagauuaauaaaaaaaaaaaaaaaaaaaaaaaaaaaaaaaaaaaaaaaaaaaaaaaaaaaaaaaaaaaaaaaaugcaucccccccccccccccccccccccccccccccaaaggcucuuuucagagccaccagaauu

SEQ ID NO: 1570 - RNA, 1243 nt, Artificial Sequence
  mRNA Design i-3 (A64-N5-C30-hSL-N5) comprising derived and/or modified sequence from Pb(ANKA)__XP_022712148.1__HsIns-iso1_Pb-CSP(24-340) (opt1)
gggagaaagcuuaccauggcccuguggaugcgccuccugccccugcucgcccugcuggcgcucuggggcccggaccccgccgccgcccagaacaagagcauccaggcccagcggaaccugaacgagcugugcuacaacgaggggaacgacaacaagcucuaccacgugcugaacuccaagaacggcaagaucuacaaccgcaacaccgucaaccggcugcucgcggacgcccccgaggggaagaagaacgagaagaagaacgagaagaucgagcgcaacaacaagcugaagcagcccccgcccccccccaacccgaacgaccccccccccccgaaccccaacgacccccccccgcccaaccccaacgaccccccgccccccaaccccaacgacccgcccccccccaacgccaacgacccgccccccccgaacgccaacgaccccgcgccccccaacgccaacgacccggccccccccaacgccaacgaccccgccccgcccaacgcgaacgaccccgcccccccgaacgccaacgaccccccccccccgaaccccaacgaccccgcccccccgaacgccaacgaccccccccccccgaaccccaacgaccccgcgccgccccagggcaacaacaacccccagccccagccgcggccccagccccagccccagccgcagccccagccccagccccagccgcagccccagccccgcccccagccgcagccccagcccgggggcaacaacaacaacaagaacaacaacaacgacgacagcuacauccccuccgccgagaagauccuggaguucgugaagcagauccgggacagcaucaccgaggaguggucccagugcaacgugacgugcggcagcgggauccgcguccggaagcgcaagggcuccaacaagaaggccgaggaccucacccuggaggacaucgacaccgagaucugcaagauggacaagugcagcuccaucuucaacaucgugagcaacucccugggguucgugauccuccugguccugguguucuucaacugaggacuaguuauaagacugacuagcccgaugggccucccaacgggcccuccuccccuccuugcaccgagauuaauaaaaaaaaaaaaaaaaaaaaaaaaaaaaaaaaaaaaaaaaaaaaaaaaaaaaaaaaaaaaaaaaugcaucccccccccccccccccccccccccccccccaaaggcucuuuucagagccaccagaauu

SEQ ID NO: 1571 - RNA, 1222 nt, Artificial Sequence
  mRNA Design i-3 (A64-N5-C30-hSL-N5) comprising derived and/or modified sequence from Pb(ANKA)__XP_022712148.1__HsSPARC_Pb-CSP(24-340) (opt1)
gggagaaagcuuaccaugcgcgccuggaucuucuuccugcucugccuggccggccgggcgcuggcccagaacaagagcauccaggcccagcgcaaccucaacgagcugugcuacaacgaggggaacgacaacaagcuguaccacgugcucaacuccaagaacggcaagaucuacaaccggaacaccgucaaccgccugcuggccgacgcccccgaggggaagaagaacgagaagaagaacgagaagaucgagcggaacaacaagcucaagcagccgcccccccccccgaaccccaacgacccccccccgcccaaccccaacgaccccccgccccccaaccccaacgacccgcccccccccaacccgaacgaccccccccccccgaacgcgaacgaccccccccccccgaacgccaacgaccccgcccccccgaacgccaacgaccccgcgccccccaacgccaacgacccggccccccccaacgccaacgaccccgccccgcccaacgcgaacgacccccccccgcccaaccccaacgaccccgccccgcccaacgccaacgacccccccccgcccaaccccaacgaccccgccccgccccagggcaacaacaacccccagccgcagccccgcccccagccccagccgcagccccagccccagccccagccgcagccccagccccagccccggccgcagccccagccccagcccgggggcaacaacaacaacaagaacaacaacaacgacgacagcuacaucccguccgccgagaagauccuggaguucgugaagcagauccgcgacagcaucaccgaggaguggucccagugcaacgugacgugcggcagcgggauccggguccgcaagcggaagggcuccaacaagaaggcggaggaccugacccucgaggacaucgacaccgagaucugcaagauggacaagugcagcuccaucuucaacaucgugagcaacucccugggguucgugauccugcucguccugguguucuucaacugaggacuaguuauaagacugacuagcccgaugggccucccaacgggcccuccuccccuccuugcaccgagauuaauaaaaaaaaaaaaaaaaaaaaaaaaaaaaaaaaaaaaaaaaaaaaaaaaaaaaaaaaaaaaaaaaugcaucccccccccccccccccccccccccccccccaaaggcucuuuucagagccaccagaauu

SEQ ID NO: 1572 - RNA, 1225 nt, Artificial Sequence
  mRNA Design i-3 (A64-N5-C30-hSL-N5) comprising derived and/or modified sequence from Pb(ANKA)__XP_022712148.1__IgE_Pb-CSP(24-340) (opt1)
gggagaaagcuuaccauggacuggaccuggauccuguuccucguggccgccgcgacccgcguccacagccagaacaaguccauccaggcccagcggaaccugaacgagcugugcuacaacgagggcaacgacaacaagcucuaccacgugcugaacagcaagaacgggaagaucuacaaccgcaacacggugaaccggcugcucgccgacgcccccgagggcaagaagaacgagaagaagaacgagaagaucgagcgcaacaacaagcugaagcagccgcccccccccccgaaccccaacgacccccccccgcccaaccccaacgaccccccgccccccaaccccaacgacccgcccccccccaacccgaacgaccccccccccccgaacgccaacgaccccccccccccgaacgcgaacgaccccgcccccccgaacgccaacgaccccgccccccccaacgcgaacgacccggccccccccaacgccaacgaccccgccccgcccaacgccaacgacccccccccgcccaaccccaacgaccccgcgccgcccaacgccaacgacccccccccgcccaaccccaacgaccccgccccgccccaggggaacaacaacccccagccgcagccccggccccagccccagccgcagccccagccccagccccagccgcagccccagccccagccccgcccgcagccccagccccagcccggcgggaacaacaacaacaagaacaacaacaacgacgacuccuacaucccgagcgccgagaagauccuggaguucgucaagcagauccgggacuccaucaccgaggaguggagccagugcaacgugaccugcggcuccggcauccgcgugcggaagcgcaaggggagcaacaagaaggccgaggaccucacccuggaggacaucgacacggagaucugcaagauggacaagugcuccagcaucuucaacaucgucuccaacagccugggcuucgugauccuccuggugcuggucuucuucaacugaggacuaguuauaagacugacuagcccgaugggccucccaacgggcccuccuccccuccuugcaccgagauuaauaaaaaaaaaaaaaaaaaaaaaaaaaaaaaaaaaaaaaaaaaaaaaaaaaaaaaaaaaaaaaaaaugcaucccccccccccccccccccccccccccccccaaaggcucuuuucagagccaccagaauu

SEQ ID NO: 1573 - RNA, 1411 nt, Artificial Sequence
  mRNA Design i-3 (A64-N5-C30-hSL-N5) comprising derived and/or modified sequence from Pf(3D7)__XP_001351122.1__Pf-CSP (opt2)
gggagaaagcuuaccaugaugcgcaagcucgccauccucuccgucuccuccuuccucuucgucgaggcccucuuccaggaguaccagugcuacggcuccuccuccaacacccgcguccucaacgagcucaacuacgacaacgccggcaccaaccucuacaacgagcucgagaugaacuacuacggcaagcaggagaacugguacucccucaagaagaacucccgcucccucggcgagaacgacgacggcaacaacgaggacaacgagaagcuccgcaagcccaagcacaagaagcucaagcagcccgccgacggcaaccccgaccccaacgccaaccccaacgucgaccccaacgccaaccccaacgucgaccccaacgccaaccccaacgucgaccccaacgccaaccccaacgccaaccccaacgccaaccccaacgccaaccccaacgccaaccccaacgccaaccccaacgccaaccccaacgccaaccccaacgccaaccccaacgccaaccccaacgccaaccccaacgccaaccccaacgccaaccccaacgccaaccccaacgccaaccccaacgccaaccccaacgccaaccccaacgucgaccccaacgccaaccccaacgccaaccccaacgccaaccccaacgccaaccccaacgccaaccccaacgccaaccccaacgccaaccccaacgccaaccccaacgccaaccccaacgccaaccccaacgccaaccccaacgccaaccccaacgccaaccccaacgccaaccccaacgccaaccccaacgccaaccccaacgccaaccccaacgccaaccccaacaagaacaaccagggcaacggccagggccacaacaugcccaacgaccccaaccgcaacgucgacgagaacgccaacgccaacuccgccgucaagaacaacaacaacgaggagcccuccgacaagcacaucaaggaguaccucaacaagauccagaacucccucuccaccgaguggucccccugcuccgucaccugcggcaacggcauccagguccgcaucaagcccggcuccgccaacaagcccaaggacgagcucgacuacgccaacgacaucgagaagaagaucugcaagauggagaagugcuccuccgucuucaacgucgucaacuccuccaucggccucaucaugguccucuccuuccucuuccucaacugaggacuaguuauaagacugacuagcccgaugggccucccaacgggcccuccuccccuccuugcaccgagauuaauaaaaaaaaaaaaaaaaaaaaaaaaaaaaaaaaaaaaaaaaaaaaaaaaaaaaaaaaaaaaaaaaugcaucccccccccccccccccccccccccccccccaaaggcucuuuucagagccaccagaauu

SEQ ID NO: 1574 - RNA, 1342 nt, Artificial Sequence
  mRNA Design i-3 (A64-N5-C30-hSL-N5) comprising derived and/or modified sequence from Pf(3D7)__XP_001351122.1__Pf-CSP(1-374) (opt2)
gggagaaagcuuaccaugaugcgcaagcucgccauccucuccgucuccuccuuccucuucgucgaggcccucuuccaggaguaccagugcuacggcuccuccuccaacacccgcguccucaacgagcucaacuacgacaacgccggcaccaaccucuacaacgagcucgagaugaacuacuacggcaagcaggagaacugguacucccucaagaagaacucccgcucccucggcgagaacgacgacggcaacaacgaggacaacgagaagcuccgcaagcccaagcacaagaagcucaagcagcccgccgacggcaaccccgaccccaacgccaaccccaacgucgaccccaacgccaaccccaacgucgaccccaacgccaaccccaacgucgaccccaacgccaaccccaacgccaaccccaacgccaaccccaacgccaaccccaacgccaaccccaacgccaaccccaacgccaaccccaacgccaaccccaacgccaaccccaacgccaaccccaacgccaaccccaacgccaaccccaacgccaaccccaacgccaaccccaacgccaaccccaacgccaaccccaacgccaaccccaacgucgaccccaacgccaaccccaacgccaaccccaacgccaaccccaacgccaaccccaacgccaaccccaacgccaaccccaacgccaaccccaacgccaaccccaacgccaaccccaacgccaaccccaacgccaaccccaacgccaaccccaacgccaaccccaacgccaaccccaacgccaaccccaacgccaaccccaacgccaaccccaacgccaaccccaacaagaacaaccagggcaacggccagggccacaacaugcccaacgaccccaaccgcaacgucgacgagaacgccaacgccaacuccgccgucaagaacaacaacaacgaggagcccuccgacaagcacaucaaggaguaccucaacaagauccagaacucccucuccaccgaguggucccccugcuccgucaccugcggcaacggcauccagguccgcaucaagcccggcuccgccaacaagcccaaggacgagcucgacuacgccaacgacaucgagaagaagaucugcaagauggagaagugcugaggacuaguuauaagacugacuagcccgaugggccucccaacgggcccuccuccccuccuugcaccgagauuaauaaaaaaaaaaaaaaaaaaaaaaaaaaaaaaaaaaaaaaaaaaaaaaaaaaaaaaaaaaaaaaaaugcaucccccccccccccccccccccccccccccccaaaggcucuuuucagagccaccagaauu

SEQ ID NO: 1575 - RNA, 1195 nt, Artificial Sequence
  mRNA Design i-3 (A64-N5-C30-hSL-N5) comprising derived and/or modified sequence from Pf(3D7)__XP_001351122.1__Pf-CSP(1-325) (opt2)
gggagaaagcuuaccaugaugcgcaagcucgccauccucuccgucuccuccuuccucuucgucgaggcccucuuccaggaguaccagugcuacggcuccuccuccaacacccgcguccucaacgagcucaacuacgacaacgccggcaccaaccucuacaacgagcucgagaugaacuacuacggcaagcaggagaacugguacucccucaagaagaacucccgcucccucggcgagaacgacgacggcaacaacgaggacaacgagaagcuccgcaagcccaagcacaagaagcucaagcagcccgccgacggcaaccccgaccccaacgccaaccccaacgucgaccccaacgccaaccccaacgucgaccccaacgccaaccccaacgucgaccccaacgccaaccccaacgccaaccccaacgccaaccccaacgccaaccccaacgccaaccccaacgccaaccccaacgccaaccccaacgccaaccccaacgccaaccccaacgccaaccccaacgccaaccccaacgccaaccccaacgccaaccccaacgccaaccccaacgccaaccccaacgccaaccccaacgccaaccccaacgucgaccccaacgccaaccccaacgccaaccccaacgccaaccccaacgccaaccccaacgccaaccccaacgccaaccccaacgccaaccccaacgccaaccccaacgccaaccccaacgccaaccccaacgccaaccccaacgccaaccccaacgccaaccccaacgccaaccccaacgccaaccccaacgccaaccccaacgccaaccccaacgccaaccccaacaagaacaaccagggcaacggccagggccacaacaugcccaacgaccccaaccgcaacgucgacgagaacgccaacgccaacuccgccgucaagaacaacaacaacgaggagcccuccgacaagcacaucaaggaguaccucaacaagauccagaacugaggacuaguuauaagacugacuagcccgaugggccucccaacgggcccuccuccccuccuugcaccgagauuaauaaaaaaaaaaaaaaaaaaaaaaaaaaaaaaaaaaaaaaaaaaaaaaaaaaaaaaaaaaaaaaaaugcaucccccccccccccccccccccccccccccccaaaggcucuuuucagagccaccagaauu

SEQ ID NO: 1576 - RNA, 1411 nt, Artificial Sequence
  mRNA Design i-3 (A64-N5-C30-hSL-N5) comprising derived and/or modified sequence from Pf(3D7)__XP_001351122.1__HsALB_Pf-CSP(19-397) (opt2)
gggagaaagcuuaccaugaagugggucaccuucaucucccuccucuuccucuucuccuccgccuacucccucuuccaggaguaccagugcuacggcuccuccuccaacacccgcguccucaacgagcucaacuacgacaacgccggcaccaaccucuacaacgagcucgagaugaacuacuacggcaagcaggagaacugguacucccucaagaagaacucccgcucccucggcgagaacgacgacggcaacaacgaggacaacgagaagcuccgcaagcccaagcacaagaagcucaagcagcccgccgacggcaaccccgaccccaacgccaaccccaacgucgaccccaacgccaaccccaacgucgaccccaacgccaaccccaacgucgaccccaacgccaaccccaacgccaaccccaacgccaaccccaacgccaaccccaacgccaaccccaacgccaaccccaacgccaaccccaacgccaaccccaacgccaaccccaacgccaaccccaacgccaaccccaacgccaaccccaacgccaaccccaacgccaaccccaacgccaaccccaacgccaaccccaacgccaaccccaacgucgaccccaacgccaaccccaacgccaaccccaacgccaaccccaacgccaaccccaacgccaaccccaacgccaaccccaacgccaaccccaacgccaaccccaacgccaaccccaacgccaaccccaacgccaaccccaacgccaaccccaacgccaaccccaacgccaaccccaacgccaaccccaacgccaaccccaacgccaaccccaacgccaaccccaacaagaacaaccagggcaacggccagggccacaacaugcccaacgaccccaaccgcaacgucgacgagaacgccaacgccaacuccgccgucaagaacaacaacaacgaggagcccuccgacaagcacaucaaggaguaccucaacaagauccagaacucccucuccaccgaguggucccccugcuccgucaccugcggcaacggcauccagguccgcaucaagcccggcuccgccaacaagcccaaggacgagcucgacuacgccaacgacaucgagaagaagaucugcaagauggagaagugcuccuccgucuucaacgucgucaacuccuccaucggccucaucaugguccucuccuuccucuuccucaacugaggacuaguuauaagacugacuagcccgaugggccucccaacgggcccuccuccccuccuugcaccgagauuaauaaaaaaaaaaaaaaaaaaaaaaaaaaaaaaaaaaaaaaaaaaaaaaaaaaaaaaaaaaaaaaaaugcaucccccccccccccccccccccccccccccccaaaggcucuuuucagagccaccagaauu

SEQ ID NO: 1577 - RNA, 1429 nt, Artificial Sequence
  mRNA Design i-3 (A64-N5-C30-hSL-N5) comprising derived and/or modified sequence from Pf(3D7)__XP_001351122.1__HsIns-iso1_Pf-CSP(19-397) (opt2)
gggagaaagcuuaccauggcccucuggaugcgccuccucccccuccucgcccuccucgcccucuggggccccgaccccgccgccgcccucuuccaggaguaccagugcuacggcuccuccuccaacacccgcguccucaacgagcucaacuacgacaacgccggcaccaaccucuacaacgagcucgagaugaacuacuacggcaagcaggagaacugguacucccucaagaagaacucccgcucccucggcgagaacgacgacggcaacaacgaggacaacgagaagcuccgcaagcccaagcacaagaagcucaagcagcccgccgacggcaaccccgaccccaacgccaaccccaacgucgaccccaacgccaaccccaacgucgaccccaacgccaaccccaacgucgaccccaacgccaaccccaacgccaaccccaacgccaaccccaacgccaaccccaacgccaaccccaacgccaaccccaacgccaaccccaacgccaaccccaacgccaaccccaacgccaaccccaacgccaaccccaacgccaaccccaacgccaaccccaacgccaaccccaacgccaaccccaacgccaaccccaacgccaaccccaacgucgaccccaacgccaaccccaacgccaaccccaacgccaaccccaacgccaaccccaacgccaaccccaacgccaaccccaacgccaaccccaacgccaaccccaacgccaaccccaacgccaaccccaacgccaaccccaacgccaaccccaacgccaaccccaacgccaaccccaacgccaaccccaacgccaaccccaacgccaaccccaacgccaaccccaacaagaacaaccagggcaacggccagggccacaacaugcccaacgaccccaaccgcaacgucgacgagaacgccaacgccaacuccgccgucaagaacaacaacaacgaggagcccuccgacaagcacaucaaggaguaccucaacaagauccagaacucccucuccaccgaguggucccccugcuccgucaccugcggcaacggcauccagguccgcaucaagcccggcuccgccaacaagcccaaggacgagcucgacuacgccaacgacaucgagaagaagaucugcaagauggagaagugcuccuccgucuucaacgucgucaacuccuccaucggccucaucaugguccucuccuuccucuuccucaacugaggacuaguuauaagacugacuagcccgaugggccucccaacgggcccuccuccccuccuugcaccgagauuaauaaaaaaaaaaaaaaaaaaaaaaaaaaaaaaaaaaaaaaaaaaaaaaaaaaaaaaaaaaaaaaaaugcaucccccccccccccccccccccccccccccccaaaggcucuuuucagagccaccagaauu

SEQ ID NO: 1578 - RNA, 1408 nt, Artificial Sequence
  mRNA Design i-3 (A64-N5-C30-hSL-N5) comprising derived and/or modified sequence from Pf(3D7)__XP_001351122.1__HsSPARC_Pf-CSP(19-397) (opt2)
gggagaaagcuuaccaugcgcgccuggaucuucuuccuccucugccucgccggccgcgcccucgcccucuuccaggaguaccagugcuacggcuccuccuccaacacccgcguccucaacgagcucaacuacgacaacgccggcaccaaccucuacaacgagcucgagaugaacuacuacggcaagcaggagaacugguacucccucaagaagaacucccgcucccucggcgagaacgacgacggcaacaacgaggacaacgagaagcuccgcaagcccaagcacaagaagcucaagcagcccgccgacggcaaccccgaccccaacgccaaccccaacgucgaccccaacgccaaccccaacgucgaccccaacgccaaccccaacgucgaccccaacgccaaccccaacgccaaccccaacgccaaccccaacgccaaccccaacgccaaccccaacgccaaccccaacgccaaccccaacgccaaccccaacgccaaccccaacgccaaccccaacgccaaccccaacgccaaccccaacgccaaccccaacgccaaccccaacgccaaccccaacgccaaccccaacgccaaccccaacgucgaccccaacgccaaccccaacgccaaccccaacgccaaccccaacgccaaccccaacgccaaccccaacgccaaccccaacgccaaccccaacgccaaccccaacgccaaccccaacgccaaccccaacgccaaccccaacgccaaccccaacgccaaccccaacgccaaccccaacgccaaccccaacgccaaccccaacgccaaccccaacgccaaccccaacaagaacaaccagggcaacggccagggccacaacaugcccaacgaccccaaccgcaacgucgacgagaacgccaacgccaacuccgccgucaagaacaacaacaacgaggagcccuccgacaagcacaucaaggaguaccucaacaagauccagaacucccucuccaccgaguggucccccugcuccgucaccugcggcaacggcauccagguccgcaucaagcccggcuccgccaacaagcccaaggacgagcucgacuacgccaacgacaucgagaagaagaucugcaagauggagaagugcuccuccgucuucaacgucgucaacuccuccaucggccucaucaugguccucuccuuccucuuccucaacugaggacuaguuauaagacugacuagcccgaugggccucccaacgggcccuccuccccuccuugcaccgagauuaauaaaaaaaaaaaaaaaaaaaaaaaaaaaaaaaaaaaaaaaaaaaaaaaaaaaaaaaaaaaaaaaaugcaucccccccccccccccccccccccccccccccaaaggcucuuuucagagccaccagaauu

SEQ ID NO: 1579 - RNA, 1411 nt, Artificial Sequence
  mRNA Design i-3 (A64-N5-C30-hSL-N5) comprising derived and/or modified sequence from Pf(3D7)__XP_001351122.1__IgE_Pf-CSP(19-397) (opt2)
gggagaaagcuuaccauggacuggaccuggauccucuuccucgucgccgccgccacccgcguccacucccucuuccaggaguaccagugcuacggcuccuccuccaacacccgcguccucaacgagcucaacuacgacaacgccggcaccaaccucuacaacgagcucgagaugaacuacuacggcaagcaggagaacugguacucccucaagaagaacucccgcucccucggcgagaacgacgacggcaacaacgaggacaacgagaagcuccgcaagcccaagcacaagaagcucaagcagcccgccgacggcaaccccgaccccaacgccaaccccaacgucgaccccaacgccaaccccaacgucgaccccaacgccaaccccaacgucgaccccaacgccaaccccaacgccaaccccaacgccaaccccaacgccaaccccaacgccaaccccaacgccaaccccaacgccaaccccaacgccaaccccaacgccaaccccaacgccaaccccaacgccaaccccaacgccaaccccaacgccaaccccaacgccaaccccaacgccaaccccaacgccaaccccaacgccaaccccaacgucgaccccaacgccaaccccaacgccaaccccaacgccaaccccaacgccaaccccaacgccaaccccaacgccaaccccaacgccaaccccaacgccaaccccaacgccaaccccaacgccaaccccaacgccaaccccaacgccaaccccaacgccaaccccaacgccaaccccaacgccaaccccaacgccaaccccaacgccaaccccaacgccaaccccaacaagaacaaccagggcaacggccagggccacaacaugcccaacgaccccaaccgcaacgucgacgagaacgccaacgccaacuccgccgucaagaacaacaacaacgaggagcccuccgacaagcacaucaaggaguaccucaacaagauccagaacucccucuccaccgaguggucccccugcuccgucaccugcggcaacggcauccagguccgcaucaagcccggcuccgccaacaagcccaaggacgagcucgacuacgccaacgacaucgagaagaagaucugcaagauggagaagugcuccuccgucuucaacgucgucaacuccuccaucggccucaucaugguccucuccuuccucuuccucaacugaggacuaguuauaagacugacuagcccgaugggccucccaacgggcccuccuccccuccuugcaccgagauuaauaaaaaaaaaaaaaaaaaaaaaaaaaaaaaaaaaaaaaaaaaaaaaaaaaaaaaaaaaaaaaaaaugcaucccccccccccccccccccccccccccccccaaaggcucuuuucagagccaccagaauu

SEQ ID NO: 1580 - RNA, 1576 nt, Artificial Sequence
  mRNA Design i-3 (A64-N5-C30-hSL-N5) comprising derived and/or modified sequence from Pf(3D7)__XP_001351122.1__Pf-CSP_L(G4SG4)_TM domain HA (opt2)
gggagaaagcuuaccaugaugcgcaagcucgccauccucuccgucuccuccuuccucuucgucgaggcccucuuccaggaguaccagugcuacggcuccuccuccaacacccgcguccucaacgagcucaacuacgacaacgccggcaccaaccucuacaacgagcucgagaugaacuacuacggcaagcaggagaacugguacucccucaagaagaacucccgcucccucggcgagaacgacgacggcaacaacgaggacaacgagaagcuccgcaagcccaagcacaagaagcucaagcagcccgccgacggcaaccccgaccccaacgccaaccccaacgucgaccccaacgccaaccccaacgucgaccccaacgccaaccccaacgucgaccccaacgccaaccccaacgccaaccccaacgccaaccccaacgccaaccccaacgccaaccccaacgccaaccccaacgccaaccccaacgccaaccccaacgccaaccccaacgccaaccccaacgccaaccccaacgccaaccccaacgccaaccccaacgccaaccccaacgccaaccccaacgccaaccccaacgccaaccccaacgucgaccccaacgccaaccccaacgccaaccccaacgccaaccccaacgccaaccccaacgccaaccccaacgccaaccccaacgccaaccccaacgccaaccccaacgccaaccccaacgccaaccccaacgccaaccccaacgccaaccccaacgccaaccccaacgccaaccccaacgccaaccccaacgccaaccccaacgccaaccccaacgccaaccccaacaagaacaaccagggcaacggccagggccacaacaugcccaacgaccccaaccgcaacgucgacgagaacgccaacgccaacuccgccgucaagaacaacaacaacgaggagcccuccgacaagcacaucaaggaguaccucaacaagauccagaacucccucuccaccgaguggucccccugcuccgucaccugcggcaacggcauccagguccgcaucaagcccggcuccgccaacaagcccaaggacgagcucgacuacgccaacgacaucgagaagaagaucugcaagauggagaagugcuccuccgucuucaacgucgucaacuccuccaucggccucaucaugguccucuccuuccucuuccucaacggcggcggcggcuccggcggcggcggcaagcucgaguccacccgcaucuaccagauccucgccaucuacuccaccgucgccuccucccucguccucgucgucucccucggcgccaucuccuucuggaugugcuccaacggcucccuccagugccgcaucugcaucugaggacuaguuauaagacugacuagcccgaugggccucccaacgggcccuccuccccuccuugcaccgagauuaauaaaaaaaaaaaaaaaaaaaaaaaaaaaaaaaaaaaaaaaaaaaaaaaaaaaaaaaaaaaaaaaaugcaucccccccccccccccccccccccccccccccaaaggcucuuuucagagccaccagaauu

SEQ ID NO: 1581 - RNA, 1450 nt, Artificial Sequence
  mRNA Design i-3 (A64-N5-C30-hSL-N5) comprising derived and/or modified sequence from Pf(3D7)__XP_001351122.1__Pf-CSP(199-377)_L(PVTN)_HBsAg (opt2)
gggagaaagcuuaccauggaccccaacgccaaccccaacgccaaccccaacgccaaccccaacgccaaccccaacgccaaccccaacgccaaccccaacgccaaccccaacgccaaccccaacgccaaccccaacgccaaccccaacgccaaccccaacgccaaccccaacgccaaccccaacgccaaccccaacgccaaccccaacgccaaccccaacgccaaccccaacgccaaccccaacaagaacaaccagggcaacggccagggccacaacaugcccaacgaccccaaccgcaacgucgacgagaacgccaacgccaacuccgccgucaagaacaacaacaacgaggagcccuccgacaagcacaucaaggaguaccucaacaagauccagaacucccucuccaccgaguggucccccugcuccgucaccugcggcaacggcauccagguccgcaucaagcccggcuccgccaacaagcccaaggacgagcucgacuacgccaacgacaucgagaagaagaucugcaagauggagaagugcuccuccguccccgucaccaacauggagaacaucaccuccggcuuccucggcccccuccucguccuccaggccggcuucuuccuccucacccgcauccucaccaucccccagucccucgacuccugguggaccucccucaacuuccucggcggcucccccgucugccucggccagaacucccagucccccaccuccaaccacucccccaccuccugcccccccaucugccccggcuaccgcuggaugugccuccgccgcuucaucaucuuccucuucauccuccuccucugccucaucuuccuccucguccuccucgacuaccagggcaugcuccccgucugcccccucauccccggcuccaccaccaccaacaccggccccugcaagaccugcaccacccccgcccagggcaacuccauguuccccuccugcugcugcaccaagcccaccgacggcaacugcaccugcauccccauccccuccuccugggccuucgccaaguaccucugggagugggccuccguccgcuucuccuggcucucccuccucguccccuucguccagugguucgucggccucucccccaccgucuggcucuccgccaucuggaugaugugguacuggggccccucccucuacuccaucgucucccccuucaucccccuccuccccaucuucuucugccucugggucuacaucugaggacuaguuauaagacugacuagcccgaugggccucccaacgggcccuccuccccuccuugcaccgagauuaauaaaaaaaaaaaaaaaaaaaaaaaaaaaaaaaaaaaaaaaaaaaaaaaaaaaaaaaaaaaaaaaaugcaucccccccccccccccccccccccccccccccaaaggcucuuuucagagccaccagaauu

SEQ ID NO: 1582 - RNA, 1492 nt, Artificial Sequence
  mRNA Design i-3 (A64-N5-C30-hSL-N5) comprising derived and/or modified sequence from Pf(3D7)__XP_001351122.1__Pf-CSP(199-387)_L(PVTN)_HBsAg (opt2)
gggagaaagcuuaccaugauggcccccgaccccaacgccaaccccaacgccaaccccaacgccaaccccaacgccaaccccaacgccaaccccaacgccaaccccaacgccaaccccaacgccaaccccaacgccaaccccaacgccaaccccaacgccaaccccaacgccaaccccaacgccaaccccaacgccaaccccaacgccaaccccaacgccaaccccaacgccaaccccaacgccaaccccaacaagaacaaccagggcaacggccagggccacaacaugcccaacgaccccaaccgcaacgucgacgagaacgccaacgccaacuccgccgucaagaacaacaacaacgaggagcccuccgacaagcacaucaaggaguaccucaacaagauccagaacucccucuccaccgaguggucccccugcuccgucaccugcggcaacggcauccagguccgcaucaagcccggcuccgccaacaagcccaaggacgagcucgacuacgccaacgacaucgagaagaagaucugcaagauggagaagugcuccuccgucuucaacgucgucaacuccuccaucggccucggccccgucaccaacauggagaacaucaccuccggcuuccucggcccccuccucguccuccaggccggcuucuuccuccucacccgcauccucaccaucccccagucccucgacuccugguggaccucccucaacuuccucggcggcucccccgucugccucggccagaacucccagucccccaccuccaaccacucccccaccuccugcccccccaucugccccggcuaccgcuggaugugccuccgccgcuucaucaucuuccucuucauccuccuccucugccucaucuuccuccucguccuccucgacuaccagggcaugcuccccgucugcccccucauccccggcuccaccaccaccaacaccggccccugcaagaccugcaccacccccgcccagggcaacuccauguuccccuccugcugcugcaccaagcccaccgacggcaacugcaccugcauccccauccccuccuccugggccuucgccaaguaccucugggagugggccuccguccgcuucuccuggcucucccuccucguccccuucguccagugguucgucggccucucccccaccgucuggcucuccgccaucuggaugaugugguacuggggccccucccucuacuccaucgucucccccuucaucccccuccuccccaucuucuucugccucugggucuacaucugaggacuaguuauaagacugacuagcccgaugggccucccaacgggcccuccuccccuccuugcaccgagauuaauaaaaaaaaaaaaaaaaaaaaaaaaaaaaaaaaaaaaaaaaaaaaaaaaaaaaaaaaaaaaaaaaugcaucccccccccccccccccccccccccccccccaaaggcucuuuucagagccaccagaauu

SEQ ID NO: 1583 - RNA, 676 nt, Artificial Sequence
  mRNA Design i-3 (A64-N5-C30-hSL-N5) comprising derived and/or modified sequence from Pf(3D7)__XP_001351122.1__HsALB_Pf-CSP(19-152) (opt2)
gggagaaagcuuaccaugaagugggucaccuucaucucccuccucuuccucuucuccuccgccuacucccucuuccaggaguaccagugcuacggcuccuccuccaacacccgcguccucaacgagcucaacuacgacaacgccggcaccaaccucuacaacgagcucgagaugaacuacuacggcaagcaggagaacugguacucccucaagaagaacucccgcucccucggcgagaacgacgacggcaacaacgaggacaacgagaagcuccgcaagcccaagcacaagaagcucaagcagcccgccgacggcaaccccgaccccaacgccaaccccaacgucgaccccaacgccaaccccaacgucgaccccaacgccaaccccaacgucgaccccaacgccaaccccaacgccaaccccaacgccaaccccaacgccaaccccaacgccaaccccaacgccaaccccugaggacuaguuauaagacugacuagcccgaugggccucccaacgggcccuccuccccuccuugcaccgagauuaauaaaaaaaaaaaaaaaaaaaaaaaaaaaaaaaaaaaaaaaaaaaaaaaaaaaaaaaaaaaaaaaaugcaucccccccccccccccccccccccccccccccaaaggcucuuuucagagccaccagaauu

SEQ ID NO: 1584 - RNA, 796 nt, Artificial Sequence
  mRNA Design i-3 (A64-N5-C30-hSL-N5) comprising derived and/or modified sequence from Pf(3D7)__XP_001351122.1__HsALB_Pf-CSP(19-192) (opt2)
gggagaaagcuuaccaugaagugggucaccuucaucucccuccucuuccucuucuccuccgccuacucccucuuccaggaguaccagugcuacggcuccuccuccaacacccgcguccucaacgagcucaacuacgacaacgccggcaccaaccucuacaacgagcucgagaugaacuacuacggcaagcaggagaacugguacucccucaagaagaacucccgcucccucggcgagaacgacgacggcaacaacgaggacaacgagaagcuccgcaagcccaagcacaagaagcucaagcagcccgccgacggcaaccccgaccccaacgccaaccccaacgucgaccccaacgccaaccccaacgucgaccccaacgccaaccccaacgucgaccccaacgccaaccccaacgccaaccccaacgccaaccccaacgccaaccccaacgccaaccccaacgccaaccccaacgccaaccccaacgccaaccccaacgccaaccccaacgccaaccccaacgccaaccccaacgccaaccccaacgccaaccccaacgccaaccccaacgccaaccccaacgccaaccccugaggacuaguuauaagacugacuagcccgaugggccucccaacgggcccuccuccccuccuugcaccgagauuaauaaaaaaaaaaaaaaaaaaaaaaaaaaaaaaaaaaaaaaaaaaaaaaaaaaaaaaaaaaaaaaaaugcaucccccccccccccccccccccccccccccccaaaggcucuuuucagagccaccagaauu

SEQ ID NO: 1585 - RNA, 1036 nt, Artificial Sequence
  mRNA Design i-3 (A64-N5-C30-hSL-N5) comprising derived and/or modified sequence from Pf(3D7)__XP_001351122.1__HsALB_Pf-CSP(19-272) (opt2)
gggagaaagcuuaccaugaagugggucaccuucaucucccuccucuuccucuucuccuccgccuacucccucuuccaggaguaccagugcuacggcuccuccuccaacacccgcguccucaacgagcucaacuacgacaacgccggcaccaaccucuacaacgagcucgagaugaacuacuacggcaagcaggagaacugguacucccucaagaagaacucccgcucccucggcgagaacgacgacggcaacaacgaggacaacgagaagcuccgcaagcccaagcacaagaagcucaagcagcccgccgacggcaaccccgaccccaacgccaaccccaacgucgaccccaacgccaaccccaacgucgaccccaacgccaaccccaacgucgaccccaacgccaaccccaacgccaaccccaacgccaaccccaacgccaaccccaacgccaaccccaacgccaaccccaacgccaaccccaacgccaaccccaacgccaaccccaacgccaaccccaacgccaaccccaacgccaaccccaacgccaaccccaacgccaaccccaacgccaaccccaacgccaaccccaacgccaaccccaacgucgaccccaacgccaaccccaacgccaaccccaacgccaaccccaacgccaaccccaacgccaaccccaacgccaaccccaacgccaaccccaacgccaaccccaacgccaaccccaacgccaaccccaacgccaaccccaacgccaaccccaacgccaaccccaacgccaaccccaacgccaaccccaacgccaaccccaacgccaaccccaacgccaaccccugaggacuaguuauaagacugacuagcccgaugggccucccaacgggcccuccuccccuccuugcaccgagauuaauaaaaaaaaaaaaaaaaaaaaaaaaaaaaaaaaaaaaaaaaaaaaaaaaaaaaaaaaaaaaaaaaugcaucccccccccccccccccccccccccccccccaaaggcucuuuucagagccaccagaauu

SEQ ID NO: 1586 - RNA, 1198 nt, Artificial Sequence
  mRNA Design i-3 (A64-N5-C30-hSL-N5) comprising derived and/or modified sequence from Pf(3D7)__XP_001351122.1__HsALB_Pf-CSP(19-272)_L(AAY)_Pf-CSP(310-3 27)_L(AAY)_Pf-CSP(346-375) (opt2)
gggagaaagcuuaccaugaagugggucaccuucaucucccuccucuuccucuucuccuccgccuacucccucuuccaggaguaccagugcuacggcuccuccuccaacacccgcguccucaacgagcucaacuacgacaacgccggcaccaaccucuacaacgagcucgagaugaacuacuacggcaagcaggagaacugguacucccucaagaagaacucccgcucccucggcgagaacgacgacggcaacaacgaggacaacgagaagcuccgcaagcccaagcacaagaagcucaagcagcccgccgacggcaaccccgaccccaacgccaaccccaacgucgaccccaacgccaaccccaacgucgaccccaacgccaaccccaacgucgaccccaacgccaaccccaacgccaaccccaacgccaaccccaacgccaaccccaacgccaaccccaacgccaaccccaacgccaaccccaacgccaaccccaacgccaaccccaacgccaaccccaacgccaaccccaacgccaaccccaacgccaaccccaacgccaaccccaacgccaaccccaacgccaaccccaacgccaaccccaacgucgaccccaacgccaaccccaacgccaaccccaacgccaaccccaacgccaaccccaacgccaaccccaacgccaaccccaacgccaaccccaacgccaaccccaacgccaaccccaacgccaaccccaacgccaaccccaacgccaaccccaacgccaaccccaacgccaaccccaacgccaaccccaacgccaaccccaacgccaaccccaacgccaaccccgccgccuacgagcccuccgacaagcacaucaaggaguaccucaacaagauccagaacucccucgccgccuacaucaagcccggcuccgccaacaagcccaaggacgagcucgacuacgccaacgacaucgagaagaagaucugcaagauggagaagugcuccugaggacuaguuauaagacugacuagcccgaugggccucccaacgggcccuccuccccuccuugcaccgagauuaauaaaaaaaaaaaaaaaaaaaaaaaaaaaaaaaaaaaaaaaaaaaaaaaaaaaaaaaaaaaaaaaaugcaucccccccccccccccccccccccccccccccaaaggcucuuuucagagccaccagaauu

SEQ ID NO: 1587 - RNA, 1159 nt, Artificial Sequence
  mRNA Design i-3 (A64-N5-C30-hSL-N5) comprising derived and/or modified sequence from Pf(3D7)__XP_001351122.1__HsALB_Pf-CSP(19-272)_L(AAY)_Pf-CSP(346-3 65)_L(AAY)_P2 (opt2)
gggagaaagcuuaccaugaagugggucaccuucaucucccuccucuuccucuucuccuccgccuacucccucuuccaggaguaccagugcuacggcuccuccuccaacacccgcguccucaacgagcucaacuacgacaacgccggcaccaaccucuacaacgagcucgagaugaacuacuacggcaagcaggagaacugguacucccucaagaagaacucccgcucccucggcgagaacgacgacggcaacaacgaggacaacgagaagcuccgcaagcccaagcacaagaagcucaagcagcccgccgacggcaaccccgaccccaacgccaaccccaacgucgaccccaacgccaaccccaacgucgaccccaacgccaaccccaacgucgaccccaacgccaaccccaacgccaaccccaacgccaaccccaacgccaaccccaacgccaaccccaacgccaaccccaacgccaaccccaacgccaaccccaacgccaaccccaacgccaaccccaacgccaaccccaacgccaaccccaacgccaaccccaacgccaaccccaacgccaaccccaacgccaaccccaacgccaaccccaacgucgaccccaacgccaaccccaacgccaaccccaacgccaaccccaacgccaaccccaacgccaaccccaacgccaaccccaacgccaaccccaacgccaaccccaacgccaaccccaacgccaaccccaacgccaaccccaacgccaaccccaacgccaaccccaacgccaaccccaacgccaaccccaacgccaaccccaacgccaaccccaacgccaaccccgccgccuacaucaagcccggcuccgccaacaagcccaaggacgagcucgacuacgccaacgacaucgaggccgccuaccaguacaucaaggccaacuccaaguucaucggcaucaccgagcucugaggacuaguuauaagacugacuagcccgaugggccucccaacgggcccuccuccccuccuugcaccgagauuaauaaaaaaaaaaaaaaaaaaaaaaaaaaaaaaaaaaaaaaaaaaaaaaaaaaaaaaaaaaaaaaaaugcaucccccccccccccccccccccccccccccccaaaggcucuuuucagagccaccagaauu

SEQ ID NO: 1588 - RNA, 1153 nt, Artificial Sequence
  mRNA Design i-3 (A64-N5-C30-hSL-N5) comprising derived and/or modified sequence from Pf(3D7)__XP_001351122.1__HsALB_Pf-CSP(19-272)_L(AAY)_Pf-CSP(346-3 65)_L(AAY)_PADRE (opt2)
gggagaaagcuuaccaugaagugggucaccuucaucucccuccucuuccucuucuccuccgccuacucccucuuccaggaguaccagugcuacggcuccuccuccaacacccgcguccucaacgagcucaacuacgacaacgccggcaccaaccucuacaacgagcucgagaugaacuacuacggcaagcaggagaacugguacucccucaagaagaacucccgcucccucggcgagaacgacgacggcaacaacgaggacaacgagaagcuccgcaagcccaagcacaagaagcucaagcagcccgccgacggcaaccccgaccccaacgccaaccccaacgucgaccccaacgccaaccccaacgucgaccccaacgccaaccccaacgucgaccccaacgccaaccccaacgccaaccccaacgccaaccccaacgccaaccccaacgccaaccccaacgccaaccccaacgccaaccccaacgccaaccccaacgccaaccccaacgccaaccccaacgccaaccccaacgccaaccccaacgccaaccccaacgccaaccccaacgccaaccccaacgccaaccccaacgccaaccccaacgucgaccccaacgccaaccccaacgccaaccccaacgccaaccccaacgccaaccccaacgccaaccccaacgccaaccccaacgccaaccccaacgccaaccccaacgccaaccccaacgccaaccccaacgccaaccccaacgccaaccccaacgccaaccccaacgccaaccccaacgccaaccccaacgccaaccccaacgccaaccccaacgccaaccccgccgccuacaucaagcccggcuccgccaacaagcccaaggacgagcucgacuacgccaacgacaucgaggccgccuacgccaaguucgucgccgccuggacccucaaggccgccgccugaggacuaguuauaagacugacuagcccgaugggccucccaacgggcccuccuccccuccuugcaccgagauuaauaaaaaaaaaaaaaaaaaaaaaaaaaaaaaaaaaaaaaaaaaaaaaaaaaaaaaaaaaaaaaaaaugcaucccccccccccccccccccccccccccccccaaaggcucuuuucagagccaccagaauu

SEQ ID NO: 1589 - RNA, 1210 nt, Artificial Sequence
  mRNA Design i-3 (A64-N5-C30-hSL-N5) comprising derived and/or modified sequence from Pf(3D7)__XP_001351122.1__HsALB_Pf-CSP(19-272)_L(G4S)_Pf-CSP(310-3 27)_L(G4S)_Pf-CSP(346-375) (opt2)
gggagaaagcuuaccaugaagugggucaccuucaucucccuccucuuccucuucuccuccgccuacucccucuuccaggaguaccagugcuacggcuccuccuccaacacccgcguccucaacgagcucaacuacgacaacgccggcaccaaccucuacaacgagcucgagaugaacuacuacggcaagcaggagaacugguacucccucaagaagaacucccgcucccucggcgagaacgacgacggcaacaacgaggacaacgagaagcuccgcaagcccaagcacaagaagcucaagcagcccgccgacggcaaccccgaccccaacgccaaccccaacgucgaccccaacgccaaccccaacgucgaccccaacgccaaccccaacgucgaccccaacgccaaccccaacgccaaccccaacgccaaccccaacgccaaccccaacgccaaccccaacgccaaccccaacgccaaccccaacgccaaccccaacgccaaccccaacgccaaccccaacgccaaccccaacgccaaccccaacgccaaccccaacgccaaccccaacgccaaccccaacgccaaccccaacgccaaccccaacgucgaccccaacgccaaccccaacgccaaccccaacgccaaccccaacgccaaccccaacgccaaccccaacgccaaccccaacgccaaccccaacgccaaccccaacgccaaccccaacgccaaccccaacgccaaccccaacgccaaccccaacgccaaccccaacgccaaccccaacgccaaccccaacgccaaccccaacgccaaccccaacgccaaccccggcggcggcggcuccgagcccuccgacaagcacaucaaggaguaccucaacaagauccagaacucccucggcggcggcggcuccaucaagcccggcuccgccaacaagcccaaggacgagcucgacuacgccaacgacaucgagaagaagaucugcaagauggagaagugcuccugaggacuaguuauaagacugacuagcccgaugggccucccaacgggcccuccuccccuccuugcaccgagauuaauaaaaaaaaaaaaaaaaaaaaaaaaaaaaaaaaaaaaaaaaaaaaaaaaaaaaaaaaaaaaaaaaugcaucccccccccccccccccccccccccccccccaaaggcucuuuucagagccaccagaauu

SEQ ID NO: 1590 - RNA, 1195 nt, Artificial Sequence
  mRNA Design i-3 (A64-N5-C30-hSL-N5) comprising derived and/or modified sequence from Pf(3D7)__XP_001351122.1__HsALB_Pf-CSP(19-272)_L(G4S)_Pf-CSP(310-3 27)_Pf-CSP(346-375) (opt2)
gggagaaagcuuaccaugaagugggucaccuucaucucccuccucuuccucuucuccuccgccuacucccucuuccaggaguaccagugcuacggcuccuccuccaacacccgcguccucaacgagcucaacuacgacaacgccggcaccaaccucuacaacgagcucgagaugaacuacuacggcaagcaggagaacugguacucccucaagaagaacucccgcucccucggcgagaacgacgacggcaacaacgaggacaacgagaagcuccgcaagcccaagcacaagaagcucaagcagcccgccgacggcaaccccgaccccaacgccaaccccaacgucgaccccaacgccaaccccaacgucgaccccaacgccaaccccaacgucgaccccaacgccaaccccaacgccaaccccaacgccaaccccaacgccaaccccaacgccaaccccaacgccaaccccaacgccaaccccaacgccaaccccaacgccaaccccaacgccaaccccaacgccaaccccaacgccaaccccaacgccaaccccaacgccaaccccaacgccaaccccaacgccaaccccaacgccaaccccaacgucgaccccaacgccaaccccaacgccaaccccaacgccaaccccaacgccaaccccaacgccaaccccaacgccaaccccaacgccaaccccaacgccaaccccaacgccaaccccaacgccaaccccaacgccaaccccaacgccaaccccaacgccaaccccaacgccaaccccaacgccaaccccaacgccaaccccaacgccaaccccaacgccaaccccggcggcggcggcuccgagcccuccgacaagcacaucaaggaguaccucaacaagauccagaacucccucaucaagcccggcuccgccaacaagcccaaggacgagcucgacuacgccaacgacaucgagaagaagaucugcaagauggagaagugcuccugaggacuaguuauaagacugacuagcccgaugggccucccaacgggcccuccuccccuccuugcaccgagauuaauaaaaaaaaaaaaaaaaaaaaaaaaaaaaaaaaaaaaaaaaaaaaaaaaaaaaaaaaaaaaaaaaugcaucccccccccccccccccccccccccccccccaaaggcucuuuucagagccaccagaauu

SEQ ID NO: 1591 - RNA, 1195 nt, Artificial Sequence
  mRNA Design i-3 (A64-N5-C30-hSL-N5) comprising derived and/or modified sequence from Pf(3D7)__XP_001351122.1__HsALB_Pf-CSP(19-325) (opt2)
gggagaaagcuuaccaugaagugggucaccuucaucucccuccucuuccucuucuccuccgccuacucccucuuccaggaguaccagugcuacggcuccuccuccaacacccgcguccucaacgagcucaacuacgacaacgccggcaccaaccucuacaacgagcucgagaugaacuacuacggcaagcaggagaacugguacucccucaagaagaacucccgcucccucggcgagaacgacgacggcaacaacgaggacaacgagaagcuccgcaagcccaagcacaagaagcucaagcagcccgccgacggcaaccccgaccccaacgccaaccccaacgucgaccccaacgccaaccccaacgucgaccccaacgccaaccccaacgucgaccccaacgccaaccccaacgccaaccccaacgccaaccccaacgccaaccccaacgccaaccccaacgccaaccccaacgccaaccccaacgccaaccccaacgccaaccccaacgccaaccccaacgccaaccccaacgccaaccccaacgccaaccccaacgccaaccccaacgccaaccccaacgccaaccccaacgccaaccccaacgucgaccccaacgccaaccccaacgccaaccccaacgccaaccccaacgccaaccccaacgccaaccccaacgccaaccccaacgccaaccccaacgccaaccccaacgccaaccccaacgccaaccccaacgccaaccccaacgccaaccccaacgccaaccccaacgccaaccccaacgccaaccccaacgccaaccccaacgccaaccccaacgccaaccccaacaagaacaaccagggcaacggccagggccacaacaugcccaacgaccccaaccgcaacgucgacgagaacgccaacgccaacuccgccgucaagaacaacaacaacgaggagcccuccgacaagcacaucaaggaguaccucaacaagauccagaacugaggacuaguuauaagacugacuagcccgaugggccucccaacgggcccuccuccccuccuugcaccgagauuaauaaaaaaaaaaaaaaaaaaaaaaaaaaaaaaaaaaaaaaaaaaaaaaaaaaaaaaaaaaaaaaaaugcaucccccccccccccccccccccccccccccccaaaggcucuuuucagagccaccagaauu

SEQ ID NO: 1592 - RNA, 1372 nt, Artificial Sequence
  mRNA Design i-3 (A64-N5-C30-hSL-N5) comprising derived and/or modified sequence from Pf(3D7)__XP_001351122.1__HsALB_Pf-CSP(19-384) (opt2)
gggagaaagcuuaccaugaagugggucaccuucaucucccuccucuuccucuucuccuccgccuacucccucuuccaggaguaccagugcuacggcuccuccuccaacacccgcguccucaacgagcucaacuacgacaacgccggcaccaaccucuacaacgagcucgagaugaacuacuacggcaagcaggagaacugguacucccucaagaagaacucccgcucccucggcgagaacgacgacggcaacaacgaggacaacgagaagcuccgcaagcccaagcacaagaagcucaagcagcccgccgacggcaaccccgaccccaacgccaaccccaacgucgaccccaacgccaaccccaacgucgaccccaacgccaaccccaacgucgaccccaacgccaaccccaacgccaaccccaacgccaaccccaacgccaaccccaacgccaaccccaacgccaaccccaacgccaaccccaacgccaaccccaacgccaaccccaacgccaaccccaacgccaaccccaacgccaaccccaacgccaaccccaacgccaaccccaacgccaaccccaacgccaaccccaacgccaaccccaacgucgaccccaacgccaaccccaacgccaaccccaacgccaaccccaacgccaaccccaacgccaaccccaacgccaaccccaacgccaaccccaacgccaaccccaacgccaaccccaacgccaaccccaacgccaaccccaacgccaaccccaacgccaaccccaacgccaaccccaacgccaaccccaacgccaaccccaacgccaaccccaacgccaaccccaacaagaacaaccagggcaacggccagggccacaacaugcccaacgaccccaaccgcaacgucgacgagaacgccaacgccaacuccgccgucaagaacaacaacaacgaggagcccuccgacaagcacaucaaggaguaccucaacaagauccagaacucccucuccaccgaguggucccccugcuccgucaccugcggcaacggcauccagguccgcaucaagcccggcuccgccaacaagcccaaggacgagcucgacuacgccaacgacaucgagaagaagaucugcaagauggagaagugcuccuccgucuucaacgucgucaacuccuccugaggacuaguuauaagacugacuagcccgaugggccucccaacgggcccuccuccccuccuugcaccgagauuaauaaaaaaaaaaaaaaaaaaaaaaaaaaaaaaaaaaaaaaaaaaaaaaaaaaaaaaaaaaaaaaaaugcaucccccccccccccccccccccccccccccccaaaggcucuuuucagagccaccagaauu

SEQ ID NO: 1593 - RNA, 1510 nt, Artificial Sequence
  mRNA Design i-3 (A64-N5-C30-hSL-N5) comprising derived and/or modified sequence from Pf(3D7)__XP_001351122.1__HsALB_Pf-CSP(19-384)_TM domain HA (opt2)
gggagaaagcuuaccaugaagugggucaccuucaucucccuccucuuccucuucuccuccgccuacucccucuuccaggaguaccagugcuacggcuccuccuccaacacccgcguccucaacgagcucaacuacgacaacgccggcaccaaccucuacaacgagcucgagaugaacuacuacggcaagcaggagaacugguacucccucaagaagaacucccgcucccucggcgagaacgacgacggcaacaacgaggacaacgagaagcuccgcaagcccaagcacaagaagcucaagcagcccgccgacggcaaccccgaccccaacgccaaccccaacgucgaccccaacgccaaccccaacgucgaccccaacgccaaccccaacgucgaccccaacgccaaccccaacgccaaccccaacgccaaccccaacgccaaccccaacgccaaccccaacgccaaccccaacgccaaccccaacgccaaccccaacgccaaccccaacgccaaccccaacgccaaccccaacgccaaccccaacgccaaccccaacgccaaccccaacgccaaccccaacgccaaccccaacgccaaccccaacgucgaccccaacgccaaccccaacgccaaccccaacgccaaccccaacgccaaccccaacgccaaccccaacgccaaccccaacgccaaccccaacgccaaccccaacgccaaccccaacgccaaccccaacgccaaccccaacgccaaccccaacgccaaccccaacgccaaccccaacgccaaccccaacgccaaccccaacgccaaccccaacgccaaccccaacaagaacaaccagggcaacggccagggccacaacaugcccaacgaccccaaccgcaacgucgacgagaacgccaacgccaacuccgccgucaagaacaacaacaacgaggagcccuccgacaagcacaucaaggaguaccucaacaagauccagaacucccucuccaccgaguggucccccugcuccgucaccugcggcaacggcauccagguccgcaucaagcccggcuccgccaacaagcccaaggacgagcucgacuacgccaacgacaucgagaagaagaucugcaagauggagaagugcuccuccgucuucaacgucgucaacuccuccaagcucgaguccacccgcaucuaccagauccucgccaucuacuccaccgucgccuccucccucguccucgucgucucccucggcgccaucuccuucuggaugugcuccaacggcucccuccagugccgcaucugcaucugaggacuaguuauaagacugacuagcccgaugggccucccaacgggcccuccuccccuccuugcaccgagauuaauaaaaaaaaaaaaaaaaaaaaaaaaaaaaaaaaaaaaaaaaaaaaaaaaaaaaaaaaaaaaaaaaugcaucccccccccccccccccccccccccccccccaaaggcucuuuucagagccaccagaauu

SEQ ID NO: 1594 - RNA, 1222 nt, Artificial Sequence
  mRNA Design i-3 (A64-N5-C30-hSL-N5) comprising derived and/or modified sequence from Pf(3D7)__XP_001351122.1__HsALB_Pf-CSP(82-397) (opt2)
gggagaaagcuuaccaugaagugggucaccuucaucucccuccucuuccucuucuccuccgccuacuccgacaacgagaagcuccgcaagcccaagcacaagaagcucaagcagcccgccgacggcaaccccgaccccaacgccaaccccaacgucgaccccaacgccaaccccaacgucgaccccaacgccaaccccaacgucgaccccaacgccaaccccaacgccaaccccaacgccaaccccaacgccaaccccaacgccaaccccaacgccaaccccaacgccaaccccaacgccaaccccaacgccaaccccaacgccaaccccaacgccaaccccaacgccaaccccaacgccaaccccaacgccaaccccaacgccaaccccaacgccaaccccaacgccaaccccaacgucgaccccaacgccaaccccaacgccaaccccaacgccaaccccaacgccaaccccaacgccaaccccaacgccaaccccaacgccaaccccaacgccaaccccaacgccaaccccaacgccaaccccaacgccaaccccaacgccaaccccaacgccaaccccaacgccaaccccaacgccaaccccaacgccaaccccaacgccaaccccaacgccaaccccaacaagaacaaccagggcaacggccagggccacaacaugcccaacgaccccaaccgcaacgucgacgagaacgccaacgccaacuccgccgucaagaacaacaacaacgaggagcccuccgacaagcacaucaaggaguaccucaacaagauccagaacucccucuccaccgaguggucccccugcuccgucaccugcggcaacggcauccagguccgcaucaagcccggcuccgccaacaagcccaaggacgagcucgacuacgccaacgacaucgagaagaagaucugcaagauggagaagugcuccuccgucuucaacgucgucaacuccuccaucggccucaucaugguccucuccuuccucuuccucaacugaggacuaguuauaagacugacuagcccgaugggccucccaacgggcccuccuccccuccuugcaccgagauuaauaaaaaaaaaaaaaaaaaaaaaaaaaaaaaaaaaaaaaaaaaaaaaaaaaaaaaaaaaaaaaaaaugcaucccccccccccccccccccccccccccccccaaaggcucuuuucagagccaccagaauu

SEQ ID NO: 1595 - RNA, 574 nt, Artificial Sequence
  mRNA Design i-3 (A64-N5-C30-hSL-N5) comprising derived and/or modified sequence from Pf(3D7)__XP_001351122.1__HsALB_Pf-CSP(93-192) (opt2)
gggagaaagcuuaccaugaagugggucaccuucaucucccuccucuuccucuucuccuccgccuacuccaagcucaagcagcccgccgacggcaaccccgaccccaacgccaaccccaacgucgaccccaacgccaaccccaacgucgaccccaacgccaaccccaacgucgaccccaacgccaaccccaacgccaaccccaacgccaaccccaacgccaaccccaacgccaaccccaacgccaaccccaacgccaaccccaacgccaaccccaacgccaaccccaacgccaaccccaacgccaaccccaacgccaaccccaacgccaaccccaacgccaaccccaacgccaaccccaacgccaaccccugaggacuaguuauaagacugacuagcccgaugggccucccaacgggcccuccuccccuccuugcaccgagauuaauaaaaaaaaaaaaaaaaaaaaaaaaaaaaaaaaaaaaaaaaaaaaaaaaaaaaaaaaaaaaaaaaugcaucccccccccccccccccccccccccccccccaaaggcucuuuucagagccaccagaauu

SEQ ID NO: 1596 - RNA, 814 nt, Artificial Sequence
  mRNA Design i-3 (A64-N5-C30-hSL-N5) comprising derived and/or modified sequence from Pf(3D7)__XP_001351122.1__HsALB_Pf-CSP(93-272) (opt2)
gggagaaagcuuaccaugaagugggucaccuucaucucccuccucuuccucuucuccuccgccuacuccaagcucaagcagcccgccgacggcaaccccgaccccaacgccaaccccaacgucgaccccaacgccaaccccaacgucgaccccaacgccaaccccaacgucgaccccaacgccaaccccaacgccaaccccaacgccaaccccaacgccaaccccaacgccaaccccaacgccaaccccaacgccaaccccaacgccaaccccaacgccaaccccaacgccaaccccaacgccaaccccaacgccaaccccaacgccaaccccaacgccaaccccaacgccaaccccaacgccaaccccaacgccaaccccaacgucgaccccaacgccaaccccaacgccaaccccaacgccaaccccaacgccaaccccaacgccaaccccaacgccaaccccaacgccaaccccaacgccaaccccaacgccaaccccaacgccaaccccaacgccaaccccaacgccaaccccaacgccaaccccaacgccaaccccaacgccaaccccaacgccaaccccaacgccaaccccaacgccaaccccugaggacuaguuauaagacugacuagcccgaugggccucccaacgggcccuccuccccuccuugcaccgagauuaauaaaaaaaaaaaaaaaaaaaaaaaaaaaaaaaaaaaaaaaaaaaaaaaaaaaaaaaaaaaaaaaaugcaucccccccccccccccccccccccccccccccaaaggcucuuuucagagccaccagaauu

SEQ ID NO: 1597 - RNA, 1189 nt, Artificial Sequence
  mRNA Design i-3 (A64-N5-C30-hSL-N5) comprising derived and/or modified sequence from Pf(3D7)__XP_001351122.1__HsALB_Pf-CSP(93-397) (opt2)
gggagaaagcuuaccaugaagugggucaccuucaucucccuccucuuccucuucuccuccgccuacuccaagcucaagcagcccgccgacggcaaccccgaccccaacgccaaccccaacgucgaccccaacgccaaccccaacgucgaccccaacgccaaccccaacgucgaccccaacgccaaccccaacgccaaccccaacgccaaccccaacgccaaccccaacgccaaccccaacgccaaccccaacgccaaccccaacgccaaccccaacgccaaccccaacgccaaccccaacgccaaccccaacgccaaccccaacgccaaccccaacgccaaccccaacgccaaccccaacgccaaccccaacgccaaccccaacgucgaccccaacgccaaccccaacgccaaccccaacgccaaccccaacgccaaccccaacgccaaccccaacgccaaccccaacgccaaccccaacgccaaccccaacgccaaccccaacgccaaccccaacgccaaccccaacgccaaccccaacgccaaccccaacgccaaccccaacgccaaccccaacgccaaccccaacgccaaccccaacgccaaccccaacaagaacaaccagggcaacggccagggccacaacaugcccaacgaccccaaccgcaacgucgacgagaacgccaacgccaacuccgccgucaagaacaacaacaacgaggagcccuccgacaagcacaucaaggaguaccucaacaagauccagaacucccucuccaccgaguggucccccugcuccgucaccugcggcaacggcauccagguccgcaucaagcccggcuccgccaacaagcccaaggacgagcucgacuacgccaacgacaucgagaagaagaucugcaagauggagaagugcuccuccgucuucaacgucgucaacuccuccaucggccucaucaugguccucuccuuccucuuccucaacugaggacuaguuauaagacugacuagcccgaugggccucccaacgggcccuccuccccuccuugcaccgagauuaauaaaaaaaaaaaaaaaaaaaaaaaaaaaaaaaaaaaaaaaaaaaaaaaaaaaaaaaaaaaaaaaaugcaucccccccccccccccccccccccccccccccaaaggcucuuuucagagccaccagaauu

SEQ ID NO: 1598 - RNA, 559 nt, Artificial Sequence
  mRNA Design i-3 (A64-N5-C30-hSL-N5) comprising derived and/or modified sequence from Pf(3D7)__XP_001351122.1__HsALB_Pf-CSP(98-192) (opt2)
gggagaaagcuuaccaugaagugggucaccuucaucucccuccucuuccucuucuccuccgccuacuccgccgacggcaaccccgaccccaacgccaaccccaacgucgaccccaacgccaaccccaacgucgaccccaacgccaaccccaacgucgaccccaacgccaaccccaacgccaaccccaacgccaaccccaacgccaaccccaacgccaaccccaacgccaaccccaacgccaaccccaacgccaaccccaacgccaaccccaacgccaaccccaacgccaaccccaacgccaaccccaacgccaaccccaacgccaaccccaacgccaaccccaacgccaaccccugaggacuaguuauaagacugacuagcccgaugggccucccaacgggcccuccuccccuccuugcaccgagauuaauaaaaaaaaaaaaaaaaaaaaaaaaaaaaaaaaaaaaaaaaaaaaaaaaaaaaaaaaaaaaaaaaugcaucccccccccccccccccccccccccccccccaaaggcucuuuucagagccaccagaauu

SEQ ID NO: 1599 - RNA, 799 nt, Artificial Sequence
  mRNA Design i-3 (A64-N5-C30-hSL-N5) comprising derived and/or modified sequence from Pf(3D7)__XP_001351122.1__HsALB_Pf-CSP(98-272) (opt2)
gggagaaagcuuaccaugaagugggucaccuucaucucccuccucuuccucuucuccuccgccuacuccgccgacggcaaccccgaccccaacgccaaccccaacgucgaccccaacgccaaccccaacgucgaccccaacgccaaccccaacgucgaccccaacgccaaccccaacgccaaccccaacgccaaccccaacgccaaccccaacgccaaccccaacgccaaccccaacgccaaccccaacgccaaccccaacgccaaccccaacgccaaccccaacgccaaccccaacgccaaccccaacgccaaccccaacgccaaccccaacgccaaccccaacgccaaccccaacgccaaccccaacgucgaccccaacgccaaccccaacgccaaccccaacgccaaccccaacgccaaccccaacgccaaccccaacgccaaccccaacgccaaccccaacgccaaccccaacgccaaccccaacgccaaccccaacgccaaccccaacgccaaccccaacgccaaccccaacgccaaccccaacgccaaccccaacgccaaccccaacgccaaccccaacgccaaccccugaggacuaguuauaagacugacuagcccgaugggccucccaacgggcccuccuccccuccuugcaccgagauuaauaaaaaaaaaaaaaaaaaaaaaaaaaaaaaaaaaaaaaaaaaaaaaaaaaaaaaaaaaaaaaaaaugcaucccccccccccccccccccccccccccccccaaaggcucuuuucagagccaccagaauu

SEQ ID NO: 1600 - RNA, 1105 nt, Artificial Sequence
  mRNA Design i-3 (A64-N5-C30-hSL-N5) comprising derived and/or modified sequence from Pf(3D7)__XP_001351122.1__HsALB_Pf-CSP(98-374) (opt2)
gggagaaagcuuaccaugaagugggucaccuucaucucccuccucuuccucuucuccuccgccuacuccgccgacggcaaccccgaccccaacgccaaccccaacgucgaccccaacgccaaccccaacgucgaccccaacgccaaccccaacgucgaccccaacgccaaccccaacgccaaccccaacgccaaccccaacgccaaccccaacgccaaccccaacgccaaccccaacgccaaccccaacgccaaccccaacgccaaccccaacgccaaccccaacgccaaccccaacgccaaccccaacgccaaccccaacgccaaccccaacgccaaccccaacgccaaccccaacgccaaccccaacgucgaccccaacgccaaccccaacgccaaccccaacgccaaccccaacgccaaccccaacgccaaccccaacgccaaccccaacgccaaccccaacgccaaccccaacgccaaccccaacgccaaccccaacgccaaccccaacgccaaccccaacgccaaccccaacgccaaccccaacgccaaccccaacgccaaccccaacgccaaccccaacgccaaccccaacaagaacaaccagggcaacggccagggccacaacaugcccaacgaccccaaccgcaacgucgacgagaacgccaacgccaacuccgccgucaagaacaacaacaacgaggagcccuccgacaagcacaucaaggaguaccucaacaagauccagaacucccucuccaccgaguggucccccugcuccgucaccugcggcaacggcauccagguccgcaucaagcccggcuccgccaacaagcccaaggacgagcucgacuacgccaacgacaucgagaagaagaucugcaagauggagaagugcugaggacuaguuauaagacugacuagcccgaugggccucccaacgggcccuccuccccuccuugcaccgagauuaauaaaaaaaaaaaaaaaaaaaaaaaaaaaaaaaaaaaaaaaaaaaaaaaaaaaaaaaaaaaaaaaaugcaucccccccccccccccccccccccccccccccaaaggcucuuuucagagccaccagaauu

SEQ ID NO: 1601 - RNA, 1174 nt, Artificial Sequence
  mRNA Design i-3 (A64-N5-C30-hSL-N5) comprising derived and/or modified sequence from Pf(3D7)__XP_001351122.1__HsALB_Pf-CSP(98-397) (opt2)
gggagaaagcuuaccaugaagugggucaccuucaucucccuccucuuccucuucuccuccgccuacuccgccgacggcaaccccgaccccaacgccaaccccaacgucgaccccaacgccaaccccaacgucgaccccaacgccaaccccaacgucgaccccaacgccaaccccaacgccaaccccaacgccaaccccaacgccaaccccaacgccaaccccaacgccaaccccaacgccaaccccaacgccaaccccaacgccaaccccaacgccaaccccaacgccaaccccaacgccaaccccaacgccaaccccaacgccaaccccaacgccaaccccaacgccaaccccaacgccaaccccaacgucgaccccaacgccaaccccaacgccaaccccaacgccaaccccaacgccaaccccaacgccaaccccaacgccaaccccaacgccaaccccaacgccaaccccaacgccaaccccaacgccaaccccaacgccaaccccaacgccaaccccaacgccaaccccaacgccaaccccaacgccaaccccaacgccaaccccaacgccaaccccaacgccaaccccaacaagaacaaccagggcaacggccagggccacaacaugcccaacgaccccaaccgcaacgucgacgagaacgccaacgccaacuccgccgucaagaacaacaacaacgaggagcccuccgacaagcacaucaaggaguaccucaacaagauccagaacucccucuccaccgaguggucccccugcuccgucaccugcggcaacggcauccagguccgcaucaagcccggcuccgccaacaagcccaaggacgagcucgacuacgccaacgacaucgagaagaagaucugcaagauggagaagugcuccuccgucuucaacgucgucaacuccuccaucggccucaucaugguccucuccuuccucuuccucaacugaggacuaguuauaagacugacuagcccgaugggccucccaacgggcccuccuccccuccuugcaccgagauuaauaaaaaaaaaaaaaaaaaaaaaaaaaaaaaaaaaaaaaaaaaaaaaaaaaaaaaaaaaaaaaaaaugcaucccccccccccccccccccccccccccccccaaaggcucuuuucagagccaccagaauu

SEQ ID NO: 1602 - RNA, 1501 nt, Artificial Sequence
  mRNA Design i-3 (A64-N5-C30-hSL-N5) comprising derived and/or modified sequence from Pf(3D7)__XP_001351122.1__HsALB_Pf-CSP(199-377)_L(PVTN)_HBsAg (opt2)
gggagaaagcuuaccaugaagugggucaccuucaucucccuccucuuccucuucuccuccgccuacuccgaccccaacgccaaccccaacgccaaccccaacgccaaccccaacgccaaccccaacgccaaccccaacgccaaccccaacgccaaccccaacgccaaccccaacgccaaccccaacgccaaccccaacgccaaccccaacgccaaccccaacgccaaccccaacgccaaccccaacgccaaccccaacgccaaccccaacgccaaccccaacgccaaccccaacaagaacaaccagggcaacggccagggccacaacaugcccaacgaccccaaccgcaacgucgacgagaacgccaacgccaacuccgccgucaagaacaacaacaacgaggagcccuccgacaagcacaucaaggaguaccucaacaagauccagaacucccucuccaccgaguggucccccugcuccgucaccugcggcaacggcauccagguccgcaucaagcccggcuccgccaacaagcccaaggacgagcucgacuacgccaacgacaucgagaagaagaucugcaagauggagaagugcuccuccguccccgucaccaacauggagaacaucaccuccggcuuccucggcccccuccucguccuccaggccggcuucuuccuccucacccgcauccucaccaucccccagucccucgacuccugguggaccucccucaacuuccucggcggcucccccgucugccucggccagaacucccagucccccaccuccaaccacucccccaccuccugcccccccaucugccccggcuaccgcuggaugugccuccgccgcuucaucaucuuccucuucauccuccuccucugccucaucuuccuccucguccuccucgacuaccagggcaugcuccccgucugcccccucauccccggcuccaccaccaccaacaccggccccugcaagaccugcaccacccccgcccagggcaacuccauguuccccuccugcugcugcaccaagcccaccgacggcaacugcaccugcauccccauccccuccuccugggccuucgccaaguaccucugggagugggccuccguccgcuucuccuggcucucccuccucguccccuucguccagugguucgucggccucucccccaccgucuggcucuccgccaucuggaugaugugguacuggggccccucccucuacuccaucgucucccccuucaucccccuccuccccaucuucuucugccucugggucuacaucugaggacuaguuauaagacugacuagcccgaugggccucccaacgggcccuccuccccuccuugcaccgagauuaauaaaaaaaaaaaaaaaaaaaaaaaaaaaaaaaaaaaaaaaaaaaaaaaaaaaaaaaaaaaaaaaaugcaucccccccccccccccccccccccccccccccaaaggcucuuuucagagccaccagaauu

SEQ ID NO: 1603 - RNA, 1240 nt, Artificial Sequence
  mRNA Design i-3 (A64-N5-C30-hSL-N5) comprising derived and/or modified sequence from Pb(ANKA)__XP_022712148.1__Pb-CSP (opt2)
gggagaaagcuuaccaugaagaagugcaccauccucgucgucgccucccuccuccucgucaacucccuccuccccggcuacggccagaacaaguccauccaggcccagcgcaaccucaacgagcucugcuacaacgagggcaacgacaacaagcucuaccacguccucaacuccaagaacggcaagaucuacaaccgcaacaccgucaaccgccuccucgccgacgcccccgagggcaagaagaacgagaagaagaacgagaagaucgagcgcaacaacaagcucaagcagcccccccccccccccaaccccaacgacccccccccccccaaccccaacgacccccccccccccaaccccaacgacccccccccccccaaccccaacgacccccccccccccaacgccaacgacccccccccccccaacgccaacgaccccgccccccccaacgccaacgaccccgccccccccaacgccaacgaccccgccccccccaacgccaacgaccccgccccccccaacgccaacgacccccccccccccaaccccaacgaccccgccccccccaacgccaacgacccccccccccccaaccccaacgaccccgcccccccccagggcaacaacaacccccagccccagccccgcccccagccccagccccagccccagccccagccccagccccagccccagccccagccccgcccccagccccagccccagcccggcggcaacaacaacaacaagaacaacaacaacgacgacuccuacauccccuccgccgagaagauccucgaguucgucaagcagauccgcgacuccaucaccgaggaguggucccagugcaacgucaccugcggcuccggcauccgcguccgcaagcgcaagggcuccaacaagaaggccgaggaccucacccucgaggacaucgacaccgagaucugcaagauggacaagugcuccuccaucuucaacaucgucuccaacucccucggcuucgucauccuccucguccucgucuucuucaacugaggacuaguuauaagacugacuagcccgaugggccucccaacgggcccuccuccccuccuugcaccgagauuaauaaaaaaaaaaaaaaaaaaaaaaaaaaaaaaaaaaaaaaaaaaaaaaaaaaaaaaaaaaaaaaaaugcaucccccccccccccccccccccccccccccccaaaggcucuuuucagagccaccagaauu

SEQ ID NO: 1604 - RNA, 1405 nt, Artificial Sequence
  mRNA Design i-3 (A64-N5-C30-hSL-N5) comprising derived and/or modified sequence from Pb(ANKA)__XP_022712148.1__Pb-CSP_L(G4SG4)_TM domain HA (opt2)
gggagaaagcuuaccaugaagaagugcaccauccucgucgucgccucccuccuccucgucaacucccuccuccccggcuacggccagaacaaguccauccaggcccagcgcaaccucaacgagcucugcuacaacgagggcaacgacaacaagcucuaccacguccucaacuccaagaacggcaagaucuacaaccgcaacaccgucaaccgccuccucgccgacgcccccgagggcaagaagaacgagaagaagaacgagaagaucgagcgcaacaacaagcucaagcagcccccccccccccccaaccccaacgacccccccccccccaaccccaacgacccccccccccccaaccccaacgacccccccccccccaaccccaacgacccccccccccccaacgccaacgacccccccccccccaacgccaacgaccccgccccccccaacgccaacgaccccgccccccccaacgccaacgaccccgccccccccaacgccaacgaccccgccccccccaacgccaacgacccccccccccccaaccccaacgaccccgccccccccaacgccaacgacccccccccccccaaccccaacgaccccgcccccccccagggcaacaacaacccccagccccagccccgcccccagccccagccccagccccagccccagccccagccccagccccagccccagccccgcccccagccccagccccagcccggcggcaacaacaacaacaagaacaacaacaacgacgacuccuacauccccuccgccgagaagauccucgaguucgucaagcagauccgcgacuccaucaccgaggaguggucccagugcaacgucaccugcggcuccggcauccgcguccgcaagcgcaagggcuccaacaagaaggccgaggaccucacccucgaggacaucgacaccgagaucugcaagauggacaagugcuccuccaucuucaacaucgucuccaacucccucggcuucgucauccuccucguccucgucuucuucaacggcggcggcggcuccggcggcggcggcaagcucgaguccacccgcaucuaccagauccucgccaucuacuccaccgucgccuccucccucguccucgucgucucccucggcgccaucuccuucuggaugugcuccaacggcucccuccagugccgcaucugcaucugaggacuaguuauaagacugacuagcccgaugggccucccaacgggcccuccuccccuccuugcaccgagauuaauaaaaaaaaaaaaaaaaaaaaaaaaaaaaaaaaaaaaaaaaaaaaaaaaaaaaaaaaaaaaaaaaugcaucccccccccccccccccccccccccccccccaaaggcucuuuucagagccaccagaauu

SEQ ID NO: 1605 - RNA, 1225 nt, Artificial Sequence
  mRNA Design i-3 (A64-N5-C30-hSL-N5) comprising derived and/or modified sequence from Pb(ANKA)__XP_022712148.1__HsALB_Pb-CSP(24-340) (opt2)
gggagaaagcuuaccaugaagugggucaccuucaucucccuccucuuccucuucuccuccgccuacucccagaacaaguccauccaggcccagcgcaaccucaacgagcucugcuacaacgagggcaacgacaacaagcucuaccacguccucaacuccaagaacggcaagaucuacaaccgcaacaccgucaaccgccuccucgccgacgcccccgagggcaagaagaacgagaagaagaacgagaagaucgagcgcaacaacaagcucaagcagcccccccccccccccaaccccaacgacccccccccccccaaccccaacgacccccccccccccaaccccaacgacccccccccccccaaccccaacgacccccccccccccaacgccaacgacccccccccccccaacgccaacgaccccgccccccccaacgccaacgaccccgccccccccaacgccaacgaccccgccccccccaacgccaacgaccccgccccccccaacgccaacgacccccccccccccaaccccaacgaccccgccccccccaacgccaacgacccccccccccccaaccccaacgaccccgcccccccccagggcaacaacaacccccagccccagccccgcccccagccccagccccagccccagccccagccccagccccagccccagccccagccccgcccccagccccagccccagcccggcggcaacaacaacaacaagaacaacaacaacgacgacuccuacauccccuccgccgagaagauccucgaguucgucaagcagauccgcgacuccaucaccgaggaguggucccagugcaacgucaccugcggcuccggcauccgcguccgcaagcgcaagggcuccaacaagaaggccgaggaccucacccucgaggacaucgacaccgagaucugcaagauggacaagugcuccuccaucuucaacaucgucuccaacucccucggcuucgucauccuccucguccucgucuucuucaacugaggacuaguuauaagacugacuagcccgaugggccucccaacgggcccuccuccccuccuugcaccgagauuaauaaaaaaaaaaaaaaaaaaaaaaaaaaaaaaaaaaaaaaaaaaaaaaaaaaaaaaaaaaaaaaaaugcaucccccccccccccccccccccccccccccccaaaggcucuuuucagagccaccagaauu

SEQ ID NO: 1606 - RNA, 1243 nt, Artificial Sequence
  mRNA Design i-3 (A64-N5-C30-hSL-N5) comprising derived and/or modified sequence from Pb(ANKA)__XP_022712148.1__HsIns-iso1_Pb-CSP(24-340) (opt2)
gggagaaagcuuaccauggcccucuggaugcgccuccucccccuccucgcccuccucgcccucuggggccccgaccccgccgccgcccagaacaaguccauccaggcccagcgcaaccucaacgagcucugcuacaacgagggcaacgacaacaagcucuaccacguccucaacuccaagaacggcaagaucuacaaccgcaacaccgucaaccgccuccucgccgacgcccccgagggcaagaagaacgagaagaagaacgagaagaucgagcgcaacaacaagcucaagcagcccccccccccccccaaccccaacgacccccccccccccaaccccaacgacccccccccccccaaccccaacgacccccccccccccaaccccaacgacccccccccccccaacgccaacgacccccccccccccaacgccaacgaccccgccccccccaacgccaacgaccccgccccccccaacgccaacgaccccgccccccccaacgccaacgaccccgccccccccaacgccaacgacccccccccccccaaccccaacgaccccgccccccccaacgccaacgacccccccccccccaaccccaacgaccccgcccccccccagggcaacaacaacccccagccccagccccgcccccagccccagccccagccccagccccagccccagccccagccccagccccagccccgcccccagccccagccccagcccggcggcaacaacaacaacaagaacaacaacaacgacgacuccuacauccccuccgccgagaagauccucgaguucgucaagcagauccgcgacuccaucaccgaggaguggucccagugcaacgucaccugcggcuccggcauccgcguccgcaagcgcaagggcuccaacaagaaggccgaggaccucacccucgaggacaucgacaccgagaucugcaagauggacaagugcuccuccaucuucaacaucgucuccaacucccucggcuucgucauccuccucguccucgucuucuucaacugaggacuaguuauaagacugacuagcccgaugggccucccaacgggcccuccuccccuccuugcaccgagauuaauaaaaaaaaaaaaaaaaaaaaaaaaaaaaaaaaaaaaaaaaaaaaaaaaaaaaaaaaaaaaaaaaugcaucccccccccccccccccccccccccccccccaaaggcucuuuucagagccaccagaauu

SEQ ID NO: 1607 - RNA, 1222 nt, Artificial Sequence
  mRNA Design i-3 (A64-N5-C30-hSL-N5) comprising derived and/or modified sequence from Pb(ANKA)__XP_022712148.1__HsSPARC_Pb-CSP(24-340) (opt2)
gggagaaagcuuaccaugcgcgccuggaucuucuuccuccucugccucgccggccgcgcccucgcccagaacaaguccauccaggcccagcgcaaccucaacgagcucugcuacaacgagggcaacgacaacaagcucuaccacguccucaacuccaagaacggcaagaucuacaaccgcaacaccgucaaccgccuccucgccgacgcccccgagggcaagaagaacgagaagaagaacgagaagaucgagcgcaacaacaagcucaagcagcccccccccccccccaaccccaacgacccccccccccccaaccccaacgacccccccccccccaaccccaacgacccccccccccccaaccccaacgacccccccccccccaacgccaacgacccccccccccccaacgccaacgaccccgccccccccaacgccaacgaccccgccccccccaacgccaacgaccccgccccccccaacgccaacgaccccgccccccccaacgccaacgacccccccccccccaaccccaacgaccccgccccccccaacgccaacgacccccccccccccaaccccaacgaccccgcccccccccagggcaacaacaacccccagccccagccccgcccccagccccagccccagccccagccccagccccagccccagccccagccccagccccgcccccagccccagccccagcccggcggcaacaacaacaacaagaacaacaacaacgacgacuccuacauccccuccgccgagaagauccucgaguucgucaagcagauccgcgacuccaucaccgaggaguggucccagugcaacgucaccugcggcuccggcauccgcguccgcaagcgcaagggcuccaacaagaaggccgaggaccucacccucgaggacaucgacaccgagaucugcaagauggacaagugcuccuccaucuucaacaucgucuccaacucccucggcuucgucauccuccucguccucgucuucuucaacugaggacuaguuauaagacugacuagcccgaugggccucccaacgggcccuccuccccuccuugcaccgagauuaauaaaaaaaaaaaaaaaaaaaaaaaaaaaaaaaaaaaaaaaaaaaaaaaaaaaaaaaaaaaaaaaaugcaucccccccccccccccccccccccccccccccaaaggcucuuuucagagccaccagaauu

SEQ ID NO: 1608 - RNA, 1225 nt, Artificial Sequence
  mRNA Design i-3 (A64-N5-C30-hSL-N5) comprising derived and/or modified sequence from Pb(ANKA)__XP_022712148.1__IgE_Pb-CSP(24-340) (opt2)
gggagaaagcuuaccauggacuggaccuggauccucuuccucgucgccgccgccacccgcguccacucccagaacaaguccauccaggcccagcgcaaccucaacgagcucugcuacaacgagggcaacgacaacaagcucuaccacguccucaacuccaagaacggcaagaucuacaaccgcaacaccgucaaccgccuccucgccgacgcccccgagggcaagaagaacgagaagaagaacgagaagaucgagcgcaacaacaagcucaagcagcccccccccccccccaaccccaacgacccccccccccccaaccccaacgacccccccccccccaaccccaacgacccccccccccccaaccccaacgacccccccccccccaacgccaacgacccccccccccccaacgccaacgaccccgccccccccaacgccaacgaccccgccccccccaacgccaacgaccccgccccccccaacgccaacgaccccgccccccccaacgccaacgacccccccccccccaaccccaacgaccccgccccccccaacgccaacgacccccccccccccaaccccaacgaccccgcccccccccagggcaacaacaacccccagccccagccccgcccccagccccagccccagccccagccccagccccagccccagccccagccccagccccgcccccagccccagccccagcccggcggcaacaacaacaacaagaacaacaacaacgacgacuccuacauccccuccgccgagaagauccucgaguucgucaagcagauccgcgacuccaucaccgaggaguggucccagugcaacgucaccugcggcuccggcauccgcguccgcaagcgcaagggcuccaacaagaaggccgaggaccucacccucgaggacaucgacaccgagaucugcaagauggacaagugcuccuccaucuucaacaucgucuccaacucccucggcuucgucauccuccucguccucgucuucuucaacugaggacuaguuauaagacugacuagcccgaugggccucccaacgggcccuccuccccuccuugcaccgagauuaauaaaaaaaaaaaaaaaaaaaaaaaaaaaaaaaaaaaaaaaaaaaaaaaaaaaaaaaaaaaaaaaaugcaucccccccccccccccccccccccccccccccaaaggcucuuuucagagccaccagaauu

SEQ ID NO: 1609 - RNA, 1411 nt, Artificial Sequence
  mRNA Design i-3 (A64-N5-C30-hSL-N5) comprising derived and/or modified sequence from Pf(3D7)__XP_001351122.1__Pf-CSP (opt3)
gggagaaagcuuaccaugaugagaaagcuggccauccucagcguguccucuuuccuuuuugucgaggcucuguuccaggaauaccaaugcuauggcucaaguagcaacaccaggguuuugaaugaguuaaacuacgacaaugcagggacaaaccuguauaaugaacuagagaugaacuacuauggaaaacaggaaaauugguacucccucaagaaaaacucucggucgcugggugagaaugaugacggcaacaaugaggauaacgaaaaacuucgcaagcccaagcacaagaaacugaagcagccugccgacgggaauccagauccgaacgcgaaucccaacguggacccuaacgcuaauccaaacguagaucccaaugccaacccuaauguggacccaaacgcaaaucccaacgccaauccuaacgcuaauccaaacgcaaauccgaacgccaaucccaacgcuaacccuaaugccaacccaaaugcgaaccccaaugcaaacccuaaugccaacccaaaugcuaaccccaaugccaacccgaaugcaaacccuaaugcuaaccccaacgccaauccaaacgcgaauccuaacgccaaucccaacgucgauccaaaugcaaaccccaaugcuaacccuaaugccaacccaaaugcuaacccgaaugccaaccccaacgcaaauccuaacgccaauccaaacgcuaaucccaacgcgaauccuaacgcaaauccaaacgccaaucccaacgcuaauccgaacgccaauccuaacgcaaauccaaacgccaaccccaaugcuaacccuaaugccaaccccaaugcaaacccaaauaaaaacaaucagggaaacggccaaggucauaauaugccuaacgaccccaaucgaaacguggaugagaaugcgaacgcuaacucagccguuaagaauaacaauaacgaggaaccaagcgacaaacacauuaaggaguauuugaauaagauacagaacagucucuccacugaauggucuccguguagcgugacgugcgggaauggaauccagguccguauuaaaccuggcuccgcaaacaagcccaaagaugagcuggacuacgccaaugacaucgaaaagaaaauuuguaagauggagaaaugcucaaguguguuuaacguaguuaauagcucuaucggccugauaauggugcucuccuucuuauuucugaacugaggacuaguuauaagacugacuagcccgaugggccucccaacgggcccuccuccccuccuugcaccgagauuaauaaaaaaaaaaaaaaaaaaaaaaaaaaaaaaaaaaaaaaaaaaaaaaaaaaaaaaaaaaaaaaaaugcaucccccccccccccccccccccccccccccccaaaggcucuuuucagagccaccagaauu

SEQ ID NO: 1610 - RNA, 1342 nt, Artificial Sequence
  mRNA Design i-3 (A64-N5-C30-hSL-N5) comprising derived and/or modified sequence from Pf(3D7)__XP_001351122.1__Pf-CSP(1-374) (opt3)
gggagaaagcuuaccaugaugagaaagcuggccauccucagcguguccucuuuccuuuuugucgaggcucuguuccaggaauaccaaugcuauggcucaaguagcaacaccaggguuuugaaugaguuaaacuacgacaaugcagggacaaaccuguauaaugaacuagagaugaacuacuauggaaaacaggaaaauugguacucccucaagaaaaacucucggucgcugggugagaaugaugacggcaacaaugaggauaacgaaaaacuucgcaagcccaagcacaagaaacugaagcagccugccgacgggaauccagauccgaacgcgaaucccaacguggacccuaacgcuaauccaaacguagaucccaaugccaacccuaauguggacccaaacgcaaaucccaacgccaauccuaacgcuaauccaaacgcaaauccgaacgccaaucccaacgcuaacccuaaugccaacccaaaugcgaaccccaaugcaaacccuaaugccaacccaaaugcuaaccccaaugccaacccgaaugcaaacccuaaugcuaaccccaacgccaauccaaacgcgaauccuaacgccaaucccaacgucgauccaaaugcaaaccccaaugcuaacccuaaugccaacccaaaugcuaacccgaaugccaaccccaacgcaaauccuaacgccaauccaaacgcuaaucccaacgcgaauccuaacgcaaauccaaacgccaaucccaacgcuaauccgaacgccaauccuaacgcaaauccaaacgccaaccccaaugcuaacccuaaugccaaccccaaugcaaacccaaauaaaaacaaucagggaaacggccaaggucauaauaugccuaacgaccccaaucgaaacguggaugagaaugcgaacgcuaacucagccguuaagaauaacaauaacgaggaaccaagcgacaaacacauuaaggaguauuugaauaagauacagaacagucucuccacugaauggucuccguguagcgugacgugcgggaauggaauccagguccguauuaaaccuggcuccgcaaacaagcccaaagaugagcuggacuacgccaaugacaucgaaaagaaaauuuguaagauggagaaaugcugaggacuaguuauaagacugacuagcccgaugggccucccaacgggcccuccuccccuccuugcaccgagauuaauaaaaaaaaaaaaaaaaaaaaaaaaaaaaaaaaaaaaaaaaaaaaaaaaaaaaaaaaaaaaaaaaugcaucccccccccccccccccccccccccccccccaaaggcucuuuucagagccaccagaauu

SEQ ID NO: 1611 - RNA, 1195 nt, Artificial Sequence
  mRNA Design i-3 (A64-N5-C30-hSL-N5) comprising derived and/or modified sequence from Pf(3D7)__XP_001351122.1__Pf-CSP(1-325) (opt3)
gggagaaagcuuaccaugaugagaaagcuggccauccucagcguguccucuuuccuuuuugucgaggcucuguuccaggaauaccaaugcuauggcucaaguagcaacaccaggguuuugaaugaguuaaacuacgacaaugcagggacaaaccuguauaaugaacuagagaugaacuacuauggaaaacaggaaaauugguacucccucaagaaaaacucucggucgcugggugagaaugaugacggcaacaaugaggauaacgaaaaacuucgcaagcccaagcacaagaaacugaagcagccugccgacgggaauccagauccgaacgcgaaucccaacguggacccuaacgcuaauccaaacguagaucccaaugccaacccuaauguggacccaaacgcaaaucccaacgccaauccuaacgcuaauccaaacgcaaauccgaacgccaaucccaacgcuaacccuaaugccaacccaaaugcgaaccccaaugcaaacccuaaugccaacccaaaugcuaaccccaaugccaacccgaaugcaaacccuaaugcuaaccccaacgccaauccaaacgcgaauccuaacgccaaucccaacgucgauccaaaugcaaaccccaaugcuaacccuaaugccaacccaaaugcuaacccgaaugccaaccccaacgcaaauccuaacgccaauccaaacgcuaaucccaacgcgaauccuaacgcaaauccaaacgccaaucccaacgcuaauccgaacgccaauccuaacgcaaauccaaacgccaaccccaaugcuaacccuaaugccaaccccaaugcaaacccaaauaaaaacaaucagggaaacggccaaggucauaauaugccuaacgaccccaaucgaaacguggaugagaaugcgaacgcuaacucagccguuaagaauaacaauaacgaggaaccaagcgacaaacacauuaaggaguauuugaauaagauacagaacugaggacuaguuauaagacugacuagcccgaugggccucccaacgggcccuccuccccuccuugcaccgagauuaauaaaaaaaaaaaaaaaaaaaaaaaaaaaaaaaaaaaaaaaaaaaaaaaaaaaaaaaaaaaaaaaaugcaucccccccccccccccccccccccccccccccaaaggcucuuuucagagccaccagaauu

SEQ ID NO: 1612 - RNA, 1411 nt, Artificial Sequence
  mRNA Design i-3 (A64-N5-C30-hSL-N5) comprising derived and/or modified sequence from Pf(3D7)__XP_001351122.1__HsALB_Pf-CSP(19-397) (opt3)
gggagaaagcuuaccaugaagugggugaccuucaucagccugcucuuucuuuucuccucugccuacucacuguuucaggaguaucaaugcuacggcaguagcuccaacacaagagucuugaaugaauuaaacuaugacaaugcugggacuaaccuguacaaugagcuagaaaugaacuauuacggaaaacaggagaauugguauucucucaagaaaaacucgaggucacugggugaaaaugaugacggcaacaaugaggauaacgagaaacuucggaagcccaagcacaagaaacugaagcagccugcagacgggaauccagauccgaacgccaaucccaacguugacccuaacgcgaauccaaacguggaucccaaugcuaacccuaauguagacccaaacgccaaucccaacgcaaauccuaacgccaauccaaacgcuaauccgaacgcaaaucccaacgccaacccuaaugcuaacccaaaugccaaccccaaugcgaacccuaaugcaaacccaaaugccaaccccaaugcuaacccgaaugccaacccuaaugcaaaccccaacgcuaauccaaacgccaauccuaacgcgaaucccaacguggauccaaaugccaaccccaaugcaaacccuaaugcuaacccaaaugccaacccgaaugcuaaccccaacgccaauccuaacgcaaauccaaacgccaaucccaacgcuaauccuaacgcgaauccaaacgcaaaucccaacgccaauccgaacgcuaauccuaacgccaauccaaacgcaaaccccaaugccaacccuaaugcuaaccccaaugccaacccaaauaaaaacaaucagggaaacggccaaggucauaauaugccuaacgaccccaaucgcaacgucgaugaaaaugcaaacgcgaacagcgcugugaagaauaacaauaacgaggaaccaagugacaaacacauuaaggaguacuugaauaagauacagaacucccucucuacggaguggagcccguguuccguuaccugcgggaauggaauccaggugcgaauuaaaccuggcucagccaacaagcccaaagaugaacuggacuacgcaaaugacaucgagaagaaaauuuguaagauggaaaaaugcaguagcgucuucaacgugguaaauucuuccaucggccugauaaugguucucucauuuuuauuccugaacugaggacuaguuauaagacugacuagcccgaugggccucccaacgggcccuccuccccuccuugcaccgagauuaauaaaaaaaaaaaaaaaaaaaaaaaaaaaaaaaaaaaaaaaaaaaaaaaaaaaaaaaaaaaaaaaaugcaucccccccccccccccccccccccccccccccaaaggcucuuuucagagccaccagaauu

SEQ ID NO: 1613 - RNA, 1429 nt, Artificial Sequence
  mRNA Design i-3 (A64-N5-C30-hSL-N5) comprising derived and/or modified sequence from Pf(3D7)__XP_001351122.1__HsIns-iso1_Pf-CSP(19-397) (opt3)
gggagaaagcuuaccauggcccuguggaugagacuccuuccccuguuggcuuuacuggcacuauggggcccugacccagccgcggcucucuuccaggaguaccaaugcuaugggagcuccucuaacaccagggugcugaaugaacuuaacuacgauaaugccggaacaaaccuguauaaugaguuggaaaugaacuacuaugguaagcaggagaauugguacucacucaaaaagaacagucggagccugggcgaaaaugacgaugggaacaaugaggacaacgagaaacugcgcaagccgaaacacaagaagcucaaacagcccgcagauggaaauccugacccaaacgccaaucccaacgucgauccuaacgcuaauccaaacguugaccccaaugcaaacccuaauguggauccaaacgccaauccgaacgcuaaucccaacgccaauccuaacgcgaauccaaacgcaaaucccaacgccaacccuaaugcuaacccaaaugccaaccccaaugcaaacccgaaugcuaacccuaaugccaaccccaaugcgaacccaaaugccaacccuaaugcaaaccccaacgcuaauccaaacgccaaucccaacgcuaauccuaacguagacccaaaugccaacccgaaugcaaaccccaaugccaacccuaaugcuaacccaaaugcgaaccccaacgcaaauccuaacgccaauccaaacgcuaaucccaacgccaauccgaacgcaaauccuaacgccaauccaaacgcuaaucccaacgccaauccuaacgcaaaucccaacgcgaacccaaaugcuaacccuaaugccaaccccaaugcaaacccaaauaagaacaaucagggcaacggucaagggcauaauaugccgaacgauccuaaucgaaacguggacgaaaaugccaacgcuaacuccgccgucaaaaauaacaauaacgaggaacccucugauaagcacaucaaagaguauuuaaauaagauucagaacucgcugucaacugaguggagcccauguagugugacgugcggaaauggcauacagguucguaucaagcccggcuccgcaaacaaaccuaaggacgaacuugacuacgcuaaugauauugagaaaaagaucuguaaaauggaaaagugcucuagcguguuuaacgucguaaauuccucaauuggguugaucauggugcugaguuuccuauuucucaacugaggacuaguuauaagacugacuagcccgaugggccucccaacgggcccuccuccccuccuugcaccgagauuaauaaaaaaaaaaaaaaaaaaaaaaaaaaaaaaaaaaaaaaaaaaaaaaaaaaaaaaaaaaaaaaaaugcaucccccccccccccccccccccccccccccccaaaggcucuuuucagagccaccagaauu

SEQ ID NO: 1614 - RNA, 1408 nt, Artificial Sequence
  mRNA Design i-3 (A64-N5-C30-hSL-N5) comprising derived and/or modified sequence from Pf(3D7)__XP_001351122.1__HsSPARC_Pf-CSP(19-397) (opt3)
gggagaaagcuuaccaugagagccuggaucuucuuucugcucugccuugcuggcagggcacuggccuuguuccaggaguaccaauguuaugggagcuccucuaacacccggguguuaaaugaacugaacuacgacaaugcgggaacaaaccuauauaaugagcucgaaaugaacuacuaugguaagcaggagaauugguacucacugaaaaagaacagucgcagccuuggcgaaaaugaugacgggaacaaugaggauaacgagaaacugcgaaagcccaaacacaagaaguugaaacagccugcugacggaaauccagauccgaacgccaaucccaacgucgacccuaacgcaaauccaaacguugaucccaaugccaacccuaauguggacccaaacgcuaaucccaacgcaaauccuaacgccaauccaaacgcuaauccgaacgccaaucccaacgcgaacccuaaugcaaacccaaaugccaaccccaaugcuaacccuaaugccaacccaaaugcaaaccccaaugcuaacccgaaugccaacccuaaugcgaaccccaacgccaauccaaacgcaaauccuaacgcuaaucccaacguagauccaaaugccaaccccaaugcuaacccuaaugccaacccaaaugcaaacccgaaugccaaccccaacgcuaauccuaacgcgaauccaaacgcaaaucccaacgccaauccuaacgcuaauccaaacgccaaucccaacgcaaauccgaacgccaauccuaacgcuaauccaaacgccaaccccaaugcaaacccuaaugcgaaccccaaugcuaacccaaauaagaacaaucagggcaacggucaagggcauaauaugccuaacgaccccaaucguaacguggaugaaaaugccaacgcaaacuccgccgucaaaaauaacaauaacgaggaaccaucugacaagcacauuaaagaguaucucaauaagauacagaacucgcugucaacugaguggagcccgugcagugugacguguggaaauggcauccagguuagaauuaagccuggcuccgcuaacaaacccaaggaugaacuggacuacgccaaugacaucgagaaaaagauuugcaaaauggaaaaguguucuagcguguuuaacgucguaaauuccucaaucgggcucauaaugguguuaaguuuccuguuucuuaacugaggacuaguuauaagacugacuagcccgaugggccucccaacgggcccuccuccccuccuugcaccgagauuaauaaaaaaaaaaaaaaaaaaaaaaaaaaaaaaaaaaaaaaaaaaaaaaaaaaaaaaaaaaaaaaaaugcaucccccccccccccccccccccccccccccccaaaggcucuuuucagagccaccagaauu

SEQ ID NO: 1615 - RNA, 1411 nt, Artificial Sequence
  mRNA Design i-3 (A64-N5-C30-hSL-N5) comprising derived and/or modified sequence from Pf(3D7)__XP_001351122.1__IgE_Pf-CSP(19-397) (opt3)
gggagaaagcuuaccauggacuggaccuggauccuguuccucguggccgcugcaacaagaguccacagccuuuuucaggaguaccaaugcuauggcuccucuucaaacacuaggguucugaaugaauugaacuacgauaaugccgggacgaacuuauauaaugagcuggaaaugaacuacuauggaaagcaggagaauugguacagucuaaagaagaacagccggucccucggugaaaaugacgauggcaacaaugaggacaacgagaaacugcgcaagcccaaacauaagaaacuuaaacagccugcggaugggaauccagacccgaacgcuaaucccaacguggauccuaacgccaauccaaacguagaccccaaugcaaacccuaauguggauccaaacgccaaucccaacgcuaauccuaacgcaaauccaaacgccaauccgaacgcuaaucccaacgccaacccuaaugcgaacccaaaugcaaaccccaaugccaacccuaaugcuaacccaaaugccaaccccaaugcaaacccgaaugcuaacccuaaugccaaccccaacgcgaauccaaacgccaauccuaacgcaaaucccaacgucgacccaaaugcuaaccccaaugccaacccuaaugcuaacccaaaugccaacccgaaugcaaaccccaacgccaauccuaacgcuaauccaaacgcgaaucccaacgcaaauccuaacgccaauccaaacgcuaaucccaacgccaauccgaacgcaaauccuaacgccaauccaaacgcuaaccccaaugccaacccuaaugcaaaccccaaugcgaacccaaauaagaacaaucagggaaacggccaaggucacaauaugccuaacgaucccaaucgaaacguggacgaaaaugcuaacgccaacucugcaguuaaaaauaacaauaacgaggaaccaucggauaagcauauuaaagaguaucugaauaagauacagaacucauugagcaccgaguggaguccguguuccgugacaugcgggaauggaauccagguccguauuaagccuggcucugccaacaaacccaaggacgaacucgacuacgcuaaugauaucgagaaaaagauuuguaaaauggaaaagugcagcuccguguucaacguaguuaauucaaguaucggccugauaauggugcugagcuuucucuucuuaaacugaggacuaguuauaagacugacuagcccgaugggccucccaacgggcccuccuccccuccuugcaccgagauuaauaaaaaaaaaaaaaaaaaaaaaaaaaaaaaaaaaaaaaaaaaaaaaaaaaaaaaaaaaaaaaaaaugcaucccccccccccccccccccccccccccccccaaaggcucuuuucagagccaccagaauu

SEQ ID NO: 1616 - RNA, 1576 nt, Artificial Sequence
  mRNA Design i-3 (A64-N5-C30-hSL-N5) comprising derived and/or modified sequence from Pf(3D7)__XP_001351122.1__Pf-CSP_L(G4SG4)_TM domain HA (opt3)
gggagaaagcuuaccaugaugagaaagcuggccauccucagcguguccucuuuccuuuuugucgaggcucuguuccaggaauaccaaugcuauggcucaaguagcaacaccaggguuuugaaugaguuaaacuacgacaaugcagggacaaaccuguauaaugaacuagagaugaacuacuauggaaagcaggaaaauugguacucccucaagaaaaacucucggucgcugggugagaaugaugacggcaacaaugaggauaacgaaaaacuucgcaagcccaagcacaagaaacugaagcagccugccgacgggaauccagauccgaacgcgaaucccaacguggacccuaacgcuaauccaaacguagaucccaaugccaacccuaauguggacccaaacgcaaaucccaacgccaauccuaacgcuaauccaaacgcaaauccgaacgccaaucccaacgcuaacccuaaugccaacccaaaugcgaaccccaaugcaaacccuaaugccaacccaaaugcuaaccccaaugccaacccgaaugcaaacccuaaugcuaaccccaacgccaauccaaacgcgaauccuaacgccaaucccaacgucgauccaaaugcaaaccccaaugcuaacccuaaugccaacccaaaugcuaacccgaaugccaaccccaacgcaaauccuaacgccaauccaaacgcuaaucccaacgcgaauccuaacgcaaauccaaacgccaaucccaacgcuaauccgaacgccaauccuaacgcaaauccaaacgccaaccccaaugcuaacccuaaugccaaccccaaugcaaacccaaauaaaaacaaucagggaaacggccaaggucauaauaugccuaacgaccccaaucgaaacguggaugagaaugcgaacgcuaacucagccguuaagaauaacaauaacgaggaaccaagcgacaaacacauuaaggaguauuugaauaagauacagaacagucucuccacugaauggucuccguguagcgugacgugcgggaauggaauccagguccguauuaaaccuggcuccgcaaacaagcccaaagaugagcuggacuacgccaaugacaucgaaaagaaaauuuguaagauggagaaaugcucaaguguguuuaacguaguuaauagcucuaucggccugauaauggugcucuccuucuuauuucugaacgggggagguggcucagggggaggcgguaaacuugaaagcaccagaaucuaccagauuuuggcuaucuauaguacagucgccucuucccuggugcuaguggucagccucggggcaauuucguucuggauguguucuaauggaucccugcaaugcaggaucuguauaugaggacuaguuauaagacugacuagcccgaugggccucccaacgggcccuccuccccuccuugcaccgagauuaauaaaaaaaaaaaaaaaaaaaaaaaaaaaaaaaaaaaaaaaaaaaaaaaaaaaaaaaaaaaaaaaaugcaucccccccccccccccccccccccccccccccaaaggcucuuuucagagccaccagaauu

SEQ ID NO: 1617 - RNA, 1450 nt, Artificial Sequence
  mRNA Design i-3 (A64-N5-C30-hSL-N5) comprising derived and/or modified sequence from Pf(3D7)__XP_001351122.1__Pf-CSP(199-377)_L(PVTN)_HBsAg (opt3)
gggagaaagcuuaccauggaccccaacgccaauccuaacgcuaauccaaacgcaaauccgaacgccaaucccaacgcgaauccuaacgcuaauccaaacgccaaucccaacgcaaauccuaacgccaacccaaaugcuaaccccaaugcaaacccuaaugccaacccaaaugcuaacccgaaugccaaccccaaugcgaacccuaaugcaaacccaaaugccaaccccaacgcuaauccuaacaagaauaaccagggcaaugggcaaggacacaacaugccaaaugaucccaacagaaauguggacgagaacgccaaugcaaacagcgcugucaaaaauaacaauaacgaggaaccguccgauaagcauaucaaagaauaccugaacaagauucaaaauucucucucaaccgaguggaguccuugcagcguuacaugugguaacggcauacaggugaggaucaaacccggguccgccaauaagccaaaggacgaacuugauuaugcgaacgacauugagaaaaagaucugcaaaauggagaaguguucuucgguaccugugacuaauauggaaaacauuacgucaggauuccugggccccuuguuaguccugcaggccggguuuuuccuacucacccggauccugacaauaccacagagccuugauaguugguggacuucccugaauuuucucgguggaucucccgugugcuugggccagaacagccaguccccuaccucaaaucacaguccaacaagcuguccgcccaucugcccuggcuaccgcuggaugugucugcgacguuucauuaucuuucuguucauucucuuacugugccuuaucuuuuugcugguucuacucgacuaucaggggaugcugccaguguguccccuuauaccuggaucuaccacuacaaacaccgguccaugcaaaacguguacuacccccgcacaaggcaauuccauguucccgucaugcugcuguacaaagccuacugaugggaacugcaccuguauuccaauccccagcaguugggcuuuugccaaguaccugugggagugggcuucugucagauucuccugguugagccuccuggugccuuuuguacagugguucguuggauuaucgcccacaguguggcugucugccauuuggaugaugugguauuggggcccaucccucuacucaaucgucaguccuuuuaucccccuucugccaauuuucuucugcuuguggguguauauaugaggacuaguuauaagacugacuagcccgaugggccucccaacgggcccuccuccccuccuugcaccgagauuaauaaaaaaaaaaaaaaaaaaaaaaaaaaaaaaaaaaaaaaaaaaaaaaaaaaaaaaaaaaaaaaaaugcaucccccccccccccccccccccccccccccccaaaggcucuuuucagagccaccagaauu

SEQ ID NO: 1618 - RNA, 1492 nt, Artificial Sequence
  mRNA Design i-3 (A64-N5-C30-hSL-N5) comprising derived and/or modified sequence from Pf(3D7)__XP_001351122.1__Pf-CSP(199-387)_L(PVTN)_HBsAg (opt3)
gggagaaagcuuaccaugauggcccccgacccuaacgcuaauccaaacgcaaauccgaacgccaaucccaacgcgaauccuaacgcuaauccaaacgccaaucccaacgcaaauccuaacgccaauccaaacgcuaaccccaaugcaaacccuaaugccaacccaaaugcuaacccgaaugccaaccccaaugcgaacccuaaugcaaacccaaaugccaaccccaaugcuaacccuaacgccaauccaaacaagaauaaccagggcaaugggcaaggacacaacaugcccaaugauccgaacagaaauguggacgagaacgcaaaugcuaacagcgccgucaaaaauaacaauaacgaggaaccuuccgauaagcauaucaaagaauaccugaacaagauucaaaauucucucucaaccgaguggagucccugcagcguuacaugugguaacggcauacaggugaggaucaaaccaggguccgcgaauaagccuaaggacgaacuugauuaugccaacgacauugagaaaaagaucugcaaaauggagaaguguucuucgguauucaauguggucaacucaagcauuggacugggccccgugacuaauauggaaaacaucacgaguggguuuuuggguccauuacugguucuacaggcaggauucuuucuccugacccggauacuuacaaucccccagucccuggauucuugguggacuagcuugaauuuccucggcggcuccccugugugccuggggcagaacucacagaguccaaccagcaaucacucuccgacauccugucccccuauuugcccaggauaccgcuggaugugucugcgacguuuuaucauuuuccucuuuaucuuacugcuuugcuugauauuccugcuaguccuccuggacuaucaggguaugcuucccguguguccucugauuccaggcucaaccacuacaaacaccgggcccugcaaaacguguacuaccccggcucaaggaaauagcauguuuccuaguugcugcuguacaaagccaacugauggcaacugcaccuguauccccauuccuucuuccugggccuucgcuaaguacuugugggagugggccagcguaagauuuucguggcucucucuguuaguucccuucgugcagugguuugucggucuguccccaacaguguggcucucagcaaucuggaugaugugguauugggggccuagucuuuacagcaucgugucccccuucauuccacuguugccgauauucuuuugccuaugggucuauaucugaggacuaguuauaagacugacuagcccgaugggccucccaacgggcccuccuccccuccuugcaccgagauuaauaaaaaaaaaaaaaaaaaaaaaaaaaaaaaaaaaaaaaaaaaaaaaaaaaaaaaaaaaaaaaaaaugcaucccccccccccccccccccccccccccccccaaaggcucuuuucagagccaccagaauu

SEQ ID NO: 1619 - RNA, 676 nt, Artificial Sequence
  mRNA Design i-3 (A64-N5-C30-hSL-N5) comprising derived and/or modified sequence from Pf(3D7)__XP_001351122.1__HsALB_Pf-CSP(19-152) (opt3)
gggagaaagcuuaccaugaagugggugaccuucaucagccugcucuuucuuuucuccucugccuacucacuguuucaggaguaucaaugcuacggcaguagcuccaacacaagagucuugaaugaauuaaacuaugacaaugcugggacuaaccuguacaaugagcuagaaaugaacuauuacggaaaacaggagaauugguauucucucaagaaaaacucgaggucacugggugaaaaugaugacggcaacaaugaggauaacgagaaacuucggaagcccaagcacaagaaacugaagcagccugcagacgggaauccagauccgaacgccaaucccaacguugacccuaacgcgaauccaaacguggaucccaaugcuaacccuaauguagacccaaacgccaaucccaacgcaaauccuaacgccaauccaaacgcuaauccgaacgcaaaucccaacgccaacccuugaggacuaguuauaagacugacuagcccgaugggccucccaacgggcccuccuccccuccuugcaccgagauuaauaaaaaaaaaaaaaaaaaaaaaaaaaaaaaaaaaaaaaaaaaaaaaaaaaaaaaaaaaaaaaaaaugcaucccccccccccccccccccccccccccccccaaaggcucuuuucagagccaccagaauu

SEQ ID NO: 1620 - RNA, 796 nt, Artificial Sequence
  mRNA Design i-3 (A64-N5-C30-hSL-N5) comprising derived and/or modified sequence from Pf(3D7)__XP_001351122.1__HsALB_Pf-CSP(19-192) (opt3)
gggagaaagcuuaccaugaagugggugaccuucaucagccugcucuuucuuuucuccucugccuacucacuguuucaggaguaucaaugcuacggcaguagcuccaacacaagagucuugaaugaauuaaacuaugacaaugcugggacuaaccuguacaaugagcuagaaaugaacuauuacggaaaacaggagaauugguauucucucaagaaaaacucgaggucacugggugaaaaugaugacggcaacaaugaggauaacgagaaacuucggaagcccaagcacaagaaacugaagcagccugcagacgggaauccagauccgaacgccaaucccaacguugacccuaacgcgaauccaaacguggaucccaaugcuaacccuaauguagacccaaacgccaaucccaacgcaaauccuaacgccaauccaaacgcuaauccgaacgcaaaucccaacgccaacccuaaugcuaacccaaaugccaaccccaaugcgaacccuaaugcaaacccaaaugccaaccccaaugcuaacccgaaugccaacccuaaugcaaaccccaacgcuaauccaaacgccaauccuugaggacuaguuauaagacugacuagcccgaugggccucccaacgggcccuccuccccuccuugcaccgagauuaauaaaaaaaaaaaaaaaaaaaaaaaaaaaaaaaaaaaaaaaaaaaaaaaaaaaaaaaaaaaaaaaaugcaucccccccccccccccccccccccccccccccaaaggcucuuuucagagccaccagaauu

SEQ ID NO: 1621 - RNA, 1036 nt, Artificial Sequence
  mRNA Design i-3 (A64-N5-C30-hSL-N5) comprising derived and/or modified sequence from Pf(3D7)__XP_001351122.1__HsALB_Pf-CSP(19-272) (opt3)
gggagaaagcuuaccaugaagugggugaccuucaucagccugcucuuucuuuucuccucugccuacucacuguuucaggaguaucaaugcuacggcaguagcuccaacacaagagucuugaaugaauuaaacuaugacaaugcugggacuaaccuguacaaugagcuagaaaugaacuauuacggaaaacaggagaauugguauucucucaagaaaaacucgaggucacugggugaaaaugaugacggcaacaaugaggauaacgagaaacuucggaagcccaagcacaagaaacugaagcagccugcagacgggaauccagauccgaacgccaaucccaacguugacccuaacgcgaauccaaacguggaucccaaugcuaacccuaauguagacccaaacgccaaucccaacgcaaauccuaacgccaauccaaacgcuaauccgaacgcaaaucccaacgccaacccuaaugcuaacccaaaugccaaccccaaugcgaacccuaaugcaaacccaaaugccaaccccaaugcuaacccgaaugccaacccuaaugcaaaccccaacgcuaauccaaacgccaauccuaacgcgaaucccaacguggauccaaaugccaaccccaaugcaaacccuaaugcuaacccaaaugccaacccgaaugcuaaccccaacgccaauccuaacgcaaauccaaacgccaaucccaacgcuaauccuaacgcgaauccaaacgcaaaucccaacgccaauccgaacgcuaauccuaacgccaauccaaacgcaaaccccaaugccaacccuaaugcuaaccccaaugccaacccaugaggacuaguuauaagacugacuagcccgaugggccucccaacgggcccuccuccccuccuugcaccgagauuaauaaaaaaaaaaaaaaaaaaaaaaaaaaaaaaaaaaaaaaaaaaaaaaaaaaaaaaaaaaaaaaaaugcaucccccccccccccccccccccccccccccccaaaggcucuuuucagagccaccagaauu

SEQ ID NO: 1622 - RNA, 1198 nt, Artificial Sequence
  mRNA Design i-3 (A64-N5-C30-hSL-N5) comprising derived and/or modified sequence from Pf(3D7)__XP_001351122.1__HsALB_Pf-CSP(19-272)_L(AAY)_Pf-CSP(310-3 27)_L(AAY)_Pf-CSP(346-375) (opt3)
gggagaaagcuuaccaugaagugggugaccuucaucagccugcucuuucuuuucuccucugccuacucacuguuucaggaguaucaaugcuacggcaguagcuccaacacaagagucuugaaugaauuaaacuaugacaaugcugggacuaaccuguacaaugagcuagaaaugaacuauuacggaaaacaggagaauugguauucucucaagaaaaacucgaggucacugggugaaaaugaugacggcaacaaugaggauaacgagaaacuucggaagcccaagcacaagaaacugaagcagccugcagacgggaauccagauccgaacgccaaucccaacguugacccuaacgcgaauccaaacguggaucccaaugcuaacccuaauguagacccaaacgccaaucccaacgcaaauccuaacgccaauccaaacgcuaauccgaacgcaaaucccaacgccaacccuaaugcuaacccaaaugccaaccccaaugcgaacccuaaugcaaacccaaaugccaaccccaaugcuaacccgaaugccaacccuaaugcaaaccccaacgcuaauccaaacgccaauccuaacgcgaaucccaacguggauccaaaugccaaccccaaugcaaacccuaaugcuaacccaaaugccaacccgaaugcuaaccccaacgccaauccuaacgcaaauccaaacgccaaucccaacgcuaauccuaacgcgaauccaaacgcaaaucccaacgccaauccgaacgcuaauccuaacgccaauccaaacgcaaaccccaaugccaacccuaaugcuaaccccaaugccaacccagcagcguacgaaccuagcgacaaacauauuaaggaguacuugaauaaaauacagaacagucucgcugccuauaucaagcccggauccgcaaauaagccaaaagaugaacuggacuacgccaacgauauugagaagaaaaucuguaagauggagaaaugcucuugaggacuaguuauaagacugacuagcccgaugggccucccaacgggcccuccuccccuccuugcaccgagauuaauaaaaaaaaaaaaaaaaaaaaaaaaaaaaaaaaaaaaaaaaaaaaaaaaaaaaaaaaaaaaaaaaugcaucccccccccccccccccccccccccccccccaaaggcucuuuucagagccaccagaauu

SEQ ID NO: 1623 - RNA, 1159 nt, Artificial Sequence
  mRNA Design i-3 (A64-N5-C30-hSL-N5) comprising derived and/or modified sequence from Pf(3D7)__XP_001351122.1__HsALB_Pf-CSP(19-272)_L(AAY)_Pf-CSP(346-3 65)_L(AAY)_P2 (opt3)
gggagaaagcuuaccaugaagugggugaccuucaucagccugcucuuucuuuucuccucugccuacucacuguuucaggaguaucaaugcuacggcaguagcuccaacacaagagucuugaaugaauuaaacuaugacaaugcugggacuaaccuguacaaugagcuagaaaugaacuauuacggaaaacaggagaauugguauucucucaagaaaaacucgaggucacugggugaaaaugaugacggcaacaaugaggauaacgagaaacuucggaagcccaagcacaagaaacugaagcagccugcagacgggaauccagauccgaacgccaaucccaacguugacccuaacgcgaauccaaacguggaucccaaugcuaacccuaauguagacccaaacgccaaucccaacgcaaauccuaacgccaauccaaacgcuaauccgaacgcaaaucccaacgccaacccuaaugcuaacccaaaugccaaccccaaugcgaacccuaaugcaaacccaaaugccaaccccaaugcuaacccgaaugccaacccuaaugcaaaccccaacgcuaauccaaacgccaauccuaacgcgaaucccaacguggauccaaaugccaaccccaaugcaaacccuaaugcuaacccaaaugccaacccgaaugcuaaccccaacgccaauccuaacgcaaauccaaacgccaaucccaacgcuaauccuaacgcgaauccaaacgcaaaucccaacgccaauccgaacgcuaauccuaacgccaauccaaacgcaaaccccaaugccaacccuaaugcuaaccccaaugccaacccagcagcguacauuaaaccuggaagcgcuaauaagcccaaagacgaauuggauuacgccaacgacauagaggcagccuaucaguacaucaaggcuaauaguaaguucauuggcaucacggaacucugaggacuaguuauaagacugacuagcccgaugggccucccaacgggcccuccuccccuccuugcaccgagauuaauaaaaaaaaaaaaaaaaaaaaaaaaaaaaaaaaaaaaaaaaaaaaaaaaaaaaaaaaaaaaaaaaugcaucccccccccccccccccccccccccccccccaaaggcucuuuucagagccaccagaauu

SEQ ID NO: 1624 - RNA, 1153 nt, Artificial Sequence
  mRNA Design i-3 (A64-N5-C30-hSL-N5) comprising derived and/or modified sequence from Pf(3D7)__XP_001351122.1__HsALB_Pf-CSP(19-272)_L(AAY)_Pf-CSP(346-3 65)_L(AAY)_PADRE (opt3)
gggagaaagcuuaccaugaagugggugaccuucaucagccugcucuuucuuuucuccucugccuacucacuguuucaggaguaucaaugcuacggcaguagcuccaacacaagagucuugaaugaauuaaacuaugacaaugcugggacuaaccuguacaaugagcuagaaaugaacuauuacggaaaacaggagaauugguauucucucaagaaaaacucgaggucacugggugaaaaugaugacggcaacaaugaggauaacgagaaacuucggaagcccaagcacaagaaacugaagcagccugcagacgggaauccagauccgaacgccaaucccaacguugacccuaacgcgaauccaaacguggaucccaaugcuaacccuaauguagacccaaacgccaaucccaacgcaaauccuaacgccaauccaaacgcuaauccgaacgcaaaucccaacgccaacccuaaugcuaacccaaaugccaaccccaaugcgaacccuaaugcaaacccaaaugccaaccccaaugcuaacccgaaugccaacccuaaugcaaaccccaacgcuaauccaaacgccaauccuaacgcgaaucccaacguggauccaaaugccaaccccaaugcaaacccuaaugcuaacccaaaugccaacccgaaugcuaaccccaacgccaauccuaacgcaaauccaaacgccaaucccaacgcuaauccuaacgcgaauccaaacgcaaaucccaacgccaauccgaacgcuaauccuaacgccaauccaaacgcaaaccccaaugccaacccuaaugcuaaccccaaugccaacccagcagcguacauuaaaccuggaagcgcuaauaagcccaaagacgaauuggauuacgccaacgacauagaggcagccuaugcuaaguucgucgccgcauggacgcucaaggcugccgcgugaggacuaguuauaagacugacuagcccgaugggccucccaacgggcccuccuccccuccuugcaccgagauuaauaaaaaaaaaaaaaaaaaaaaaaaaaaaaaaaaaaaaaaaaaaaaaaaaaaaaaaaaaaaaaaaaugcaucccccccccccccccccccccccccccccccaaaggcucuuuucagagccaccagaauu

SEQ ID NO: 1625 - RNA, 1210 nt, Artificial Sequence
  mRNA Design i-3 (A64-N5-C30-hSL-N5) comprising derived and/or modified sequence from Pf(3D7)__XP_001351122.1__HsALB_Pf-CSP(19-272)_L(G4S)_Pf-CSP(310-3 27)_L(G4S)_Pf-CSP(346-375) (opt3)
gggagaaagcuuaccaugaagugggugaccuucaucagccugcucuuucuuuucuccucugccuacucacuguuucaggaguaucaaugcuacggcaguagcuccaacacaagagucuugaaugaauuaaacuaugacaaugcugggacuaaccuguacaaugagcuagaaaugaacuauuacggaaaacaggagaauugguauucucucaagaaaaacucgaggucacugggugaaaaugaugacggcaacaaugaggauaacgagaaacuucggaagcccaagcacaagaaacugaagcagccugcagacgggaauccagauccgaacgccaaucccaacguugacccuaacgcgaauccaaacguggaucccaaugcuaacccuaauguagacccaaacgccaaucccaacgcaaauccuaacgccaauccaaacgcuaauccgaacgcaaaucccaacgccaacccuaaugcuaacccaaaugccaaccccaaugcgaacccuaaugcaaacccaaaugccaaccccaaugcuaacccgaaugccaacccuaaugcaaaccccaacgcuaauccaaacgccaauccuaacgcgaaucccaacguggauccaaaugccaaccccaaugcaaacccuaaugcuaacccaaaugccaacccgaaugcuaaccccaacgccaauccuaacgcaaauccaaacgccaaucccaacgcuaauccuaacgcgaauccaaacgcaaaucccaacgccaauccgaacgcuaauccuaacgccaauccaaacgcaaaccccaaugccaacccuaaugcuaaccccaaugccaacccaggaggcggugggagcgaaccuagugacaaacauauuaaggaguacuugaauaaaauacagaacucccucggaggcggcgggucuaucaagcccggaagcgcaaauaagccaaaagaugaacuggacuacgcgaacgauauugagaagaaaaucuguaagauggagaaaugcuccugaggacuaguuauaagacugacuagcccgaugggccucccaacgggcccuccuccccuccuugcaccgagauuaauaaaaaaaaaaaaaaaaaaaaaaaaaaaaaaaaaaaaaaaaaaaaaaaaaaaaaaaaaaaaaaaaugcaucccccccccccccccccccccccccccccccaaaggcucuuuucagagccaccagaauu

SEQ ID NO: 1626 - RNA, 1195 nt, Artificial Sequence
  mRNA Design i-3 (A64-N5-C30-hSL-N5) comprising derived and/or modified sequence from Pf(3D7)__XP_001351122.1__HsALB_Pf-CSP(19-272)_L(G4S)_Pf-CSP(310-3 27)_Pf-CSP(346-375) (opt3)
gggagaaagcuuaccaugaagugggugaccuucaucagccugcucuuucuuuucuccucugccuacucacuguuucaggaguaucaaugcuacggcaguagcuccaacacaagagucuugaaugaauuaaacuaugacaaugcugggacuaaccuguacaaugagcuagaaaugaacuauuacggaaaacaggagaauugguauucucucaagaaaaacucgaggucacugggugaaaaugaugacggcaacaaugaggauaacgagaaacuucggaagcccaagcacaagaaacugaagcagccugcagacgggaauccagauccgaacgccaaucccaacguugacccuaacgcgaauccaaacguggaucccaaugcuaacccuaauguagacccaaacgccaaucccaacgcaaauccuaacgccaauccaaacgcuaauccgaacgcaaaucccaacgccaacccuaaugcuaacccaaaugccaaccccaaugcgaacccuaaugcaaacccaaaugccaaccccaaugcuaacccgaaugccaacccuaaugcaaaccccaacgcuaauccaaacgccaauccuaacgcgaaucccaacguggauccaaaugccaaccccaaugcaaacccuaaugcuaacccaaaugccaacccgaaugcuaaccccaacgccaauccuaacgcaaauccaaacgccaaucccaacgcuaauccuaacgcgaauccaaacgcaaaucccaacgccaauccgaacgcuaauccuaacgccaauccaaacgcaaaccccaaugccaacccuaaugcuaaccccaaugccaacccaggaggcggugggagcgaaccuagugacaaacauauuaaggaguacuugaauaaaauacagaacucccucaucaagcccggaucugcaaauaagccaaaagaugaacuggacuacgcgaacgauauugagaagaaaaucuguaagauggagaaaugcagcugaggacuaguuauaagacugacuagcccgaugggccucccaacgggcccuccuccccuccuugcaccgagauuaauaaaaaaaaaaaaaaaaaaaaaaaaaaaaaaaaaaaaaaaaaaaaaaaaaaaaaaaaaaaaaaaaugcaucccccccccccccccccccccccccccccccaaaggcucuuuucagagccaccagaauu

SEQ ID NO: 1627 - RNA, 1195 nt, Artificial Sequence
  mRNA Design i-3 (A64-N5-C30-hSL-N5) comprising derived and/or modified sequence from Pf(3D7)__XP_001351122.1__HsALB_Pf-CSP(19-325) (opt3)
gggagaaagcuuaccaugaagugggugaccuucaucagccugcucuuucuuuucuccucugccuacucacuguuucaggaguaucaaugcuacggcaguagcuccaacacaagagucuugaaugaauuaaacuaugacaaugcugggacuaaccuguacaaugagcuagaaaugaacuauuacggaaaacaggagaauugguauucucucaagaaaaacucgaggucacugggugaaaaugaugacggcaacaaugaggauaacgagaaacuucggaagcccaagcacaagaaacugaagcagccugcagacgggaauccagauccgaacgccaaucccaacguugacccuaacgcgaauccaaacguggaucccaaugcuaacccuaauguagacccaaacgccaaucccaacgcaaauccuaacgccaauccaaacgcuaauccgaacgcaaaucccaacgccaacccuaaugcuaacccaaaugccaaccccaaugcgaacccuaaugcaaacccaaaugccaaccccaaugcuaacccgaaugccaacccuaaugcaaaccccaacgcuaauccaaacgccaauccuaacgcgaaucccaacguggauccaaaugccaaccccaaugcaaacccuaaugcuaacccaaaugccaacccgaaugcuaaccccaacgccaauccuaacgcaaauccaaacgccaaucccaacgcuaauccuaacgcgaauccaaacgcaaaucccaacgccaauccgaacgcuaauccuaacgccaauccaaacgcaaaccccaaugccaacccuaaugcuaaccccaaugccaacccaaauaaaaacaaucagggaaacggccaaggucauaauaugccuaacgaccccaaucgcaacgucgaugaaaaugcaaacgcgaacagcgcugugaagaauaacaauaacgaggaaccaagugacaaacacauuaaggaguacuugaauaagauacagaacugaggacuaguuauaagacugacuagcccgaugggccucccaacgggcccuccuccccuccuugcaccgagauuaauaaaaaaaaaaaaaaaaaaaaaaaaaaaaaaaaaaaaaaaaaaaaaaaaaaaaaaaaaaaaaaaaugcaucccccccccccccccccccccccccccccccaaaggcucuuuucagagccaccagaauu

SEQ ID NO: 1628 - RNA, 1372 nt, Artificial Sequence
  mRNA Design i-3 (A64-N5-C30-hSL-N5) comprising derived and/or modified sequence from Pf(3D7)__XP_001351122.1__HsALB_Pf-CSP(19-384) (opt3)
gggagaaagcuuaccaugaagugggugaccuucaucagccugcucuuucuuuucuccucugccuacucacuguuucaggaguaucaaugcuacggcaguagcuccaacacaagagucuugaaugaauuaaacuaugacaaugcugggacuaaccuguacaaugagcuagaaaugaacuauuacggaaaacaggagaauugguauucucucaagaaaaacucgaggucacugggugaaaaugaugacggcaacaaugaggauaacgagaaacuucggaagcccaagcacaagaaacugaagcagccugcagacgggaauccagauccgaacgccaaucccaacguugacccuaacgcgaauccaaacguggaucccaaugcuaacccuaauguagacccaaacgccaaucccaacgcaaauccuaacgccaauccaaacgcuaauccgaacgcaaaucccaacgccaacccuaaugcuaacccaaaugccaaccccaaugcgaacccuaaugcaaacccaaaugccaaccccaaugcuaacccgaaugccaacccuaaugcaaaccccaacgcuaauccaaacgccaauccuaacgcgaaucccaacguggauccaaaugccaaccccaaugcaaacccuaaugcuaacccaaaugccaacccgaaugcuaaccccaacgccaauccuaacgcaaauccaaacgccaaucccaacgcuaauccuaacgcgaauccaaacgcaaaucccaacgccaauccgaacgcuaauccuaacgccaauccaaacgcaaaccccaaugccaacccuaaugcuaaccccaaugccaacccaaauaaaaacaaucagggaaacggccaaggucauaauaugccuaacgaccccaaucgcaacgucgaugaaaaugcaaacgcgaacagcgcugugaagaauaacaauaacgaggaaccaagugacaaacacauuaaggaguacuugaauaagauacagaacucccucucuacggaguggagcccguguuccguuaccugcgggaauggaauccaggugcgaauuaaaccuggcucagccaacaagcccaaagaugaacuggacuacgcaaaugacaucgagaagaaaauuuguaagauggaaaaaugcaguagcgucuucaacgugguaaauucuuccugaggacuaguuauaagacugacuagcccgaugggccucccaacgggcccuccuccccuccuugcaccgagauuaauaaaaaaaaaaaaaaaaaaaaaaaaaaaaaaaaaaaaaaaaaaaaaaaaaaaaaaaaaaaaaaaaugcaucccccccccccccccccccccccccccccccaaaggcucuuuucagagccaccagaauu

SEQ ID NO: 1629 - RNA, 1510 nt, Artificial Sequence
  mRNA Design i-3 (A64-N5-C30-hSL-N5) comprising derived and/or modified sequence from Pf(3D7)__XP_001351122.1__HsALB_Pf-CSP(19-384)_TM domain HA (opt3)
gggagaaagcuuaccaugaagugggugaccuucaucagccugcucuuucuuuucuccucugccuacucacuguuucaggaguaucaaugcuacggcaguagcuccaacacaagagucuugaaugaauuaaacuaugacaaugcugggacuaaccuguacaaugagcuagaaaugaacuauuacggaaaacaggagaauugguauucucucaagaaaaacucgaggucacugggugaaaaugaugacggcaacaaugaggauaacgagaaacuucggaagcccaagcacaagaaacugaagcagccugcagacgggaauccagauccgaacgccaaucccaacguugacccuaacgcgaauccaaacguggaucccaaugcuaacccuaauguagacccaaacgccaaucccaacgcaaauccuaacgccaauccaaacgcuaauccgaacgcaaaucccaacgccaacccuaaugcuaacccaaaugccaaccccaaugcgaacccuaaugcaaacccaaaugccaaccccaaugcuaacccgaaugccaacccuaaugcaaaccccaacgcuaauccaaacgccaauccuaacgcgaaucccaacguggauccaaaugccaaccccaaugcaaacccuaaugcuaacccaaaugccaacccgaaugcuaaccccaacgccaauccuaacgcaaauccaaacgccaaucccaacgcuaauccuaacgcgaauccaaacgcaaaucccaacgccaauccgaacgcuaauccuaacgccaauccaaacgcaaaccccaaugccaacccuaaugcuaaccccaaugccaacccaaauaaaaacaaucagggaaacggccaaggucauaauaugccuaacgaccccaaucgcaacgucgaugaaaaugcaaacgcgaacagcgcugugaagaauaacaauaacgaggaaccaagugacaaacacauuaaggaguacuugaauaagauacagaacucccucucuacggaguggagcccguguuccguuaccugcgggaauggaauccaggugcgaauuaaaccuggcucagccaacaagcccaaagaugaacuggacuacgcaaaugacaucgagaagaaaauuuguaagauggaaaaaugcaguagcgucuucaacgugguaaauucuuccaagcuggagucaacacguaucuaucagauacucgccaucuacagcacuguugcuaguucuuuagugcuggucgugucccuuggcgccauuagcuuuuggauguguucgaacgggucuuugcaaugcagaaucuguauuugaggacuaguuauaagacugacuagcccgaugggccucccaacgggcccuccuccccuccuugcaccgagauuaauaaaaaaaaaaaaaaaaaaaaaaaaaaaaaaaaaaaaaaaaaaaaaaaaaaaaaaaaaaaaaaaaugcaucccccccccccccccccccccccccccccccaaaggcucuuuucagagccaccagaauu

SEQ ID NO: 1630 - RNA, 1222 nt, Artificial Sequence
  mRNA Design i-3 (A64-N5-C30-hSL-N5) comprising derived and/or modified sequence from Pf(3D7)__XP_001351122.1__HsALB_Pf-CSP(82-397) (opt3)
gggagaaagcuuaccaugaagugggugaccuucaucagccugcucuuucuuuucuccucugccuacucagacaacgagaaacugagaaagcccaaacacaagaaauugaagcagccugcugauggcaauccagacccgaacgcaaaucccaacgucgauccuaaugccaacccaaauguugaccccaacgcgaauccuaacguggauccaaaugcuaaccccaaugccaacccuaaugcaaacccaaacgccaauccgaacgcuaaucccaacgcaaauccuaacgccaauccaaacgcuaaucccaacgccaauccuaacgcgaauccaaacgcaaaucccaacgccaacccgaaugcuaacccuaaugccaaccccaaugcaaacccaaaugcuaacccuaaugccaaccccaauguagacccaaacgcgaaucccaacgccaauccuaacgcaaacccaaaugcuaacccgaaugccaaccccaaugcuaacccuaaugccaacccaaaugcaaaccccaaugccaacccuaaugcuaacccaaaugcgaaccccaacgcaaauccgaacgccaauccuaacgcuaauccaaacgccaaucccaacgcaaauccuaacgccaaucccaacgcuaauccaaacaagaauaaccaggggaauggacagggucauaacaugccuaacgaucccaauaggaacguggacgaaaaugccaacgcaaauagugcggucaaaaacaauaacaaugaggaaccaagcgauaagcacauuaaagaguauuuaaacaagauacaaaauucccugucuacagaauggucgccgugcucagugacuuguggcaacgggauccagguucggauuaaaccuggaagcgcuaauaagcccaaggacgagcuagauuacgccaacgacaucgagaaaaagauuugcaaaauggaaaaguguaguuccguguuuaaugucgugaacucuagcaucggccucauaaugguacuguccuuccuuuuucugaacugaggacuaguuauaagacugacuagcccgaugggccucccaacgggcccuccuccccuccuugcaccgagauuaauaaaaaaaaaaaaaaaaaaaaaaaaaaaaaaaaaaaaaaaaaaaaaaaaaaaaaaaaaaaaaaaaugcaucccccccccccccccccccccccccccccccaaaggcucuuuucagagccaccagaauu

SEQ ID NO: 1631 - RNA, 574 nt, Artificial Sequence
  mRNA Design i-3 (A64-N5-C30-hSL-N5) comprising derived and/or modified sequence from Pf(3D7)__XP_001351122.1__HsALB_Pf-CSP(93-192) (opt3)
gggagaaagcuuaccaugaagugggugaccuucaucagccugcucuuucuuuucuccucugccuacucaaaacugaagcagcccgcugacggcaacccugauccaaaugcaaacccgaaugucgaccccaacgccaauccuaacguugauccaaaugcgaaccccaauguggacccuaacgcuaauccaaacgccaaucccaacgcaaauccuaacgccaacccaaaugcuaacccgaaugcaaaccccaaugccaacccuaaugcuaacccaaaugccaaccccaaugcgaacccuaaugcaaacccaaaugccaaccccaacgcuaauccgaacgccaauccuaacgcaaaucccaacgcuaauccaugaggacuaguuauaagacugacuagcccgaugggccucccaacgggcccuccuccccuccuugcaccgagauuaauaaaaaaaaaaaaaaaaaaaaaaaaaaaaaaaaaaaaaaaaaaaaaaaaaaaaaaaaaaaaaaaaugcaucccccccccccccccccccccccccccccccaaaggcucuuuucagagccaccagaauu

SEQ ID NO: 1632 - RNA, 814 nt, Artificial Sequence
  mRNA Design i-3 (A64-N5-C30-hSL-N5) comprising derived and/or modified sequence from Pf(3D7)__XP_001351122.1__HsALB_Pf-CSP(93-272) (opt3)
gggagaaagcuuaccaugaagugggugaccuucaucagccugcucuuucuuuucuccucugccuacucaaaacugaagcagcccgcugacggcaacccugauccaaaugcaaacccgaaugucgaccccaacgccaauccuaacguugauccaaaugcgaaccccaauguggacccuaacgcuaauccaaacgccaaucccaacgcaaauccuaacgccaacccaaaugcuaacccgaaugcaaaccccaaugccaacccuaaugcuaacccaaaugccaaccccaaugcgaacccuaaugcaaacccaaaugccaaccccaacgcuaauccgaacgccaauccuaacgcaaaucccaacgcuaauccaaacgccaauccuaacguagaucccaaugcgaacccaaaugccaaccccaaugcaaacccuaacgcuaauccaaacgccaauccgaacgcuaaucccaacgccaauccuaacgcaaauccaaacgccaaucccaacgcuaauccuaacgcgaauccaaacgcaaaccccaaugccaacccgaaugcuaacccuaaugccaacccaaaugcaaaccccaaugccaacccuaaugcuaaccccugaggacuaguuauaagacugacuagcccgaugggccucccaacgggcccuccuccccuccuugcaccgagauuaauaaaaaaaaaaaaaaaaaaaaaaaaaaaaaaaaaaaaaaaaaaaaaaaaaaaaaaaaaaaaaaaaugcaucccccccccccccccccccccccccccccccaaaggcucuuuucagagccaccagaauu

SEQ ID NO: 1633 - RNA, 1189 nt, Artificial Sequence
  mRNA Design i-3 (A64-N5-C30-hSL-N5) comprising derived and/or modified sequence from Pf(3D7)__XP_001351122.1__HsALB_Pf-CSP(93-397) (opt3)
gggagaaagcuuaccaugaagugggugaccuucaucagccugcucuuucuuuucuccucugccuacucaaaacugaagcagcccgcugacggcaacccugauccaaaugcaaacccgaaugucgaccccaacgccaauccuaacguugauccaaaugcgaaccccaauguggacccuaacgcuaauccaaacgccaaucccaacgcaaauccuaacgccaacccaaaugcuaacccgaaugcaaaccccaaugccaacccuaaugcuaacccaaaugccaaccccaaugcgaacccuaaugcaaacccaaaugccaaccccaacgcuaauccgaacgccaauccuaacgcaaaucccaacgcuaauccaaacgccaauccuaacguagaucccaaugcgaacccaaaugccaaccccaaugcaaacccuaacgcuaauccaaacgccaauccgaacgcuaaucccaacgccaauccuaacgcaaauccaaacgccaaucccaacgcuaauccuaacgcgaauccaaacgcaaaccccaaugccaacccgaaugcuaacccuaaugccaacccaaaugcaaaccccaaugccaacccuaaugcuaaccccaauaaaaacaaucaagggaacggacagggucacaauaugccaaacgacccuaacagaaauguggaugagaacgccaaugcaaacagugcggucaagaauaacaauaacgaggaacccagcgacaaacauauuaaggaauauuugaauaagauacagaacuccuuaucuacagaguggucgccaugcucagugacuuguggcaaugggauccagguuaggauuaaaccgggaagcgcuaacaagccuaaagaugaacuggacuacgccaaugauaucgagaagaaaauuugcaagauggagaaguguaguuccguguuuaacgucguaaauucuagcaucggccuaauaauggugcucuccuuccuguuucuuaacugaggacuaguuauaagacugacuagcccgaugggccucccaacgggcccuccuccccuccuugcaccgagauuaauaaaaaaaaaaaaaaaaaaaaaaaaaaaaaaaaaaaaaaaaaaaaaaaaaaaaaaaaaaaaaaaaugcaucccccccccccccccccccccccccccccccaaaggcucuuuucagagccaccagaauu

SEQ ID NO: 1634 - RNA, 559 nt, Artificial Sequence
  mRNA Design i-3 (A64-N5-C30-hSL-N5) comprising derived and/or modified sequence from Pf(3D7)__XP_001351122.1__HsALB_Pf-CSP(98-192) (opt3)
gggagaaagcuuaccaugaagugggugaccuucaucagccugcucuuucuuuucuccucugccuacucagcugacggcaaccccgauccuaaugcaaacccaaaugucgacccgaacgccaaucccaacguugauccuaaugcgaacccaaauguggaccccaacgcuaauccuaacgccaauccaaacgcaaaucccaacgccaacccuaaugcuaacccaaaugcaaacccgaaugccaaccccaaugcuaacccuaaugccaacccaaaugcgaaccccaaugcaaacccuaaugccaacccaaacgcuaaucccaacgccaauccgaacgcaaauccuaacgcuaaucccugaggacuaguuauaagacugacuagcccgaugggccucccaacgggcccuccuccccuccuugcaccgagauuaauaaaaaaaaaaaaaaaaaaaaaaaaaaaaaaaaaaaaaaaaaaaaaaaaaaaaaaaaaaaaaaaaugcaucccccccccccccccccccccccccccccccaaaggcucuuuucagagccaccagaauu

SEQ ID NO: 1635 - RNA, 799 nt, Artificial Sequence
  mRNA Design i-3 (A64-N5-C30-hSL-N5) comprising derived and/or modified sequence from Pf(3D7)__XP_001351122.1__HsALB_Pf-CSP(98-272) (opt3)
gggagaaagcuuaccaugaagugggugaccuucaucagccugcucuuucuuuucuccucugccuacucagcugacggcaaccccgauccuaaugcaaacccaaaugucgacccgaacgccaaucccaacguugauccuaaugcgaacccaaauguggaccccaacgcuaauccuaacgccaauccaaacgcaaaucccaacgccaacccuaaugcuaacccaaaugcaaacccgaaugccaaccccaaugcuaacccuaaugccaacccaaaugcgaaccccaaugcaaacccuaaugccaacccaaacgcuaaucccaacgccaauccgaacgcaaauccuaacgcuaaucccaacgccaauccaaacguagauccuaaugcgaaccccaaugccaacccaaaugcaaaccccaacgcuaauccuaacgccaauccaaacgcuaauccgaacgccaaucccaacgcaaauccuaacgccaauccaaacgcuaaucccaacgcgaauccuaacgcaaacccaaaugccaaccccaaugcuaacccgaaugccaacccuaaugcaaacccaaaugccaaccccaaugcuaacccuugaggacuaguuauaagacugacuagcccgaugggccucccaacgggcccuccuccccuccuugcaccgagauuaauaaaaaaaaaaaaaaaaaaaaaaaaaaaaaaaaaaaaaaaaaaaaaaaaaaaaaaaaaaaaaaaaugcaucccccccccccccccccccccccccccccccaaaggcucuuuucagagccaccagaauu

SEQ ID NO: 1636 - RNA, 1105 nt, Artificial Sequence
  mRNA Design i-3 (A64-N5-C30-hSL-N5) comprising derived and/or modified sequence from Pf(3D7)__XP_001351122.1__HsALB_Pf-CSP(98-374) (opt3)
gggagaaagcuuaccaugaagugggugaccuucaucagccugcucuuucuuuucuccucugccuacucagcugacggcaaccccgauccuaaugcaaacccaaaugucgacccgaacgccaaucccaacguugauccuaaugcgaacccaaauguggaccccaacgcuaauccuaacgccaauccaaacgcaaaucccaacgccaacccuaaugcuaacccaaaugcaaacccgaaugccaaccccaaugcuaacccuaaugccaacccaaaugcgaaccccaaugcaaacccuaaugccaacccaaacgcuaaucccaacgccaauccgaacgcaaauccuaacgcuaaucccaacgccaauccaaacguagauccuaaugcgaaccccaaugccaacccaaaugcaaaccccaacgcuaauccuaacgccaauccaaacgcuaauccgaacgccaaucccaacgcaaauccuaacgccaauccaaacgcuaaucccaacgcgaauccuaacgcaaacccaaaugccaaccccaaugcuaacccgaaugccaacccuaaugcaaacccaaaugccaaccccaaugcuaacccuaauaaaaacaaucaggggaacggacaaggucacaauaugcccaacgacccaaacagaaauguggaugagaacgccaaugcaaacagugcggucaagaauaacaauaacgaggaaccuagcgacaaacauauuaaggaauaucugaauaaaauacagaacuccuugucuacagaguggucgcccugcucagugacuuguggcaaugggauccagguuaggauuaagccaggaagcgcuaacaagccgaaagaugaauuagacuacgccaaugauaucgagaagaaaauuugcaagauggagaaauguugaggacuaguuauaagacugacuagcccgaugggccucccaacgggcccuccuccccuccuugcaccgagauuaauaaaaaaaaaaaaaaaaaaaaaaaaaaaaaaaaaaaaaaaaaaaaaaaaaaaaaaaaaaaaaaaaugcaucccccccccccccccccccccccccccccccaaaggcucuuuucagagccaccagaauu

SEQ ID NO: 1637 - RNA, 1174 nt, Artificial Sequence
  mRNA Design i-3 (A64-N5-C30-hSL-N5) comprising derived and/or modified sequence from Pf(3D7)__XP_001351122.1__HsALB_Pf-CSP(98-397) (opt3)
gggagaaagcuuaccaugaagugggugaccuucaucagccugcucuuucuuuucuccucugccuacucagcugacggcaaccccgauccuaaugcaaacccaaaugucgacccgaacgccaaucccaacguugauccuaaugcgaacccaaauguggaccccaacgcuaauccuaacgccaauccaaacgcaaaucccaacgccaacccuaaugcuaacccaaaugcaaacccgaaugccaaccccaaugcuaacccuaaugccaacccaaaugcgaaccccaaugcaaacccuaaugccaacccaaacgcuaaucccaacgccaauccgaacgcaaauccuaacgcuaaucccaacgccaauccaaacguagauccuaaugcgaaccccaaugccaacccaaaugcaaaccccaacgcuaauccuaacgccaauccaaacgcuaauccgaacgccaaucccaacgcaaauccuaacgccaauccaaacgcuaaucccaacgcgaauccuaacgcaaacccaaaugccaaccccaaugcuaacccgaaugccaacccuaaugcaaacccaaaugccaaccccaaugcuaacccuaauaaaaacaaucaggggaacggacaaggucacaauaugcccaacgacccaaacagaaauguggaugagaacgccaaugcaaacagugcggucaagaauaacaauaacgaggaaccuagcgacaaacauauuaaggaauaucugaauaaaauacagaacuccuugucuacagaguggucgcccugcucagugacuuguggcaaugggauccagguuaggauuaagccaggaagcgcuaacaagccgaaagaugaauuagacuacgccaaugauaucgagaagaaaauuugcaagauggagaaauguaguuccguguuuaacgucguaaauucuagcaucggccugauaauggugcuauccuuccucuuucugaacugaggacuaguuauaagacugacuagcccgaugggccucccaacgggcccuccuccccuccuugcaccgagauuaauaaaaaaaaaaaaaaaaaaaaaaaaaaaaaaaaaaaaaaaaaaaaaaaaaaaaaaaaaaaaaaaaugcaucccccccccccccccccccccccccccccccaaaggcucuuuucagagccaccagaauu

SEQ ID NO: 1638 - RNA, 1501 nt, Artificial Sequence
  mRNA Design i-3 (A64-N5-C30-hSL-N5) comprising derived and/or modified sequence from Pf(3D7)__XP_001351122.1__HsALB_Pf-CSP(199-377)_L(PVTN)_HBsAg (opt3)
gggagaaagcuuaccaugaagugggugaccuucaucagccugcucuuucuuuucuccucugccuacucagaccccaacgcuaauccuaacgcaaauccaaacgccaauccgaacgcgaaucccaacgcuaauccuaacgccaauccaaacgcaaaucccaacgccaauccuaacgcuaacccaaaugcaaaccccaaugccaacccuaaugcuaacccaaaugccaacccgaaugcgaaccccaaugcaaacccuaaugccaacccaaaugcuaaccccaacgccaauccuaacaaaaauaaccagggcaaugggcaaggacacaacaugccaaaugaucccaacagaaaugucgacgagaacgcaaaugcuaacagugccguuaagaauaacaauaacgaggaaccgagcgauaaacauauuaaggaauaucugaacaaaauacaaaauuccuugucuacagaguggucgccuugcucagugacuugugguaacggcauccagguaaggauuaagcccgggagcgcgaauaagccaaaagacgaauuagauuacgccaacgacaucgagaagaaaauuugcaagauggagaaauguaguuccgugccugucacgaauauggaaaacaucaccucuggauuucugggcccccuacucgugcugcaggcagguuucuuucuucugacacggauauugacuaucccacagagccucgauuccugguggaccucacugaauuuccucgggggaagucccguuugccugggccagaacagccagucuccuacauccaaucacucaccaaccagcuguccgcccauuugcccuggcuaucgcuggauguguuuacgacguuuuaucauuuuccuguuuauccuuuugcugugccuaauauuccuccuggugcuucuggacuaccaggggauguugccagucuguccccucauuccuggaaguacuacaaccaacacggguccaugcaagacuuguaccacacccgcucaaggcaauucuauguuuccguccugcugcuguacuaagccuaccgaugggaacugcacauguaucccaauucccagcucgugggccuucgcuaaauaucugugggagugggccucugugagauuuuccugguuaucacugcucguaccuuucguucagugguucgugggacuuagucccaccgucuggcugagcgcaaucuggaugaugugguacuggggcccauccuuguauucuaucgugagcccuuuuauuccccuacugccaauauucuuuugccucuggguguacaucugaggacuaguuauaagacugacuagcccgaugggccucccaacgggcccuccuccccuccuugcaccgagauuaauaaaaaaaaaaaaaaaaaaaaaaaaaaaaaaaaaaaaaaaaaaaaaaaaaaaaaaaaaaaaaaaaugcaucccccccccccccccccccccccccccccccaaaggcucuuuucagagccaccagaauu

SEQ ID NO: 1639 - RNA, 1240 nt, Artificial Sequence
  mRNA Design i-3 (A64-N5-C30-hSL-N5) comprising derived and/or modified sequence from Pb(ANKA)__XP_022712148.1__Pb-CSP (opt3)
gggagaaagcuuaccaugaagaaaugcaccauccugguggucgccagccuccuucugguuaacuccuuguuacccggcuacgggcagaauaagucuauucaagcucagagaaaccugaaugagcuauguuauaacgaaggaaaugacaacaaacucuaccacgugcuuaauucaaagaacgguaaaauauauaauaggaacacaguaaaucggcugcuggcagaugccccugagggcaagaagaacgaaaagaaaaaugagaaaaucgaacgcaacaauaaguugaaacagccaccgcccccuccaaaccccaacgacccuccacccccuaauccaaacgauccgcccccuccaaaucccaacgacccuccacccccgaauccuaacgaucccccaccucccaaugcgaacgacccacccccuccaaaugcuaacgauccggcacccccuaaugccaacgacccagcucccccuaaugccaacgauccagcacccccgaaugccaacgacccugcuccacccaacgccaaugauccucccccaccuaaccccaaugacccagcgccgccuaacgcaaaugaucccccacccccuaacccaaaugaccccgccccuccgcaggggaacaauaacccacaaccccagccucgaccacagccccagccucaaccgcagccccagccacagccucaaccccagccacagccucguccccaaccacagccgcagccuggaggcaauaacaauaacaagaauaacaacaaugacgauaguuacauucccagcgcugagaagauccucgaguucgugaaacagauuagagacuccaucacugaagaguggucucaaugcaacgucacgugugguucggggauaagggugcggaagcgcaaaggaucaaauaagaaagccgaagaucugacccuggaggacaucgauacagagauuugcaagauggacaaauguagcaguaucuuuaacauuguuuccaauucucucggcuucgugaucuuacugguccuuguguuuuucaacugaggacuaguuauaagacugacuagcccgaugggccucccaacgggcccuccuccccuccuugcaccgagauuaauaaaaaaaaaaaaaaaaaaaaaaaaaaaaaaaaaaaaaaaaaaaaaaaaaaaaaaaaaaaaaaaaugcaucccccccccccccccccccccccccccccccaaaggcucuuuucagagccaccagaauu

SEQ ID NO: 1640 - RNA, 1405 nt, Artificial Sequence
  mRNA Design i-3 (A64-N5-C30-hSL-N5) comprising derived and/or modified sequence from Pb(ANKA)__XP_022712148.1__Pb-CSP_L(G4SG4)_TM domain HA (opt3)
gggagaaagcuuaccaugaagaaaugcaccauccugguggucgccagccuccuucugguuaacuccuuguuacccggcuacgggcagaauaagucuauucaagcucagagaaaccugaaugagcuauguuauaacgaaggaaaugacaacaaacucuaccacgugcuuaauucaaagaacgguaaaauauauaauaggaacacaguaaaucggcugcuggcagaugccccugagggcaagaagaacgaaaagaaaaaugagaaaaucgaacgcaacaauaaguugaaacagccaccgcccccuccaaaccccaacgacccuccacccccuaauccaaacgauccgcccccuccaaaucccaacgacccuccacccccgaauccuaacgaucccccaccucccaaugcgaacgacccacccccuccaaaugcuaacgauccggcacccccuaaugccaacgacccagcucccccuaaugccaacgauccagcacccccgaaugccaacgacccugcuccacccaacgccaaugauccucccccaccuaaccccaaugacccagcgccgccuaacgcaaaugaucccccacccccuaacccaaaugaccccgccccuccgcaggggaacaauaacccacaaccccagccucgaccacagccccagccucaaccgcagccccagccacagccucaaccccagccacagccucguccccaaccacagccgcagccuggaggcaauaacaauaacaagaauaacaacaaugacgauaguuacauucccagcgcugagaagauccucgaguucgugaaacagauuagagacuccaucacugaagaguggucucaaugcaacgucacgugugguucggggauaagggugcggaagcgcaaaggaucaaauaagaaagccgaagaucugacccuggaggacaucgauacagagauuugcaagauggacaaauguagcaguaucuuuaacauuguuuccaauucucucggcuucgugaucuuacugguccuuguguuuuucaacggcgggggagguagcggcgggggaggcaaguuggaauccacuagaauauaucagauucuggcaaucuacucaaccguagcuaguagccuaguucucguggucucucugggugccauuuccuuuuggaugugcucaaaugggagccuucaguguaggaucugcaucugaggacuaguuauaagacugacuagcccgaugggccucccaacgggcccuccuccccuccuugcaccgagauuaauaaaaaaaaaaaaaaaaaaaaaaaaaaaaaaaaaaaaaaaaaaaaaaaaaaaaaaaaaaaaaaaaugcaucccccccccccccccccccccccccccccccaaaggcucuuuucagagccaccagaauu

SEQ ID NO: 1641 - RNA, 1225 nt, Artificial Sequence
  mRNA Design i-3 (A64-N5-C30-hSL-N5) comprising derived and/or modified sequence from Pb(ANKA)__XP_022712148.1__HsALB_Pb-CSP(24-340) (opt3)
gggagaaagcuuaccaugaagugggugaccuucaucagccugcucuuucuuuucuccucugccuacucacagaacaaaaguauucaagcucagagaaaucugaacgaguugugcuauaaugaaggcaacgacaauaaguuauaccacguccugaacagcaaaaaugggaagauauauaacaggaauacaguuaaccggcuacucgcagaugcccccgaggguaaaaagaaugaaaagaaaaacgagaagaucgaacgcaauaacaaacugaagcagccuccaccgcccccuaauccaaacgaucccccuccacccaacccuaaugacccaccgcccccuaacccaaaugaucccccuccacccaacccgaaugacccucccccaccuaacgcgaaugaucccccacccccuaacgcuaaugacccagccccgcccaacgcaaaugacccugccccacccaacgcuaaugauccugcaccacccaacgccaaugacccggcuccuccaaacgccaacgaucccccucccccaaauccuaacgaccccgcgccaccgaaugcaaacgauccucccccacccaauccuaacgacccagcucccccucagggaaauaacaauccgcaaccacagccccgaccucagccacagccccaaccucagccgcagccccagccacaaccucagccccagccacguccucaaccccagccacagccgggcgggaacaauaacaauaaaaacaauaacaacgacgauuccuacauuccuucugccgagaagauccuugaguuugugaagcagauuagagacucgaucacugaagaguggucacaauguaauguaacgugcggaagcggcauaagggugcggaaacgcaaggguaguaacaaaaaggccgaagaucugaccuuggaggacaucgauacagagauuuguaaaauggacaagugcuccucuaucuucaauauugucagcaacucccucggguuugugauccugcugguucucguguucuuuaauugaggacuaguuauaagacugacuagcccgaugggccucccaacgggcccuccuccccuccuugcaccgagauuaauaaaaaaaaaaaaaaaaaaaaaaaaaaaaaaaaaaaaaaaaaaaaaaaaaaaaaaaaaaaaaaaaugcaucccccccccccccccccccccccccccccccaaaggcucuuuucagagccaccagaauu

SEQ ID NO: 1642 - RNA, 1243 nt, Artificial Sequence
  mRNA Design i-3 (A64-N5-C30-hSL-N5) comprising derived and/or modified sequence from Pb(ANKA)__XP_022712148.1__HsIns-iso1_Pb-CSP(24-340) (opt3)
gggagaaagcuuaccauggcccuguggaugagacuccuuccccuguuggcuuuacuggcacuauggggcccugacccagccgcggcucagaacaagagcauccaagcccagaggaaucucaacgagcugugcuacaaugaagggaacgauaauaaacuuuaucacguucugaacuccaagaauggaaaaauuuacaaccggaauaccgucaaccgcuugcucgcagacgccccggaggguaagaaaaaugaaaagaagaacgagaaaauagaacgaaauaacaagcugaaacagcccccuccacccccuaauccaaacgaucccccuccaccgaaccccaaugacccuccacccccuaacccaaaugaucccccgccucccaacccaaaugacccucccccacccaacgcuaaugauccuccaccgcccaacgcaaaugacccugccccacccaacgcuaaugauccugccccacccaacgcgaaugacccggcaccuccaaacgccaaugaucccgcuccucccaacgccaacgacccaccucccccaaauccgaacgauccugcacccccaaaugcuaacgaucccccuccacccaauccuaacgacccggccccaccccagggcaauaacaauccucaaccacagccccguccucagccgcagccccaaccacagccucagccccagccacaaccucagccccagccaagaccgcaaccucagccccagccagggggaaacaauaacaauaagaacaauaacaacgacgacucuuauauccccucagcggagaaaauucuggaguucguuaagcagaucagggauaguauuacagaagaguggagccaauguaaugugacuugcggcuccgguauccggguacgcaagagaaaagggucuaacaagaaagccgaagaccucacguuagaggauauagacaccgagaucuguaagauggauaaaugcucgucaauuuuuaauaucgugagcaacagucugggauucgucauucuuuuggugcugguguuuuucaauugaggacuaguuauaagacugacuagcccgaugggccucccaacgggcccuccuccccuccuugcaccgagauuaauaaaaaaaaaaaaaaaaaaaaaaaaaaaaaaaaaaaaaaaaaaaaaaaaaaaaaaaaaaaaaaaaugcaucccccccccccccccccccccccccccccccaaaggcucuuuucagagccaccagaauu

SEQ ID NO: 1643 - RNA, 1222 nt, Artificial Sequence
  mRNA Design i-3 (A64-N5-C30-hSL-N5) comprising derived and/or modified sequence from Pb(ANKA)__XP_022712148.1__HsSPARC_Pb-CSP(24-340) (opt3)
gggagaaagcuuaccaugagagccuggaucuucuuucugcucugccuugcuggcagggcacuggcccagaacaagagcauucaagcgcagcggaauuugaacgaguuauguuacaaugaagggaacgacaauaaacuguaucacguucuaaacuccaagaauggaaaaauauacaaccgcaauaccgucaaccgacuccuggcugaugcccccgaggguaagaaaaaugaaaagaagaacgagaaaaucgaacguaauaacaaacuuaagcagccuccaccgcccccuaauccaaacgacccgccuccacccaacccuaaugauccaccgcccccuaacccaaaugaucccccuccacccaacccgaaugacccucccccaccuaacgcaaaugaucccccacccccuaacgccaaugacccagcuccgcccaacgcaaaugacccugccccacccaacgcuaaugauccugccccacccaacgcgaaugacccggcaccuccaaacgccaacgaucccccucccccaaauccuaacgaccccgcuccaccgaaugccaacgauccucccccacccaauccuaacgacccagcacccccucagggcaauaacaauccgcaaccacagcccagaccucagccacagccccaaccucagccgcagccccagccacaaccucagccccagccaaggccucaaccccagccacagcccgggggaaacaauaacaauaagaacaauaacaacgacgauucuuauauuccuucagcugagaaaauccuggaguucguuaagcagauucgggacaguaucacagaagaguggagccaaugcaaugugacuuguggcuccgguauacgcguaagaaagaggaaagggucuaacaagaaagccgaagauuugacgcucgaggacaucgauaccgagauuugcaagauggacaaauguucgucaaucuuuaauauugugagcaacagucugggauucgucauccugcucguguuaguguuuuucaauugaggacuaguuauaagacugacuagcccgaugggccucccaacgggcccuccuccccuccuugcaccgagauuaauaaaaaaaaaaaaaaaaaaaaaaaaaaaaaaaaaaaaaaaaaaaaaaaaaaaaaaaaaaaaaaaaugcaucccccccccccccccccccccccccccccccaaaggcucuuuucagagccaccagaauu

SEQ ID NO: 1644 - RNA, 1225 nt, Artificial Sequence
  mRNA Design i-3 (A64-N5-C30-hSL-N5) comprising derived and/or modified sequence from Pb(ANKA)__XP_022712148.1__IgE_Pb-CSP(24-340) (opt3)
gggagaaagcuuaccauggacuggaccuggauccuguuccucguggccgcugcaacaagaguccacagccagaacaaguccauucaagcccagaggaaucuuaacgagcugugcuacaaugaaggcaacgauaauaaauuguaucauguuuuaaacucuaagaaugggaaaauauacaaccggaauacugugaaccgccugcuagcggacgcucccgagggaaagaaaaaugaaaagaagaacgagaaaaucgaacgaaauaacaagcucaaacagccuccaccgcccccuaauccaaacgaucccccuccacccaacccuaaugacccaccgcccccuaacccaaaugaucccccuccacccaacccgaaugacccucccccaccuaacgccaaugaucccccacccccuaacgcaaaugacccagccccgcccaacgcuaaugauccugcaccacccaacgccaaugacccugcuccacccaacgccaaugauccggcgccuccaaacgcaaacgaucccccucccccaaauccuaacgaccccgccccaccgaaugcuaacgacccucccccacccaauccuaacgacccagcacccccucaggguaauaacaauccgcaaccacagccccguccucagccacagccccaaccucagccgcagccccagccacaaccucagccccagccaagaccucaaccccagccacagccgggcgggaacaauaacaauaagaacaauaacaacgaugacucauauauuccuagugccgagaaaauccuggaguuuguaaagcagauuagggauagcaucacggaagaguggucccaauguaaugugaccugcggaucuggcauacggguccgcaagagaaaagguucgaacaagaaagcugaagaccuuacacuggaggauaucgacacugagauuuguaagauggauaaaugcucaagcaucuucaauauugugaguaacuccuugggguuuguuauccuccuggugcuggucuucuuuaauugaggacuaguuauaagacugacuagcccgaugggccucccaacgggcccuccuccccuccuugcaccgagauuaauaaaaaaaaaaaaaaaaaaaaaaaaaaaaaaaaaaaaaaaaaaaaaaaaaaaaaaaaaaaaaaaaugcaucccccccccccccccccccccccccccccccaaaggcucuuuucagagccaccagaauu

SEQ ID NO: 1645 - RNA, 1411 nt, Artificial Sequence
  mRNA Design i-3 (A64-N5-C30-hSL-N5) comprising derived and/or modified sequence from Pf(3D7)__XP_001351122.1__Pf-CSP (opt4)
gggagaaagcuuaccaugaugagaaagcuggccauccugagcgugagcagcuuccuguucguggaggcccuguuccaggaguaccagugcuacggcagcagcagcaacaccagagugcugaacgagcugaacuacgacaacgccggcaccaaccuguacaacgagcuggagaugaacuacuacggcaagcaggagaacugguacagccugaagaagaacagcagaagccugggcgagaacgacgacggcaacaacgaggacaacgagaagcugagaaagcccaagcacaagaagcugaagcagcccgccgacggcaaccccgaccccaacgccaaccccaacguggaccccaacgccaaccccaacguggaccccaacgccaaccccaacguggaccccaacgccaaccccaacgccaaccccaacgccaaccccaacgccaaccccaacgccaaccccaacgccaaccccaacgccaaccccaacgccaaccccaacgccaaccccaacgccaaccccaacgccaaccccaacgccaaccccaacgccaaccccaacgccaaccccaacgccaaccccaacgccaaccccaacgccaaccccaacguggaccccaacgccaaccccaacgccaaccccaacgccaaccccaacgccaaccccaacgccaaccccaacgccaaccccaacgccaaccccaacgccaaccccaacgccaaccccaacgccaaccccaacgccaaccccaacgccaaccccaacgccaaccccaacgccaaccccaacgccaaccccaacgccaaccccaacgccaaccccaacgccaaccccaacaagaacaaccagggcaacggccagggccacaacaugcccaacgaccccaacagaaacguggacgagaacgccaacgccaacagcgccgugaagaacaacaacaacgaggagcccagcgacaagcacaucaaggaguaccugaacaagauccagaacagccugagcaccgaguggagccccugcagcgugaccugcggcaacggcauccaggugagaaucaagcccggcagcgccaacaagcccaaggacgagcuggacuacgccaacgacaucgagaagaagaucugcaagauggagaagugcagcagcguguucaacguggugaacagcagcaucggccugaucauggugcugagcuuccuguuccugaacugaggacuaguuauaagacugacuagcccgaugggccucccaacgggcccuccuccccuccuugcaccgagauuaauaaaaaaaaaaaaaaaaaaaaaaaaaaaaaaaaaaaaaaaaaaaaaaaaaaaaaaaaaaaaaaaaugcaucccccccccccccccccccccccccccccccaaaggcucuuuucagagccaccagaauu

SEQ ID NO: 1646 - RNA, 1342 nt, Artificial Sequence
  mRNA Design i-3 (A64-N5-C30-hSL-N5) comprising derived and/or modified sequence from Pf(3D7)__XP_001351122.1__Pf-CSP(1-374) (opt4)
gggagaaagcuuaccaugaugagaaagcuggccauccugagcgugagcagcuuccuguucguggaggcccuguuccaggaguaccagugcuacggcagcagcagcaacaccagagugcugaacgagcugaacuacgacaacgccggcaccaaccuguacaacgagcuggagaugaacuacuacggcaagcaggagaacugguacagccugaagaagaacagcagaagccugggcgagaacgacgacggcaacaacgaggacaacgagaagcugagaaagcccaagcacaagaagcugaagcagcccgccgacggcaaccccgaccccaacgccaaccccaacguggaccccaacgccaaccccaacguggaccccaacgccaaccccaacguggaccccaacgccaaccccaacgccaaccccaacgccaaccccaacgccaaccccaacgccaaccccaacgccaaccccaacgccaaccccaacgccaaccccaacgccaaccccaacgccaaccccaacgccaaccccaacgccaaccccaacgccaaccccaacgccaaccccaacgccaaccccaacgccaaccccaacgccaaccccaacguggaccccaacgccaaccccaacgccaaccccaacgccaaccccaacgccaaccccaacgccaaccccaacgccaaccccaacgccaaccccaacgccaaccccaacgccaaccccaacgccaaccccaacgccaaccccaacgccaaccccaacgccaaccccaacgccaaccccaacgccaaccccaacgccaaccccaacgccaaccccaacgccaaccccaacaagaacaaccagggcaacggccagggccacaacaugcccaacgaccccaacagaaacguggacgagaacgccaacgccaacagcgccgugaagaacaacaacaacgaggagcccagcgacaagcacaucaaggaguaccugaacaagauccagaacagccugagcaccgaguggagccccugcagcgugaccugcggcaacggcauccaggugagaaucaagcccggcagcgccaacaagcccaaggacgagcuggacuacgccaacgacaucgagaagaagaucugcaagauggagaagugcugaggacuaguuauaagacugacuagcccgaugggccucccaacgggcccuccuccccuccuugcaccgagauuaauaaaaaaaaaaaaaaaaaaaaaaaaaaaaaaaaaaaaaaaaaaaaaaaaaaaaaaaaaaaaaaaaugcaucccccccccccccccccccccccccccccccaaaggcucuuuucagagccaccagaauu

SEQ ID NO: 1647 - RNA, 1195 nt, Artificial Sequence
  mRNA Design i-3 (A64-N5-C30-hSL-N5) comprising derived and/or modified sequence from Pf(3D7)__XP_001351122.1__Pf-CSP(1-325) (opt4)
gggagaaagcuuaccaugaugagaaagcuggccauccugagcgugagcagcuuccuguucguggaggcccuguuccaggaguaccagugcuacggcagcagcagcaacaccagagugcugaacgagcugaacuacgacaacgccggcaccaaccuguacaacgagcuggagaugaacuacuacggcaagcaggagaacugguacagccugaagaagaacagcagaagccugggcgagaacgacgacggcaacaacgaggacaacgagaagcugagaaagcccaagcacaagaagcugaagcagcccgccgacggcaaccccgaccccaacgccaaccccaacguggaccccaacgccaaccccaacguggaccccaacgccaaccccaacguggaccccaacgccaaccccaacgccaaccccaacgccaaccccaacgccaaccccaacgccaaccccaacgccaaccccaacgccaaccccaacgccaaccccaacgccaaccccaacgccaaccccaacgccaaccccaacgccaaccccaacgccaaccccaacgccaaccccaacgccaaccccaacgccaaccccaacgccaaccccaacguggaccccaacgccaaccccaacgccaaccccaacgccaaccccaacgccaaccccaacgccaaccccaacgccaaccccaacgccaaccccaacgccaaccccaacgccaaccccaacgccaaccccaacgccaaccccaacgccaaccccaacgccaaccccaacgccaaccccaacgccaaccccaacgccaaccccaacgccaaccccaacgccaaccccaacaagaacaaccagggcaacggccagggccacaacaugcccaacgaccccaacagaaacguggacgagaacgccaacgccaacagcgccgugaagaacaacaacaacgaggagcccagcgacaagcacaucaaggaguaccugaacaagauccagaacugaggacuaguuauaagacugacuagcccgaugggccucccaacgggcccuccuccccuccuugcaccgagauuaauaaaaaaaaaaaaaaaaaaaaaaaaaaaaaaaaaaaaaaaaaaaaaaaaaaaaaaaaaaaaaaaaugcaucccccccccccccccccccccccccccccccaaaggcucuuuucagagccaccagaauu

SEQ ID NO: 1648 - RNA, 1411 nt, Artificial Sequence
  mRNA Design i-3 (A64-N5-C30-hSL-N5) comprising derived and/or modified sequence from Pf(3D7)__XP_001351122.1__HsALB_Pf-CSP(19-397) (opt4)
gggagaaagcuuaccaugaagugggugaccuucaucagccugcuguuccuguucagcagcgccuacagccuguuccaggaguaccagugcuacggcagcagcagcaacaccagagugcugaacgagcugaacuacgacaacgccggcaccaaccuguacaacgagcuggagaugaacuacuacggcaagcaggagaacugguacagccugaagaagaacagcagaagccugggcgagaacgacgacggcaacaacgaggacaacgagaagcugagaaagcccaagcacaagaagcugaagcagcccgccgacggcaaccccgaccccaacgccaaccccaacguggaccccaacgccaaccccaacguggaccccaacgccaaccccaacguggaccccaacgccaaccccaacgccaaccccaacgccaaccccaacgccaaccccaacgccaaccccaacgccaaccccaacgccaaccccaacgccaaccccaacgccaaccccaacgccaaccccaacgccaaccccaacgccaaccccaacgccaaccccaacgccaaccccaacgccaaccccaacgccaaccccaacgccaaccccaacguggaccccaacgccaaccccaacgccaaccccaacgccaaccccaacgccaaccccaacgccaaccccaacgccaaccccaacgccaaccccaacgccaaccccaacgccaaccccaacgccaaccccaacgccaaccccaacgccaaccccaacgccaaccccaacgccaaccccaacgccaaccccaacgccaaccccaacgccaaccccaacgccaaccccaacaagaacaaccagggcaacggccagggccacaacaugcccaacgaccccaacagaaacguggacgagaacgccaacgccaacagcgccgugaagaacaacaacaacgaggagcccagcgacaagcacaucaaggaguaccugaacaagauccagaacagccugagcaccgaguggagccccugcagcgugaccugcggcaacggcauccaggugagaaucaagcccggcagcgccaacaagcccaaggacgagcuggacuacgccaacgacaucgagaagaagaucugcaagauggagaagugcagcagcguguucaacguggugaacagcagcaucggccugaucauggugcugagcuuccuguuccugaacugaggacuaguuauaagacugacuagcccgaugggccucccaacgggcccuccuccccuccuugcaccgagauuaauaaaaaaaaaaaaaaaaaaaaaaaaaaaaaaaaaaaaaaaaaaaaaaaaaaaaaaaaaaaaaaaaugcaucccccccccccccccccccccccccccccccaaaggcucuuuucagagccaccagaauu

SEQ ID NO: 1649 - RNA, 1429 nt, Artificial Sequence
  mRNA Design i-3 (A64-N5-C30-hSL-N5) comprising derived and/or modified sequence from Pf(3D7)__XP_001351122.1__HsIns-iso1_Pf-CSP(19-397) (opt4)
gggagaaagcuuaccauggcccuguggaugagacugcugccccugcuggcccugcuggcccuguggggccccgaccccgccgccgcccuguuccaggaguaccagugcuacggcagcagcagcaacaccagagugcugaacgagcugaacuacgacaacgccggcaccaaccuguacaacgagcuggagaugaacuacuacggcaagcaggagaacugguacagccugaagaagaacagcagaagccugggcgagaacgacgacggcaacaacgaggacaacgagaagcugagaaagcccaagcacaagaagcugaagcagcccgccgacggcaaccccgaccccaacgccaaccccaacguggaccccaacgccaaccccaacguggaccccaacgccaaccccaacguggaccccaacgccaaccccaacgccaaccccaacgccaaccccaacgccaaccccaacgccaaccccaacgccaaccccaacgccaaccccaacgccaaccccaacgccaaccccaacgccaaccccaacgccaaccccaacgccaaccccaacgccaaccccaacgccaaccccaacgccaaccccaacgccaaccccaacgccaaccccaacguggaccccaacgccaaccccaacgccaaccccaacgccaaccccaacgccaaccccaacgccaaccccaacgccaaccccaacgccaaccccaacgccaaccccaacgccaaccccaacgccaaccccaacgccaaccccaacgccaaccccaacgccaaccccaacgccaaccccaacgccaaccccaacgccaaccccaacgccaaccccaacgccaaccccaacaagaacaaccagggcaacggccagggccacaacaugcccaacgaccccaacagaaacguggacgagaacgccaacgccaacagcgccgugaagaacaacaacaacgaggagcccagcgacaagcacaucaaggaguaccugaacaagauccagaacagccugagcaccgaguggagccccugcagcgugaccugcggcaacggcauccaggugagaaucaagcccggcagcgccaacaagcccaaggacgagcuggacuacgccaacgacaucgagaagaagaucugcaagauggagaagugcagcagcguguucaacguggugaacagcagcaucggccugaucauggugcugagcuuccuguuccugaacugaggacuaguuauaagacugacuagcccgaugggccucccaacgggcccuccuccccuccuugcaccgagauuaauaaaaaaaaaaaaaaaaaaaaaaaaaaaaaaaaaaaaaaaaaaaaaaaaaaaaaaaaaaaaaaaaugcaucccccccccccccccccccccccccccccccaaaggcucuuuucagagccaccagaauu

SEQ ID NO: 1650 - RNA, 1408 nt, Artificial Sequence
  mRNA Design i-3 (A64-N5-C30-hSL-N5) comprising derived and/or modified sequence from Pf(3D7)__XP_001351122.1__HsSPARC_Pf-CSP(19-397) (opt4)
gggagaaagcuuaccaugagagccuggaucuucuuccugcugugccuggccggcagagcccuggcccuguuccaggaguaccagugcuacggcagcagcagcaacaccagagugcugaacgagcugaacuacgacaacgccggcaccaaccuguacaacgagcuggagaugaacuacuacggcaagcaggagaacugguacagccugaagaagaacagcagaagccugggcgagaacgacgacggcaacaacgaggacaacgagaagcugagaaagcccaagcacaagaagcugaagcagcccgccgacggcaaccccgaccccaacgccaaccccaacguggaccccaacgccaaccccaacguggaccccaacgccaaccccaacguggaccccaacgccaaccccaacgccaaccccaacgccaaccccaacgccaaccccaacgccaaccccaacgccaaccccaacgccaaccccaacgccaaccccaacgccaaccccaacgccaaccccaacgccaaccccaacgccaaccccaacgccaaccccaacgccaaccccaacgccaaccccaacgccaaccccaacgccaaccccaacguggaccccaacgccaaccccaacgccaaccccaacgccaaccccaacgccaaccccaacgccaaccccaacgccaaccccaacgccaaccccaacgccaaccccaacgccaaccccaacgccaaccccaacgccaaccccaacgccaaccccaacgccaaccccaacgccaaccccaacgccaaccccaacgccaaccccaacgccaaccccaacgccaaccccaacaagaacaaccagggcaacggccagggccacaacaugcccaacgaccccaacagaaacguggacgagaacgccaacgccaacagcgccgugaagaacaacaacaacgaggagcccagcgacaagcacaucaaggaguaccugaacaagauccagaacagccugagcaccgaguggagccccugcagcgugaccugcggcaacggcauccaggugagaaucaagcccggcagcgccaacaagcccaaggacgagcuggacuacgccaacgacaucgagaagaagaucugcaagauggagaagugcagcagcguguucaacguggugaacagcagcaucggccugaucauggugcugagcuuccuguuccugaacugaggacuaguuauaagacugacuagcccgaugggccucccaacgggcccuccuccccuccuugcaccgagauuaauaaaaaaaaaaaaaaaaaaaaaaaaaaaaaaaaaaaaaaaaaaaaaaaaaaaaaaaaaaaaaaaaugcaucccccccccccccccccccccccccccccccaaaggcucuuuucagagccaccagaauu

SEQ ID NO: 1651 - RNA, 1411 nt, Artificial Sequence
  mRNA Design i-3 (A64-N5-C30-hSL-N5) comprising derived and/or modified sequence from Pf(3D7)__XP_001351122.1__IgE_Pf-CSP(19-397) (opt4)
gggagaaagcuuaccauggacuggaccuggauccuguuccugguggccgccgccaccagagugcacagccuguuccaggaguaccagugcuacggcagcagcagcaacaccagagugcugaacgagcugaacuacgacaacgccggcaccaaccuguacaacgagcuggagaugaacuacuacggcaagcaggagaacugguacagccugaagaagaacagcagaagccugggcgagaacgacgacggcaacaacgaggacaacgagaagcugagaaagcccaagcacaagaagcugaagcagcccgccgacggcaaccccgaccccaacgccaaccccaacguggaccccaacgccaaccccaacguggaccccaacgccaaccccaacguggaccccaacgccaaccccaacgccaaccccaacgccaaccccaacgccaaccccaacgccaaccccaacgccaaccccaacgccaaccccaacgccaaccccaacgccaaccccaacgccaaccccaacgccaaccccaacgccaaccccaacgccaaccccaacgccaaccccaacgccaaccccaacgccaaccccaacgccaaccccaacguggaccccaacgccaaccccaacgccaaccccaacgccaaccccaacgccaaccccaacgccaaccccaacgccaaccccaacgccaaccccaacgccaaccccaacgccaaccccaacgccaaccccaacgccaaccccaacgccaaccccaacgccaaccccaacgccaaccccaacgccaaccccaacgccaaccccaacgccaaccccaacgccaaccccaacaagaacaaccagggcaacggccagggccacaacaugcccaacgaccccaacagaaacguggacgagaacgccaacgccaacagcgccgugaagaacaacaacaacgaggagcccagcgacaagcacaucaaggaguaccugaacaagauccagaacagccugagcaccgaguggagccccugcagcgugaccugcggcaacggcauccaggugagaaucaagcccggcagcgccaacaagcccaaggacgagcuggacuacgccaacgacaucgagaagaagaucugcaagauggagaagugcagcagcguguucaacguggugaacagcagcaucggccugaucauggugcugagcuuccuguuccugaacugaggacuaguuauaagacugacuagcccgaugggccucccaacgggcccuccuccccuccuugcaccgagauuaauaaaaaaaaaaaaaaaaaaaaaaaaaaaaaaaaaaaaaaaaaaaaaaaaaaaaaaaaaaaaaaaaugcaucccccccccccccccccccccccccccccccaaaggcucuuuucagagccaccagaauu

SEQ ID NO: 1652 - RNA, 1576 nt, Artificial Sequence
  mRNA Design i-3 (A64-N5-C30-hSL-N5) comprising derived and/or modified sequence from Pf(3D7)__XP_001351122.1__Pf-CSP_L(G4SG4)_TM domain HA (opt4)
gggagaaagcuuaccaugaugagaaagcuggccauccugagcgugagcagcuuccuguucguggaggcccuguuccaggaguaccagugcuacggcagcagcagcaacaccagagugcugaacgagcugaacuacgacaacgccggcaccaaccuguacaacgagcuggagaugaacuacuacggcaagcaggagaacugguacagccugaagaagaacagcagaagccugggcgagaacgacgacggcaacaacgaggacaacgagaagcugagaaagcccaagcacaagaagcugaagcagcccgccgacggcaaccccgaccccaacgccaaccccaacguggaccccaacgccaaccccaacguggaccccaacgccaaccccaacguggaccccaacgccaaccccaacgccaaccccaacgccaaccccaacgccaaccccaacgccaaccccaacgccaaccccaacgccaaccccaacgccaaccccaacgccaaccccaacgccaaccccaacgccaaccccaacgccaaccccaacgccaaccccaacgccaaccccaacgccaaccccaacgccaaccccaacgccaaccccaacguggaccccaacgccaaccccaacgccaaccccaacgccaaccccaacgccaaccccaacgccaaccccaacgccaaccccaacgccaaccccaacgccaaccccaacgccaaccccaacgccaaccccaacgccaaccccaacgccaaccccaacgccaaccccaacgccaaccccaacgccaaccccaacgccaaccccaacgccaaccccaacgccaaccccaacaagaacaaccagggcaacggccagggccacaacaugcccaacgaccccaacagaaacguggacgagaacgccaacgccaacagcgccgugaagaacaacaacaacgaggagcccagcgacaagcacaucaaggaguaccugaacaagauccagaacagccugagcaccgaguggagccccugcagcgugaccugcggcaacggcauccaggugagaaucaagcccggcagcgccaacaagcccaaggacgagcuggacuacgccaacgacaucgagaagaagaucugcaagauggagaagugcagcagcguguucaacguggugaacagcagcaucggccugaucauggugcugagcuuccuguuccugaacggcggcggcggcagcggcggcggcggcaagcuggagagcaccagaaucuaccagauccuggccaucuacagcaccguggccagcagccuggugcugguggugagccugggcgccaucagcuucuggaugugcagcaacggcagccugcagugcagaaucugcaucugaggacuaguuauaagacugacuagcccgaugggccucccaacgggcccuccuccccuccuugcaccgagauuaauaaaaaaaaaaaaaaaaaaaaaaaaaaaaaaaaaaaaaaaaaaaaaaaaaaaaaaaaaaaaaaaaugcaucccccccccccccccccccccccccccccccaaaggcucuuuucagagccaccagaauu

SEQ ID NO: 1653 - RNA, 1450 nt, Artificial Sequence
  mRNA Design i-3 (A64-N5-C30-hSL-N5) comprising derived and/or modified sequence from Pf(3D7)__XP_001351122.1__Pf-CSP(199-377)_L(PVTN)_HBsAg (opt4)
gggagaaagcuuaccauggaccccaacgccaaccccaacgccaaccccaacgccaaccccaacgccaaccccaacgccaaccccaacgccaaccccaacgccaaccccaacgccaaccccaacgccaaccccaacgccaaccccaacgccaaccccaacgccaaccccaacgccaaccccaacgccaaccccaacgccaaccccaacgccaaccccaacgccaaccccaacgccaaccccaacaagaacaaccagggcaacggccagggccacaacaugcccaacgaccccaacagaaacguggacgagaacgccaacgccaacagcgccgugaagaacaacaacaacgaggagcccagcgacaagcacaucaaggaguaccugaacaagauccagaacagccugagcaccgaguggagccccugcagcgugaccugcggcaacggcauccaggugagaaucaagcccggcagcgccaacaagcccaaggacgagcuggacuacgccaacgacaucgagaagaagaucugcaagauggagaagugcagcagcgugcccgugaccaacauggagaacaucaccagcggcuuccugggcccccugcuggugcugcaggccggcuucuuccugcugaccagaauccugaccaucccccagagccuggacagcugguggaccagccugaacuuccugggcggcagccccgugugccugggccagaacagccagagccccaccagcaaccacagccccaccagcugcccccccaucugccccggcuacagauggaugugccugagaagauucaucaucuuccuguucauccugcugcugugccugaucuuccugcuggugcugcuggacuaccagggcaugcugcccgugugcccccugauccccggcagcaccaccaccaacaccggccccugcaagaccugcaccacccccgcccagggcaacagcauguuccccagcugcugcugcaccaagcccaccgacggcaacugcaccugcauccccauccccagcagcugggccuucgccaaguaccugugggagugggccagcgugagauucagcuggcugagccugcuggugcccuucgugcagugguucgugggccugagccccaccguguggcugagcgccaucuggaugaugugguacuggggccccagccuguacagcaucgugagccccuucaucccccugcugcccaucuucuucugccuguggguguacaucugaggacuaguuauaagacugacuagcccgaugggccucccaacgggcccuccuccccuccuugcaccgagauuaauaaaaaaaaaaaaaaaaaaaaaaaaaaaaaaaaaaaaaaaaaaaaaaaaaaaaaaaaaaaaaaaaugcaucccccccccccccccccccccccccccccccaaaggcucuuuucagagccaccagaauu

SEQ ID NO: 1654 - RNA, 1492 nt, Artificial Sequence
  mRNA Design i-3 (A64-N5-C30-hSL-N5) comprising derived and/or modified sequence from Pf(3D7)__XP_001351122.1__Pf-CSP(199-387)_L(PVTN)_HBsAg (opt4)
gggagaaagcuuaccaugauggcccccgaccccaacgccaaccccaacgccaaccccaacgccaaccccaacgccaaccccaacgccaaccccaacgccaaccccaacgccaaccccaacgccaaccccaacgccaaccccaacgccaaccccaacgccaaccccaacgccaaccccaacgccaaccccaacgccaaccccaacgccaaccccaacgccaaccccaacgccaaccccaacgccaaccccaacaagaacaaccagggcaacggccagggccacaacaugcccaacgaccccaacagaaacguggacgagaacgccaacgccaacagcgccgugaagaacaacaacaacgaggagcccagcgacaagcacaucaaggaguaccugaacaagauccagaacagccugagcaccgaguggagccccugcagcgugaccugcggcaacggcauccaggugagaaucaagcccggcagcgccaacaagcccaaggacgagcuggacuacgccaacgacaucgagaagaagaucugcaagauggagaagugcagcagcguguucaacguggugaacagcagcaucggccugggccccgugaccaacauggagaacaucaccagcggcuuccugggcccccugcuggugcugcaggccggcuucuuccugcugaccagaauccugaccaucccccagagccuggacagcugguggaccagccugaacuuccugggcggcagccccgugugccugggccagaacagccagagccccaccagcaaccacagccccaccagcugcccccccaucugccccggcuacagauggaugugccugagaagauucaucaucuuccuguucauccugcugcugugccugaucuuccugcuggugcugcuggacuaccagggcaugcugcccgugugcccccugauccccggcagcaccaccaccaacaccggccccugcaagaccugcaccacccccgcccagggcaacagcauguuccccagcugcugcugcaccaagcccaccgacggcaacugcaccugcauccccauccccagcagcugggccuucgccaaguaccugugggagugggccagcgugagauucagcuggcugagccugcuggugcccuucgugcagugguucgugggccugagccccaccguguggcugagcgccaucuggaugaugugguacuggggccccagccuguacagcaucgugagccccuucaucccccugcugcccaucuucuucugccuguggguguacaucugaggacuaguuauaagacugacuagcccgaugggccucccaacgggcccuccuccccuccuugcaccgagauuaauaaaaaaaaaaaaaaaaaaaaaaaaaaaaaaaaaaaaaaaaaaaaaaaaaaaaaaaaaaaaaaaaugcaucccccccccccccccccccccccccccccccaaaggcucuuuucagagccaccagaauu

SEQ ID NO: 1655 - RNA, 676 nt, Artificial Sequence
  mRNA Design i-3 (A64-N5-C30-hSL-N5) comprising derived and/or modified sequence from Pf(3D7)__XP_001351122.1__HsALB_Pf-CSP(19-152) (opt4)
gggagaaagcuuaccaugaagugggugaccuucaucagccugcuguuccuguucagcagcgccuacagccuguuccaggaguaccagugcuacggcagcagcagcaacaccagagugcugaacgagcugaacuacgacaacgccggcaccaaccuguacaacgagcuggagaugaacuacuacggcaagcaggagaacugguacagccugaagaagaacagcagaagccugggcgagaacgacgacggcaacaacgaggacaacgagaagcugagaaagcccaagcacaagaagcugaagcagcccgccgacggcaaccccgaccccaacgccaaccccaacguggaccccaacgccaaccccaacguggaccccaacgccaaccccaacguggaccccaacgccaaccccaacgccaaccccaacgccaaccccaacgccaaccccaacgccaaccccaacgccaaccccugaggacuaguuauaagacugacuagcccgaugggccucccaacgggcccuccuccccuccuugcaccgagauuaauaaaaaaaaaaaaaaaaaaaaaaaaaaaaaaaaaaaaaaaaaaaaaaaaaaaaaaaaaaaaaaaaugcaucccccccccccccccccccccccccccccccaaaggcucuuuucagagccaccagaauu

SEQ ID NO: 1656 - RNA, 796 nt, Artificial Sequence
  mRNA Design i-3 (A64-N5-C30-hSL-N5) comprising derived and/or modified sequence from Pf(3D7)__XP_001351122.1__HsALB_Pf-CSP(19-192) (opt4)
gggagaaagcuuaccaugaagugggugaccuucaucagccugcuguuccuguucagcagcgccuacagccuguuccaggaguaccagugcuacggcagcagcagcaacaccagagugcugaacgagcugaacuacgacaacgccggcaccaaccuguacaacgagcuggagaugaacuacuacggcaagcaggagaacugguacagccugaagaagaacagcagaagccugggcgagaacgacgacggcaacaacgaggacaacgagaagcugagaaagcccaagcacaagaagcugaagcagcccgccgacggcaaccccgaccccaacgccaaccccaacguggaccccaacgccaaccccaacguggaccccaacgccaaccccaacguggaccccaacgccaaccccaacgccaaccccaacgccaaccccaacgccaaccccaacgccaaccccaacgccaaccccaacgccaaccccaacgccaaccccaacgccaaccccaacgccaaccccaacgccaaccccaacgccaaccccaacgccaaccccaacgccaaccccaacgccaaccccaacgccaaccccugaggacuaguuauaagacugacuagcccgaugggccucccaacgggcccuccuccccuccuugcaccgagauuaauaaaaaaaaaaaaaaaaaaaaaaaaaaaaaaaaaaaaaaaaaaaaaaaaaaaaaaaaaaaaaaaaugcaucccccccccccccccccccccccccccccccaaaggcucuuuucagagccaccagaauu

SEQ ID NO: 1657 - RNA, 1036 nt, Artificial Sequence
  mRNA Design i-3 (A64-N5-C30-hSL-N5) comprising derived and/or modified sequence from Pf(3D7)__XP_001351122.1__HsALB_Pf-CSP(19-272) (opt4)
gggagaaagcuuaccaugaagugggugaccuucaucagccugcuguuccuguucagcagcgccuacagccuguuccaggaguaccagugcuacggcagcagcagcaacaccagagugcugaacgagcugaacuacgacaacgccggcaccaaccuguacaacgagcuggagaugaacuacuacggcaagcaggagaacugguacagccugaagaagaacagcagaagccugggcgagaacgacgacggcaacaacgaggacaacgagaagcugagaaagcccaagcacaagaagcugaagcagcccgccgacggcaaccccgaccccaacgccaaccccaacguggaccccaacgccaaccccaacguggaccccaacgccaaccccaacguggaccccaacgccaaccccaacgccaaccccaacgccaaccccaacgccaaccccaacgccaaccccaacgccaaccccaacgccaaccccaacgccaaccccaacgccaaccccaacgccaaccccaacgccaaccccaacgccaaccccaacgccaaccccaacgccaaccccaacgccaaccccaacgccaaccccaacgccaaccccaacguggaccccaacgccaaccccaacgccaaccccaacgccaaccccaacgccaaccccaacgccaaccccaacgccaaccccaacgccaaccccaacgccaaccccaacgccaaccccaacgccaaccccaacgccaaccccaacgccaaccccaacgccaaccccaacgccaaccccaacgccaaccccaacgccaaccccaacgccaaccccaacgccaaccccugaggacuaguuauaagacugacuagcccgaugggccucccaacgggcccuccuccccuccuugcaccgagauuaauaaaaaaaaaaaaaaaaaaaaaaaaaaaaaaaaaaaaaaaaaaaaaaaaaaaaaaaaaaaaaaaaugcaucccccccccccccccccccccccccccccccaaaggcucuuuucagagccaccagaauu

SEQ ID NO: 1658 - RNA, 1198 nt, Artificial Sequence
  mRNA Design i-3 (A64-N5-C30-hSL-N5) comprising derived and/or modified sequence from Pf(3D7)__XP_001351122.1__HsALB_Pf-CSP(19-272)_L(AAY)_Pf-CSP(310-3 27)_L(AAY)_Pf-CSP(346-375) (opt4)
gggagaaagcuuaccaugaagugggugaccuucaucagccugcuguuccuguucagcagcgccuacagccuguuccaggaguaccagugcuacggcagcagcagcaacaccagagugcugaacgagcugaacuacgacaacgccggcaccaaccuguacaacgagcuggagaugaacuacuacggcaagcaggagaacugguacagccugaagaagaacagcagaagccugggcgagaacgacgacggcaacaacgaggacaacgagaagcugagaaagcccaagcacaagaagcugaagcagcccgccgacggcaaccccgaccccaacgccaaccccaacguggaccccaacgccaaccccaacguggaccccaacgccaaccccaacguggaccccaacgccaaccccaacgccaaccccaacgccaaccccaacgccaaccccaacgccaaccccaacgccaaccccaacgccaaccccaacgccaaccccaacgccaaccccaacgccaaccccaacgccaaccccaacgccaaccccaacgccaaccccaacgccaaccccaacgccaaccccaacgccaaccccaacgccaaccccaacguggaccccaacgccaaccccaacgccaaccccaacgccaaccccaacgccaaccccaacgccaaccccaacgccaaccccaacgccaaccccaacgccaaccccaacgccaaccccaacgccaaccccaacgccaaccccaacgccaaccccaacgccaaccccaacgccaaccccaacgccaaccccaacgccaaccccaacgccaaccccaacgccaaccccgccgccuacgagcccagcgacaagcacaucaaggaguaccugaacaagauccagaacagccuggccgccuacaucaagcccggcagcgccaacaagcccaaggacgagcuggacuacgccaacgacaucgagaagaagaucugcaagauggagaagugcagcugaggacuaguuauaagacugacuagcccgaugggccucccaacgggcccuccuccccuccuugcaccgagauuaauaaaaaaaaaaaaaaaaaaaaaaaaaaaaaaaaaaaaaaaaaaaaaaaaaaaaaaaaaaaaaaaaugcaucccccccccccccccccccccccccccccccaaaggcucuuuucagagccaccagaauu

SEQ ID NO: 1659 - RNA, 1159 nt, Artificial Sequence
  mRNA Design i-3 (A64-N5-C30-hSL-N5) comprising derived and/or modified sequence from Pf(3D7)__XP_001351122.1__HsALB_Pf-CSP(19-272)_L(AAY)_Pf-CSP(346-3 65)_L(AAY)_P2 (opt4)
gggagaaagcuuaccaugaagugggugaccuucaucagccugcuguuccuguucagcagcgccuacagccuguuccaggaguaccagugcuacggcagcagcagcaacaccagagugcugaacgagcugaacuacgacaacgccggcaccaaccuguacaacgagcuggagaugaacuacuacggcaagcaggagaacugguacagccugaagaagaacagcagaagccugggcgagaacgacgacggcaacaacgaggacaacgagaagcugagaaagcccaagcacaagaagcugaagcagcccgccgacggcaaccccgaccccaacgccaaccccaacguggaccccaacgccaaccccaacguggaccccaacgccaaccccaacguggaccccaacgccaaccccaacgccaaccccaacgccaaccccaacgccaaccccaacgccaaccccaacgccaaccccaacgccaaccccaacgccaaccccaacgccaaccccaacgccaaccccaacgccaaccccaacgccaaccccaacgccaaccccaacgccaaccccaacgccaaccccaacgccaaccccaacgccaaccccaacguggaccccaacgccaaccccaacgccaaccccaacgccaaccccaacgccaaccccaacgccaaccccaacgccaaccccaacgccaaccccaacgccaaccccaacgccaaccccaacgccaaccccaacgccaaccccaacgccaaccccaacgccaaccccaacgccaaccccaacgccaaccccaacgccaaccccaacgccaaccccaacgccaaccccgccgccuacaucaagcccggcagcgccaacaagcccaaggacgagcuggacuacgccaacgacaucgaggccgccuaccaguacaucaaggccaacagcaaguucaucggcaucaccgagcugugaggacuaguuauaagacugacuagcccgaugggccucccaacgggcccuccuccccuccuugcaccgagauuaauaaaaaaaaaaaaaaaaaaaaaaaaaaaaaaaaaaaaaaaaaaaaaaaaaaaaaaaaaaaaaaaaugcaucccccccccccccccccccccccccccccccaaaggcucuuuucagagccaccagaauu

SEQ ID NO: 1660 - RNA, 1153 nt, Artificial Sequence
  mRNA Design i-3 (A64-N5-C30-hSL-N5) comprising derived and/or modified sequence from Pf(3D7)__XP_001351122.1__HsALB_Pf-CSP(19-272)_L(AAY)_Pf-CSP(346-3 65)_L(AAY)_PADRE (opt4)
gggagaaagcuuaccaugaagugggugaccuucaucagccugcuguuccuguucagcagcgccuacagccuguuccaggaguaccagugcuacggcagcagcagcaacaccagagugcugaacgagcugaacuacgacaacgccggcaccaaccuguacaacgagcuggagaugaacuacuacggcaagcaggagaacugguacagccugaagaagaacagcagaagccugggcgagaacgacgacggcaacaacgaggacaacgagaagcugagaaagcccaagcacaagaagcugaagcagcccgccgacggcaaccccgaccccaacgccaaccccaacguggaccccaacgccaaccccaacguggaccccaacgccaaccccaacguggaccccaacgccaaccccaacgccaaccccaacgccaaccccaacgccaaccccaacgccaaccccaacgccaaccccaacgccaaccccaacgccaaccccaacgccaaccccaacgccaaccccaacgccaaccccaacgccaaccccaacgccaaccccaacgccaaccccaacgccaaccccaacgccaaccccaacgccaaccccaacguggaccccaacgccaaccccaacgccaaccccaacgccaaccccaacgccaaccccaacgccaaccccaacgccaaccccaacgccaaccccaacgccaaccccaacgccaaccccaacgccaaccccaacgccaaccccaacgccaaccccaacgccaaccccaacgccaaccccaacgccaaccccaacgccaaccccaacgccaaccccaacgccaaccccgccgccuacaucaagcccggcagcgccaacaagcccaaggacgagcuggacuacgccaacgacaucgaggccgccuacgccaaguucguggccgccuggacccugaaggccgccgccugaggacuaguuauaagacugacuagcccgaugggccucccaacgggcccuccuccccuccuugcaccgagauuaauaaaaaaaaaaaaaaaaaaaaaaaaaaaaaaaaaaaaaaaaaaaaaaaaaaaaaaaaaaaaaaaaugcaucccccccccccccccccccccccccccccccaaaggcucuuuucagagccaccagaauu

SEQ ID NO: 1661 - RNA, 1210 nt, Artificial Sequence
  mRNA Design i-3 (A64-N5-C30-hSL-N5) comprising derived and/or modified sequence from Pf(3D7)__XP_001351122.1__HsALB_Pf-CSP(19-272)_L(G4S)_Pf-CSP(310-3 27)_L(G4S)_Pf-CSP(346-375) (opt4)
gggagaaagcuuaccaugaagugggugaccuucaucagccugcuguuccuguucagcagcgccuacagccuguuccaggaguaccagugcuacggcagcagcagcaacaccagagugcugaacgagcugaacuacgacaacgccggcaccaaccuguacaacgagcuggagaugaacuacuacggcaagcaggagaacugguacagccugaagaagaacagcagaagccugggcgagaacgacgacggcaacaacgaggacaacgagaagcugagaaagcccaagcacaagaagcugaagcagcccgccgacggcaaccccgaccccaacgccaaccccaacguggaccccaacgccaaccccaacguggaccccaacgccaaccccaacguggaccccaacgccaaccccaacgccaaccccaacgccaaccccaacgccaaccccaacgccaaccccaacgccaaccccaacgccaaccccaacgccaaccccaacgccaaccccaacgccaaccccaacgccaaccccaacgccaaccccaacgccaaccccaacgccaaccccaacgccaaccccaacgccaaccccaacgccaaccccaacguggaccccaacgccaaccccaacgccaaccccaacgccaaccccaacgccaaccccaacgccaaccccaacgccaaccccaacgccaaccccaacgccaaccccaacgccaaccccaacgccaaccccaacgccaaccccaacgccaaccccaacgccaaccccaacgccaaccccaacgccaaccccaacgccaaccccaacgccaaccccaacgccaaccccggcggcggcggcagcgagcccagcgacaagcacaucaaggaguaccugaacaagauccagaacagccugggcggcggcggcagcaucaagcccggcagcgccaacaagcccaaggacgagcuggacuacgccaacgacaucgagaagaagaucugcaagauggagaagugcagcugaggacuaguuauaagacugacuagcccgaugggccucccaacgggcccuccuccccuccuugcaccgagauuaauaaaaaaaaaaaaaaaaaaaaaaaaaaaaaaaaaaaaaaaaaaaaaaaaaaaaaaaaaaaaaaaaugcaucccccccccccccccccccccccccccccccaaaggcucuuuucagagccaccagaauu

SEQ ID NO: 1662 - RNA, 1195 nt, Artificial Sequence
  mRNA Design i-3 (A64-N5-C30-hSL-N5) comprising derived and/or modified sequence from Pf(3D7)__XP_001351122.1__HsALB_Pf-CSP(19-272)_L(G4S)_Pf-CSP(310-3 27)_Pf-CSP(346-375) (opt4)
gggagaaagcuuaccaugaagugggugaccuucaucagccugcuguuccuguucagcagcgccuacagccuguuccaggaguaccagugcuacggcagcagcagcaacaccagagugcugaacgagcugaacuacgacaacgccggcaccaaccuguacaacgagcuggagaugaacuacuacggcaagcaggagaacugguacagccugaagaagaacagcagaagccugggcgagaacgacgacggcaacaacgaggacaacgagaagcugagaaagcccaagcacaagaagcugaagcagcccgccgacggcaaccccgaccccaacgccaaccccaacguggaccccaacgccaaccccaacguggaccccaacgccaaccccaacguggaccccaacgccaaccccaacgccaaccccaacgccaaccccaacgccaaccccaacgccaaccccaacgccaaccccaacgccaaccccaacgccaaccccaacgccaaccccaacgccaaccccaacgccaaccccaacgccaaccccaacgccaaccccaacgccaaccccaacgccaaccccaacgccaaccccaacgccaaccccaacguggaccccaacgccaaccccaacgccaaccccaacgccaaccccaacgccaaccccaacgccaaccccaacgccaaccccaacgccaaccccaacgccaaccccaacgccaaccccaacgccaaccccaacgccaaccccaacgccaaccccaacgccaaccccaacgccaaccccaacgccaaccccaacgccaaccccaacgccaaccccaacgccaaccccggcggcggcggcagcgagcccagcgacaagcacaucaaggaguaccugaacaagauccagaacagccugaucaagcccggcagcgccaacaagcccaaggacgagcuggacuacgccaacgacaucgagaagaagaucugcaagauggagaagugcagcugaggacuaguuauaagacugacuagcccgaugggccucccaacgggcccuccuccccuccuugcaccgagauuaauaaaaaaaaaaaaaaaaaaaaaaaaaaaaaaaaaaaaaaaaaaaaaaaaaaaaaaaaaaaaaaaaugcaucccccccccccccccccccccccccccccccaaaggcucuuuucagagccaccagaauu

SEQ ID NO: 1663 - RNA, 1195 nt, Artificial Sequence
  mRNA Design i-3 (A64-N5-C30-hSL-N5) comprising derived and/or modified sequence from Pf(3D7)__XP_001351122.1__HsALB_Pf-CSP(19-325) (opt4)
gggagaaagcuuaccaugaagugggugaccuucaucagccugcuguuccuguucagcagcgccuacagccuguuccaggaguaccagugcuacggcagcagcagcaacaccagagugcugaacgagcugaacuacgacaacgccggcaccaaccuguacaacgagcuggagaugaacuacuacggcaagcaggagaacugguacagccugaagaagaacagcagaagccugggcgagaacgacgacggcaacaacgaggacaacgagaagcugagaaagcccaagcacaagaagcugaagcagcccgccgacggcaaccccgaccccaacgccaaccccaacguggaccccaacgccaaccccaacguggaccccaacgccaaccccaacguggaccccaacgccaaccccaacgccaaccccaacgccaaccccaacgccaaccccaacgccaaccccaacgccaaccccaacgccaaccccaacgccaaccccaacgccaaccccaacgccaaccccaacgccaaccccaacgccaaccccaacgccaaccccaacgccaaccccaacgccaaccccaacgccaaccccaacgccaaccccaacguggaccccaacgccaaccccaacgccaaccccaacgccaaccccaacgccaaccccaacgccaaccccaacgccaaccccaacgccaaccccaacgccaaccccaacgccaaccccaacgccaaccccaacgccaaccccaacgccaaccccaacgccaaccccaacgccaaccccaacgccaaccccaacgccaaccccaacgccaaccccaacgccaaccccaacaagaacaaccagggcaacggccagggccacaacaugcccaacgaccccaacagaaacguggacgagaacgccaacgccaacagcgccgugaagaacaacaacaacgaggagcccagcgacaagcacaucaaggaguaccugaacaagauccagaacugaggacuaguuauaagacugacuagcccgaugggccucccaacgggcccuccuccccuccuugcaccgagauuaauaaaaaaaaaaaaaaaaaaaaaaaaaaaaaaaaaaaaaaaaaaaaaaaaaaaaaaaaaaaaaaaaugcaucccccccccccccccccccccccccccccccaaaggcucuuuucagagccaccagaauu

SEQ ID NO: 1664 - RNA, 1372 nt, Artificial Sequence
  mRNA Design i-3 (A64-N5-C30-hSL-N5) comprising derived and/or modified sequence from Pf(3D7)__XP_001351122.1__HsALB_Pf-CSP(19-384) (opt4)
gggagaaagcuuaccaugaagugggugaccuucaucagccugcuguuccuguucagcagcgccuacagccuguuccaggaguaccagugcuacggcagcagcagcaacaccagagugcugaacgagcugaacuacgacaacgccggcaccaaccuguacaacgagcuggagaugaacuacuacggcaagcaggagaacugguacagccugaagaagaacagcagaagccugggcgagaacgacgacggcaacaacgaggacaacgagaagcugagaaagcccaagcacaagaagcugaagcagcccgccgacggcaaccccgaccccaacgccaaccccaacguggaccccaacgccaaccccaacguggaccccaacgccaaccccaacguggaccccaacgccaaccccaacgccaaccccaacgccaaccccaacgccaaccccaacgccaaccccaacgccaaccccaacgccaaccccaacgccaaccccaacgccaaccccaacgccaaccccaacgccaaccccaacgccaaccccaacgccaaccccaacgccaaccccaacgccaaccccaacgccaaccccaacgccaaccccaacguggaccccaacgccaaccccaacgccaaccccaacgccaaccccaacgccaaccccaacgccaaccccaacgccaaccccaacgccaaccccaacgccaaccccaacgccaaccccaacgccaaccccaacgccaaccccaacgccaaccccaacgccaaccccaacgccaaccccaacgccaaccccaacgccaaccccaacgccaaccccaacgccaaccccaacaagaacaaccagggcaacggccagggccacaacaugcccaacgaccccaacagaaacguggacgagaacgccaacgccaacagcgccgugaagaacaacaacaacgaggagcccagcgacaagcacaucaaggaguaccugaacaagauccagaacagccugagcaccgaguggagccccugcagcgugaccugcggcaacggcauccaggugagaaucaagcccggcagcgccaacaagcccaaggacgagcuggacuacgccaacgacaucgagaagaagaucugcaagauggagaagugcagcagcguguucaacguggugaacagcagcugaggacuaguuauaagacugacuagcccgaugggccucccaacgggcccuccuccccuccuugcaccgagauuaauaaaaaaaaaaaaaaaaaaaaaaaaaaaaaaaaaaaaaaaaaaaaaaaaaaaaaaaaaaaaaaaaugcaucccccccccccccccccccccccccccccccaaaggcucuuuucagagccaccagaauu

SEQ ID NO: 1665 - RNA, 1510 nt, Artificial Sequence
  mRNA Design i-3 (A64-N5-C30-hSL-N5) comprising derived and/or modified sequence from Pf(3D7)__XP_001351122.1__HsALB_Pf-CSP(19-384)_TM domain HA (opt4)
gggagaaagcuuaccaugaagugggugaccuucaucagccugcuguuccuguucagcagcgccuacagccuguuccaggaguaccagugcuacggcagcagcagcaacaccagagugcugaacgagcugaacuacgacaacgccggcaccaaccuguacaacgagcuggagaugaacuacuacggcaagcaggagaacugguacagccugaagaagaacagcagaagccugggcgagaacgacgacggcaacaacgaggacaacgagaagcugagaaagcccaagcacaagaagcugaagcagcccgccgacggcaaccccgaccccaacgccaaccccaacguggaccccaacgccaaccccaacguggaccccaacgccaaccccaacguggaccccaacgccaaccccaacgccaaccccaacgccaaccccaacgccaaccccaacgccaaccccaacgccaaccccaacgccaaccccaacgccaaccccaacgccaaccccaacgccaaccccaacgccaaccccaacgccaaccccaacgccaaccccaacgccaaccccaacgccaaccccaacgccaaccccaacgccaaccccaacguggaccccaacgccaaccccaacgccaaccccaacgccaaccccaacgccaaccccaacgccaaccccaacgccaaccccaacgccaaccccaacgccaaccccaacgccaaccccaacgccaaccccaacgccaaccccaacgccaaccccaacgccaaccccaacgccaaccccaacgccaaccccaacgccaaccccaacgccaaccccaacgccaaccccaacaagaacaaccagggcaacggccagggccacaacaugcccaacgaccccaacagaaacguggacgagaacgccaacgccaacagcgccgugaagaacaacaacaacgaggagcccagcgacaagcacaucaaggaguaccugaacaagauccagaacagccugagcaccgaguggagccccugcagcgugaccugcggcaacggcauccaggugagaaucaagcccggcagcgccaacaagcccaaggacgagcuggacuacgccaacgacaucgagaagaagaucugcaagauggagaagugcagcagcguguucaacguggugaacagcagcaagcuggagagcaccagaaucuaccagauccuggccaucuacagcaccguggccagcagccuggugcugguggugagccugggcgccaucagcuucuggaugugcagcaacggcagccugcagugcagaaucugcaucugaggacuaguuauaagacugacuagcccgaugggccucccaacgggcccuccuccccuccuugcaccgagauuaauaaaaaaaaaaaaaaaaaaaaaaaaaaaaaaaaaaaaaaaaaaaaaaaaaaaaaaaaaaaaaaaaugcaucccccccccccccccccccccccccccccccaaaggcucuuuucagagccaccagaauu

SEQ ID NO: 1666 - RNA, 1222 nt, Artificial Sequence
  mRNA Design i-3 (A64-N5-C30-hSL-N5) comprising derived and/or modified sequence from Pf(3D7)__XP_001351122.1__HsALB_Pf-CSP(82-397) (opt4)
gggagaaagcuuaccaugaagugggugaccuucaucagccugcuguuccuguucagcagcgccuacagcgacaacgagaagcugagaaagcccaagcacaagaagcugaagcagcccgccgacggcaaccccgaccccaacgccaaccccaacguggaccccaacgccaaccccaacguggaccccaacgccaaccccaacguggaccccaacgccaaccccaacgccaaccccaacgccaaccccaacgccaaccccaacgccaaccccaacgccaaccccaacgccaaccccaacgccaaccccaacgccaaccccaacgccaaccccaacgccaaccccaacgccaaccccaacgccaaccccaacgccaaccccaacgccaaccccaacgccaaccccaacgccaaccccaacguggaccccaacgccaaccccaacgccaaccccaacgccaaccccaacgccaaccccaacgccaaccccaacgccaaccccaacgccaaccccaacgccaaccccaacgccaaccccaacgccaaccccaacgccaaccccaacgccaaccccaacgccaaccccaacgccaaccccaacgccaaccccaacgccaaccccaacgccaaccccaacgccaaccccaacaagaacaaccagggcaacggccagggccacaacaugcccaacgaccccaacagaaacguggacgagaacgccaacgccaacagcgccgugaagaacaacaacaacgaggagcccagcgacaagcacaucaaggaguaccugaacaagauccagaacagccugagcaccgaguggagccccugcagcgugaccugcggcaacggcauccaggugagaaucaagcccggcagcgccaacaagcccaaggacgagcuggacuacgccaacgacaucgagaagaagaucugcaagauggagaagugcagcagcguguucaacguggugaacagcagcaucggccugaucauggugcugagcuuccuguuccugaacugaggacuaguuauaagacugacuagcccgaugggccucccaacgggcccuccuccccuccuugcaccgagauuaauaaaaaaaaaaaaaaaaaaaaaaaaaaaaaaaaaaaaaaaaaaaaaaaaaaaaaaaaaaaaaaaaugcaucccccccccccccccccccccccccccccccaaaggcucuuuucagagccaccagaauu

SEQ ID NO: 1667 - RNA, 574 nt, Artificial Sequence
  mRNA Design i-3 (A64-N5-C30-hSL-N5) comprising derived and/or modified sequence from Pf(3D7)__XP_001351122.1__HsALB_Pf-CSP(93-192) (opt4)
gggagaaagcuuaccaugaagugggugaccuucaucagccugcuguuccuguucagcagcgccuacagcaagcugaagcagcccgccgacggcaaccccgaccccaacgccaaccccaacguggaccccaacgccaaccccaacguggaccccaacgccaaccccaacguggaccccaacgccaaccccaacgccaaccccaacgccaaccccaacgccaaccccaacgccaaccccaacgccaaccccaacgccaaccccaacgccaaccccaacgccaaccccaacgccaaccccaacgccaaccccaacgccaaccccaacgccaaccccaacgccaaccccaacgccaaccccaacgccaaccccugaggacuaguuauaagacugacuagcccgaugggccucccaacgggcccuccuccccuccuugcaccgagauuaauaaaaaaaaaaaaaaaaaaaaaaaaaaaaaaaaaaaaaaaaaaaaaaaaaaaaaaaaaaaaaaaaugcaucccccccccccccccccccccccccccccccaaaggcucuuuucagagccaccagaauu

SEQ ID NO: 1668 - RNA, 814 nt, Artificial Sequence
  mRNA Design i-3 (A64-N5-C30-hSL-N5) comprising derived and/or modified sequence from Pf(3D7)__XP_001351122.1__HsALB_Pf-CSP(93-272) (opt4)
gggagaaagcuuaccaugaagugggugaccuucaucagccugcuguuccuguucagcagcgccuacagcaagcugaagcagcccgccgacggcaaccccgaccccaacgccaaccccaacguggaccccaacgccaaccccaacguggaccccaacgccaaccccaacguggaccccaacgccaaccccaacgccaaccccaacgccaaccccaacgccaaccccaacgccaaccccaacgccaaccccaacgccaaccccaacgccaaccccaacgccaaccccaacgccaaccccaacgccaaccccaacgccaaccccaacgccaaccccaacgccaaccccaacgccaaccccaacgccaaccccaacgccaaccccaacguggaccccaacgccaaccccaacgccaaccccaacgccaaccccaacgccaaccccaacgccaaccccaacgccaaccccaacgccaaccccaacgccaaccccaacgccaaccccaacgccaaccccaacgccaaccccaacgccaaccccaacgccaaccccaacgccaaccccaacgccaaccccaacgccaaccccaacgccaaccccaacgccaaccccugaggacuaguuauaagacugacuagcccgaugggccucccaacgggcccuccuccccuccuugcaccgagauuaauaaaaaaaaaaaaaaaaaaaaaaaaaaaaaaaaaaaaaaaaaaaaaaaaaaaaaaaaaaaaaaaaugcaucccccccccccccccccccccccccccccccaaaggcucuuuucagagccaccagaauu

SEQ ID NO: 1669 - RNA, 1189 nt, Artificial Sequence
  mRNA Design i-3 (A64-N5-C30-hSL-N5) comprising derived and/or modified sequence from Pf(3D7)__XP_001351122.1__HsALB_Pf-CSP(93-397) (opt4)
gggagaaagcuuaccaugaagugggugaccuucaucagccugcuguuccuguucagcagcgccuacagcaagcugaagcagcccgccgacggcaaccccgaccccaacgccaaccccaacguggaccccaacgccaaccccaacguggaccccaacgccaaccccaacguggaccccaacgccaaccccaacgccaaccccaacgccaaccccaacgccaaccccaacgccaaccccaacgccaaccccaacgccaaccccaacgccaaccccaacgccaaccccaacgccaaccccaacgccaaccccaacgccaaccccaacgccaaccccaacgccaaccccaacgccaaccccaacgccaaccccaacgccaaccccaacguggaccccaacgccaaccccaacgccaaccccaacgccaaccccaacgccaaccccaacgccaaccccaacgccaaccccaacgccaaccccaacgccaaccccaacgccaaccccaacgccaaccccaacgccaaccccaacgccaaccccaacgccaaccccaacgccaaccccaacgccaaccccaacgccaaccccaacgccaaccccaacgccaaccccaacaagaacaaccagggcaacggccagggccacaacaugcccaacgaccccaacagaaacguggacgagaacgccaacgccaacagcgccgugaagaacaacaacaacgaggagcccagcgacaagcacaucaaggaguaccugaacaagauccagaacagccugagcaccgaguggagccccugcagcgugaccugcggcaacggcauccaggugagaaucaagcccggcagcgccaacaagcccaaggacgagcuggacuacgccaacgacaucgagaagaagaucugcaagauggagaagugcagcagcguguucaacguggugaacagcagcaucggccugaucauggugcugagcuuccuguuccugaacugaggacuaguuauaagacugacuagcccgaugggccucccaacgggcccuccuccccuccuugcaccgagauuaauaaaaaaaaaaaaaaaaaaaaaaaaaaaaaaaaaaaaaaaaaaaaaaaaaaaaaaaaaaaaaaaaugcaucccccccccccccccccccccccccccccccaaaggcucuuuucagagccaccagaauu

SEQ ID NO: 1670 - RNA, 559 nt, Artificial Sequence
  mRNA Design i-3 (A64-N5-C30-hSL-N5) comprising derived and/or modified sequence from Pf(3D7)__XP_001351122.1__HsALB_Pf-CSP(98-192) (opt4)
gggagaaagcuuaccaugaagugggugaccuucaucagccugcuguuccuguucagcagcgccuacagcgccgacggcaaccccgaccccaacgccaaccccaacguggaccccaacgccaaccccaacguggaccccaacgccaaccccaacguggaccccaacgccaaccccaacgccaaccccaacgccaaccccaacgccaaccccaacgccaaccccaacgccaaccccaacgccaaccccaacgccaaccccaacgccaaccccaacgccaaccccaacgccaaccccaacgccaaccccaacgccaaccccaacgccaaccccaacgccaaccccaacgccaaccccugaggacuaguuauaagacugacuagcccgaugggccucccaacgggcccuccuccccuccuugcaccgagauuaauaaaaaaaaaaaaaaaaaaaaaaaaaaaaaaaaaaaaaaaaaaaaaaaaaaaaaaaaaaaaaaaaugcaucccccccccccccccccccccccccccccccaaaggcucuuuucagagccaccagaauu

SEQ ID NO: 1671 - RNA, 799 nt, Artificial Sequence
  mRNA Design i-3 (A64-N5-C30-hSL-N5) comprising derived and/or modified sequence from Pf(3D7)__XP_001351122.1__HsALB_Pf-CSP(98-272) (opt4)
gggagaaagcuuaccaugaagugggugaccuucaucagccugcuguuccuguucagcagcgccuacagcgccgacggcaaccccgaccccaacgccaaccccaacguggaccccaacgccaaccccaacguggaccccaacgccaaccccaacguggaccccaacgccaaccccaacgccaaccccaacgccaaccccaacgccaaccccaacgccaaccccaacgccaaccccaacgccaaccccaacgccaaccccaacgccaaccccaacgccaaccccaacgccaaccccaacgccaaccccaacgccaaccccaacgccaaccccaacgccaaccccaacgccaaccccaacgccaaccccaacguggaccccaacgccaaccccaacgccaaccccaacgccaaccccaacgccaaccccaacgccaaccccaacgccaaccccaacgccaaccccaacgccaaccccaacgccaaccccaacgccaaccccaacgccaaccccaacgccaaccccaacgccaaccccaacgccaaccccaacgccaaccccaacgccaaccccaacgccaaccccaacgccaaccccugaggacuaguuauaagacugacuagcccgaugggccucccaacgggcccuccuccccuccuugcaccgagauuaauaaaaaaaaaaaaaaaaaaaaaaaaaaaaaaaaaaaaaaaaaaaaaaaaaaaaaaaaaaaaaaaaugcaucccccccccccccccccccccccccccccccaaaggcucuuuucagagccaccagaauu

SEQ ID NO: 1672 - RNA, 1105 nt, Artificial Sequence
  mRNA Design i-3 (A64-N5-C30-hSL-N5) comprising derived and/or modified sequence from Pf(3D7)__XP_001351122.1__HsALB_Pf-CSP(98-374) (opt4)
gggagaaagcuuaccaugaagugggugaccuucaucagccugcuguuccuguucagcagcgccuacagcgccgacggcaaccccgaccccaacgccaaccccaacguggaccccaacgccaaccccaacguggaccccaacgccaaccccaacguggaccccaacgccaaccccaacgccaaccccaacgccaaccccaacgccaaccccaacgccaaccccaacgccaaccccaacgccaaccccaacgccaaccccaacgccaaccccaacgccaaccccaacgccaaccccaacgccaaccccaacgccaaccccaacgccaaccccaacgccaaccccaacgccaaccccaacgccaaccccaacguggaccccaacgccaaccccaacgccaaccccaacgccaaccccaacgccaaccccaacgccaaccccaacgccaaccccaacgccaaccccaacgccaaccccaacgccaaccccaacgccaaccccaacgccaaccccaacgccaaccccaacgccaaccccaacgccaaccccaacgccaaccccaacgccaaccccaacgccaaccccaacgccaaccccaacaagaacaaccagggcaacggccagggccacaacaugcccaacgaccccaacagaaacguggacgagaacgccaacgccaacagcgccgugaagaacaacaacaacgaggagcccagcgacaagcacaucaaggaguaccugaacaagauccagaacagccugagcaccgaguggagccccugcagcgugaccugcggcaacggcauccaggugagaaucaagcccggcagcgccaacaagcccaaggacgagcuggacuacgccaacgacaucgagaagaagaucugcaagauggagaagugcugaggacuaguuauaagacugacuagcccgaugggccucccaacgggcccuccuccccuccuugcaccgagauuaauaaaaaaaaaaaaaaaaaaaaaaaaaaaaaaaaaaaaaaaaaaaaaaaaaaaaaaaaaaaaaaaaugcaucccccccccccccccccccccccccccccccaaaggcucuuuucagagccaccagaauu

SEQ ID NO: 1673 - RNA, 1174 nt, Artificial Sequence
  mRNA Design i-3 (A64-N5-C30-hSL-N5) comprising derived and/or modified sequence from Pf(3D7)__XP_001351122.1__HsALB_Pf-CSP(98-397) (opt4)
gggagaaagcuuaccaugaagugggugaccuucaucagccugcuguuccuguucagcagcgccuacagcgccgacggcaaccccgaccccaacgccaaccccaacguggaccccaacgccaaccccaacguggaccccaacgccaaccccaacguggaccccaacgccaaccccaacgccaaccccaacgccaaccccaacgccaaccccaacgccaaccccaacgccaaccccaacgccaaccccaacgccaaccccaacgccaaccccaacgccaaccccaacgccaaccccaacgccaaccccaacgccaaccccaacgccaaccccaacgccaaccccaacgccaaccccaacgccaaccccaacguggaccccaacgccaaccccaacgccaaccccaacgccaaccccaacgccaaccccaacgccaaccccaacgccaaccccaacgccaaccccaacgccaaccccaacgccaaccccaacgccaaccccaacgccaaccccaacgccaaccccaacgccaaccccaacgccaaccccaacgccaaccccaacgccaaccccaacgccaaccccaacgccaaccccaacaagaacaaccagggcaacggccagggccacaacaugcccaacgaccccaacagaaacguggacgagaacgccaacgccaacagcgccgugaagaacaacaacaacgaggagcccagcgacaagcacaucaaggaguaccugaacaagauccagaacagccugagcaccgaguggagccccugcagcgugaccugcggcaacggcauccaggugagaaucaagcccggcagcgccaacaagcccaaggacgagcuggacuacgccaacgacaucgagaagaagaucugcaagauggagaagugcagcagcguguucaacguggugaacagcagcaucggccugaucauggugcugagcuuccuguuccugaacugaggacuaguuauaagacugacuagcccgaugggccucccaacgggcccuccuccccuccuugcaccgagauuaauaaaaaaaaaaaaaaaaaaaaaaaaaaaaaaaaaaaaaaaaaaaaaaaaaaaaaaaaaaaaaaaaugcaucccccccccccccccccccccccccccccccaaaggcucuuuucagagccaccagaauu

SEQ ID NO: 1674 - RNA, 1501 nt, Artificial Sequence
  mRNA Design i-3 (A64-N5-C30-hSL-N5) comprising derived and/or modified sequence from Pf(3D7)__XP_001351122.1__HsALB_Pf-CSP(199-377)_L(PVTN)_HBsAg (opt4)
gggagaaagcuuaccaugaagugggugaccuucaucagccugcuguuccuguucagcagcgccuacagcgaccccaacgccaaccccaacgccaaccccaacgccaaccccaacgccaaccccaacgccaaccccaacgccaaccccaacgccaaccccaacgccaaccccaacgccaaccccaacgccaaccccaacgccaaccccaacgccaaccccaacgccaaccccaacgccaaccccaacgccaaccccaacgccaaccccaacgccaaccccaacgccaaccccaacaagaacaaccagggcaacggccagggccacaacaugcccaacgaccccaacagaaacguggacgagaacgccaacgccaacagcgccgugaagaacaacaacaacgaggagcccagcgacaagcacaucaaggaguaccugaacaagauccagaacagccugagcaccgaguggagccccugcagcgugaccugcggcaacggcauccaggugagaaucaagcccggcagcgccaacaagcccaaggacgagcuggacuacgccaacgacaucgagaagaagaucugcaagauggagaagugcagcagcgugcccgugaccaacauggagaacaucaccagcggcuuccugggcccccugcuggugcugcaggccggcuucuuccugcugaccagaauccugaccaucccccagagccuggacagcugguggaccagccugaacuuccugggcggcagccccgugugccugggccagaacagccagagccccaccagcaaccacagccccaccagcugcccccccaucugccccggcuacagauggaugugccugagaagauucaucaucuuccuguucauccugcugcugugccugaucuuccugcuggugcugcuggacuaccagggcaugcugcccgugugcccccugauccccggcagcaccaccaccaacaccggccccugcaagaccugcaccacccccgcccagggcaacagcauguuccccagcugcugcugcaccaagcccaccgacggcaacugcaccugcauccccauccccagcagcugggccuucgccaaguaccugugggagugggccagcgugagauucagcuggcugagccugcuggugcccuucgugcagugguucgugggccugagccccaccguguggcugagcgccaucuggaugaugugguacuggggccccagccuguacagcaucgugagccccuucaucccccugcugcccaucuucuucugccuguggguguacaucugaggacuaguuauaagacugacuagcccgaugggccucccaacgggcccuccuccccuccuugcaccgagauuaauaaaaaaaaaaaaaaaaaaaaaaaaaaaaaaaaaaaaaaaaaaaaaaaaaaaaaaaaaaaaaaaaugcaucccccccccccccccccccccccccccccccaaaggcucuuuucagagccaccagaauu

SEQ ID NO: 1675 - RNA, 1240 nt, Artificial Sequence
  mRNA Design i-3 (A64-N5-C30-hSL-N5) comprising derived and/or modified sequence from Pb(ANKA)__XP_022712148.1__Pb-CSP (opt4)
gggagaaagcuuaccaugaagaagugcaccauccuggugguggccagccugcugcuggugaacagccugcugcccggcuacggccagaacaagagcauccaggcccagagaaaccugaacgagcugugcuacaacgagggcaacgacaacaagcuguaccacgugcugaacagcaagaacggcaagaucuacaacagaaacaccgugaacagacugcuggccgacgcccccgagggcaagaagaacgagaagaagaacgagaagaucgagagaaacaacaagcugaagcagcccccccccccccccaaccccaacgacccccccccccccaaccccaacgacccccccccccccaaccccaacgacccccccccccccaaccccaacgacccccccccccccaacgccaacgacccccccccccccaacgccaacgaccccgccccccccaacgccaacgaccccgccccccccaacgccaacgaccccgccccccccaacgccaacgaccccgccccccccaacgccaacgacccccccccccccaaccccaacgaccccgccccccccaacgccaacgacccccccccccccaaccccaacgaccccgcccccccccagggcaacaacaacccccagccccagcccagaccccagccccagccccagccccagccccagccccagccccagccccagccccagcccagaccccagccccagccccagcccggcggcaacaacaacaacaagaacaacaacaacgacgacagcuacauccccagcgccgagaagauccuggaguucgugaagcagaucagagacagcaucaccgaggaguggagccagugcaacgugaccugcggcagcggcaucagagugagaaagagaaagggcagcaacaagaaggccgaggaccugacccuggaggacaucgacaccgagaucugcaagauggacaagugcagcagcaucuucaacaucgugagcaacagccugggcuucgugauccugcuggugcugguguucuucaacugaggacuaguuauaagacugacuagcccgaugggccucccaacgggcccuccuccccuccuugcaccgagauuaauaaaaaaaaaaaaaaaaaaaaaaaaaaaaaaaaaaaaaaaaaaaaaaaaaaaaaaaaaaaaaaaaugcaucccccccccccccccccccccccccccccccaaaggcucuuuucagagccaccagaauu

SEQ ID NO: 1676 - RNA, 1405 nt, Artificial Sequence
  mRNA Design i-3 (A64-N5-C30-hSL-N5) comprising derived and/or modified sequence from Pb(ANKA)__XP_022712148.1__Pb-CSP_L(G4SG4)_TM domain HA (opt4)
gggagaaagcuuaccaugaagaagugcaccauccuggugguggccagccugcugcuggugaacagccugcugcccggcuacggccagaacaagagcauccaggcccagagaaaccugaacgagcugugcuacaacgagggcaacgacaacaagcuguaccacgugcugaacagcaagaacggcaagaucuacaacagaaacaccgugaacagacugcuggccgacgcccccgagggcaagaagaacgagaagaagaacgagaagaucgagagaaacaacaagcugaagcagcccccccccccccccaaccccaacgacccccccccccccaaccccaacgacccccccccccccaaccccaacgacccccccccccccaaccccaacgacccccccccccccaacgccaacgacccccccccccccaacgccaacgaccccgccccccccaacgccaacgaccccgccccccccaacgccaacgaccccgccccccccaacgccaacgaccccgccccccccaacgccaacgacccccccccccccaaccccaacgaccccgccccccccaacgccaacgacccccccccccccaaccccaacgaccccgcccccccccagggcaacaacaacccccagccccagcccagaccccagccccagccccagccccagccccagccccagccccagccccagccccagcccagaccccagccccagccccagcccggcggcaacaacaacaacaagaacaacaacaacgacgacagcuacauccccagcgccgagaagauccuggaguucgugaagcagaucagagacagcaucaccgaggaguggagccagugcaacgugaccugcggcagcggcaucagagugagaaagagaaagggcagcaacaagaaggccgaggaccugacccuggaggacaucgacaccgagaucugcaagauggacaagugcagcagcaucuucaacaucgugagcaacagccugggcuucgugauccugcuggugcugguguucuucaacggcggcggcggcagcggcggcggcggcaagcuggagagcaccagaaucuaccagauccuggccaucuacagcaccguggccagcagccuggugcugguggugagccugggcgccaucagcuucuggaugugcagcaacggcagccugcagugcagaaucugcaucugaggacuaguuauaagacugacuagcccgaugggccucccaacgggcccuccuccccuccuugcaccgagauuaauaaaaaaaaaaaaaaaaaaaaaaaaaaaaaaaaaaaaaaaaaaaaaaaaaaaaaaaaaaaaaaaaugcaucccccccccccccccccccccccccccccccaaaggcucuuuucagagccaccagaauu

SEQ ID NO: 1677 - RNA, 1225 nt, Artificial Sequence
  mRNA Design i-3 (A64-N5-C30-hSL-N5) comprising derived and/or modified sequence from Pb(ANKA)__XP_022712148.1__HsALB_Pb-CSP(24-340) (opt4)
gggagaaagcuuaccaugaagugggugaccuucaucagccugcuguuccuguucagcagcgccuacagccagaacaagagcauccaggcccagagaaaccugaacgagcugugcuacaacgagggcaacgacaacaagcuguaccacgugcugaacagcaagaacggcaagaucuacaacagaaacaccgugaacagacugcuggccgacgcccccgagggcaagaagaacgagaagaagaacgagaagaucgagagaaacaacaagcugaagcagcccccccccccccccaaccccaacgacccccccccccccaaccccaacgacccccccccccccaaccccaacgacccccccccccccaaccccaacgacccccccccccccaacgccaacgacccccccccccccaacgccaacgaccccgccccccccaacgccaacgaccccgccccccccaacgccaacgaccccgccccccccaacgccaacgaccccgccccccccaacgccaacgacccccccccccccaaccccaacgaccccgccccccccaacgccaacgacccccccccccccaaccccaacgaccccgcccccccccagggcaacaacaacccccagccccagcccagaccccagccccagccccagccccagccccagccccagccccagccccagccccagcccagaccccagccccagccccagcccggcggcaacaacaacaacaagaacaacaacaacgacgacagcuacauccccagcgccgagaagauccuggaguucgugaagcagaucagagacagcaucaccgaggaguggagccagugcaacgugaccugcggcagcggcaucagagugagaaagagaaagggcagcaacaagaaggccgaggaccugacccuggaggacaucgacaccgagaucugcaagauggacaagugcagcagcaucuucaacaucgugagcaacagccugggcuucgugauccugcuggugcugguguucuucaacugaggacuaguuauaagacugacuagcccgaugggccucccaacgggcccuccuccccuccuugcaccgagauuaauaaaaaaaaaaaaaaaaaaaaaaaaaaaaaaaaaaaaaaaaaaaaaaaaaaaaaaaaaaaaaaaaugcaucccccccccccccccccccccccccccccccaaaggcucuuuucagagccaccagaauu

SEQ ID NO: 1678 - RNA, 1243 nt, Artificial Sequence
  mRNA Design i-3 (A64-N5-C30-hSL-N5) comprising derived and/or modified sequence from Pb(ANKA)__XP_022712148.1__HsIns-iso1_Pb-CSP(24-340) (opt4)
gggagaaagcuuaccauggcccuguggaugagacugcugccccugcuggcccugcuggcccuguggggccccgaccccgccgccgcccagaacaagagcauccaggcccagagaaaccugaacgagcugugcuacaacgagggcaacgacaacaagcuguaccacgugcugaacagcaagaacggcaagaucuacaacagaaacaccgugaacagacugcuggccgacgcccccgagggcaagaagaacgagaagaagaacgagaagaucgagagaaacaacaagcugaagcagcccccccccccccccaaccccaacgacccccccccccccaaccccaacgacccccccccccccaaccccaacgacccccccccccccaaccccaacgacccccccccccccaacgccaacgacccccccccccccaacgccaacgaccccgccccccccaacgccaacgaccccgccccccccaacgccaacgaccccgccccccccaacgccaacgaccccgccccccccaacgccaacgacccccccccccccaaccccaacgaccccgccccccccaacgccaacgacccccccccccccaaccccaacgaccccgcccccccccagggcaacaacaacccccagccccagcccagaccccagccccagccccagccccagccccagccccagccccagccccagccccagcccagaccccagccccagccccagcccggcggcaacaacaacaacaagaacaacaacaacgacgacagcuacauccccagcgccgagaagauccuggaguucgugaagcagaucagagacagcaucaccgaggaguggagccagugcaacgugaccugcggcagcggcaucagagugagaaagagaaagggcagcaacaagaaggccgaggaccugacccuggaggacaucgacaccgagaucugcaagauggacaagugcagcagcaucuucaacaucgugagcaacagccugggcuucgugauccugcuggugcugguguucuucaacugaggacuaguuauaagacugacuagcccgaugggccucccaacgggcccuccuccccuccuugcaccgagauuaauaaaaaaaaaaaaaaaaaaaaaaaaaaaaaaaaaaaaaaaaaaaaaaaaaaaaaaaaaaaaaaaaugcaucccccccccccccccccccccccccccccccaaaggcucuuuucagagccaccagaauu

SEQ ID NO: 1679 - RNA, 1222 nt, Artificial Sequence
  mRNA Design i-3 (A64-N5-C30-hSL-N5) comprising derived and/or modified sequence from Pb(ANKA)__XP_022712148.1__HsSPARC_Pb-CSP(24-340) (opt4)
gggagaaagcuuaccaugagagccuggaucuucuuccugcugugccuggccggcagagcccuggcccagaacaagagcauccaggcccagagaaaccugaacgagcugugcuacaacgagggcaacgacaacaagcuguaccacgugcugaacagcaagaacggcaagaucuacaacagaaacaccgugaacagacugcuggccgacgcccccgagggcaagaagaacgagaagaagaacgagaagaucgagagaaacaacaagcugaagcagcccccccccccccccaaccccaacgacccccccccccccaaccccaacgacccccccccccccaaccccaacgacccccccccccccaaccccaacgacccccccccccccaacgccaacgacccccccccccccaacgccaacgaccccgccccccccaacgccaacgaccccgccccccccaacgccaacgaccccgccccccccaacgccaacgaccccgccccccccaacgccaacgacccccccccccccaaccccaacgaccccgccccccccaacgccaacgacccccccccccccaaccccaacgaccccgcccccccccagggcaacaacaacccccagccccagcccagaccccagccccagccccagccccagccccagccccagccccagccccagccccagcccagaccccagccccagccccagcccggcggcaacaacaacaacaagaacaacaacaacgacgacagcuacauccccagcgccgagaagauccuggaguucgugaagcagaucagagacagcaucaccgaggaguggagccagugcaacgugaccugcggcagcggcaucagagugagaaagagaaagggcagcaacaagaaggccgaggaccugacccuggaggacaucgacaccgagaucugcaagauggacaagugcagcagcaucuucaacaucgugagcaacagccugggcuucgugauccugcuggugcugguguucuucaacugaggacuaguuauaagacugacuagcccgaugggccucccaacgggcccuccuccccuccuugcaccgagauuaauaaaaaaaaaaaaaaaaaaaaaaaaaaaaaaaaaaaaaaaaaaaaaaaaaaaaaaaaaaaaaaaaugcaucccccccccccccccccccccccccccccccaaaggcucuuuucagagccaccagaauu

SEQ ID NO: 1680 - RNA, 1225 nt, Artificial Sequence
  mRNA Design i-3 (A64-N5-C30-hSL-N5) comprising derived and/or modified sequence from Pb(ANKA)__XP_022712148.1__IgE_Pb-CSP(24-340) (opt4)
gggagaaagcuuaccauggacuggaccuggauccuguuccugguggccgccgccaccagagugcacagccagaacaagagcauccaggcccagagaaaccugaacgagcugugcuacaacgagggcaacgacaacaagcuguaccacgugcugaacagcaagaacggcaagaucuacaacagaaacaccgugaacagacugcuggccgacgcccccgagggcaagaagaacgagaagaagaacgagaagaucgagagaaacaacaagcugaagcagcccccccccccccccaaccccaacgacccccccccccccaaccccaacgacccccccccccccaaccccaacgacccccccccccccaaccccaacgacccccccccccccaacgccaacgacccccccccccccaacgccaacgaccccgccccccccaacgccaacgaccccgccccccccaacgccaacgaccccgccccccccaacgccaacgaccccgccccccccaacgccaacgacccccccccccccaaccccaacgaccccgccccccccaacgccaacgacccccccccccccaaccccaacgaccccgcccccccccagggcaacaacaacccccagccccagcccagaccccagccccagccccagccccagccccagccccagccccagccccagccccagcccagaccccagccccagccccagcccggcggcaacaacaacaacaagaacaacaacaacgacgacagcuacauccccagcgccgagaagauccuggaguucgugaagcagaucagagacagcaucaccgaggaguggagccagugcaacgugaccugcggcagcggcaucagagugagaaagagaaagggcagcaacaagaaggccgaggaccugacccuggaggacaucgacaccgagaucugcaagauggacaagugcagcagcaucuucaacaucgugagcaacagccugggcuucgugauccugcuggugcugguguucuucaacugaggacuaguuauaagacugacuagcccgaugggccucccaacgggcccuccuccccuccuugcaccgagauuaauaaaaaaaaaaaaaaaaaaaaaaaaaaaaaaaaaaaaaaaaaaaaaaaaaaaaaaaaaaaaaaaaugcaucccccccccccccccccccccccccccccccaaaggcucuuuucagagccaccagaauu

SEQ ID NO: 1681 - RNA, 1411 nt, Artificial Sequence
  mRNA Design i-3 (A64-N5-C30-hSL-N5) comprising derived and/or modified sequence from Pf(3D7)__XP_001351122.1__Pf-CSP (opt5)
gggagaaagcuuaccaugaugagaaagcuggccauccucagcguguccucuuuccuguuugucgaggcucuuuuccaggaauaccaaugcuauggcagcuccucuaacacccggguucugaaugagcucaacuacgacaaugccgggacaaaccuguauaaugaacuugagaugaacuacuauggaaaacaggaaaauugguacagccugaagaaaaacucccgcucucucggcgagaaugaugacgggaacaaugaggauaacgaaaagcugagaaaacccaagcacaagaaacugaagcagccugcggacggaaauccggaucccaacgcuaauccuaacguggaccccaacgccaauccuaacguggaucccaaugccaacccuaaugucgacccgaacgcuaaucccaacgccaauccuaacgcuaaucccaacgccaauccuaacgcgaaucccaacgccaacccgaaugcuaacccuaaugccaaccccaaugcuaacccuaaugccaaccccaaugcgaaccccaaugccaacccuaaugcuaacccgaaugccaaccccaacgcuaauccuaacgccaaucccaacgccaauccuaacguggaucccaaugcuaacccgaaugcgaacccuaaugccaaccccaaugcuaacccuaaugccaaccccaacgccaauccuaacgcuaaucccaacgccaauccgaacgcgaauccuaacgcuaaucccaacgccaaucccaacgccaauccuaacgcuaauccgaacgccaaucccaacgcuaacccuaaugccaaccccaaugcgaacccuaaugccaaccccaauaaaaacaaucagggcaacgggcaaggacauaauaugccuaacgaccccaaucggaacguugaugagaaugcuaacgccaacagcgcugugaagaauaacaauaacgaggaaccguccgacaaacacauuaaggaguaucucaauaagauccagaacagccugucuacggaaugguccccuuguagcgugaccugcggcaauggcauucagguccgcaucaaacccgggucugccaacaagccuaaagaugagcuugacuacgcgaaugacauugaaaagaaaaucuguaagauggagaaaugcuccagcguuuuuaacguggucaauucuuccaucggacugauuauggugcucagcuuccuguuucuuaacugaggacuaguuauaagacugacuagcccgaugggccucccaacgggcccuccuccccuccuugcaccgagauuaauaaaaaaaaaaaaaaaaaaaaaaaaaaaaaaaaaaaaaaaaaaaaaaaaaaaaaaaaaaaaaaaaugcaucccccccccccccccccccccccccccccccaaaggcucuuuucagagccaccagaauu

SEQ ID NO: 1682 - RNA, 1342 nt, Artificial Sequence
  mRNA Design i-3 (A64-N5-C30-hSL-N5) comprising derived and/or modified sequence from Pf(3D7)__XP_001351122.1__Pf-CSP(1-374) (opt5)
gggagaaagcuuaccaugaugagaaagcuggccauccucagcguguccucuuuccuguuugucgaggcucuuuuccaggaauaccaaugcuauggcagcuccucuaacacccggguucugaaugagcucaacuacgacaaugccgggacaaaccuguauaaugaacuugagaugaacuacuauggaaaacaggaaaauugguacagccugaagaaaaacucccgcucucucggcgagaaugaugacgggaacaaugaggauaacgaaaagcugagaaaacccaagcacaagaaacugaagcagccugcggacggaaauccggaucccaacgcuaauccuaacguggaccccaacgccaauccuaacguggaucccaaugccaacccuaaugucgacccgaacgcuaaucccaacgccaauccuaacgcuaaucccaacgccaauccuaacgcgaaucccaacgccaacccgaaugcuaacccuaaugccaaccccaaugcuaacccuaaugccaaccccaaugcgaaccccaaugccaacccuaaugcuaacccgaaugccaaccccaacgcuaauccuaacgccaaucccaacgccaauccuaacguggaucccaaugcuaacccgaaugcgaacccuaaugccaaccccaaugcuaacccuaaugccaaccccaacgccaauccuaacgcuaaucccaacgccaauccgaacgcgaauccuaacgcuaaucccaacgccaaucccaacgccaauccuaacgcuaauccgaacgccaaucccaacgcuaacccuaaugccaaccccaaugcgaacccuaaugccaaccccaauaaaaacaaucagggcaacgggcaaggacauaauaugccuaacgaccccaaucggaacguugaugagaaugcuaacgccaacagcgcugugaagaauaacaauaacgaggaaccguccgacaaacacauuaaggaguaucucaauaagauccagaacagccugucuacggaaugguccccuuguagcgugaccugcggcaauggcauucagguccgcaucaaacccgggucugccaacaagccuaaagaugagcuugacuacgcgaaugacauugaaaagaaaaucuguaagauggagaaaugcugaggacuaguuauaagacugacuagcccgaugggccucccaacgggcccuccuccccuccuugcaccgagauuaauaaaaaaaaaaaaaaaaaaaaaaaaaaaaaaaaaaaaaaaaaaaaaaaaaaaaaaaaaaaaaaaaugcaucccccccccccccccccccccccccccccccaaaggcucuuuucagagccaccagaauu

SEQ ID NO: 1683 - RNA, 1195 nt, Artificial Sequence
  mRNA Design i-3 (A64-N5-C30-hSL-N5) comprising derived and/or modified sequence from Pf(3D7)__XP_001351122.1__Pf-CSP(1-325) (opt5)
gggagaaagcuuaccaugaugagaaagcuggccauccucagcguguccucuuuccuguuugucgaggcucuuuuccaggaauaccaaugcuauggcagcuccucuaacacccggguucugaaugagcucaacuacgacaaugccgggacaaaccuguauaaugaacuugagaugaacuacuauggaaaacaggaaaauugguacagccugaagaaaaacucccgcucucucggcgagaaugaugacgggaacaaugaggauaacgaaaagcugagaaaacccaagcacaagaaacugaagcagccugcggacggaaauccggaucccaacgcuaauccuaacguggaccccaacgccaauccuaacguggaucccaaugccaacccuaaugucgacccgaacgcuaaucccaacgccaauccuaacgcuaaucccaacgccaauccuaacgcgaaucccaacgccaacccgaaugcuaacccuaaugccaaccccaaugcuaacccuaaugccaaccccaaugcgaaccccaaugccaacccuaaugcuaacccgaaugccaaccccaacgcuaauccuaacgccaaucccaacgccaauccuaacguggaucccaaugcuaacccgaaugcgaacccuaaugccaaccccaaugcuaacccuaaugccaaccccaacgccaauccuaacgcuaaucccaacgccaauccgaacgcgaauccuaacgcuaaucccaacgccaaucccaacgccaauccuaacgcuaauccgaacgccaaucccaacgcuaacccuaaugccaaccccaaugcgaacccuaaugccaaccccaauaaaaacaaucagggcaacgggcaaggacauaauaugccuaacgaccccaaucggaacguugaugagaaugcuaacgccaacagcgcugugaagaauaacaauaacgaggaaccguccgacaaacacauuaaggaguaucucaauaagauccagaacugaggacuaguuauaagacugacuagcccgaugggccucccaacgggcccuccuccccuccuugcaccgagauuaauaaaaaaaaaaaaaaaaaaaaaaaaaaaaaaaaaaaaaaaaaaaaaaaaaaaaaaaaaaaaaaaaugcaucccccccccccccccccccccccccccccccaaaggcucuuuucagagccaccagaauu

SEQ ID NO: 1684 - RNA, 1411 nt, Artificial Sequence
  mRNA Design i-3 (A64-N5-C30-hSL-N5) comprising derived and/or modified sequence from Pf(3D7)__XP_001351122.1__HsALB_Pf-CSP(19-397) (opt5)
gggagaaagcuuaccaugaagugggugaccuucaucagccugcucuuucuguucuccucugccuacagccuuuuucaggaguaucaaugcuacggcuccucuagcaacacaagaguccugaaugaacucaacuaugacaaugcugggacgaaccuguacaaugagcuugaaaugaacuauuacggaaaacaggagaauugguauucccugaagaaaaacucucggagccucggcgaaaaugaugacgggaacaaugaggauaacgagaagcugcgcaaacccaagcacaagaaacugaagcagccugccgacggaaauccggaucccaacgcgaauccuaacguugaccccaacgcuaauccuaacguggaucccaaugccaacccuaauguggacccgaacgccaaucccaacgcuaauccuaacgccaaucccaacgcuaauccuaacgccaaucccaacgcgaacccgaaugccaacccuaaugcuaaccccaaugccaacccuaaugcuaaccccaaugccaaccccaaugcgaacccuaaugccaacccgaaugcuaaccccaacgccaauccuaacgcuaaucccaacgccaauccuaacgucgaucccaaugccaacccgaaugcuaacccuaaugcgaaccccaaugccaacccuaaugcuaaccccaacgccaauccuaacgccaaucccaacgcuaauccgaacgccaauccuaacgcgaaucccaacgcuaaucccaacgccaauccuaacgccaauccgaacgcuaaucccaacgccaacccuaaugcuaaccccaaugccaacccuaaugcgaaccccaauaaaaacaaucagggcaacgggcaaggacauaauaugccuaacgaccccaauagaaacguggaugaaaaugccaacgcuaacuccgccguuaagaauaacaauaacgaggaaccgagcgacaaacacauuaaggaguaccucaauaagauccagaacucucuguccaccgaguggagcccuuguucugugacaugcggcaauggcauucagguccggaucaaacccggguccgcuaacaagccuaaagaugaacuugacuacgccaaugacauugagaagaaaaucuguaagauggaaaaaugcagcucuguguucaacguugucaauuccagcaucggacugauuauggugcucuccuuucuguuccuuaacugaggacuaguuauaagacugacuagcccgaugggccucccaacgggcccuccuccccuccuugcaccgagauuaauaaaaaaaaaaaaaaaaaaaaaaaaaaaaaaaaaaaaaaaaaaaaaaaaaaaaaaaaaaaaaaaaugcaucccccccccccccccccccccccccccccccaaaggcucuuuucagagccaccagaauu

SEQ ID NO: 1685 - RNA, 1429 nt, Artificial Sequence
  mRNA Design i-3 (A64-N5-C30-hSL-N5) comprising derived and/or modified sequence from Pf(3D7)__XP_001351122.1__HsIns-iso1_Pf-CSP(19-397) (opt5)
gggagaaagcuuaccauggcccuguggaugagacuccugccccuucuggcucuccuggcccuuuggggcccugacccggcggcugcccuguuccaggaguaccaaugcuaugggagcuccucuaacacccgggugcucaaugaacugaacuacgauaaugccggaacaaaccuguauaaugagcucgaaaugaacuacuauggcaagcaggagaauugguacagccugaaaaagaacucccgcucucuuggggaaaaugacgauggaaacaaugaggacaacgagaaacugagaaagcccaaacacaagaagcucaaacagccugcugauggcaaucccgacccuaacgccaaucccaacgucgauccuaacgcuaauccgaacguugaccccaaugccaacccuaauguggaucccaacgcgaauccuaacgccaaucccaacgcuaauccgaacgccaauccuaacgcuaaucccaacgccaacccuaaugcgaaccccaaugccaaccccaaugcuaacccuaaugccaacccgaaugcuaaccccaaugccaacccuaaugccaaccccaaugcuaacccuaacgcgaaucccaacgccaauccgaacgcuaauccuaacguggaccccaaugccaacccuaaugccaaccccaaugcuaacccuaaugccaaccccaaugcgaacccgaacgcuaauccuaacgccaaucccaacgccaaucccaacgcuaauccuaacgccaauccgaacgcuaaucccaacgccaauccuaacgcgaaucccaacgccaauccuaacgcuaaccccaaugccaacccuaaugcuaaccccaaugccaacccgaauaagaacaaucaggggaacggacaaggccauaauaugccuaacgaucccaaucggaacgucgacgaaaaugcgaacgccaacagcgcugugaaaaauaacaauaacgaggaaccuuccgauaagcacaucaaagaguaucugaauaagauucagaacucucuuagcacggaguggucccccuguagcguuaccugcggcaaugggauccaggugcgcauuaagccgggaucugccaacaaaccuaaggacgaacuggacuacgcuaaugauaucgagaaaaagauuuguaaaauggaaaagugcuccagcgucuuuaacgugguuaauucuuccaucggccucaucauggugcugagcuuccuguuucucaacugaggacuaguuauaagacugacuagcccgaugggccucccaacgggcccuccuccccuccuugcaccgagauuaauaaaaaaaaaaaaaaaaaaaaaaaaaaaaaaaaaaaaaaaaaaaaaaaaaaaaaaaaaaaaaaaaugcaucccccccccccccccccccccccccccccccaaaggcucuuuucagagccaccagaauu

SEQ ID NO: 1686 - RNA, 1408 nt, Artificial Sequence
  mRNA Design i-3 (A64-N5-C30-hSL-N5) comprising derived and/or modified sequence from Pf(3D7)__XP_001351122.1__HsSPARC_Pf-CSP(19-397) (opt5)
gggagaaagcuuaccaugagagccuggaucuucuuucugcucugccuggcuggccgggcccuugcgcuguuccaggaguaccaauguuaugggagcuccucuaacacccgcgugcucaaugaacugaacuacgacaaugcuggaacaaaccuuuauaaugagcuggaaaugaacuacuauggcaagcaggagaauugguacagccucaaaaagaacuccagaucucugggggaaaaugaugacggaaacaaugaggauaacgagaaacugcggaagcccaaacacaagaagcucaaacagccugccgacggcaauccggaucccaacgccaauccuaacgucgaccccaacgcuaauccuaacguugaucccaaugccaacccuaauguggacccgaacgcuaaucccaacgccaauccuaacgcgaaucccaacgccaauccuaacgcuaaucccaacgccaacccgaaugcuaacccuaaugccaaccccaaugcgaacccuaaugccaaccccaaugcuaaccccaaugccaacccuaaugcuaacccgaaugccaaccccaacgccaauccuaacgcuaaucccaacgcgaauccuaacguggaucccaaugccaacccgaaugcuaacccuaaugccaaccccaaugccaacccuaaugcuaaccccaacgccaauccuaacgcgaaucccaacgcuaauccgaacgccaauccuaacgccaaucccaacgcuaaucccaacgccaauccuaacgcuaauccgaacgccaaucccaacgcgaacccuaaugccaaccccaaugcuaacccuaaugccaaccccaauaagaacaaucaggggaacggacaaggccauaauaugccuaacgaccccaaucgcaacgucgaugaaaaugcuaacgccaacagcgcggugaaaaauaacaauaacgaggaaccguccgacaagcacauuaaagaguaucugaauaagauccagaacucucuuagcacggagugguccccuugcagcguuaccuguggcaaugggauucaggugagaaucaagcccggaucugccaacaaaccuaaggaugaacuggacuacgcuaaugacauugagaaaaagaucugcaaaauggaaaaguguuccagcgucuuuaacgugguuaauucuuccaucggccucauuauggugcugagcuuccuuuuucugaacugaggacuaguuauaagacugacuagcccgaugggccucccaacgggcccuccuccccuccuugcaccgagauuaauaaaaaaaaaaaaaaaaaaaaaaaaaaaaaaaaaaaaaaaaaaaaaaaaaaaaaaaaaaaaaaaaugcaucccccccccccccccccccccccccccccccaaaggcucuuuucagagccaccagaauu

SEQ ID NO: 1687 - RNA, 1411 nt, Artificial Sequence
  mRNA Design i-3 (A64-N5-C30-hSL-N5) comprising derived and/or modified sequence from Pf(3D7)__XP_001351122.1__IgE_Pf-CSP(19-397) (opt5)
gggagaaagcuuaccauggacuggaccuggauccuguuccucguggccgcugccacaagaguccacagccuguuucaggaguaccaaugcuauggcuccucuagcaacacgcggguucuuaaugaacugaacuacgauaaugcggggaccaaccucuauaaugagcuggaaaugaacuacuauggaaagcaggagaauugguacucccuuaaaaagaacucucgcagccugggcgaaaaugacgaugggaacaaugaggacaacgagaaacucagaaagcccaaacauaagaagcugaaacagccugcugauggaaauccggaccccaacgccaauccuaacguggaucccaacgccaauccuaacguggaccccaaugcuaacccuaaugucgauccgaacgccaaucccaacgcuaauccuaacgccaaucccaacgcgaauccuaacgccaaucccaacgcuaacccgaaugccaacccuaaugcuaaccccaaugccaacccuaaugcgaaccccaaugccaaccccaaugcuaacccuaaugccaacccgaaugcuaaccccaacgccaauccuaacgccaaucccaacgcuaauccuaacguggaccccaaugcgaacccgaaugccaacccuaaugcuaaccccaaugccaacccuaaugccaaccccaacgcuaauccuaacgccaaucccaacgcgaauccgaacgcuaauccuaacgccaaucccaacgccaaucccaacgcuaauccuaacgccaauccgaacgcuaaucccaacgccaacccuaaugcgaaccccaaugccaacccuaaugcuaaccccaauaagaacaaucagggcaacgggcaaggacacaauaugccuaacgaucccaaucggaacguugacgaaaaugccaacgcuaacuccgccgugaaaaauaacaauaacgaggaaccgucugauaagcauauuaaagaguaucugaauaagauccagaacagccucuccacagaguggagcccuuguucugugaccugcggcaauggcauucagguccgcaucaagcccggguccgcgaacaaaccuaaggacgaacuggacuacgccaaugauauugagaaaaagaucuguaaaauggaaaagugcagcucuguuuucaacguggucaauuccagcaucggacuuauuauggugcugucuuuucucuuccugaacugaggacuaguuauaagacugacuagcccgaugggccucccaacgggcccuccuccccuccuugcaccgagauuaauaaaaaaaaaaaaaaaaaaaaaaaaaaaaaaaaaaaaaaaaaaaaaaaaaaaaaaaaaaaaaaaaugcaucccccccccccccccccccccccccccccccaaaggcucuuuucagagccaccagaauu

SEQ ID NO: 1688 - RNA, 1576 nt, Artificial Sequence
  mRNA Design i-3 (A64-N5-C30-hSL-N5) comprising derived and/or modified sequence from Pf(3D7)__XP_001351122.1__Pf-CSP_L(G4SG4)_TM domain HA (opt5)
gggagaaagcuuaccaugaugagaaagcuggccauccucagcguguccucuuuccuguuugucgaggcucuuuuccaggaauaccaaugcuauggcagcuccucuaacacccggguucugaaugagcucaacuacgacaaugccgggacaaaccuguauaaugaacuugagaugaacuacuauggaaaacaggaaaauugguacagccugaagaaaaacucccgcucucucggcgagaaugaugacgggaacaaugaggauaacgaaaagcugagaaaacccaagcacaagaaacugaagcagccugcggacggaaauccggaucccaacgcuaauccuaacguggaccccaacgccaauccuaacguggaucccaaugccaacccuaaugucgacccgaacgcuaaucccaacgccaauccuaacgcuaaucccaacgccaauccuaacgcgaaucccaacgccaacccgaaugcuaacccuaaugccaaccccaaugcuaacccuaaugccaaccccaaugcgaaccccaaugccaacccuaaugcuaacccgaaugccaaccccaacgcuaauccuaacgccaaucccaacgccaauccuaacguggaucccaaugcuaacccgaaugcgaacccuaaugccaaccccaaugcuaacccuaaugccaaccccaacgccaauccuaacgcuaaucccaacgccaauccgaacgcgaauccuaacgcuaaucccaacgccaaucccaacgccaauccuaacgcuaauccgaacgccaaucccaacgcuaacccuaaugccaaccccaaugcgaacccuaaugccaaccccaauaaaaacaaucagggcaacgggcaaggacauaauaugccuaacgaccccaaucggaacguugaugagaaugcuaacgccaacagcgcugugaagaauaacaauaacgaggaaccguccgacaaacacauuaaggaguaucucaauaagauccagaacagccugucuacggaaugguccccuuguagcgugaccugcggcaauggcauucagguccgcaucaaacccgggucugccaacaagccuaaagaugagcuugacuacgcgaaugacauugaaaagaaaaucuguaagauggagaaaugcuccagcguuuuuaacguggucaauucuuccaucggacugauuauggugcucagcuuccuguuucuuaacggcgggggaggcuccgggggaggcggcaagcuggaaucuacaagaaucuaccagauucucgccaucuauagcaccguggcuuccagccugguccugguugugucucucggggccauuuccuucuggauguguagcaauggaucucugcaaugccggaucuguauuugaggacuaguuauaagacugacuagcccgaugggccucccaacgggcccuccuccccuccuugcaccgagauuaauaaaaaaaaaaaaaaaaaaaaaaaaaaaaaaaaaaaaaaaaaaaaaaaaaaaaaaaaaaaaaaaaugcaucccccccccccccccccccccccccccccccaaaggcucuuuucagagccaccagaauu

SEQ ID NO: 1689 - RNA, 1450 nt, Artificial Sequence
  mRNA Design i-3 (A64-N5-C30-hSL-N5) comprising derived and/or modified sequence from Pf(3D7)__XP_001351122.1__Pf-CSP(199-377)_L(PVTN)_HBsAg (opt5)
gggagaaagcuuaccauggaccccaacgccaauccuaacgcuaauccgaacgccaaucccaacgcgaauccuaacgcuaaucccaacgccaauccuaacgccaaucccaacgcuaauccuaacgccaacccgaaugcuaaccccaaugccaacccuaaugcgaaccccaaugccaacccuaaugcuaaccccaaugccaacccgaaugcuaacccuaaugccaaccccaacgcgaauccuaacaagaauaaccagggcaaugggcaaggacacaacaugcccaaugaucccaacagaaauguggacgagaacgccaaugcuaacagcgccgucaaaaauaacaauaacgaggaaccuuccgauaagcauaucaaagaauaccugaacaagauucaaaauucucucagcaccgagugguccccgugcucuguuacauguggcaacgggauccaggugcggauuaaacccggaagcgcuaauaagccuaaggacgaacuggauuaugccaacgacaucgagaaaaagauuugcaaaauggagaaguguuccucugugcccgucacgaauauggaaaacaucaccagcggcuuccuugggccucugcucgugcugcaggccggauuuuuccuucugacacgcauccucaccauuccccagucccuggauagcugguggacaucucugaauuuucucggcggcuccccgguuugccuggggcagaacagccagucuccuaccuccaaucacagccccacaucuuguccucccaucugcccuggauacagauggaugugucuucggcgcuucauuaucuuucuguucauucuccugcuuugccugaucuuucuccuggugcugcucgacuaucagggcaugcugcccgucuguccgcuuauuccuggguccaccacgaccaacacaggacccugcaaaaccuguacaacccccgcucaaggcaauagcauguucccuuccugcugcuguacgaagccgacagaugggaacugcaccuguauccccaucccuucuagcugggcguuugccaaguaccugugggagugggcuuccgugagauucagcuggcucucucugcuuguucccuuugugcagugguucgucggacuguccccuacaguguggcucagcgccauuuggaugaugugguauuggggccccucucuguacagcaucguguccccuuuuauuccccugcucccgaucuucuucugccugugggucuauauuugaggacuaguuauaagacugacuagcccgaugggccucccaacgggcccuccuccccuccuugcaccgagauuaauaaaaaaaaaaaaaaaaaaaaaaaaaaaaaaaaaaaaaaaaaaaaaaaaaaaaaaaaaaaaaaaaugcaucccccccccccccccccccccccccccccccaaaggcucuuuucagagccaccagaauu

SEQ ID NO: 1690 - RNA, 1492 nt, Artificial Sequence
  mRNA Design i-3 (A64-N5-C30-hSL-N5) comprising derived and/or modified sequence from Pf(3D7)__XP_001351122.1__Pf-CSP(199-387)_L(PVTN)_HBsAg (opt5)
gggagaaagcuuaccaugauggcccccgacccuaacgcuaauccgaacgccaaucccaacgcgaauccuaacgcuaaucccaacgccaauccuaacgccaaucccaacgcuaauccuaacgccaauccgaacgcuaaccccaaugccaacccuaaugcgaaccccaaugccaacccuaaugcuaaccccaaugccaacccgaaugcuaacccuaaugccaaccccaaugcgaacccuaacgccaaucccaacaagaauaaccagggcaaugggcaaggacacaacaugcccaaugauccuaacagaaauguggacgagaacgcuaaugccaacagcgcugucaaaaauaacaauaacgaggaaccguccgauaagcauaucaaagaauaccugaacaagauucaaaauucucucagcaccgaguggucccccugcucuguuacauguggcaacgggauccaggugcggauuaaaccuggaagcgccaauaagcccaaggacgaacuggauuaugccaacgacaucgagaaaaagauuugcaaaauggagaaguguuccucuguguucaaugucgugaacagcuccaucggccuugggccuguuacgaauauggaaaacaucaccagcggauuucugggcccccuccuggugcuucaggcuggcuucuuucugcucacacgcauucugaccaucccgcagucucuggauuccugguggacaagccucaauuuccuugggggaucuccugucugccugggccagaacucccagagccccaccucuaaucacuccccuacaagcugucccccuauuugccccggguacagauggaugugucugcggcgcuuuaucauuuuccucuuuauccugcuucugugccucauuuuccugcuggugcuccuggacuaucagggaaugcuuccgguuuguccucugauccccggcuccaccacgaccaacacagggcccugcaaaaccuguacaaccccugcgcaaggaaauucuauguuuccgagcugcugcuguacgaagcccacagauggcaacugcaccuguaucccuauucccuccagcugggccuucgcuaaguaccucugggagugggccucugugagauuuuccuggcugagccuucuggucccuuucgugcagugguuugugggccucucucccacagucuggcugagcgccaucuggaugaugugguauugggggccuucccuguacucuauuguuagccccuucaucccgcuccugccuauuuucuuuugccuuuggguguauaucugaggacuaguuauaagacugacuagcccgaugggccucccaacgggcccuccuccccuccuugcaccgagauuaauaaaaaaaaaaaaaaaaaaaaaaaaaaaaaaaaaaaaaaaaaaaaaaaaaaaaaaaaaaaaaaaaugcaucccccccccccccccccccccccccccccccaaaggcucuuuucagagccaccagaauu

SEQ ID NO: 1691 - RNA, 676 nt, Artificial Sequence
  mRNA Design i-3 (A64-N5-C30-hSL-N5) comprising derived and/or modified sequence from Pf(3D7)__XP_001351122.1__HsALB_Pf-CSP(19-152) (opt5)
gggagaaagcuuaccaugaagugggugaccuucaucagccugcucuuucuguucuccucugccuacagccuuuuucaggaguaucaaugcuacggcuccucuagcaacacaagaguccugaaugaacucaacuaugacaaugcugggacgaaccuguacaaugagcuugaaaugaacuauuacggaaaacaggagaauugguauucccugaagaaaaacucucggagccucggcgaaaaugaugacgggaacaaugaggauaacgagaagcugcgcaaacccaagcacaagaaacugaagcagccugccgacggaaauccggaucccaacgcgaauccuaacguugaccccaacgcuaauccuaacguggaucccaaugccaacccuaauguggacccgaacgccaaucccaacgcuaauccuaacgccaaucccaacgcuaauccuaacgccaaucccaacgcgaacccgugaggacuaguuauaagacugacuagcccgaugggccucccaacgggcccuccuccccuccuugcaccgagauuaauaaaaaaaaaaaaaaaaaaaaaaaaaaaaaaaaaaaaaaaaaaaaaaaaaaaaaaaaaaaaaaaaugcaucccccccccccccccccccccccccccccccaaaggcucuuuucagagccaccagaauu

SEQ ID NO: 1692 - RNA, 796 nt, Artificial Sequence
  mRNA Design i-3 (A64-N5-C30-hSL-N5) comprising derived and/or modified sequence from Pf(3D7)__XP_001351122.1__HsALB_Pf-CSP(19-192) (opt5)
gggagaaagcuuaccaugaagugggugaccuucaucagccugcucuuucuguucuccucugccuacagccuuuuucaggaguaucaaugcuacggcuccucuagcaacacaagaguccugaaugaacucaacuaugacaaugcugggacgaaccuguacaaugagcuugaaaugaacuauuacggaaaacaggagaauugguauucccugaagaaaaacucucggagccucggcgaaaaugaugacgggaacaaugaggauaacgagaagcugcgcaaacccaagcacaagaaacugaagcagccugccgacggaaauccggaucccaacgcgaauccuaacguugaccccaacgcuaauccuaacguggaucccaaugccaacccuaauguggacccgaacgccaaucccaacgcuaauccuaacgccaaucccaacgcuaauccuaacgccaaucccaacgcgaacccgaaugccaacccuaaugcuaaccccaaugccaacccuaaugcuaaccccaaugccaaccccaaugcgaacccuaaugccaacccgaaugcuaaccccaacgccaauccuaacgcuaaucccugaggacuaguuauaagacugacuagcccgaugggccucccaacgggcccuccuccccuccuugcaccgagauuaauaaaaaaaaaaaaaaaaaaaaaaaaaaaaaaaaaaaaaaaaaaaaaaaaaaaaaaaaaaaaaaaaugcaucccccccccccccccccccccccccccccccaaaggcucuuuucagagccaccagaauu

SEQ ID NO: 1693 - RNA, 1036 nt, Artificial Sequence
  mRNA Design i-3 (A64-N5-C30-hSL-N5) comprising derived and/or modified sequence from Pf(3D7)__XP_001351122.1__HsALB_Pf-CSP(19-272) (opt5)
gggagaaagcuuaccaugaagugggugaccuucaucagccugcucuuucuguucuccucugccuacagccuuuuucaggaguaucaaugcuacggcuccucuagcaacacaagaguccugaaugaacucaacuaugacaaugcugggacgaaccuguacaaugagcuugaaaugaacuauuacggaaaacaggagaauugguauucccugaagaaaaacucucggagccucggcgaaaaugaugacgggaacaaugaggauaacgagaagcugcgcaaacccaagcacaagaaacugaagcagccugccgacggaaauccggaucccaacgcgaauccuaacguugaccccaacgcuaauccuaacguggaucccaaugccaacccuaauguggacccgaacgccaaucccaacgcuaauccuaacgccaaucccaacgcuaauccuaacgccaaucccaacgcgaacccgaaugccaacccuaaugcuaaccccaaugccaacccuaaugcuaaccccaaugccaaccccaaugcgaacccuaaugccaacccgaaugcuaaccccaacgccaauccuaacgcuaaucccaacgccaauccuaacgucgaucccaaugccaacccgaaugcuaacccuaaugcgaaccccaaugccaacccuaaugcuaaccccaacgccaauccuaacgccaaucccaacgcuaauccgaacgccaauccuaacgcgaaucccaacgcuaaucccaacgccaauccuaacgccaauccgaacgcuaaucccaacgccaacccuaaugcuaaccccaaugccaacccuaaugcgaaccccugaggacuaguuauaagacugacuagcccgaugggccucccaacgggcccuccuccccuccuugcaccgagauuaauaaaaaaaaaaaaaaaaaaaaaaaaaaaaaaaaaaaaaaaaaaaaaaaaaaaaaaaaaaaaaaaaugcaucccccccccccccccccccccccccccccccaaaggcucuuuucagagccaccagaauu

SEQ ID NO: 1694 - RNA, 1198 nt, Artificial Sequence
  mRNA Design i-3 (A64-N5-C30-hSL-N5) comprising derived and/or modified sequence from Pf(3D7)__XP_001351122.1__HsALB_Pf-CSP(19-272)_L(AAY)_Pf-CSP(310-3 27)_L(AAY)_Pf-CSP(346-375) (opt5)
gggagaaagcuuaccaugaagugggugaccuucaucagccugcucuuucuguucuccucugccuacagccuuuuucaggaguaucaaugcuacggcuccucuagcaacacaagaguccugaaugaacucaacuaugacaaugcugggacgaaccuguacaaugagcuugaaaugaacuauuacggaaaacaggagaauugguauucccugaagaaaaacucucggagccucggcgaaaaugaugacgggaacaaugaggauaacgagaagcugcgcaaacccaagcacaagaaacugaagcagccugccgacggaaauccggaucccaacgcgaauccuaacguugaccccaacgcuaauccuaacguggaucccaaugccaacccuaauguggacccgaacgccaaucccaacgcuaauccuaacgccaaucccaacgcuaauccuaacgccaaucccaacgcgaacccgaaugccaacccuaaugcuaaccccaaugccaacccuaaugcuaaccccaaugccaaccccaaugcgaacccuaaugccaacccgaaugcuaaccccaacgccaauccuaacgcuaaucccaacgccaauccuaacgucgaucccaaugccaacccgaaugcuaacccuaaugcgaaccccaaugccaacccuaaugcuaaccccaacgccaauccuaacgccaaucccaacgcuaauccgaacgccaauccuaacgcgaaucccaacgcuaaucccaacgccaauccuaacgccaauccgaacgcuaaucccaacgccaacccuaaugcuaaccccaaugccaacccuaaugcgaaccccgccgcuuacgaaccuuccgacaaacauauuaaggaguaccucaauaaaauccagaacagccuggccgcuuauauuaagcccggcucugccaauaagccgaaagaugaacuugacuacgcgaacgauaucgagaagaaaauuuguaagauggagaaaugcuccugaggacuaguuauaagacugacuagcccgaugggccucccaacgggcccuccuccccuccuugcaccgagauuaauaaaaaaaaaaaaaaaaaaaaaaaaaaaaaaaaaaaaaaaaaaaaaaaaaaaaaaaaaaaaaaaaugcaucccccccccccccccccccccccccccccccaaaggcucuuuucagagccaccagaauu

SEQ ID NO: 1695 - RNA, 1159 nt, Artificial Sequence
  mRNA Design i-3 (A64-N5-C30-hSL-N5) comprising derived and/or modified sequence from Pf(3D7)__XP_001351122.1__HsALB_Pf-CSP(19-272)_L(AAY)_Pf-CSP(346-3 65)_L(AAY)_P2 (opt5)
gggagaaagcuuaccaugaagugggugaccuucaucagccugcucuuucuguucuccucugccuacagccuuuuucaggaguaucaaugcuacggcuccucuagcaacacaagaguccugaaugaacucaacuaugacaaugcugggacgaaccuguacaaugagcuugaaaugaacuauuacggaaaacaggagaauugguauucccugaagaaaaacucucggagccucggcgaaaaugaugacgggaacaaugaggauaacgagaagcugcgcaaacccaagcacaagaaacugaagcagccugccgacggaaauccggaucccaacgcgaauccuaacguugaccccaacgcuaauccuaacguggaucccaaugccaacccuaauguggacccgaacgccaaucccaacgcuaauccuaacgccaaucccaacgcuaauccuaacgccaaucccaacgcgaacccgaaugccaacccuaaugcuaaccccaaugccaacccuaaugcuaaccccaaugccaaccccaaugcgaacccuaaugccaacccgaaugcuaaccccaacgccaauccuaacgcuaaucccaacgccaauccuaacgucgaucccaaugccaacccgaaugcuaacccuaaugcgaaccccaaugccaacccuaaugcuaaccccaacgccaauccuaacgccaaucccaacgcuaauccgaacgccaauccuaacgcgaaucccaacgcuaaucccaacgccaauccuaacgccaauccgaacgcuaaucccaacgccaacccuaaugcuaaccccaaugccaacccuaaugcgaaccccgccgcuuacauuaaaccuggcuccgccaauaagcccaaagacgaacucgauuacgcuaacgacaucgaggccgcguaucaguacauuaaggccaauagcaaguucaucgggauuaccgaacugugaggacuaguuauaagacugacuagcccgaugggccucccaacgggcccuccuccccuccuugcaccgagauuaauaaaaaaaaaaaaaaaaaaaaaaaaaaaaaaaaaaaaaaaaaaaaaaaaaaaaaaaaaaaaaaaaugcaucccccccccccccccccccccccccccccccaaaggcucuuuucagagccaccagaauu

SEQ ID NO: 1696 - RNA, 1153 nt, Artificial Sequence
  mRNA Design i-3 (A64-N5-C30-hSL-N5) comprising derived and/or modified sequence from Pf(3D7)__XP_001351122.1__HsALB_Pf-CSP(19-272)_L(AAY)_Pf-CSP(346-3 65)_L(AAY)_PADRE (opt5)
gggagaaagcuuaccaugaagugggugaccuucaucagccugcucuuucuguucuccucugccuacagccuuuuucaggaguaucaaugcuacggcuccucuagcaacacaagaguccugaaugaacucaacuaugacaaugcugggacgaaccuguacaaugagcuugaaaugaacuauuacggaaaacaggagaauugguauucccugaagaaaaacucucggagccucggcgaaaaugaugacgggaacaaugaggauaacgagaagcugcgcaaacccaagcacaagaaacugaagcagccugccgacggaaauccggaucccaacgcgaauccuaacguugaccccaacgcuaauccuaacguggaucccaaugccaacccuaauguggacccgaacgccaaucccaacgcuaauccuaacgccaaucccaacgcuaauccuaacgccaaucccaacgcgaacccgaaugccaacccuaaugcuaaccccaaugccaacccuaaugcuaaccccaaugccaaccccaaugcgaacccuaaugccaacccgaaugcuaaccccaacgccaauccuaacgcuaaucccaacgccaauccuaacgucgaucccaaugccaacccgaaugcuaacccuaaugcgaaccccaaugccaacccuaaugcuaaccccaacgccaauccuaacgccaaucccaacgcuaauccgaacgccaauccuaacgcgaaucccaacgcuaaucccaacgccaauccuaacgccaauccgaacgcuaaucccaacgccaacccuaaugcuaaccccaaugccaacccuaaugcgaaccccgccgcuuacauuaaaccuggcuccgccaauaagcccaaagacgaacucgauuacgcuaacgacaucgaggccgcguaugccaaguucguggcugccuggacccugaaggcugccgccugaggacuaguuauaagacugacuagcccgaugggccucccaacgggcccuccuccccuccuugcaccgagauuaauaaaaaaaaaaaaaaaaaaaaaaaaaaaaaaaaaaaaaaaaaaaaaaaaaaaaaaaaaaaaaaaaugcaucccccccccccccccccccccccccccccccaaaggcucuuuucagagccaccagaauu

SEQ ID NO: 1697 - RNA, 1210 nt, Artificial Sequence
  mRNA Design i-3 (A64-N5-C30-hSL-N5) comprising derived and/or modified sequence from Pf(3D7)__XP_001351122.1__HsALB_Pf-CSP(19-272)_L(G4S)_Pf-CSP(310-3 27)_L(G4S)_Pf-CSP(346-375) (opt5)
gggagaaagcuuaccaugaagugggugaccuucaucagccugcucuuucuguucuccucugccuacagccuuuuucaggaguaucaaugcuacggcuccucuagcaacacaagaguccugaaugaacucaacuaugacaaugcugggacgaaccuguacaaugagcuugaaaugaacuauuacggaaaacaggagaauugguauucccugaagaaaaacucucggagccucggcgaaaaugaugacgggaacaaugaggauaacgagaagcugcgcaaacccaagcacaagaaacugaagcagccugccgacggaaauccggaucccaacgcgaauccuaacguugaccccaacgcuaauccuaacguggaucccaaugccaacccuaauguggacccgaacgccaaucccaacgcuaauccuaacgccaaucccaacgcuaauccuaacgccaaucccaacgcgaacccgaaugccaacccuaaugcuaaccccaaugccaacccuaaugcuaaccccaaugccaaccccaaugcgaacccuaaugccaacccgaaugcuaaccccaacgccaauccuaacgcuaaucccaacgccaauccuaacgucgaucccaaugccaacccgaaugcuaacccuaaugcgaaccccaaugccaacccuaaugcuaaccccaacgccaauccuaacgccaaucccaacgcuaauccgaacgccaauccuaacgcgaaucccaacgcuaaucccaacgccaauccuaacgccaauccgaacgcuaaucccaacgccaacccuaaugcuaaccccaaugccaacccuaaugcgaaccccggcgggggaggcuccgaaccuagcgacaaacauauuaaggaguaccucaauaaaauccagaacucucugggcgggggaggcuccauuaagcccgggagcgccaauaagccgaaagaugaacuugacuacgcuaacgauaucgagaagaaaauuuguaagauggagaaaugcucuugaggacuaguuauaagacugacuagcccgaugggccucccaacgggcccuccuccccuccuugcaccgagauuaauaaaaaaaaaaaaaaaaaaaaaaaaaaaaaaaaaaaaaaaaaaaaaaaaaaaaaaaaaaaaaaaaugcaucccccccccccccccccccccccccccccccaaaggcucuuuucagagccaccagaauu

SEQ ID NO: 1698 - RNA, 1195 nt, Artificial Sequence
  mRNA Design i-3 (A64-N5-C30-hSL-N5) comprising derived and/or modified sequence from Pf(3D7)__XP_001351122.1__HsALB_Pf-CSP(19-272)_L(G4S)_Pf-CSP(310-3 27)_Pf-CSP(346-375) (opt5)
gggagaaagcuuaccaugaagugggugaccuucaucagccugcucuuucuguucuccucugccuacagccuuuuucaggaguaucaaugcuacggcuccucuagcaacacaagaguccugaaugaacucaacuaugacaaugcugggacgaaccuguacaaugagcuugaaaugaacuauuacggaaaacaggagaauugguauucccugaagaaaaacucucggagccucggcgaaaaugaugacgggaacaaugaggauaacgagaagcugcgcaaacccaagcacaagaaacugaagcagccugccgacggaaauccggaucccaacgcgaauccuaacguugaccccaacgcuaauccuaacguggaucccaaugccaacccuaauguggacccgaacgccaaucccaacgcuaauccuaacgccaaucccaacgcuaauccuaacgccaaucccaacgcgaacccgaaugccaacccuaaugcuaaccccaaugccaacccuaaugcuaaccccaaugccaaccccaaugcgaacccuaaugccaacccgaaugcuaaccccaacgccaauccuaacgcuaaucccaacgccaauccuaacgucgaucccaaugccaacccgaaugcuaacccuaaugcgaaccccaaugccaacccuaaugcuaaccccaacgccaauccuaacgccaaucccaacgcuaauccgaacgccaauccuaacgcgaaucccaacgcuaaucccaacgccaauccuaacgccaauccgaacgcuaaucccaacgccaacccuaaugcuaaccccaaugccaacccuaaugcgaaccccggcgggggaggcuccgaaccuagcgacaaacauauuaaggaguaccucaauaaaauccagaacucucugauuaagcccggcuccgccaauaagccgaaagaugaacuugacuacgcuaacgauaucgagaagaaaauuuguaagauggagaaaugcagcugaggacuaguuauaagacugacuagcccgaugggccucccaacgggcccuccuccccuccuugcaccgagauuaauaaaaaaaaaaaaaaaaaaaaaaaaaaaaaaaaaaaaaaaaaaaaaaaaaaaaaaaaaaaaaaaaugcaucccccccccccccccccccccccccccccccaaaggcucuuuucagagccaccagaauu

SEQ ID NO: 1699 - RNA, 1195 nt, Artificial Sequence
  mRNA Design i-3 (A64-N5-C30-hSL-N5) comprising derived and/or modified sequence from Pf(3D7)__XP_001351122.1__HsALB_Pf-CSP(19-325) (opt5)
gggagaaagcuuaccaugaagugggugaccuucaucagccugcucuuucuguucuccucugccuacagccuuuuucaggaguaucaaugcuacggcuccucuagcaacacaagaguccugaaugaacucaacuaugacaaugcugggacgaaccuguacaaugagcuugaaaugaacuauuacggaaaacaggagaauugguauucccugaagaaaaacucucggagccucggcgaaaaugaugacgggaacaaugaggauaacgagaagcugcgcaaacccaagcacaagaaacugaagcagccugccgacggaaauccggaucccaacgcgaauccuaacguugaccccaacgcuaauccuaacguggaucccaaugccaacccuaauguggacccgaacgccaaucccaacgcuaauccuaacgccaaucccaacgcuaauccuaacgccaaucccaacgcgaacccgaaugccaacccuaaugcuaaccccaaugccaacccuaaugcuaaccccaaugccaaccccaaugcgaacccuaaugccaacccgaaugcuaaccccaacgccaauccuaacgcuaaucccaacgccaauccuaacgucgaucccaaugccaacccgaaugcuaacccuaaugcgaaccccaaugccaacccuaaugcuaaccccaacgccaauccuaacgccaaucccaacgcuaauccgaacgccaauccuaacgcgaaucccaacgcuaaucccaacgccaauccuaacgccaauccgaacgcuaaucccaacgccaacccuaaugcuaaccccaaugccaacccuaaugcgaaccccaauaaaaacaaucagggcaacgggcaaggacauaauaugccuaacgaccccaauagaaacguggaugaaaaugccaacgcuaacuccgccguuaagaauaacaauaacgaggaaccgagcgacaaacacauuaaggaguaccucaauaagauccagaacugaggacuaguuauaagacugacuagcccgaugggccucccaacgggcccuccuccccuccuugcaccgagauuaauaaaaaaaaaaaaaaaaaaaaaaaaaaaaaaaaaaaaaaaaaaaaaaaaaaaaaaaaaaaaaaaaugcaucccccccccccccccccccccccccccccccaaaggcucuuuucagagccaccagaauu

SEQ ID NO: 1700 - RNA, 1372 nt, Artificial Sequence
  mRNA Design i-3 (A64-N5-C30-hSL-N5) comprising derived and/or modified sequence from Pf(3D7)__XP_001351122.1__HsALB_Pf-CSP(19-384) (opt5)
gggagaaagcuuaccaugaagugggugaccuucaucagccugcucuuucuguucuccucugccuacagccuuuuucaggaguaucaaugcuacggcuccucuagcaacacaagagugcugaaugaacucaacuaugacaaugcugggacgaaccuguacaaugagcuugaaaugaacuauuacggaaaacaggagaauugguauucccugaagaaaaacucucggagccucggcgaaaaugaugacgggaacaaugaggauaacgagaagcugcgcaaacccaagcacaagaaacugaagcagccugccgacggaaauccggaucccaacgcgaauccuaacguugaccccaacgcuaauccuaacguggaucccaaugccaacccuaauguggacccgaacgccaaucccaacgcuaauccuaacgccaaucccaacgcuaauccuaacgccaaucccaacgcgaacccgaaugccaacccuaaugcuaaccccaaugccaacccuaaugcuaaccccaaugccaaccccaaugcgaacccuaaugccaacccgaaugcuaaccccaacgccaauccuaacgcuaaucccaacgccaauccuaacgucgaucccaaugccaacccgaaugcuaacccuaaugcgaaccccaaugccaacccuaaugcuaaccccaacgccaauccuaacgccaaucccaacgcuaauccgaacgccaauccuaacgcgaaucccaacgcuaaucccaacgccaauccuaacgccaauccgaacgcuaaucccaacgccaacccuaaugcuaaccccaaugccaacccuaaugcgaaccccaauaaaaacaaucagggcaacgggcaaggacauaauaugccuaacgaccccaauagaaacguggaugaaaaugccaacgcuaacuccgccguuaagaauaacaauaacgaggaaccgagcgacaaacacauuaaggaguaccucaauaagauccagaacucucuguccaccgaguggagcccuuguucugugacaugcggcaauggcauucagguccggaucaaacccggguccgcuaacaagccuaaagaugaacuugacuacgccaaugacauugagaagaaaaucuguaagauggaaaaaugcagcucuguguucaacguugucaauuccagcugaggacuaguuauaagacugacuagcccgaugggccucccaacgggcccuccuccccuccuugcaccgagauuaauaaaaaaaaaaaaaaaaaaaaaaaaaaaaaaaaaaaaaaaaaaaaaaaaaaaaaaaaaaaaaaaaugcaucccccccccccccccccccccccccccccccaaaggcucuuuucagagccaccagaauu

SEQ ID NO: 1701 - RNA, 1510 nt, Artificial Sequence
  mRNA Design i-3 (A64-N5-C30-hSL-N5) comprising derived and/or modified sequence from Pf(3D7)__XP_001351122.1__HsALB_Pf-CSP(19-384)_TM domain HA (opt5)
gggagaaagcuuaccaugaagugggugaccuucaucagccugcucuuucuguucuccucugccuacagccuuuuucaggaguaucaaugcuacggcuccucuagcaacacaagaguccugaaugaacucaacuaugacaaugcugggacgaaccuguacaaugagcuugaaaugaacuauuacggaaaacaggagaauugguauucccugaagaaaaacucucggagccucggcgaaaaugaugacgggaacaaugaggauaacgagaagcugcgcaaacccaagcacaagaaacugaagcagccugccgacggaaauccggaucccaacgcgaauccuaacguugaccccaacgcuaauccuaacguggaucccaaugccaacccuaauguggacccgaacgccaaucccaacgcuaauccuaacgccaaucccaacgcuaauccuaacgccaaucccaacgcgaacccgaaugccaacccuaaugcuaaccccaaugccaacccuaaugcuaaccccaaugccaaccccaaugcgaacccuaaugccaacccgaaugcuaaccccaacgccaauccuaacgcuaaucccaacgccaauccuaacgucgaucccaaugccaacccgaaugcuaacccuaaugcgaaccccaaugccaacccuaaugcuaaccccaacgccaauccuaacgccaaucccaacgcuaauccgaacgccaauccuaacgcgaaucccaacgcuaaucccaacgccaauccuaacgccaauccgaacgcuaaucccaacgccaacccuaaugcuaaccccaaugccaacccuaaugcgaaccccaauaaaaacaaucagggcaacgggcaaggacauaauaugccuaacgaccccaauagaaacguggaugaaaaugccaacgcuaacuccgccguuaagaauaacaauaacgaggaaccgagcgacaaacacauuaaggaguaccucaauaagauccagaacucucuguccaccgaguggagcccuuguucugugacaugcggcaauggcauucagguccggaucaaacccggguccgcuaacaagccuaaagaugaacuugacuacgccaaugacauugagaagaaaaucuguaagauggaaaaaugcagcucuguguucaacguugucaauuccagcaagcuggaguccacccgcaucuaucagauucucgcgaucuacucuacaguggccagcucccuggugcuuguggucagccugggagcuauuucuuuuuggauguguuccaacggcagccuccaaugcagaaucuguauuugaggacuaguuauaagacugacuagcccgaugggccucccaacgggcccuccuccccuccuugcaccgagauuaauaaaaaaaaaaaaaaaaaaaaaaaaaaaaaaaaaaaaaaaaaaaaaaaaaaaaaaaaaaaaaaaaugcaucccccccccccccccccccccccccccccccaaaggcucuuuucagagccaccagaauu

SEQ ID NO: 1702 - RNA, 1222 nt, Artificial Sequence
  mRNA Design i-3 (A64-N5-C30-hSL-N5) comprising derived and/or modified sequence from Pf(3D7)__XP_001351122.1__HsALB_Pf-CSP(82-397) (opt5)
gggagaaagcuuaccaugaagugggugaccuucaucagccugcucuuucuguucuccucugccuacagcgacaacgagaaacuuagaaagcccaaacacaagaaacugaagcagccugcugauggcaauccggaccccaacgccaauccuaacgucgaucccaaugcgaacccuaauguugaccccaacgcuaauccuaacguggauccgaaugccaaccccaaugccaacccuaaugcuaaccccaacgccaauccuaacgcuaaucccaacgccaauccgaacgcgaauccuaacgccaaucccaacgcuaauccuaacgccaaucccaacgcuaaucccaacgccaacccuaaugcgaacccgaaugccaaccccaaugcuaacccuaaugccaaccccaaugcuaacccuaauguggaccccaacgccaauccgaacgccaauccuaacgcuaaccccaaugcgaacccuaaugccaaccccaaugcuaacccuaaugccaaccccaaugccaacccgaaugcuaacccuaaugccaaccccaaugcgaaccccaacgcuaauccuaacgccaauccgaacgccaaucccaacgcuaauccuaacgccaaucccaacgcuaauccuaacgccaaucccaacaagaauaaccaagggaauggacagggccauaacaugccuaacgaucccaaucggaacgucgacgaaaaugcgaacgccaauuccgcugugaaaaacaauaacaaugaggaaccgucugauaagcacauuaaagaguaucucaacaagauccagaauagccuguccacagaauggucuccuugcagcguuacgugugggaacggcauucaggugcgcaucaaacccggauccgccaauaagccuaaggacgagcuugauuacgcuaacgacauugagaaaaagaucugcaaaauggaaaaguguagcucugucuuuaaugugguuaacuccagcaucgggcugauuauggugcucucuuuccuguuucugaacugaggacuaguuauaagacugacuagcccgaugggccucccaacgggcccuccuccccuccuugcaccgagauuaauaaaaaaaaaaaaaaaaaaaaaaaaaaaaaaaaaaaaaaaaaaaaaaaaaaaaaaaaaaaaaaaaugcaucccccccccccccccccccccccccccccccaaaggcucuuuucagagccaccagaauu

SEQ ID NO: 1703 - RNA, 574 nt, Artificial Sequence
  mRNA Design i-3 (A64-N5-C30-hSL-N5) comprising derived and/or modified sequence from Pf(3D7)__XP_001351122.1__HsALB_Pf-CSP(93-192) (opt5)
gggagaaagcuuaccaugaagugggugaccuucaucagccugcucuuucuguucuccucugccuacagcaaacuuaagcagcccgcugacggcaacccugauccgaaugccaaccccaaugucgacccuaacgcgaaucccaacguugauccuaaugcuaaccccaauguggacccuaacgccaauccgaacgccaaucccaacgcuaauccuaacgccaaccccaaugcuaacccuaaugccaaccccaaugcgaacccgaaugccaacccuaaugcuaaccccaaugccaacccuaaugcuaaccccaaugccaaccccaacgcgaauccuaacgccaauccgaacgcuaaucccaacgccaauccuugaggacuaguuauaagacugacuagcccgaugggccucccaacgggcccuccuccccuccuugcaccgagauuaauaaaaaaaaaaaaaaaaaaaaaaaaaaaaaaaaaaaaaaaaaaaaaaaaaaaaaaaaaaaaaaaaugcaucccccccccccccccccccccccccccccccaaaggcucuuuucagagccaccagaauu

SEQ ID NO: 1704 - RNA, 814 nt, Artificial Sequence
  mRNA Design i-3 (A64-N5-C30-hSL-N5) comprising derived and/or modified sequence from Pf(3D7)__XP_001351122.1__HsALB_Pf-CSP(93-272) (opt5)
gggagaaagcuuaccaugaagugggugaccuucaucagccugcucuuucuguucuccucugccuacagcaaacuuaagcagcccgcugacggcaacccugauccgaaugccaaccccaaugucgacccuaacgcgaaucccaacguugauccuaaugcuaaccccaauguggacccuaacgccaauccgaacgccaaucccaacgcuaauccuaacgccaaccccaaugcuaacccuaaugccaaccccaaugcgaacccgaaugccaacccuaaugcuaaccccaaugccaacccuaaugcuaaccccaaugccaaccccaacgcgaauccuaacgccaauccgaacgcuaaucccaacgccaauccuaacgcuaaucccaacguggauccuaaugccaaccccaaugccaacccgaaugcuaacccuaacgcgaaucccaacgccaauccuaacgcuaaucccaacgccaauccuaacgccaaucccaacgcuaauccgaacgccaauccuaacgcgaaucccaacgcuaaccccaaugccaacccuaaugccaacccgaaugcuaaccccaaugccaacccuaaugcuaaccccaaugccaacccuugaggacuaguuauaagacugacuagcccgaugggccucccaacgggcccuccuccccuccuugcaccgagauuaauaaaaaaaaaaaaaaaaaaaaaaaaaaaaaaaaaaaaaaaaaaaaaaaaaaaaaaaaaaaaaaaaugcaucccccccccccccccccccccccccccccccaaaggcucuuuucagagccaccagaauu

SEQ ID NO: 1705 - RNA, 1189 nt, Artificial Sequence
  mRNA Design i-3 (A64-N5-C30-hSL-N5) comprising derived and/or modified sequence from Pf(3D7)__XP_001351122.1__HsALB_Pf-CSP(93-397) (opt5)
gggagaaagcuuaccaugaagugggugaccuucaucagccugcucuuucuguucuccucugccuacagcaaacuuaagcagcccgcugacggcaacccugauccgaaugccaaccccaaugucgacccuaacgcgaaucccaacguugauccuaaugcuaaccccaauguggacccuaacgccaauccgaacgccaaucccaacgcuaauccuaacgccaaccccaaugcuaacccuaaugccaaccccaaugcgaacccgaaugccaacccuaaugcuaaccccaaugccaacccuaaugcuaaccccaaugccaaccccaacgcgaauccuaacgccaauccgaacgcuaaucccaacgccaauccuaacgcuaaucccaacguggauccuaaugccaaccccaaugccaacccgaaugcuaacccuaacgcgaaucccaacgccaauccuaacgcuaaucccaacgccaauccuaacgccaaucccaacgcuaauccgaacgccaauccuaacgcgaaucccaacgcuaaccccaaugccaacccuaaugccaacccgaaugcuaaccccaaugccaacccuaaugcuaaccccaaugccaacccuaauaaaaacaaucaagggaacggacagggccacaauaugcccaacgacccuaacagaaaugucgaugagaacgcgaaugccaacuccgcugugaagaauaacaauaacgaggaacccucugacaaacauauuaaggaauaucugaauaagauccagaacagccucuccacagaguggucuccgugcagcguuacgugugggaauggcauucaggugcggaucaaaccuggauccgccaacaagcccaaagaugaacuggacuacgcuaaugauauugagaagaaaaucugcaagauggagaaguguagcucugucuuuaacgugguuaauuccagcaucgggcuuauuauggugcugucuuuccucuuucugaacugaggacuaguuauaagacugacuagcccgaugggccucccaacgggcccuccuccccuccuugcaccgagauuaauaaaaaaaaaaaaaaaaaaaaaaaaaaaaaaaaaaaaaaaaaaaaaaaaaaaaaaaaaaaaaaaaugcaucccccccccccccccccccccccccccccccaaaggcucuuuucagagccaccagaauu

SEQ ID NO: 1706 - RNA, 559 nt, Artificial Sequence
  mRNA Design i-3 (A64-N5-C30-hSL-N5) comprising derived and/or modified sequence from Pf(3D7)__XP_001351122.1__HsALB_Pf-CSP(98-192) (opt5)
gggagaaagcuuaccaugaagugggugaccuucaucagccugcucuuucuguucuccucugccuacagcgcugacggcaaccccgauccuaaugccaacccgaaugucgaccccaacgcgaauccuaacguugaucccaaugcuaacccuaauguggaccccaacgccaauccuaacgccaauccgaacgcuaaucccaacgccaacccuaaugcuaaccccaaugccaacccuaaugcgaaccccaaugccaacccgaaugcuaacccuaaugccaaccccaaugcuaacccuaaugccaaccccaacgcgaaucccaacgccaauccuaacgcuaauccgaacgccaaucccugaggacuaguuauaagacugacuagcccgaugggccucccaacgggcccuccuccccuccuugcaccgagauuaauaaaaaaaaaaaaaaaaaaaaaaaaaaaaaaaaaaaaaaaaaaaaaaaaaaaaaaaaaaaaaaaaugcaucccccccccccccccccccccccccccccccaaaggcucuuuucagagccaccagaauu

SEQ ID NO: 1707 - RNA, 799 nt, Artificial Sequence
  mRNA Design i-3 (A64-N5-C30-hSL-N5) comprising derived and/or modified sequence from Pf(3D7)__XP_001351122.1__HsALB_Pf-CSP(98-272) (opt5)
gggagaaagcuuaccaugaagugggugaccuucaucagccugcucuuucuguucuccucugccuacagcgcugacggcaaccccgauccuaaugccaacccgaaugucgaccccaacgcgaauccuaacguugaucccaaugcuaacccuaauguggaccccaacgccaauccuaacgccaauccgaacgcuaaucccaacgccaacccuaaugcuaaccccaaugccaacccuaaugcgaaccccaaugccaacccgaaugcuaacccuaaugccaaccccaaugcuaacccuaaugccaaccccaacgcgaaucccaacgccaauccuaacgcuaauccgaacgccaaucccaacgcuaauccuaacguggaucccaaugccaacccuaaugccaaccccaaugcuaacccgaacgcgaauccuaacgccaaucccaacgcuaauccuaacgccaaucccaacgccaauccuaacgcuaaucccaacgccaauccgaacgcgaauccuaacgcuaaccccaaugccaaccccaaugccaacccuaaugcuaacccgaaugccaaccccaaugcuaacccuaaugccaaccccugaggacuaguuauaagacugacuagcccgaugggccucccaacgggcccuccuccccuccuugcaccgagauuaauaaaaaaaaaaaaaaaaaaaaaaaaaaaaaaaaaaaaaaaaaaaaaaaaaaaaaaaaaaaaaaaaugcaucccccccccccccccccccccccccccccccaaaggcucuuuucagagccaccagaauu

SEQ ID NO: 1708 - RNA, 1105 nt, Artificial Sequence
  mRNA Design i-3 (A64-N5-C30-hSL-N5) comprising derived and/or modified sequence from Pf(3D7)__XP_001351122.1__HsALB_Pf-CSP(98-374) (opt5)
gggagaaagcuuaccaugaagugggugaccuucaucagccugcucuuucuguucuccucugccuacagcgcugacggcaaccccgauccuaaugccaacccgaaugucgaccccaacgcgaauccuaacguugaucccaaugcuaacccuaauguggaccccaacgccaauccuaacgccaauccgaacgcuaaucccaacgccaacccuaaugcuaaccccaaugccaacccuaaugcgaaccccaaugccaacccgaaugcuaacccuaaugccaaccccaaugcuaacccuaaugccaaccccaacgcgaaucccaacgccaauccuaacgcuaauccgaacgccaaucccaacgcuaauccuaacguggaucccaaugccaacccuaaugccaaccccaaugcuaacccgaacgcgaauccuaacgccaaucccaacgcuaauccuaacgccaaucccaacgccaauccuaacgcuaaucccaacgccaauccgaacgcgaauccuaacgcuaaccccaaugccaaccccaaugccaacccuaaugcuaacccgaaugccaaccccaaugcuaacccuaaugccaaccccaauaaaaacaaucaggggaacggacaaggccacaauaugccuaacgaccccaacagaaaugucgaugagaacgcgaaugccaacuccgcugugaagaauaacaauaacgaggaaccuucugacaaacauauuaaggaauaucuuaauaaaauccagaacagccuguccacagaguggucucccugcagcguuacgugugggaauggcauucaggugcggaucaagccgggauccgccaacaagccuaaagaugaacucgacuacgcuaaugauauugagaagaaaaucugcaagauggagaaauguugaggacuaguuauaagacugacuagcccgaugggccucccaacgggcccuccuccccuccuugcaccgagauuaauaaaaaaaaaaaaaaaaaaaaaaaaaaaaaaaaaaaaaaaaaaaaaaaaaaaaaaaaaaaaaaaaugcaucccccccccccccccccccccccccccccccaaaggcucuuuucagagccaccagaauu

SEQ ID NO: 1709 - RNA, 1174 nt, Artificial Sequence
  mRNA Design i-3 (A64-N5-C30-hSL-N5) comprising derived and/or modified sequence from Pf(3D7)__XP_001351122.1__HsALB_Pf-CSP(98-397) (opt5)
gggagaaagcuuaccaugaagugggugaccuucaucagccugcucuuucuguucuccucugccuacagcgcugacggcaaccccgauccuaaugccaacccgaaugucgaccccaacgcgaauccuaacguugaucccaaugcuaacccuaauguggaccccaacgccaauccuaacgccaauccgaacgcuaaucccaacgccaacccuaaugcuaaccccaaugccaacccuaaugcgaaccccaaugccaacccgaaugcuaacccuaaugccaaccccaaugcuaacccuaaugccaaccccaacgcgaaucccaacgccaauccuaacgcuaauccgaacgccaaucccaacgcuaauccuaacguggaucccaaugccaacccuaaugccaaccccaaugcuaacccgaacgcgaauccuaacgccaaucccaacgcuaauccuaacgccaaucccaacgccaauccuaacgcuaaucccaacgccaauccgaacgcgaauccuaacgcuaaccccaaugccaaccccaaugccaacccuaaugcuaacccgaaugccaaccccaaugcuaacccuaaugccaaccccaauaaaaacaaucaggggaacggacaaggccacaauaugccuaacgaccccaacagaaaugucgaugagaacgcgaaugccaacuccgcugugaagaauaacaauaacgaggaaccuucugacaaacauauuaaggaauaucuuaauaaaauccagaacagccuguccacagaguggucucccugcagcguuacgugugggaauggcauucaggugcggaucaagccgggauccgccaacaagccuaaagaugaacucgacuacgcuaaugauauugagaagaaaaucugcaagauggagaaauguagcucugucuuuaacgugguuaauuccagcaucgggcugauuauggugcuuucuuuccuguuucucaacugaggacuaguuauaagacugacuagcccgaugggccucccaacgggcccuccuccccuccuugcaccgagauuaauaaaaaaaaaaaaaaaaaaaaaaaaaaaaaaaaaaaaaaaaaaaaaaaaaaaaaaaaaaaaaaaaugcaucccccccccccccccccccccccccccccccaaaggcucuuuucagagccaccagaauu

SEQ ID NO: 1710 - RNA, 1501 nt, Artificial Sequence
  mRNA Design i-3 (A64-N5-C30-hSL-N5) comprising derived and/or modified sequence from Pf(3D7)__XP_001351122.1__HsALB_Pf-CSP(199-377)_L(PVTN)_HBsAg (opt5)
gggagaaagcuuaccaugaagugggugaccuucaucagccugcucuuucuguucuccucugccuacagcgaccccaacgcuaauccuaacgccaauccgaacgcgaaucccaacgcuaauccuaacgccaaucccaacgccaauccuaacgcuaaucccaacgccaauccuaacgcuaacccgaaugccaaccccaaugcgaacccuaaugccaaccccaaugcuaacccuaaugccaaccccaaugcuaacccgaaugccaacccuaaugcgaaccccaacgccaauccuaacaaaaauaaccagggcaaugggcaaggacacaacaugcccaaugaucccaacagaaaugucgacgagaacgcuaaugccaacuccgcuguuaagaauaacaauaacgaggaaccuucugauaaacauauuaaggaauaucuuaacaaaauccagaauagccuguccacagaguggucuccgugcagcgugacguguggcaacgggauucaggugcggaucaagcccggauccgccaauaagccuaaagacgaacucgauuacgccaacgacauugagaagaaaaucugcaagauggagaaauguagcucuguccccgugaccaauauggaaaacaucacauccggcuuucuggggccucuucugguucuccaggcuggauucuuucugcugacccgcauucucacaaucccccaaagccuggauucuugguggaccucccuuaauuuccugggcggcagcccggugugccucgggcagaacucucaguccccuacaagcaaucacucccccaccucuuguccucccauuugcccuggauauagauggaugugucugcggcgcuuuaucauuuuccuuuuuauccugcuccugugccugauuuuccuccugguccuucuggacuaccagggcaugcuccccguguguccgcugaucccugggagcacgaccacaaacaccggacccugcaagacauguaccacgcccgcgcaaggcaauuccauguuuccuagcugcugcuguacaaagccgaccgaugggaacugcacauguauccccauuccuucuuccugggccuucgcuaaauaucuuugggagugggccagcguuagauuuucuuggcugagccuccuggugcccuucguccagugguucgugggacuguccccuaccguguggcucucugccaucuggaugaugugguacuggggccccagccuguauuccauugucagcccuuuuaucccccuucugccgauuuucuuuugccucuggguuuacaucugaggacuaguuauaagacugacuagcccgaugggccucccaacgggcccuccuccccuccuugcaccgagauuaauaaaaaaaaaaaaaaaaaaaaaaaaaaaaaaaaaaaaaaaaaaaaaaaaaaaaaaaaaaaaaaaaugcaucccccccccccccccccccccccccccccccaaaggcucuuuucagagccaccagaauu

SEQ ID NO: 1711 - RNA, 1240 nt, Artificial Sequence
  mRNA Design i-3 (A64-N5-C30-hSL-N5) comprising derived and/or modified sequence from Pb(ANKA)__XP_022712148.1__Pb-CSP (opt5)
gggagaaagcuuaccaugaagaaaugcaccauccugguugucgccagccuccugcuuguuaacucccugcuccccggcuacgggcagaauaagucuauucaagcucagagaaaccugaaugagcuuuguuauaacgaaggaaaugacaacaaacuguaccacgugcucaauagcaagaacggcaaaaucuauaaucggaacacagugaaucgccugcuggccgaugcgccugaggggaagaagaacgaaaagaaaaaugagaaaauugaaagaaacaauaagcucaaacagccgcccccucccccuaaccccaacgacccuccgcccccuaaucccaacgauccucccccgccuaaucccaacgacccucccccucccaauccgaacgaucccccucccccuaaugcuaacgaucccccgccucccaaugccaacgacccugcucccccuaaugccaacgaccccgccccgccuaaugcuaacgaucccgcgcccccuaaugccaacgacccggcucccccuaacgccaaugaucccccucccccuaaccccaaugacccggccccucccaacgcuaaugauccucccccgccuaaccccaaugacccugccccuccccagggaaacaauaacccccaaccgcagccccggccucagccccagccucaaccccagccucagccgcagccccaaccucagccccagccucgcccccaaccgcagccucagcccggcgggaauaacaauaacaagaauaacaacaaugacgauuccuacauccccucugcggagaagauucuggaguucgucaaacagaucagagacagcaucacggaagaguggucccaaugcaacgugaccuguggaucuggcauucggguucgcaagagaaaaggcagcaauaagaaagccgaagaucuuacacuggaggacaucgauaccgagauuugcaagauggacaaauguuccagcaucuuuaacauugugucuaauucccucggguucgucauccugcuugugcugguguuuuucaacugaggacuaguuauaagacugacuagcccgaugggccucccaacgggcccuccuccccuccuugcaccgagauuaauaaaaaaaaaaaaaaaaaaaaaaaaaaaaaaaaaaaaaaaaaaaaaaaaaaaaaaaaaaaaaaaaugcaucccccccccccccccccccccccccccccccaaaggcucuuuucagagccaccagaauu

SEQ ID NO: 1712 - RNA, 1405 nt, Artificial Sequence
  mRNA Design i-3 (A64-N5-C30-hSL-N5) comprising derived and/or modified sequence from Pb(ANKA)__XP_022712148.1__Pb-CSP_L(G4SG4)_TM domain HA (opt5)
gggagaaagcuuaccaugaagaaaugcaccauccugguggucgccagccuccugcuuguuaacucccugcuccccggcuacgggcagaauaagucuauucaagcucagagaaaccugaaugagcuuuguuauaacgaaggaaaugacaacaaacuguaccacgugcucaauagcaagaacggcaaaaucuauaaucggaacacagugaaucgccugcuggccgaugcgccugaggggaagaagaacgaaaagaaaaaugagaaaauugaaagaaacaauaagcucaaacagccgcccccucccccuaaccccaacgacccuccgcccccuaaucccaacgauccucccccgccuaaucccaacgacccucccccucccaauccgaacgaucccccucccccuaaugcuaacgaucccccgccucccaaugccaacgacccugcucccccuaaugccaacgaccccgccccgccuaaugcuaacgaucccgcgcccccuaaugccaacgacccggcucccccuaacgccaaugaucccccucccccuaaccccaaugacccggccccucccaacgcuaaugauccucccccgccuaaccccaaugacccugccccuccccagggaaacaauaacccccaaccgcagccccggccucagccccagccucaaccccagccucagccgcagccccaaccucagccccagccucgcccccaaccgcagccucagcccggcgggaauaacaauaacaagaauaacaacaaugacgauuccuacauccccucugcggagaagauucuggaguucgucaaacagaucagagacagcaucacggaagaguggucccaaugcaacgugaccuguggaucuggcauucggguucgcaagagaaaaggcagcaauaagaaagccgaagaucuuacacuggaggacaucgauaccgagauuugcaagauggacaaauguuccagcaucuuuaacauugugucuaauucccucggguucgucauccugcuugugcugguguuuuucaacggaggcgggggaagcggcgggggaggcaagcucgaaucuacacggauuuaucagauccuggcuaucuacuccaccguugccagcucucugguccucguggugucccugggcgcuauuagcuuuuggaugugcuccaaugggucucuucagugucgcaucugcauuugaggacuaguuauaagacugacuagcccgaugggccucccaacgggcccuccuccccuccuugcaccgagauuaauaaaaaaaaaaaaaaaaaaaaaaaaaaaaaaaaaaaaaaaaaaaaaaaaaaaaaaaaaaaaaaaaugcaucccccccccccccccccccccccccccccccaaaggcucuuuucagagccaccagaauu

SEQ ID NO: 1713 - RNA, 1225 nt, Artificial Sequence
  mRNA Design i-3 (A64-N5-C30-hSL-N5) comprising derived and/or modified sequence from Pb(ANKA)__XP_022712148.1__HsALB_Pb-CSP(24-340) (opt5)
gggagaaagcuuaccaugaagugggugaccuucaucagccugcucuuucuguucuccucugccuacagccagaacaaauccauucaagcucagagaaaucuuaacgagcugugcuauaaugaaggcaacgacaauaagcucuaccacguccugaacucuaaaaaugggaagaucuauaaccggaauacaguuaaccgccuucuggccgaugcgcccgagggcaaaaagaaugaaaagaaaaacgagaagauugaaagaaauaacaaacucaagcagccuccgcccccucccaauccuaacgacccucccccgcccaacccuaaugaucccccucccccgaacccuaaugaucccccuccucccaaccccaaugacccgcccccucccaacgcuaaugacccucccccgccuaacgccaaugaucccgccccucccaacgcuaaugacccugcucccccgaacgccaaugauccugccccucccaacgcgaaugaccccgccccgcccaacgcuaacgauccucccccucccaauccuaacgaccccgccccgccuaaugcuaacgaucccccucccccgaauccuaacgaccccgccccuccccagggaaauaacaauccccaaccucagccgcggccccagccucagccccaaccucagccccagccucagccgcaaccccagccucagccccgcccucaaccccagccgcagccugggggaaacaauaacaauaaaaacaauaacaacgacgauagcuacauccccuccgcggagaagauucuggaguuugugaagcagaucagagacucuaucacggaagaguggagccaaugcaaugugaccugcggcuccgggauucggguccgcaaaagaaagggaagcaacaaaaaggccgaagaucugacacucgaggacaucgauaccgagauuuguaaaauggacaaguguucuuccaucuucaauauugugagcaacucucugggcuuuguuauccuucuggugcucgucuucuuuaauugaggacuaguuauaagacugacuagcccgaugggccucccaacgggcccuccuccccuccuugcaccgagauuaauaaaaaaaaaaaaaaaaaaaaaaaaaaaaaaaaaaaaaaaaaaaaaaaaaaaaaaaaaaaaaaaaugcaucccccccccccccccccccccccccccccccaaaggcucuuuucagagccaccagaauu

SEQ ID NO: 1714 - RNA, 1243 nt, Artificial Sequence
  mRNA Design i-3 (A64-N5-C30-hSL-N5) comprising derived and/or modified sequence from Pb(ANKA)__XP_022712148.1__HsIns-iso1_Pb-CSP(24-340) (opt5)
gggagaaagcuuaccauggcccuguggaugagacuccugccccuucuggcucuccuggcccuuuggggcccugacccggcggcugcccagaacaagagcauccaagcccagcggaaucugaacgagcucugcuacaaugaagggaacgauaauaaacuguaucacgugcugaacuccaagaauggaaaaauuuacaaccgcaauaccgucaacagacuccuggcugacgcccccgagggcaagaaaaaugaaaagaagaacgagaaaaucgaacggaauaacaaacuuaagcagccucccccucccccuaauccgaacgaucccccucccccuaaccccaaugacccgccucccccuaaccccaaugaucccccuccgcccaacccuaaugaucccccucccccgaacgcuaaugacccucccccucccaacgccaaugacccugcgcccccgaacgccaaugauccugcuccucccaacgccaaugaccccgcuccgcccaacgccaaugauccugcgcccccuaacgccaacgaucccccucccccgaauccuaacgaccccgcuccucccaaugccaacgacccgccucccccuaaucccaacgaccccgcuccuccgcaggggaauaacaauccccaaccucagccccgcccucagccccagccucaaccgcagccccagccucagccccaaccucagccccagccgagaccucaaccccagccccagccuggaggcaacaauaacaauaagaacaauaacaacgaugacucuuauauucccagcgccgagaaaauccuggaguucguuaagcagauucgggauuccaucacagaagaguggucucaauguaaugugacgugcgggagcggaauccgcgugagaaagcggaaaggcuccaacaagaaagccgaagaccucacccuggaggauauugacacagagaucuguaagauggauaaaugcucuagcauuuuuaauaucgucuccaacagccuuggcuucgugauucugcucguucugguguuuuucaauugaggacuaguuauaagacugacuagcccgaugggccucccaacgggcccuccuccccuccuugcaccgagauuaauaaaaaaaaaaaaaaaaaaaaaaaaaaaaaaaaaaaaaaaaaaaaaaaaaaaaaaaaaaaaaaaaugcaucccccccccccccccccccccccccccccccaaaggcucuuuucagagccaccagaauu

SEQ ID NO: 1715 - RNA, 1222 nt, Artificial Sequence
  mRNA Design i-3 (A64-N5-C30-hSL-N5) comprising derived and/or modified sequence from Pb(ANKA)__XP_022712148.1__HsSPARC_Pb-CSP(24-340) (opt5)
gggagaaagcuuaccaugagagccuggaucuucuuucugcucugccuggcuggccgggcccuugcgcagaacaagagcauucaagcucagcgcaaucugaacgagcucuguuacaaugaagggaacgacaauaaacuguaucacgugcuuaacuccaagaauggaaaaaucuacaacagaaauaccgucaaccggcugcucgccgaugcccccgagggcaagaaaaaugaaaagaagaacgagaaaauugaacgcaauaacaagcugaaacagccuccgcccccucccaauccuaacgacccucccccgcccaacccuaaugaucccccucccccgaacccuaaugaucccccuccucccaaccccaaugacccgcccccucccaacgcuaaugacccucccccgccuaacgccaaugaucccgcuccucccaacgccaaugacccugcgcccccgaacgccaaugauccugcuccucccaacgccaaugaccccgcuccgcccaacgccaacgauccucccccucccaauccuaacgaccccgcgccgccuaaugccaacgaucccccucccccgaauccuaacgaccccgcuccuccccaggggaauaacaauccccaaccucagccgagaccccagccucagccccaaccucagccccagccucagccgcaaccccagccucagccccggccucaaccccagccgcagccuggaggcaacaauaacaauaagaacaauaacaacgacgauucuuauauccccagcgccgagaaaauucuggaguucguuaagcagauccgcgacuccaucacagaagaguggucucaaugcaaugugacgugugggagcggaauuagagugcggaagcgcaaaggcuccaacaagaaagcugaagaucucacccuggaggacaucgauacagagauuugcaagauggacaaauguucuagcaucuuuaauauugucuccaacagccuuggcuucgugauccugcucguucugguguuuuucaauugaggacuaguuauaagacugacuagcccgaugggccucccaacgggcccuccuccccuccuugcaccgagauuaauaaaaaaaaaaaaaaaaaaaaaaaaaaaaaaaaaaaaaaaaaaaaaaaaaaaaaaaaaaaaaaaaugcaucccccccccccccccccccccccccccccccaaaggcucuuuucagagccaccagaauu

SEQ ID NO: 1716 - RNA, 1225 nt, Artificial Sequence
  mRNA Design i-3 (A64-N5-C30-hSL-N5) comprising derived and/or modified sequence from Pb(ANKA)__XP_022712148.1__IgE_Pb-CSP(24-340) (opt5)
gggagaaagcuuaccauggacuggaccuggauccuguuccucguggccgcugccacaagaguccacagccagaacaaguccauucaagcgcagcggaaucugaacgagcuuugcuacaaugaaggcaacgauaauaaacuguaucauguucucaacucuaagaaugggaaaaucuacaaccgcaauacggugaacagacugcuugcugacgcccccgagggaaagaaaaaugaaaagaagaacgagaaaauugaacggaauaacaagcugaaacagccuccgcccccucccaauccuaacgaucccccuccgcccaacccuaaugacccgccucccccgaacccuaaugaucccccuccucccaaccccaaugacccgcccccucccaacgccaaugauccucccccgccuaacgcuaaugaccccgccccucccaacgcuaaugauccugccccucccaacgcgaaugaccccgccccucccaacgcuaaugaucccgccccgcccaacgcuaacgacccucccccucccaauccuaacgaucccgccccgccuaaugcgaacgaucccccucccccgaauccuaacgaccccgccccuccccagggcaauaacaauccccaaccucagccgcgcccccagccucagccccaaccucagccccagccucagccgcaaccccagccucagcccagaccucaaccccagccgcagccugggggaaacaauaacaauaagaacaauaacaacgacgacagcuauauccccuccgcugagaaaauucucgaguuugugaagcagauccgggauucuaucaccgaagaguggagccaauguaaugucacaugcggcuccgggauucgcgugagaaagcggaaaggaucuaacaagaaagccgaagaccugacccuggaggauaucgacacagagauuuguaagauggauaaaugcagcuccaucuucaauauuguuagcaacucucucggcuuugugauccugcuuguccugguguucuuuaauugaggacuaguuauaagacugacuagcccgaugggccucccaacgggcccuccuccccuccuugcaccgagauuaauaaaaaaaaaaaaaaaaaaaaaaaaaaaaaaaaaaaaaaaaaaaaaaaaaaaaaaaaaaaaaaaaugcaucccccccccccccccccccccccccccccccaaaggcucuuuucagagccaccagaauu

SEQ ID NO: 1717 - RNA, 1411 nt, Artificial Sequence
  mRNA Design i-3 (A64-N5-C30-hSL-N5) comprising derived and/or modified sequence from Pf(3D7)__XP_001351122.1__Pf-CSP (opt6)
gggagaaagcuuaccaugaugagaaaacuugcaauacuaagcguaucuucauuccuauucguagaagcacuauuccaagaauaucaaugcuauggaucaagcuccaacacaagaguacuuaacgaacuaaauuacgacaaugcaggaacaaaccuauacaaugaacuugaaaugaauuacuacggcaaacaagaaaacugguacucccuaaaaaaaaacucaaggucauuaggagaaaacgacgacggaaacaacgaagacaacgaaaaacuacgaaaacccaaacacaaaaaauuaaaacaaccagcagacggaaaccccgacccaaacgcaaacccaaacgucgacccaaacgcaaacccgaacguagacccaaacgcgaacccaaacguagacccaaacgcaaacccaaacgcaaacccaaacgcaaacccaaacgcaaacccaaaugcaaacccaaacgcaaacccaaacgccaauccaaacgccaacccaaacgcaaacccaaacgcaaacccaaacgcaaacccaaacgcaaaccccaacgcaaacccaaacgcuaacccaaacgcaaacccuaaugcaaacccuaacgcaaacccaaacgucgacccgaacgcaaacccaaaugcaaacccaaacgcaaacccaaacgcaaaccccaacgccaacccaaaugcaaacccaaaugcaaauccaaacgcaaacccaaacgcaaacccuaacgcaaacccaaacgcaaaccccaacgcaaacccaaacgcaaacccaaacgccaacccaaacgcaaaccccaaugcaaacccaaacgcaaacccaaacgcaaacccaaacaaaaacaaucaaggcaacggacaaggacacaacaugcccaacgacccaaaccgaaacgucgacgaaaacgccaacgcaaacagcgcaguaaaaaacaacaacaacgaagaacccucagacaaacacauaaaagaauacuuaaacaaaauacaaaacucacuaucuacagaauggucacccuguagcguaaccugcggcaacggaauacaaguaagaauaaaaccaggcucagcaaacaaaccaaaagaugaacuagacuacgccaaugauauagaaaaaaaaauauguaaaauggaaaaauguagcucagucuucaacguagucaacucaucaauaggacuaauaaugguacucuccuuccucuuccuaaauuaaggacuaguuauaagacugacuagcccgaugggccucccaacgggcccuccuccccuccuugcaccgagauuaauaaaaaaaaaaaaaaaaaaaaaaaaaaaaaaaaaaaaaaaaaaaaaaaaaaaaaaaaaaaaaaaaugcaucccccccccccccccccccccccccccccccaaaggcucuuuucagagccaccagaauu

SEQ ID NO: 1718 - RNA, 1342 nt, Artificial Sequence
  mRNA Design i-3 (A64-N5-C30-hSL-N5) comprising derived and/or modified sequence from Pf(3D7)__XP_001351122.1__Pf-CSP(1-374) (opt6)
gggagaaagcuuaccaugaugagaaaacuagcaauauuaagcguaagcucauuccuauucguugaagcauuauuccaagaauaccaaugcuacggcucaagcucaaacacaagaguauuaaacgaauuaaacuacgacaaugcaggaaccaaccucuacaacgaacuagaaaugaauuauuacggcaaacaagaaaacugguacucacucaaaaaaaacucacgaucccuaggagaaaacgaugacggaaacaaugaagauaacgaaaaauuaagaaaaccaaaacacaaaaaauuaaaacaaccugcagacggaaacccagacccaaacgcaaauccaaauguagacccaaacgcaaaccccaacguagacccaaaugcaaacccaaacguagacccaaacgcaaacccaaaugcaaacccaaacgcaaacccaaacgcaaacccaaacgcaaaccccaacgcaaacccaaacgcaaacccaaacgccaaccccaacgcaaacccaaacgcaaacccgaaugcaaacccaaacgcaaacccaaacgcaaacccaaacgcaaacccaaacgcaaacccaaacgcaaacccaaaugcaaacccaaacguggauccaaacgcaaauccaaacgcaaacccaaacgcaaacccaaacgcaaaccccaacgcaaauccaaacgcaaaccccaaugcaaauccaaacgcaaacccaaacgccaacccaaacgcaaacccgaacgccaauccaaacgcaaacccaaacgcaaacccaaacgcaaacccaaacgccaacccaaacgcaaacccaaacgcaaacccaaacgcaaaccccaacaaaaacaaccaaggaaacggacaaggacacaacaugccaaacgauccaaacagaaacgucgacgaaaacgccaacgcuaacagcgcaguaaaaaacaauaacaacgaagaaccaucagacaaacauauaaaagaauacuuaaacaaaauccaaaacucacuaucaacagaauggucccccuguuccguaacaugcggaaacggaauacaaguacgaaucaaaccaggaucagccaacaaaccgaaagacgaacuagacuaugccaacgauauagaaaaaaaaauaugcaaaauggaaaaaugcugaggacuaguuauaagacugacuagcccgaugggccucccaacgggcccuccuccccuccuugcaccgagauuaauaaaaaaaaaaaaaaaaaaaaaaaaaaaaaaaaaaaaaaaaaaaaaaaaaaaaaaaaaaaaaaaaugcaucccccccccccccccccccccccccccccccaaaggcucuuuucagagccaccagaauu

SEQ ID NO: 1719 - RNA, 1195 nt, Artificial Sequence
  mRNA Design i-3 (A64-N5-C30-hSL-N5) comprising derived and/or modified sequence from Pf(3D7)__XP_001351122.1__Pf-CSP(1-325) (opt6)
gggagaaagcuuaccaugaugcgaaaauuagcaauacuaagcguaagcucauucuuauucguagaagcacucuuccaagaauaccaaugcuacggaucaagcucaaacacaagaguccuaaacgaauuaaacuaugacaacgcaggaacaaaccuauacaacgaacuagaaaugaacuacuacggaaaacaagaaaacugguacucacucaaaaaaaacagcagaagucuaggagaaaacgacgacggaaacaacgaagacaacgaaaaacuacgaaaaccaaaacacaaaaaacuaaaacaaccagcagacgggaacccagacccaaacgcaaacccaaacguagauccaaacgcaaacccaaauguagacccuaacgcaaacccaaauguagacccaaacgcaaacccuaacgcaaacccaaaugcaaacccaaacgcaaauccaaacgcaaacccaaacgcaaacccaaacgcgaacccaaacgcaaacccaaacgcaaacccaaaugcaaaccccaacgcaaauccaaaugcaaacccaaaugcaaauccaaacgcaaacccaaacgcaaacccaaaugcaaauccaaacgcaaauccaaacguggauccaaacgcaaacccaaacgcaaacccaaacgcaaacccaaacgcaaacccaaacgcaaacccaaacgcaaauccaaacgccaauccaaacgcaaauccaaaugcaaacccaaacgcaaacccaaacgcaaacccaaacgcaaacccaaacgcaaacccaaacgcaaacccaaacgcaaacccaaacgcaaacccaaacgcaaacccaaacgcaaacccaaacaaaaacaaccaaggaaacggacaaggacacaacaugccaaacgacccaaacagaaacguagacgaaaacgccaacgcaaauagcgcagucaaaaacaacaauaacgaagaaccaucggacaaacacauaaaagaauacuuaaacaaaauacaaaacugaggacuaguuauaagacugacuagcccgaugggccucccaacgggcccuccuccccuccuugcaccgagauuaauaaaaaaaaaaaaaaaaaaaaaaaaaaaaaaaaaaaaaaaaaaaaaaaaaaaaaaaaaaaaaaaaugcaucccccccccccccccccccccccccccccccaaaggcucuuuucagagccaccagaauu

SEQ ID NO: 1720 - RNA, 1411 nt, Artificial Sequence
  mRNA Design i-3 (A64-N5-C30-hSL-N5) comprising derived and/or modified sequence from Pf(3D7)__XP_001351122.1__HsALB_Pf-CSP(19-397) (opt6)
gggagaaagcuuaccaugaaaugggucacauuuauuucacuacuauucuuauucucaagcgcauacucacuauuucaagaauaccaaugcuacggcucauccucaaauacacgaguacuaaaugaacucaacuacgacaacgcaggaaccaaucucuacaacgaauuagaaaugaacuacuacggcaaacaagaaaacugguauucacuaaaaaaaaacaguagaucacuaggagaaaaugacgacggaaacaaugaagacaacgaaaaacuaagaaaaccaaaacacaaaaaauuaaaacaaccagcagacggaaacccagacccaaacgcaaacccuaacguagaucccaaugccaacccaaauguagacccaaacgcaaaccccaacgucgauccaaacgcaaacccaaacgcaaacccaaacgcaaacccaaacgcaaacccaaacgcaaacccaaaugcaaaccccaacgcaaacccaaacgcuaacccaaacgcaaacccaaacgcaaacccaaacgcaaacccaaacgcaaacccaaacgccaacccaaacgccaacccaaacgcaaauccaaacgcaaacccaaaugccaauccaaacguugacccaaacgcaaacccaaacgcaaaccccaacgcaaacccaaacgcaaauccaaacgcgaaccccaacgcaaacccaaacgcaaacccaaaugcaaacccaaacgcuaacccaaaugcaaacccaaacgccaacccaaacgccaacccaaacgcaaaccccaacgcaaacccaaacgcaaacccaaacgccaauccaaacgcaaacccaaaugcaaacccaaacaaaaacaaccaaggaaacggacaaggacacaacaugccaaacgaccccaacagaaacguagaugaaaaugcaaaugcuaacucagccguaaaaaacaauaacaacgaagaaccaucagacaaacacauaaaagaauaccuaaauaaaauacaaaauuccuuaucaacagaaugguccccaugcucaguaacuugcgguaacggcauacaaguaagaauaaaaccaggaucagcaaacaaaccaaaagacgaauuagacuaugcaaacgacauagaaaaaaaaauauguaaaauggaaaaaugcagcucaguauucaacguaguaaauuccucaaucggacucaucaugguauuaucauuccuauuuuuaaauuaaggacuaguuauaagacugacuagcccgaugggccucccaacgggcccuccuccccuccuugcaccgagauuaauaaaaaaaaaaaaaaaaaaaaaaaaaaaaaaaaaaaaaaaaaaaaaaaaaaaaaaaaaaaaaaaaugcaucccccccccccccccccccccccccccccccaaaggcucuuuucagagccaccagaauu

SEQ ID NO: 1721 - RNA, 1429 nt, Artificial Sequence
  mRNA Design i-3 (A64-N5-C30-hSL-N5) comprising derived and/or modified sequence from Pf(3D7)__XP_001351122.1__HsIns-iso1_Pf-CSP(19-397) (opt6)
gggagaaagcuuaccauggcacuauggaugagacuacuaccacuacuagcacuccuagccuuauggggacccgauccagccgcagcacucuuccaagaauaccaaugcuauggaucauccuccaacacaagaguccuaaacgaauuaaauuacgacaacgcuggaacaaaccuauacaaugaacuagaaaugaauuauuacggaaaacaagaaaauugguacucacuaaaaaaaaacucuagaagccuaggagaaaacgacgacggaaacaacgaagauaacgaaaaacuaagaaaaccaaaacacaaaaaauuaaaacaacccgcagacggcaacccagacccaaaugcaaauccaaacguagacccaaacgcaaauccaaacguagacccaaacgcaaacccaaauguagacccaaacgcaaauccaaacgcaaacccaaaugcaaacccaaaugcaaacccaaacgcaaauccaaacgcaaaucccaacgccaacccaaacgcaaacccaaacgcaaauccaaacgcaaacccaaacgcaaacccaaacgcaaacccaaacgcaaacccaaaugcaaacccaaaugccaauccaaacgccaacccaaacgcaaacccaaacguagacccaaacgcaaacccaaacgccaacccaaacgcaaaccccaaugcaaacccaaacgcaaacccaaacgcaaaccccaacgcaaauccaaacgcaaacccaaacgcaaauccaaacgcaaauccaaacgccaacccaaacgcaaacccaaacgcaaauccaaacgcaaaccccaacgcaaacccaaacgccaacccaaaugcaaacccaaacgcaaaucccaauaaaaacaaccaaggaaacggacaaggacacaacaugccaaacgauccaaacagaaacguagacgaaaacgcaaacgcaaacucagcagucaaaaacaauaacaacgaagaaccaucagacaaacacauaaaagaauaccuaaacaaaauacaaaacucacuauccacagaauggucaccaugcucaguaaccugcggaaacggaauacaaguaagaauaaaaccaggaucagccaacaaaccaaaagacgaacuagacuaugcuaaugacauagaaaaaaaaauaugcaaaauggaaaaaugcuccucaguauucaacgucguaaacucuucaauaggacuaauaaugguacuauccuucuuauuucuaaacuaaggacuaguuauaagacugacuagcccgaugggccucccaacgggcccuccuccccuccuugcaccgagauuaauaaaaaaaaaaaaaaaaaaaaaaaaaaaaaaaaaaaaaaaaaaaaaaaaaaaaaaaaaaaaaaaaugcaucccccccccccccccccccccccccccccccaaaggcucuuuucagagccaccagaauu

SEQ ID NO: 1722 - RNA, 1408 nt, Artificial Sequence
  mRNA Design i-3 (A64-N5-C30-hSL-N5) comprising derived and/or modified sequence from Pf(3D7)__XP_001351122.1__HsSPARC_Pf-CSP(19-397) (opt6)
gggagaaagcuuaccaugcgcgcauggauauucuuccuccuaugucuagcaggucgagcacuugcacucuuccaagaauaccaauguuacggauccucaagcaacacacgaguacuaaacgaacuaaacuacgauaacgcaggaaccaacuuauacaacgaacuagaaaugaacuacuacggcaaacaagaaaacugguacucacucaaaaaaaacagcagaagccuaggagaaaaugacgacggaaacaacgaagauaacgaaaaauuacgaaaacccaaacacaaaaaauuaaaacaacccgcagauggaaauccagacccgaacgcaaacccaaacguagacccaaacgcaaacccaaacguugacccaaacgcaaacccaaacguagacccaaacgcaaacccuaacgccaacccaaacgcaaacccaaacgcaaacccaaaugcgaacccaaaugcaaacccaaacgccaacccaaaugcaaaccccaacgcaaauccaaacgcaaacccaaaugcaaacccaaacgcaaacccaaacgcaaacccaaacgcaaacccaaacgccaaccccaaugcaaacccaaacgcaaacccaaacgucgacccaaacgcaaacccaaacgcaaacccaaacgcaaauccaaacgcaaauccaaacgcaaacccuaacgcaaacccaaacgcaaacccaaaugcaaauccaaacgcaaacccaaacgcaaacccaaacgcaaauccaaacgcaaacccaaacgcaaacccaaacgcaaacccuaaugcaaacccaaaugcaaauccaaacgcaaacccaaaugcaaaccccaacaaaaacaaccaaggaaacggacaaggacacaauaugccaaacgacccaaacagaaacguagacgaaaacgcaaacgccaacagcgcaguaaaaaacaacaacaacgaagaaccaucagacaaacacauaaaagaauaccuaaacaaaauacaaaacucacuaucaacagaauggucucccugcuccguaacaugcggaaacggcauacaaguacgaauaaaaccuggaucagccaacaaaccaaaagacgaacuagacuaugcaaaugacauagaaaaaaaaauaugcaaaauggaaaaaugcaguucagucuucaacguagucaacagcucaauaggccuaauaaugguacucucauuccuauucuuaaacuaaggacuaguuauaagacugacuagcccgaugggccucccaacgggcccuccuccccuccuugcaccgagauuaauaaaaaaaaaaaaaaaaaaaaaaaaaaaaaaaaaaaaaaaaaaaaaaaaaaaaaaaaaaaaaaaaugcaucccccccccccccccccccccccccccccccaaaggcucuuuucagagccaccagaauu

SEQ ID NO: 1723 - RNA, 1411 nt, Artificial Sequence
  mRNA Design i-3 (A64-N5-C30-hSL-N5) comprising derived and/or modified sequence from Pf(3D7)__XP_001351122.1__IgE_Pf-CSP(19-397) (opt6)
gggagaaagcuuaccauggauuggacauggauucucuuccucguagcagcagccacaagaguacacucuuuauuucaagaauaccaaugcuacggaucaagcucaaacacacgcguacuaaacgaacuaaacuacgacaacgcaggaacaaacuuauacaacgaacuagaaaugaacuauuauggcaaacaagaaaacugguacucacuaaaaaaaaacuccagaagcuuaggagaaaacgacgacggaaacaacgaagacaacgaaaaacuacgcaaaccuaaacacaaaaaacuaaaacaaccugcagacggaaacccagacccaaacgcgaacccaaacguagauccaaacgcaaacccaaacguagaucccaacgcaaacccgaacguagacccuaacgcaaauccaaacgcaaaccccaacgcaaacccgaacgcaaacccaaacgcaaacccaaacgcaaacccaaacgcaaacccaaacgcaaacccaaacgccaacccaaacgcaaauccaaacgcuaacccaaaugcaaacccuaacgcaaacccaaacgccaacccaaacgcaaacccaaacgcaaacccaaacgcaaaucccaauguagacccaaacgcaaacccaaacgcaaacccaaacgcuaacccaaaugcaaacccaaacgcaaacccaaacgcaaacccaaacgcuaaccccaacgcaaacccgaacgcaaacccaaaugcaaacccaaacgcaaacccaaaugcaaacccaaacgcaaacccaaacgcaaaccccaaugccaacccaaacgcaaauccaaaugccaauccaaacgcaaacccaaacaaaaacaaccaaggaaauggacaaggacauaacaugccaaacgaccccaaccgaaauguagacgaaaacgccaacgcaaauagugcagucaaaaacaauaacaaugaagaacccucagauaaacauauaaaagaauacuuaaacaaaauacaaaacucacuaucaaccgaguggucuccuugcucaguaacauguggaaacggaauacaaguacgaauaaaaccaggaucagcaaacaaaccgaaagacgaacuagacuacgccaacgacauagaaaagaaaauauguaaaauggagaaauguaguucaguauucaacgugguaaacagcucaauaggccuaauaaugguacucucuuuccuauuccuaaacuaaggacuaguuauaagacugacuagcccgaugggccucccaacgggcccuccuccccuccuugcaccgagauuaauaaaaaaaaaaaaaaaaaaaaaaaaaaaaaaaaaaaaaaaaaaaaaaaaaaaaaaaaaaaaaaaaugcaucccccccccccccccccccccccccccccccaaaggcucuuuucagagccaccagaauu

SEQ ID NO: 1724 - RNA, 1576 nt, Artificial Sequence
  mRNA Design i-3 (A64-N5-C30-hSL-N5) comprising derived and/or modified sequence from Pf(3D7)__XP_001351122.1__Pf-CSP_L(G4SG4)_TM domain HA (opt6)
gggagaaagcuuaccaugaugcguaaacuagcaauacuaucugucaguucauucuuauucguagaagcacuauuccaagaauaccaauguuacggaucuucaucaaacacaagaguacucaacgaauuaaacuacgauaacgcuggaaccaauuuauacaacgaacuagaaaugaacuacuauggaaaacaagaaaacugguauucacuaaaaaaaaacagcagaaguuuaggagaaaaugacgacggaaacaaugaagacaaugaaaaauuacgaaaaccaaaacacaaaaaauuaaaacaacccgccgacggaaauccagacccaaacgcaaacccaaauguagacccaaacgcaaacccaaauguagaucccaacgcaaacccaaacguagaucccaaugcaaacccaaacgcaaacccaaaugcaaaccccaacgcaaacccaaaugcaaacccuaacgcaaacccgaacgcaaacccaaacgcaaaucccaaugcaaaccccaacgcaaauccaaaugcaaacccuaacgcaaauccgaacgcaaauccaaacgcaaacccaaacgcaaacccaaacgcaaacccaaacgcaaacccaaacgucgacccaaacgccaauccaaacgcaaaccccaaugcaaacccaaaugcaaacccaaacgcaaacccaaaugccaacccaaacgcaaacccaaacgcaaacccaaacgcaaacccaaacgcaaacccaaaugcaaacccaaaugcaaacccaaacgccaacccaaacgcaaacccaaacgcaaacccaaacgccaacccaaacgcaaacccuaacgcaaauccaaacaaaaacaaccaagggaacggacaaggacacaacaugccaaacgacccaaacagaaacguagacgaaaacgccaacgcaaacucagcugucaaaaacaauaacaacgaagaacccuccgauaaacacauaaaagaauaccuaaacaaaauccaaaacucccuuucuacagaauggucacccugcucaguaacaugcggcaacggcauacaaguuagaaucaaaccaggaucagcaaauaaaccaaaagacgaauuagacuaugccaacgacauagaaaaaaaaauauguaaaauggaaaaaugcucaucaguuuucaacguaguaaacagcucaaucggauuaauaaugguacuaucauucuuauuuuuaaacggaggaggaggcuccggcggagguggaaaacuagaaucaacuagaauauaccaaauauuagcaauauacucaacaguagcaucaucacucguauuaguaguaucgcuaggagcaauaaguuucuggaugugcucuaacggaagccuacaaugccgaauaugcauauaaggacuaguuauaagacugacuagcccgaugggccucccaacgggcccuccuccccuccuugcaccgagauuaauaaaaaaaaaaaaaaaaaaaaaaaaaaaaaaaaaaaaaaaaaaaaaaaaaaaaaaaaaaaaaaaaugcaucccccccccccccccccccccccccccccccaaaggcucuuuucagagccaccagaauu

SEQ ID NO: 1725 - RNA, 1450 nt, Artificial Sequence
  mRNA Design i-3 (A64-N5-C30-hSL-N5) comprising derived and/or modified sequence from Pf(3D7)__XP_001351122.1__Pf-CSP(199-377)_L(PVTN)_HBsAg (opt6)
gggagaaagcuuaccauggacccaaacgccaaccccaacgcaaacccaaaugcaaacccaaacgcuaaccccaacgcaaacccaaacgcuaacccuaacgcaaauccaaacgcaaaucccaacgcaaauccaaacgcaaacccaaacgcaaacccaaaugccaacccaaacgcaaacccuaacgcaaaucccaacgcaaauccaaaugcaaaccccaaugcaaacccaaacgcaaauccaaacaaaaauaaucaaggaaauggacaaggacauaacaugccaaacgacccuaaccgaaacgucgacgaaaaugcaaacgcaaacuccgcaguaaaaaacaacaacaacgaagaaccuuccgacaaacacauaaaagaauaccuaaacaaaauacaaaacucucuauccacugaauggucaccaugcucaguaaccugcggaaauggcauacaaguaagaauaaaaccaggaucugcaaauaaaccuaaagacgaacuagauuacgcaaaugacauagaaaaaaaaauaugcaaaauggaaaaaugcucaucagucccaguaacaaacauggaaaacaucacaucaggauucuuaggaccacuacucguauuacaagcaggauucuuucuuuuaacaagaauauuaacaauaccacaaucccuagacucaugguggacaucauuaaacuuccuagguggaucaccagucugccucggacaaaacucacaaucaccaacaucaaaccacucaccaacauccugcccaccaauuuguccaggauacagauggaugugccuacgaagauucauaauauucuuauuuauauuacuacuaugucucauauuuuuacucguacuauuagacuaucagggcauguuacccguauguccacuaauaccaggcucaaccaccacaaacacagguccaugcaaaaccugcaccacaccagcacaaggaaacuccauguuucccucauguugcugcaccaaacccaccgauggaaacugcaccugcauaccaaucccaucuucaugggcauucgcaaaauaucuaugggaaugggcauccguaagauuuucauggcuaucacuauuaguaccauucguacaaugguucguaggauuaucaccaacaguaugguuaucagcaauauggaugaugugguacuggggaccaucacuauacucaauaguauccccuuucauaccauuacucccaauauuuuucugccuuuggguauacauauaaggacuaguuauaagacugacuagcccgaugggccucccaacgggcccuccuccccuccuugcaccgagauuaauaaaaaaaaaaaaaaaaaaaaaaaaaaaaaaaaaaaaaaaaaaaaaaaaaaaaaaaaaaaaaaaaugcaucccccccccccccccccccccccccccccccaaaggcucuuuucagagccaccagaauu

SEQ ID NO: 1726 - RNA, 1492 nt, Artificial Sequence
  mRNA Design i-3 (A64-N5-C30-hSL-N5) comprising derived and/or modified sequence from Pf(3D7)__XP_001351122.1__Pf-CSP(199-387)_L(PVTN)_HBsAg (opt6)
gggagaaagcuuaccaugauggcaccagauccaaacgcaaacccaaacgcaaacccaaacgcaaauccaaaugcaaacccaaacgcaaaucccaaugcaaacccuaacgcaaacccaaacgccaacccaaaugccaacccaaacgcaaacccaaacgcaaauccaaacgcaaacccaaacgcuaacccaaaugcaaaccccaacgcaaauccaaacgcaaacccaaacgcaaauccaaacgcuaacccaaacaaaaauaaccaaggaaacggacaaggacacaauaugccaaaugacccaaauagaaacguagacgaaaacgcaaacgcaaauucagcagucaaaaacaauaacaacgaagaaccauccgauaaacacauaaaagaauacuuaaacaaaauccaaaacucacuaucaacugaauggucaccuuguucaguaacauguggcaacggaauacaaguaagaauaaaaccagguucagccaacaaaccuaaagacgaacuagacuacgcaaacgacauagaaaaaaaaaucugcaaaauggaaaaaugcucaucaguauuuaauguaguaaacucaucaauaggacuaggcccuguaacaaacauggaaaacauaaccucaggauucuuaggcccacuacuaguacuccaagcaggauucuuucuucuaacaagaauauuaaccauuccucaaucauuagacucaugguggacaucccuuaacuuucuaggaggaagccccguaugcuuaggacaaaacagccaauccccaacauccaaccacuccccaacaucaugccccccaauaugcccaggauacagauggaugugccuaagaagauucaucauauuccuauuuauucucuuacucugcuuaauauucuuacucguauuacucgacuaccaaggaauguuaccaguaugcccacuaauaccaggauccacaacaacaaacacgggaccaugcaaaacaugcacaacaccugcccaaggaaauuccauguucccaucaugcugcugcacaaaaccaaccgacggcaacugcacaugcauaccaauaccaucaagcugggccuucgcaaaauaccuaugggaaugggcaucagugagauucucauggcucucauuacuagucccauucguacaaugguuuguaggauuaucaccaacaguuuggcucagcgcaauauggaugaugugguacuggggccccucuuuauauucaauaguauccccauuuauaccacuacucccaauauucuucuguuuauggguauacauauaaggacuaguuauaagacugacuagcccgaugggccucccaacgggcccuccuccccuccuugcaccgagauuaauaaaaaaaaaaaaaaaaaaaaaaaaaaaaaaaaaaaaaaaaaaaaaaaaaaaaaaaaaaaaaaaaugcaucccccccccccccccccccccccccccccccaaaggcucuuuucagagccaccagaauu

SEQ ID NO: 1727 - RNA, 676 nt, Artificial Sequence
  mRNA Design i-3 (A64-N5-C30-hSL-N5) comprising derived and/or modified sequence from Pf(3D7)__XP_001351122.1__HsALB_Pf-CSP(19-152) (opt6)
gggagaaagcuuaccaugaaauggguaacauucauaucacuacuauuccuauucuccagcgcauacucacuauuccaagaauaccaaugcuacggaucaagcucaaacacacgaguacuaaacgaacuaaacuacgacaacgcaggaaccaaccuauacaacgaacuagaaaugaacuacuacggaaaacaagaaaacugguacucacuaaaaaaaaacagcagaucacuaggagaaaacgacgacggaaacaacgaagacaacgaaaaacuaagaaaaccaaaacacaaaaaacuaaaacaacccgcagacggaaacccagacccaaacgcaaacccaaacguagacccaaaugcaaacccaaacguagacccaaacgcaaacccaaacguagacccaaacgcaaacccaaacgcaaacccaaacgcaaacccaaacgcaaacccaaacgcaaacccaaacgcaaacccauaaggacuaguuauaagacugacuagcccgaugggccucccaacgggcccuccuccccuccuugcaccgagauuaauaaaaaaaaaaaaaaaaaaaaaaaaaaaaaaaaaaaaaaaaaaaaaaaaaaaaaaaaaaaaaaaaugcaucccccccccccccccccccccccccccccccaaaggcucuuuucagagccaccagaauu

SEQ ID NO: 1728 - RNA, 796 nt, Artificial Sequence
  mRNA Design i-3 (A64-N5-C30-hSL-N5) comprising derived and/or modified sequence from Pf(3D7)__XP_001351122.1__HsALB_Pf-CSP(19-192) (opt6)
gggagaaagcuuaccaugaaauggguaacauucaucucacuacuauucuuauucucaucagcauacucacuauuccaagaauaccaaugcuacggaucaucaucaaacacacgaguacucaacgaacuaaacuacgacaacgcaggaacaaaccuauacaacgaacuagaaaugaacuacuacggaaaacaagaaaacugguauucacuaaaaaaaaacucaagaucacuaggagaaaacgacgacggaaacaacgaagacaacgaaaaacuaagaaaaccaaaacacaaaaaacuaaaacaaccagcagacggaaacccagacccaaacgcaaacccaaacguagacccaaacgccaacccaaacguagacccaaacgcaaacccaaacguagacccaaacgcaaacccaaacgcaaacccaaacgcaaacccaaacgcaaacccaaacgcaaacccaaacgcaaacccaaacgcaaacccaaacgcaaacccaaacgcaaacccaaacgcaaacccaaacgcaaacccaaacgcaaauccaaacgcaaacccaaacgcaaacccaaacgcaaacccaaacgcaaaccccuaaggacuaguuauaagacugacuagcccgaugggccucccaacgggcccuccuccccuccuugcaccgagauuaauaaaaaaaaaaaaaaaaaaaaaaaaaaaaaaaaaaaaaaaaaaaaaaaaaaaaaaaaaaaaaaaaugcaucccccccccccccccccccccccccccccccaaaggcucuuuucagagccaccagaauu

SEQ ID NO: 1729 - RNA, 1036 nt, Artificial Sequence
  mRNA Design i-3 (A64-N5-C30-hSL-N5) comprising derived and/or modified sequence from Pf(3D7)__XP_001351122.1__HsALB_Pf-CSP(19-272) (opt6)
gggagaaagcuuaccaugaaauggguaacauucauaucacuacuauuccuauucucaagcgcauauucacuauuccaagaauaccaaugcuacggaucaagcucaaacacaagaguacuuaacgaacuaaacuacgacaacgcaggaacaaaccuauacaacgaacuugaaaugaacuacuacggaaaacaagaaaacugguacucacuaaaaaaaaauagcagaagcuuaggagaaaacgacgacggaaacaacgaagacaacgaaaaauuaagaaaaccuaaacacaaaaaacuaaaacaacccgcagacggaaacccagacccuaacgccaacccaaauguagacccaaacgcaaacccaaacguagacccaaacgcaaaccccaacguagacccaaacgcaaacccaaacgcaaacccaaacgcaaacccaaacgcaaaccccaacgcaaacccaaacgcaaacccaaacgcaaacccaaacgcaaacccaaacgcaaacccaaacgcaaacccaaacgcaaacccaaacgcaaacccaaacgcgaacccaaacgcaaacccaaacgcaaacccaaacgcaaacccaaacgcaaacccaaacguagacccaaaugcaaaccccaacgcaaacccaaacgcaaacccaaaugcaaaccccaacgcaaacccaaacgcaaacccaaacgcaaacccaaacgcaaacccaaaugcaaacccaaacgcaaacccaaacgccaacccaaacgcaaacccaaacgcaaacccaaacgcaaacccaaacgcaaacccgaacgcaaacccaaacgcaaacccaaacgcaaacccauaaggacuaguuauaagacugacuagcccgaugggccucccaacgggcccuccuccccuccuugcaccgagauuaauaaaaaaaaaaaaaaaaaaaaaaaaaaaaaaaaaaaaaaaaaaaaaaaaaaaaaaaaaaaaaaaaugcaucccccccccccccccccccccccccccccccaaaggcucuuuucagagccaccagaauu

SEQ ID NO: 1730 - RNA, 1198 nt, Artificial Sequence
  mRNA Design i-3 (A64-N5-C30-hSL-N5) comprising derived and/or modified sequence from Pf(3D7)__XP_001351122.1__HsALB_Pf-CSP(19-272)_L(AAY)_Pf-CSP(310-3 27)_L(AAY)_Pf-CSP(346-375) (opt6)
gggagaaagcuuaccaugaaauggguaacauuuauaucacuccuauuccuuuuuucgucagcauacucacuauuccaagaauaucaaugcuacggaucaagcuccaacacaagaguacuaaacgaacuaaacuacgacaacgcaggaacaaaccuauacaacgaacuagaaaugaacuacuacggaaaacaagaaaacugguacucacuaaaaaaaaacagccgaagcuuaggagaaaaugacgacggaaacaacgaagacaacgaaaaauuacgcaaacccaaacacaaaaaacugaaacaaccagcagacggaaacccagacccaaacgcaaacccaaacguagacccaaacgcaaacccaaacguagacccaaacgcaaacccaaacguagacccaaacgcaaacccaaacgcgaacccaaacgccaacccaaacgcaaacccaaacgcaaacccaaacgcaaacccaaacgcaaacccaaacgcaaacccaaacgccaacccgaacgcaaacccaaacgcaaacccaaacgcaaauccaaacgcaaacccaaacgcaaacccaaacgccaacccaaacgcaaacccaaacgcaaacccaaauguggacccaaacgcaaacccaaacgcaaacccaaacgcaaacccaaaugcaaacccaaacgcaaacccaaacgcaaacccaaacgcaaacccaaacgcaaacccaaaugcaaacccaaacgcaaauccaaacgcaaacccaaacgcaaacccaaacgcaaacccaaacgcaaacccuaacgcaaacccaaacgcaaacccaaacgccaaccccaaugcaaacccagcagcauacgaaccaucagacaaacacauaaaagaauaccuaaacaaaauacaaaacucacucgcagcauauauaaagccaggaagcgccaacaaaccaaaagacgaacuagauuacgcaaacgacauagaaaaaaaaaucuguaaaauggaaaaaugcucauaaggacuaguuauaagacugacuagcccgaugggccucccaacgggcccuccuccccuccuugcaccgagauuaauaaaaaaaaaaaaaaaaaaaaaaaaaaaaaaaaaaaaaaaaaaaaaaaaaaaaaaaaaaaaaaaaugcaucccccccccccccccccccccccccccccccaaaggcucuuuucagagccaccagaauu

SEQ ID NO: 1731 - RNA, 1159 nt, Artificial Sequence
  mRNA Design i-3 (A64-N5-C30-hSL-N5) comprising derived and/or modified sequence from Pf(3D7)__XP_001351122.1__HsALB_Pf-CSP(19-272)_L(AAY)_Pf-CSP(346-3 65)_L(AAY)_P2 (opt6)
gggagaaagcuuaccaugaaauggguaacauucauaucacuauuauuccuuuucucaucagcuuacucacuauuccaagaauaccaaugcuacggaucauccucaaacacaagaguacuaaacgaacuaaacuacgacaacgccggaaccaaccuauacaacgaacucgaaaugaacuacuacggaaaacaagaaaacugguacucacuaaaaaaaaacagccgaucccuaggagaaaacgacgacggaaauaacgaagacaaugaaaaauuaagaaaaccaaaacacaaaaaacuaaaacaaccagcagacggaaacccagacccaaacgcaaacccaaacguagauccaaacgcaaacccaaacguagacccaaacgcaaacccaaacguagacccaaacgcuaacccaaacgcaaacccaaacgcaaacccaaacgcaaacccaaacgcaaacccaaacgcaaacccgaacgcaaaccccaacgcaaacccaaacgcaaacccaaacgcaaaccccaacgcaaacccaaacgcaaacccgaacgcaaacccaaacgcaaacccaaacgcaaacccaaacgcaaacccaaacgcaaacccaaacguagacccaaacgccaacccaaacgcaaacccaaacgcaaacccaaacgcaaacccaaacgcaaacccaaacgcaaacccaaacgcaaacccaaacgcaaacccaaacgcaaacccaaacgcaaaccccaacgcaaacccaaaugcaaacccaaacgcaaacccaaaugcaaaccccaacgcaaacccaaaugccaauccaaacgcaaacccaaacgcaaacccagccgcauacauaaaaccaggauccgcaaacaaaccaaaagacgaacuagacuacgcaaacgacauagaagcagcauaccaauauauaaaagccaacuccaaauucauagguauaacagaacucuaaggacuaguuauaagacugacuagcccgaugggccucccaacgggcccuccuccccuccuugcaccgagauuaauaaaaaaaaaaaaaaaaaaaaaaaaaaaaaaaaaaaaaaaaaaaaaaaaaaaaaaaaaaaaaaaaugcaucccccccccccccccccccccccccccccccaaaggcucuuuucagagccaccagaauu

SEQ ID NO: 1732 - RNA, 1153 nt, Artificial Sequence
  mRNA Design i-3 (A64-N5-C30-hSL-N5) comprising derived and/or modified sequence from Pf(3D7)__XP_001351122.1__HsALB_Pf-CSP(19-272)_L(AAY)_Pf-CSP(346-3 65)_L(AAY)_PADRE (opt6)
gggagaaagcuuaccaugaaauggguaaccuucauaucacuacuauucuuauucucaucagcauacucacucuuccaagaauaccaaugcuacggcucaagcucaaacacaagaguacuaaacgaauuaaacuaugacaacgccggaacaaaccuauacaaugaauuagaaaugaacuacuacggcaaacaagaaaacugguacucacucaaaaaaaacuccagaaguuuaggagaaaaugacgacggaaacaaugaagacaaugaaaaauuacgaaaaccaaaacacaaaaaacuaaaacaacccgccgacggaaaccccgacccgaacgcaaacccaaacguagacccaaacgcaaacccaaacguagacccaaaugcaaacccaaacguagacccaaacgcaaacccaaacgcaaacccaaacgcaaauccaaacgcaaacccaaaugcaaacccaaaugcaaauccaaacgcaaaccccaacgcaaacccaaacgcaaacccaaaugcaaauccaaacgccaacccaaaugcaaacccaaacgcaaauccaaacgcaaacccaaacgcaaauccaaacgcaaacccaaaugcaaacccaaacguagauccaaacgcaaacccaaacgccaacccaaacgcaaacccgaacgcaaacccaaacgcaaacccaaacgccaacccaaacgccaacccaaacgccaacccaaacgcaaacccaaacgcaaacccaaacgcaaacccaaacgcaaacccaaaugcaaacccuaacgcaaacccaaacgcaaacccaaacgcaaacccaaacgccaacccaaacgcaaauccagcagcauacauaaaaccaggaucagcaaacaaaccaaaagaugaacuagacuacgcaaaugacaucgaagcagccuacgcuaaauucguagcagccuggacacuaaaagcagcagccuaaggacuaguuauaagacugacuagcccgaugggccucccaacgggcccuccuccccuccuugcaccgagauuaauaaaaaaaaaaaaaaaaaaaaaaaaaaaaaaaaaaaaaaaaaaaaaaaaaaaaaaaaaaaaaaaaugcaucccccccccccccccccccccccccccccccaaaggcucuuuucagagccaccagaauu

SEQ ID NO: 1733 - RNA, 1210 nt, Artificial Sequence
  mRNA Design i-3 (A64-N5-C30-hSL-N5) comprising derived and/or modified sequence from Pf(3D7)__XP_001351122.1__HsALB_Pf-CSP(19-272)_L(G4S)_Pf-CSP(310-3 27)_L(G4S)_Pf-CSP(346-375) (opt6)
gggagaaagcuuaccaugaaauggguaaccuucaucucacuacuauuccuauucucaagcgcauacucacucuuucaagaauaccaaugcuacggcucaagcucaaacacacgaguacuaaacgaacuaaacuacgacaacgcaggaacaaaccuauauaacgaacucgaaaugaacuacuacggcaaacaagaaaauugguacucacuaaaaaaaaacagcagaagcuuaggagaaaacgacgacggaaacaacgaagauaacgaaaaacuaagaaaaccaaaacacaaaaaacuaaaacaacccgcagacggaaacccagacccaaacgcaaauccaaauguagacccgaacgcaaacccaaacguagacccaaaugcgaacccaaacgucgacccaaacgcaaacccaaaugcaaacccaaaugcgaacccaaacgcaaacccaaacgcaaauccaaacgcaaauccaaaugcaaacccaaacgcgaauccaaacgcaaacccaaacgcaaacccaaacgcaaacccaaacgcaaacccaaacgcaaacccaaacgcaaacccgaacgcuaacccaaacgcaaacccaaacgcaaacccaaacguagauccaaacgcgaacccaaacgcaaacccaaaugcaaacccaaacgcaaacccaaacgcaaacccaaacgcaaacccaaacgcaaacccaaacgcaaacccaaacgcgaacccaaacgcaaauccaaaugcaaacccaaacgcaaacccaaacgcaaacccaaacgcaaacccaaaugcaaacccaaacgcaaacccaaaugcaaacccaaacgcaaacccaggaggaggaggaucagaacccucagacaaacacauaaaagaauaccuaaacaaaauacaaaacucacuaggaggaggaggaucgaucaaaccaggaagcgcaaacaaaccaaaagacgaacucgacuacgcaaacgauauagaaaaaaaaauaugcaaaauggaaaaaugcucguaaggacuaguuauaagacugacuagcccgaugggccucccaacgggcccuccuccccuccuugcaccgagauuaauaaaaaaaaaaaaaaaaaaaaaaaaaaaaaaaaaaaaaaaaaaaaaaaaaaaaaaaaaaaaaaaaugcaucccccccccccccccccccccccccccccccaaaggcucuuuucagagccaccagaauu

SEQ ID NO: 1734 - RNA, 1195 nt, Artificial Sequence
  mRNA Design i-3 (A64-N5-C30-hSL-N5) comprising derived and/or modified sequence from Pf(3D7)__XP_001351122.1__HsALB_Pf-CSP(19-272)_L(G4S)_Pf-CSP(310-3 27)_Pf-CSP(346-375) (opt6)
gggagaaagcuuaccaugaaauggguaacauucauaucacuccuauuccuauucuccucagcauacucccucuuccaagaauaccaaugcuacggcucaagcucaaacacacgaguacuaaacgaacuaaauuacgacaacgccggaacaaaccuauauaaugaacuagaaaugaauuacuacggaaaacaagaaaacugguacucacuuaaaaaaaacucaagaucauuaggagaaaacgacgacggcaacaacgaagacaacgaaaaacuaagaaaaccaaaacacaaaaaacuaaaacaacccgcagacggaaauccagauccaaacgcaaacccaaacguagacccaaacgcaaacccaaacguagacccaaacgcaaacccaaacgucgacccaaacgccaacccaaacgcaaacccaaacgcaaacccaaacgcaaacccaaacgccaacccaaacgcaaacccaaacgcaaacccaaacgcaaacccaaacgcaaacccaaacgcaaacccaaacgcaaacccgaacgcaaacccaaacgcaaauccuaacgcaaacccaaacgcaaacccaaacgcaaauccgaacgcaaacccaaacguagacccaaacgcaaacccaaacgcaaacccaaacgcaaacccaaacgcaaacccaaacgcaaacccuaacgcaaacccaaaugcaaacccaaacgcgaacccaaaugcaaacccaaaugcaaacccaaacgcaaacccaaacgcaaacccaaacgcaaauccaaacgcaaauccaaacgcaaacccaaacgcaaacccaaacgcaaacccaaacgccaacccaggaggagguggaagcgaaccauccgacaaacacauaaaagaauaccuaaacaaaauacaaaacucacuaauaaaacccggcucagcaaacaaaccaaaagacgaacuagacuacgccaacgacauagaaaaaaaaauauguaaaauggaaaaaugcucauaaggacuaguuauaagacugacuagcccgaugggccucccaacgggcccuccuccccuccuugcaccgagauuaauaaaaaaaaaaaaaaaaaaaaaaaaaaaaaaaaaaaaaaaaaaaaaaaaaaaaaaaaaaaaaaaaugcaucccccccccccccccccccccccccccccccaaaggcucuuuucagagccaccagaauu

SEQ ID NO: 1735 - RNA, 1195 nt, Artificial Sequence
  mRNA Design i-3 (A64-N5-C30-hSL-N5) comprising derived and/or modified sequence from Pf(3D7)__XP_001351122.1__HsALB_Pf-CSP(19-325) (opt6)
gggagaaagcuuaccaugaaauggguaacauucauaucacuccuauuccuauucucaagcgcauacucauuauuccaagaauaccaaugcuacggaucaucaucuaacacaagaguacucaacgaacuaaacuacgacaacgcaggaacuaaucucuacaacgaacuagaaaugaacuacuacggaaaacaagaaaacugguauucacuaaaaaaaaacagccgaucauuaggagaaaacgacgacggcaacaacgaagacaacgaaaaacuacgaaaaccaaaacacaaaaaauuaaaacagccagccgacggaaacccagacccaaacgcaaacccaaacguagacccaaacgcaaacccaaacguagacccaaacgcaaacccaaacguagacccaaacgcaaacccaaacgcaaacccaaacgcaaauccaaacgcaaacccaaacgccaacccaaacgcaaacccaaacgcaaaccccaacgcaaacccaaacgcaaacccaaacgcaaacccaaaugccaacccaaacgcaaacccaaacgcaaacccaaacgcaaacccaaacgcaaacccaaaugcaaacccaaacgcaaacccaaacguagacccaaacgcaaacccaaaugcaaacccaaacgcaaaccccaacgcaaacccaaacgcaaacccaaacgcaaacccaaacgcaaacccaaacgccaacccaaacgcaaacccaaacgcaaacccaaacgcaaacccaaacgcaaacccaaacgcaaauccaaacgcaaacccaaacgcaaacccaaacgcaaacccaaacgcaaacccaaacgcaaacccaaauaaaaacaaucaaggaaacggacaaggacacaacaugccaaacgauccaaaucgcaacguagacgaaaacgcaaacgcaaacagcgcagucaaaaacaacaacaacgaagaaccaucagacaaacacauaaaagaauaccuaaauaaaauacaaaacuagggacuaguuauaagacugacuagcccgaugggccucccaacgggcccuccuccccuccuugcaccgagauuaauaaaaaaaaaaaaaaaaaaaaaaaaaaaaaaaaaaaaaaaaaaaaaaaaaaaaaaaaaaaaaaaaugcaucccccccccccccccccccccccccccccccaaaggcucuuuucagagccaccagaauu

SEQ ID NO: 1736 - RNA, 1372 nt, Artificial Sequence
  mRNA Design i-3 (A64-N5-C30-hSL-N5) comprising derived and/or modified sequence from Pf(3D7)__XP_001351122.1__HsALB_Pf-CSP(19-384) (opt6)
gggagaaagcuuaccaugaaauggguaaccuuuauaucacucuuauuccuauuuucaucagcauacucacucuuccaagaauaucaaugcuacggaucaucaucaaacacaagaguccucaaugaauuaaacuaugacaaugcaggaaccaaccuauacaacgaauuagaaaugaacuacuacggcaaacaagaaaacugguacucacucaaaaaaaacucaagauccuuaggagaaaaugaugacggaaacaacgaagacaacgaaaaacuccgaaaaccaaaacacaaaaaacuaaaacaacccgccgacggaaacccagaccccaacgcaaacccaaauguagaccccaacgcaaacccaaacguagacccaaacgcaaacccaaacguagacccaaacgcaaauccaaacgccaacccaaacgcaaacccaaacgccaacccaaacgcaaacccaaacgcaaacccaaacgcaaacccaaacgcaaacccaaaugcaaacccaaaugcaaacccaaacgcaaacccaaacgcaaacccaaacgcaaacccaaacgcaaacccaaaugcaaacccaaacgcaaacccaaacgcaaacccaaacguagacccaaaugcaaacccaaacgcaaacccaaacgcaaauccaaaugcaaauccaaacgcaaauccaaacgcaaacccaaacgcaaacccaaacgcaaacccaaacgcaaauccaaaugcaaacccaaacgcaaacccaaacgcaaacccaaacgcuaacccaaacgccaauccaaacgcaaacccaaacgcaaacccuaaugcaaacccaaacgccaacccaaauaaaaauaaccaaggaaacggacaaggacacaacaugccaaacgacccaaacagaaacgucgaugaaaacgcaaacgcaaauuccgcagucaaaaacaacaacaacgaagaaccaucagacaaacacauaaaagaauaccucaacaaaauacaaaacucccuaucaacagaauggucacccugcuccguuacaugcgguaacggcauacaaguaagaauaaaaccaggaucagcuaacaaacccaaagacgaacuagacuacgccaacgacauagaaaaaaaaauaugcaaaauggaaaaaugcuccucaguauucaacguaguaaacucaucauaaggacuaguuauaagacugacuagcccgaugggccucccaacgggcccuccuccccuccuugcaccgagauuaauaaaaaaaaaaaaaaaaaaaaaaaaaaaaaaaaaaaaaaaaaaaaaaaaaaaaaaaaaaaaaaaaugcaucccccccccccccccccccccccccccccccaaaggcucuuuucagagccaccagaauu

SEQ ID NO: 1737 - RNA, 1510 nt, Artificial Sequence
  mRNA Design i-3 (A64-N5-C30-hSL-N5) comprising derived and/or modified sequence from Pf(3D7)__XP_001351122.1__HsALB_Pf-CSP(19-384)_TM domain HA (opt6)
gggagaaagcuuaccaugaaauggguaacauuuauaucacuacuuuuccuauucucaucagcauacucacucuuccaagaauaucaaugcuauggauccucaucaaacacaagaguacucaacgaauuaaacuacgauaaugccggaacaaaccuauauaacgaacuagaaaugaacuacuacggaaaacaagaaaauugguacucauuaaaaaaaaacuccagaucccuuggagaaaacgacgauggaaacaacgaagauaacgaaaaauuaagaaaaccaaaacacaaaaaauugaaacaaccagcagacgguaacccagacccaaacgccaacccaaacguagacccaaacgcgaauccaaacgucgacccaaacgcaaaucccaacguagacccaaaugcaaauccaaaugccaauccaaacgcaaacccaaacgcaaacccaaaugcaaacccaaacgccaacccaaacgcaaauccaaacgcaaacccaaacgcaaacccaaacgccaacccaaacgccaaccccaaugcaaacccaaaugcaaacccaaacgcaaacccaaacgcaaauccaaacgcaaacccaaacgccaacccaaacguagacccaaacgcaaauccaaacgcaaacccaaacgccaauccaaacgcaaacccaaacgccaacccaaaugcaaaucccaacgcaaacccaaacgcaaauccaaaugcaaaccccaacgcaaauccaaacgcaaacccaaacgcaaauccaaacgcaaauccaaaugcaaacccaaacgcaaacccuaaugcaaacccaaacgcaaacccaaacgccaacccaaacaaaaacaaccaaggaaacggacaaggucacaauaugccaaaugacccaaaccgaaacguagacgaaaacgcaaaugccaauagcgcaguaaaaaacaauaacaacgaagaaccuucagauaaacacauaaaagaauaccuaaacaaaauacaaaacucccuaucaacagaauggucaccuuguucagucacauguggaaacggaauacaaguaagaauaaaaccaggaucagcaaacaaaccaaaagacgaacuagauuacgcaaacgauauagaaaaaaaaauauguaaaauggaaaaaugcuccucagucuucaacguagucaacaguuccaaacuagaaucaaccagaaucuaccaaauacuagcaauauauuccacaguagcaagcucacucguauuaguagucucccuaggagcaauaucauucuggaugugcucaaacggaagcuuacaaugccgaauauguauauaaggacuaguuauaagacugacuagcccgaugggccucccaacgggcccuccuccccuccuugcaccgagauuaauaaaaaaaaaaaaaaaaaaaaaaaaaaaaaaaaaaaaaaaaaaaaaaaaaaaaaaaaaaaaaaaaugcaucccccccccccccccccccccccccccccccaaaggcucuuuucagagccaccagaauu

SEQ ID NO: 1738 - RNA, 1222 nt, Artificial Sequence
  mRNA Design i-3 (A64-N5-C30-hSL-N5) comprising derived and/or modified sequence from Pf(3D7)__XP_001351122.1__HsALB_Pf-CSP(82-397) (opt6)
gggagaaagcuuaccaugaaauggguaacauucauaucacuacuauuccucuucaguucagccuauagcgauaacgaaaaacuaagaaaaccaaaacacaaaaaacucaaacaaccagcagacggaaacccagacccaaacgcaaacccaaacguagacccaaacgcaaacccaaacguagacccaaacgcaaauccaaacguagacccaaaugcaaaccccaacgcaaacccaaacgcaaacccaaacgcaaacccaaacgcaaacccaaaugcgaacccaaaugcaaauccaaacgcaaacccaaacgcaaacccaaacgcaaacccaaacgcuaacccaaacgcaaacccaaacgcaaacccaaaugcaaacccaaacgcaaacccaaacgcaaaccccaacgcaaacccaaacguagacccaaacgcaaacccaaacgcaaacccaaacgcaaacccaaacgccaacccaaaugccaacccaaacgcaaacccaaaugcaaaccccaacgcaaacccaaacgccaacccaaacgcaaacccaaacgcaaacccaaacgcaaaccccaaugcaaacccaaacgcaaacccaaaugcaaauccaaacgcaaacccaaacgcaaacccaaacgcaaacccaaacaaaaacaaccaaggaaacggacaaggacacaacaugccaaacgacccaaaucgaaacgucgaugaaaacgccaacgcaaacucagcaguaaaaaacaacaacaacgaagaaccaucugacaaacacauaaaagaauaccuaaacaaaauacaaaacucauuauccaccgaauggucaccauguucaguaacaugcggcaacggaauacaagucagaauaaaaccaggcucagcaaauaaaccaaaagacgaacuagacuacgcaaacgacauagaaaaaaaaauaugcaaaauggaaaaauguucaucagucuucaacguaguaaacucaucaauaggacucauaaugguacuaucauuccuauucuuaaacuaaggacuaguuauaagacugacuagcccgaugggccucccaacgggcccuccuccccuccuugcaccgagauuaauaaaaaaaaaaaaaaaaaaaaaaaaaaaaaaaaaaaaaaaaaaaaaaaaaaaaaaaaaaaaaaaaugcaucccccccccccccccccccccccccccccccaaaggcucuuuucagagccaccagaauu

SEQ ID NO: 1739 - RNA, 574 nt, Artificial Sequence
  mRNA Design i-3 (A64-N5-C30-hSL-N5) comprising derived and/or modified sequence from Pf(3D7)__XP_001351122.1__HsALB_Pf-CSP(93-192) (opt6)
gggagaaagcuuaccaugaaauggguaacauucaucucacuacuauuccuauucucaagcgcauacucaaaacuaaaacaaccagcagacggaaacccagacccaaacgcaaacccaaacguagacccaaacgcaaacccaaacguagacccaaacgcaaacccaaacguagacccaaacgcaaacccaaacgcaaacccaaacgcaaacccaaacgcaaacccaaacgcaaacccaaacgcaaacccaaacgcaaacccaaacgcaaacccaaacgcaaacccaaacgcaaacccaaacgcaaacccaaacgcaaacccaaacgcaaacccaaacgcaaacccaaacgcaaacccaaacgcaaacccauaaggacuaguuauaagacugacuagcccgaugggccucccaacgggcccuccuccccuccuugcaccgagauuaauaaaaaaaaaaaaaaaaaaaaaaaaaaaaaaaaaaaaaaaaaaaaaaaaaaaaaaaaaaaaaaaaugcaucccccccccccccccccccccccccccccccaaaggcucuuuucagagccaccagaauu

SEQ ID NO: 1740 - RNA, 814 nt, Artificial Sequence
  mRNA Design i-3 (A64-N5-C30-hSL-N5) comprising derived and/or modified sequence from Pf(3D7)__XP_001351122.1__HsALB_Pf-CSP(93-272) (opt6)
gggagaaagcuuaccaugaaaugggucacauucauaucacuccuauuccuauucucaagcgcauacucaaaacuaaaacaaccagcagacggaaacccagacccaaacgcaaacccaaacguagacccaaacgcaaacccaaacguagacccaaacgcaaacccaaacguagacccaaacgcaaacccaaacgcaaacccaaacgccaacccaaacgcaaacccaaacgcaaacccaaacgcaaacccaaacgcaaacccaaacgcaaacccaaacgcaaacccaaacgcaaacccaaacgcaaacccaaacgcaaacccaaacgcaaauccaaacgcaaacccaaacgccaacccaaacgcaaacccaaacgcaaacccaaacguagacccaaacgcaaacccaaacgcaaacccaaacgcaaacccaaacgcaaacccaaacgcaaacccaaacgcaaacccaaacgcaaacccaaacgcaaacccaaacgcaaauccaaacgcaaacccaaacgcaaacccaaacgcaaacccaaacgcaaacccaaacgcaaacccaaacgcaaacccaaacgcaaacccaaacgcaaacccaaacgcaaacccauaaggacuaguuauaagacugacuagcccgaugggccucccaacgggcccuccuccccuccuugcaccgagauuaauaaaaaaaaaaaaaaaaaaaaaaaaaaaaaaaaaaaaaaaaaaaaaaaaaaaaaaaaaaaaaaaaugcaucccccccccccccccccccccccccccccccaaaggcucuuuucagagccaccagaauu

SEQ ID NO: 1741 - RNA, 1189 nt, Artificial Sequence
  mRNA Design i-3 (A64-N5-C30-hSL-N5) comprising derived and/or modified sequence from Pf(3D7)__XP_001351122.1__HsALB_Pf-CSP(93-397) (opt6)
gggagaaagcuuaccaugaaauggguaacauucauaucacuccuauuccuauucucaucagcauacucaaaacuaaaacaacccgcagacggaaacccagacccaaacgccaacccaaacguagacccaaacgcaaacccgaacguagacccaaacgcaaaccccaacguagacccaaacgcaaacccaaaugcaaacccaaacgcaaacccaaacgcaaacccaaacgcaaacccaaacgcaaacccaaacgcaaacccaaacgcaaacccaaacgcaaacccaaacgcgaaucccaacgcaaauccaaacgcaaacccaaacgcaaauccaaacgcaaacccgaacgcaaacccaaacgcaaacccaaacgcaaacccaaacguagauccaaacgcaaauccaaacgcaaacccaaacgcaaauccaaacgcaaacccaaacgcaaacccaaacgcaaaccccaacgcaaacccaaacgcaaacccaaacgcaaacccaaacgcaaauccaaacgccaacccaaacgcaaacccaaacgcaaacccaaacgcgaacccaaacgcgaacccaaacgcaaacccaaacgcaaacccaaacgcaaacccaaacaaaaacaaccaagggaacggacaaggacacaacaugccaaacgauccaaacagaaacguagacgaaaacgcaaacgcaaacucagcaguaaaaaacaacaacaacgaagaaccaucagacaaacacauaaaagaauaccuaaacaaaauacaaaacucacucucaacagaauggucaccaugcaguguaacaugcggaaauggaauacaaguacguauaaaaccaggaucagcaaacaaaccaaaagacgaauuagacuacgccaacgauauagaaaaaaaaauaugcaaaauggaaaaaugcagcucagucuucaacguagucaacagcucaauaggacuaauaaugguccucucauucuuauuucuaaacugaggacuaguuauaagacugacuagcccgaugggccucccaacgggcccuccuccccuccuugcaccgagauuaauaaaaaaaaaaaaaaaaaaaaaaaaaaaaaaaaaaaaaaaaaaaaaaaaaaaaaaaaaaaaaaaaugcaucccccccccccccccccccccccccccccccaaaggcucuuuucagagccaccagaauu

SEQ ID NO: 1742 - RNA, 559 nt, Artificial Sequence
  mRNA Design i-3 (A64-N5-C30-hSL-N5) comprising derived and/or modified sequence from Pf(3D7)__XP_001351122.1__HsALB_Pf-CSP(98-192) (opt6)
gggagaaagcuuaccaugaaauggguaacauucauaagccuacuauuccuauucagcucagcauacagcgcagacggaaacccagacccaaacgcaaacccaaacguagacccaaacgcaaacccaaacguagacccaaacgcaaacccaaacguagacccaaacgcaaacccaaacgcaaacccaaacgcaaacccaaacgcaaacccaaacgcaaacccaaacgcaaacccaaacgcaaacccaaacgcaaacccaaacgcaaacccaaacgcaaacccaaacgcaaacccaaacgcaaacccaaacgcaaacccaaacgcaaacccaaacgcaaacccaaacgcaaacccauaaggacuaguuauaagacugacuagcccgaugggccucccaacgggcccuccuccccuccuugcaccgagauuaauaaaaaaaaaaaaaaaaaaaaaaaaaaaaaaaaaaaaaaaaaaaaaaaaaaaaaaaaaaaaaaaaugcaucccccccccccccccccccccccccccccccaaaggcucuuuucagagccaccagaauu

SEQ ID NO: 1743 - RNA, 799 nt, Artificial Sequence
  mRNA Design i-3 (A64-N5-C30-hSL-N5) comprising derived and/or modified sequence from Pf(3D7)__XP_001351122.1__HsALB_Pf-CSP(98-272) (opt6)
gggagaaagcuuaccaugaaauggguaacauucauaucacuacuauuccuauucagcucagccuacagcgcagacggaaacccagacccaaacgcaaacccaaacguagacccaaacgcaaacccaaacgucgacccaaacgcaaacccaaacguagacccaaacgcaaacccaaacgcaaacccaaacgcaaacccaaacgcaaacccaaacgcaaacccaaacgcaaacccaaacgcaaacccaaacgcaaacccaaacgcaaacccaaacgcaaacccaaacgcaaacccaaacgcaaacccaaacgcaaacccaaacgcaaacccaaacgcaaacccaaacgcaaacccaaacgcaaacccaaacguagacccaaaugcaaacccaaacgcaaacccaaacgcaaacccaaacgcaaacccaaacgcaaacccaaacgcaaacccaaacgcaaacccaaacgcaaacccaaacgcaaacccaaacgcaaacccaaacgcaaacccaaacgcgaacccaaacgcaaacccaaacgcaaacccaaacgcaaacccaaacgcaaacccaaaugcaaacccaaacgcaaacccauaaggacuaguuauaagacugacuagcccgaugggccucccaacgggcccuccuccccuccuugcaccgagauuaauaaaaaaaaaaaaaaaaaaaaaaaaaaaaaaaaaaaaaaaaaaaaaaaaaaaaaaaaaaaaaaaaugcaucccccccccccccccccccccccccccccccaaaggcucuuuucagagccaccagaauu

SEQ ID NO: 1744 - RNA, 1105 nt, Artificial Sequence
  mRNA Design i-3 (A64-N5-C30-hSL-N5) comprising derived and/or modified sequence from Pf(3D7)__XP_001351122.1__HsALB_Pf-CSP(98-374) (opt6)
gggagaaagcuuaccaugaaaugggucacauucauaucccuacuauuccuauucucaucagcauauucagcagauggaaacccagacccaaacgccaacccaaacguagacccaaacgcaaacccaaacguagacccaaacgcaaacccaaacguagacccaaacgcaaacccaaacgcaaacccaaacgcaaacccaaacgcaaacccaaacgcaaacccaaacgcaaacccaaacgcaaacccaaacgcaaacccaaacgcaaacccaaacgcaaacccaaacgcaaacccaaaugcaaauccaaacgcaaauccaaacgcaaacccaaacgccaacccaaacgcaaauccaaacgcaaacccaaacguagacccgaacgcaaacccgaacgcaaacccaaacgcaaacccaaaugcaaacccaaacgcaaacccaaacgccaacccaaacgcaaacccaaacgcaaacccaaaugcaaacccaaacgcaaacccaaacgccaacccaaacgcaaacccaaacgcaaacccaaacgcaaacccaaacgcaaacccaaaugcaaacccaaacgcaaacccaaacgcaaacccaaacaaaaacaaccaaggaaauggacaaggccacaacaugccaaacgacccaaacagaaacguagacgaaaacgcaaacgcaaacuccgcagucaaaaacaacaacaacgaagaaccauccgacaaacacauaaaagaauaccucaauaaaauacaaaacucacuaucaacagaaugguccccaugcucaguaacaugcggaaacggaauacaaguaagaauaaaaccaggauccgcaaacaaaccaaaagacgaacuagacuacgcaaacgauauagaaaaaaaaauaugcaaaauggaaaaaugcuaaggacuaguuauaagacugacuagcccgaugggccucccaacgggcccuccuccccuccuugcaccgagauuaauaaaaaaaaaaaaaaaaaaaaaaaaaaaaaaaaaaaaaaaaaaaaaaaaaaaaaaaaaaaaaaaaugcaucccccccccccccccccccccccccccccccaaaggcucuuuucagagccaccagaauu

SEQ ID NO: 1745 - RNA, 1174 nt, Artificial Sequence
  mRNA Design i-3 (A64-N5-C30-hSL-N5) comprising derived and/or modified sequence from Pf(3D7)__XP_001351122.1__HsALB_Pf-CSP(98-397) (opt6)
gggagaaagcuuaccaugaaauggguaaccuucauaucauuacuauuccuuuucagcucggcauacucagcagacggcaacccagacccaaacgcaaacccaaacgucgacccaaaugcgaacccaaacguagacccaaacgcaaacccaaacguagauccaaacgcaaacccaaacgcaaacccaaacgcaaacccaaacgcaaacccaaacgccaacccaaaugcaaacccaaacgcaaaccccaacgcaaacccaaacgcaaacccaaacgcaaacccaaacgcaaaucccaacgcaaauccaaacgcaaacccaaaugcaaacccaaacgccaacccaaacgcaaacccaaacgcaaaccccaaugucgacccaaacgcaaacccaaacgcaaacccaaacgcaaacccaaacgcaaauccaaacgcaaaccccaacgcaaacccaaacgcaaacccaaacgcaaacccaaacgcaaacccaaacgcaaacccaaacgcaaacccaaacgcaaacccaaacgcaaacccaaacgcaaacccaaacgcaaauccaaacgcaaacccaaacgcaaacccaaacgcaaacccaaacaaaaacaaccaaggaaauggacaaggacacaacaugccaaaugaccccaacagaaacgucgacgaaaacgccaacgcaaacagcgcaguaaaaaacaacaacaaugaagaaccaucagacaaacacauaaaagaauaccuaaacaaaauucaaaacucacuaucaaccgaaugguccccaugcucaguaacaugcggaaacgguauacaaguacgaauaaaaccaggaucagcaaacaaaccaaaagacgaacuagacuacgcaaacgacauagaaaaaaaaauaugcaaaauggaaaaaugcucaucaguuuuuaacguagucaauagcucaaucggacucauaaugguacuaucauuucucuuccuaaauuaaggacuaguuauaagacugacuagcccgaugggccucccaacgggcccuccuccccuccuugcaccgagauuaauaaaaaaaaaaaaaaaaaaaaaaaaaaaaaaaaaaaaaaaaaaaaaaaaaaaaaaaaaaaaaaaaugcaucccccccccccccccccccccccccccccccaaaggcucuuuucagagccaccagaauu

SEQ ID NO: 1746 - RNA, 1501 nt, Artificial Sequence
  mRNA Design i-3 (A64-N5-C30-hSL-N5) comprising derived and/or modified sequence from Pf(3D7)__XP_001351122.1__HsALB_Pf-CSP(199-377)_L(PVTN)_HBsAg (opt6)
gggagaaagcuuaccaugaaauggguaacauuuauauccuuacuauuucucuucuccucagcuuacucugacccaaacgcaaaucccaacgcaaacccaaaugcaaacccaaacgcaaauccaaacgcaaacccaaaugcuaaucccaacgcaaacccaaacgcaaaccccaaugccaacccaaacgcuaacccaaacgcaaacccaaacgccaacccaaaugcaaacccaaacgcaaacccaaacgcaaauccaaaugcaaacccaaacgcaaauccaaacgcaaacccaaacaaaaacaaccaaggaaacggacaaggccauaauaugccuaaugaccccaacagaaacguagacgaaaaugcuaacgccaacucagcaguaaaaaacaacaauaacgaagaaccaucagauaaacacauaaaagaauacuuaaacaaaauacaaaauucauuaucaacagaauggucaccaugcucagucaccugcggaaacgguauacaaguacgcauaaaaccaggcucagcaaauaaaccaaaagacgaacuagauuacgcuaacgacauagaaaaaaaaauaugcaaaauggaaaaaugcucaucaguaccaguaacaaauauggaaaacauaacaucaggauuccuaggcccacucuuaguacuacaagcaggauuuuuucuucuaacaagaaucuuaacuauaccccaaucacucgacucaugguggaccucacuaaauuuccucggaggaucuccaguaugccucggacaaaauucacaaucaccaacauccaaucacucacccaccuccugcccaccaaucugcccaggauacagauggaugugcuuacgaagauucauaauauuccuauucauacuacuucuaugcuuaauauuccuucucguccuacucgacuaucaaggaaugcucccuguaugcccacucauaccaggauccacaacaacuaacacaggacccuguaaaacaugcacaacacccgcccaaggaaauucaauguuccccucuugcugcugcacaaaaccaacagacggaaauugcacaugcauuccaauuccaucaucuugggcauuugcaaaauacuuaugggaaugggcaucaguccgauucucgugguuaucuuuacuaguaccauucguucaaugguuuguaggacuuucaccuacaguaugguuaucugcaauauggaugaugugguacuggggaccaucauuauacucaaucguaucaccauuuauaccacuacuacccauauuuuucugccuauggguauacauauaaggacuaguuauaagacugacuagcccgaugggccucccaacgggcccuccuccccuccuugcaccgagauuaauaaaaaaaaaaaaaaaaaaaaaaaaaaaaaaaaaaaaaaaaaaaaaaaaaaaaaaaaaaaaaaaaugcaucccccccccccccccccccccccccccccccaaaggcucuuuucagagccaccagaauu

SEQ ID NO: 1747 - RNA, 1240 nt, Artificial Sequence
  mRNA Design i-3 (A64-N5-C30-hSL-N5) comprising derived and/or modified sequence from Pb(ANKA)__XP_022712148.1__Pb-CSP (opt6)
gggagaaagcuuaccaugaaaaaaugcacaaucuuaguaguagcaucacuccuacuagucaacucucuccuaccaggauacggccaaaacaaauccauacaagcccaacgcaaccuaaacgaauuaugcuauaacgaaggcaacgacaacaaauuauaccauguauuaaacucaaaaaacggaaaaauauacaacagaaacacaguaaacagacuacucgcagacgcacccgaaggaaaaaaaaaugaaaaaaaaaacgaaaaaauagaacgcaacaacaaacuuaaacaaccaccaccacccccaaaccccaacgacccaccacccccaaaccccaacgauccaccccccccaaaccccaacgacccaccacccccaaacccaaacgaccccccaccaccaaaugcaaacgacccaccaccaccaaacgcaaacgacccagcaccacccaacgccaacgaccccgcaccaccaaacgcaaacgauccagcucccccaaacgcaaacgauccagcaccaccaaacgccaacgacccaccaccaccaaacccaaacgacccagcaccaccaaacgcaaaugacccaccaccccccaacccaaacgaccccgccccaccacaagguaacaacaacccacaaccacaaccacgcccacaaccacaaccacaaccacaaccacaaccccaaccacaaccacaaccacaaccacgcccacaaccccaaccucaaccaggaggcaauaacaacaacaaaaacaauaauaacgaugacuccuacauaccaucugccgaaaaaauccucgaauucguaaaacaaauaagagacucaauaacagaagaauggucacaauguaacguaacaugcggaucaggcauacgaguaagaaaacgcaaaggaucaaacaaaaaagcagaagaccuaacacucgaagacauugacacagaaaucugcaaaauggacaaaugcucaucaauauucaacauagucucaaacucauuaggauucguaauccuacuaguacucguauucuucaacuaaggacuaguuauaagacugacuagcccgaugggccucccaacgggcccuccuccccuccuugcaccgagauuaauaaaaaaaaaaaaaaaaaaaaaaaaaaaaaaaaaaaaaaaaaaaaaaaaaaaaaaaaaaaaaaaaugcaucccccccccccccccccccccccccccccccaaaggcucuuuucagagccaccagaauu

SEQ ID NO: 1748 - RNA, 1405 nt, Artificial Sequence
  mRNA Design i-3 (A64-N5-C30-hSL-N5) comprising derived and/or modified sequence from Pb(ANKA)__XP_022712148.1__Pb-CSP_L(G4SG4)_TM domain HA (opt6)
gggagaaagcuuaccaugaaaaaaugcaccauacuagucguagccucacuacuacuagucaauucauuauuaccaggauacggccaaaauaaauccauacaagcacaaagaaaucucaaugaauuaugcuacaacgaaggaaacgacaauaaacuauaccacguauuaaacucaaaaaauggaaaaauauacaaccgaaacaccguaaaccguuuauuagcagacgcaccagaaggaaaaaaaaacgaaaaaaaaaacgaaaaaauugaaagaaacaauaaacucaaacaaccaccucccccacccaacccaaacgacccacccccacccaacccaaacgacccaccacccccaaaccccaacgauccccccccacccaauccaaacgauccaccaccaccaaacgcaaacgacccaccaccaccaaacgcaaacgacccagcaccaccaaacgcaaacgaccccgcaccaccaaacgcaaacgauccagcaccacccaacgcaaacgacccagcacccccaaacgccaacgaccccccaccaccaaacccaaacgaccccgcaccuccaaacgcaaacgacccaccaccaccaaacccuaacgacccagcccccccacaaggaaacaacaauccucaaccacaaccacgcccucaaccacaaccccaaccucaaccacaaccacaaccacaaccccaaccacaaccacgaccacaaccucaaccucaaccaggaggcaacaacaacaacaaaaacaacaacaacgacgacucauacauaccaucagcagaaaaaauacuagaauucgucaaacaaauaagagacucuauaacugaagaauggucccaaugcaauguaacuugcggaucaggcaucagagucagaaaacgcaaaggauccaacaaaaaagccgaagaccuaacccucgaagauauagacacagaaaucugcaaaauggacaaaugcucaucaauuuucaauauagucucaaauucacuaggauucgucaucuuacuaguacuaguauucuuuaauggaggaggaggaucaggaggaggaggaaaacuagaaucaacccgaauauaccaaauacuagcaauauacucaaccguagcaucaucacucguacuagugguauccuuaggagcaauaagcuuuuggaugugcuccaacggcucucuacaaugucgaauaugcauaugaggacuaguuauaagacugacuagcccgaugggccucccaacgggcccuccuccccuccuugcaccgagauuaauaaaaaaaaaaaaaaaaaaaaaaaaaaaaaaaaaaaaaaaaaaaaaaaaaaaaaaaaaaaaaaaaugcaucccccccccccccccccccccccccccccccaaaggcucuuuucagagccaccagaauu

SEQ ID NO: 1749 - RNA, 1225 nt, Artificial Sequence
  mRNA Design i-3 (A64-N5-C30-hSL-N5) comprising derived and/or modified sequence from Pb(ANKA)__XP_022712148.1__HsALB_Pb-CSP(24-340) (opt6)
gggagaaagcuuaccaugaaaugggucacauucauaucacuccuauuccuauucucaucagcauacucacaaaacaaaucaauccaagcccaacgaaaccuaaacgaacuaugcuacaacgaaggaaacgauaacaaacuauaccacguacuaaacucaaaaaacggaaaaauauacaaucgaaacacaguaaacagacucuuagcagacgcaccagaaggaaaaaaaaacgaaaaaaaaaacgaaaaaaucgaaagaaacaacaaacucaaacaaccaccaccaccaccaaacccaaacgauccaccaccccccaacccaaacgacccacccccacccaacccaaacgaccccccaccaccaaacccaaacgaccccccaccaccaaacgcaaacgauccaccaccccccaacgcaaacgauccagcaccacccaacgccaacgacccagcaccacccaaugcaaacgacccagcacccccaaacgcaaacgacccagcacccccaaacgccaacgacccaccaccaccaaacccaaaugacccagcaccaccaaacgccaacgauccaccacccccaaacccaaacgacccugcaccuccccaaggaaacaacaacccacaaccacaaccaagaccacaaccucaaccacaaccacaaccacaaccacaaccacaaccacaaccccaaccaagaccacaaccacaaccccaaccaggaggcaacaacaauaacaaaaauaacaacaacgacgacucauacaucccauccgcagaaaaaauauuagaauuuguaaaacaaauaagagacucaauaacagaagaauggucccaaugcaacguaacaugcgguucaggaauccguguacgaaaacgcaaaggcucaaacaaaaaagcagaagaccucacacucgaagacauugacacagaaauaugcaaaauggacaaaugcuccucaaucuucaacauugucucaaacucauuaggauucguaaucuuacucguacucguauucuucaacuaaggacuaguuauaagacugacuagcccgaugggccucccaacgggcccuccuccccuccuugcaccgagauuaauaaaaaaaaaaaaaaaaaaaaaaaaaaaaaaaaaaaaaaaaaaaaaaaaaaaaaaaaaaaaaaaaugcaucccccccccccccccccccccccccccccccaaaggcucuuuucagagccaccagaauu

SEQ ID NO: 1750 - RNA, 1243 nt, Artificial Sequence
  mRNA Design i-3 (A64-N5-C30-hSL-N5) comprising derived and/or modified sequence from Pb(ANKA)__XP_022712148.1__HsIns-iso1_Pb-CSP(24-340) (opt6)
gggagaaagcuuaccauggcacuauggaugagacuacuaccacuauuagcacuacucgcacuauggggacccgacccagcagcagcacaaaacaaaucaauacaagcccaaagaaaccuaaaugaacuaugcuacaacgaaggaaacgacaacaaauuauaccacguacuaaacuccaaaaacggaaaaauuuacaacagaaacaccguaaaccgacuacuagcagacgcaccagaaggaaaaaaaaacgaaaaaaaaaacgaaaaaauagaaagaaacaauaaacuaaaacaaccaccacccccaccaaaccccaacgacccaccaccaccaaacccaaacgacccuccaccaccaaaccccaacgaccccccucccccaaacccaaacgaccccccaccaccaaacgcaaaugaccccccccccccaaaugcaaacgaccccgcaccaccaaacgcaaacgacccagccccaccaaacgccaacgauccugcaccaccaaaugcaaacgacccagcccccccaaacgcaaaugacccaccaccaccaaacccaaacgacccugcaccaccaaaugcuaacgaccccccaccaccaaauccaaacgaccccgcccccccacaaggaaacaauaacccacaaccccaacccagaccacaaccacaaccucaaccacaaccccaaccacaaccccaaccacaaccacaaccacgcccacaaccacaaccacaaccaggaggaaacaacaauaauaaaaacaacaauaacgacgacucauacauucccuccgcagaaaaaauacucgaauucguaaaacaaauaagagacucuauaacagaagaauggucccaaugcaacgucacaugcggauccggaauaagagucagaaaaagaaaaggaucaaacaaaaaagcagaagaccucacacuagaagacauagauacagaaauaugcaaaauggacaaauguucaucaauauuuaacauaguaucaaacucuuuaggauucgucauauuacucguacuaguauucuucaacuaaggacuaguuauaagacugacuagcccgaugggccucccaacgggcccuccuccccuccuugcaccgagauuaauaaaaaaaaaaaaaaaaaaaaaaaaaaaaaaaaaaaaaaaaaaaaaaaaaaaaaaaaaaaaaaaaugcaucccccccccccccccccccccccccccccccaaaggcucuuuucagagccaccagaauu

SEQ ID NO: 1751 - RNA, 1222 nt, Artificial Sequence
  mRNA Design i-3 (A64-N5-C30-hSL-N5) comprising derived and/or modified sequence from Pb(ANKA)__XP_022712148.1__HsSPARC_Pb-CSP(24-340) (opt6)
gggagaaagcuuaccaugcgagcauggauauucuucuuacuuugucucgcaggacgcgcccuagcacaaaacaaaucaauacaagcacaaagaaaccucaacgaacuaugcuacaacgaaggaaacgacaacaaacuauaccacgucuuaaacucaaaaaacggaaaaauauacaauagaaacacaguaaaccgacuauuagcagacgcacccgaaggaaaaaaaaacgaaaaaaaaaaugaaaaaaucgaaagaaacaacaaacucaaacaaccacccccacccccaaacccuaacgacccaccaccaccaaaccccaacgauccaccaccaccaaacccaaacgacccaccaccccccaacccaaacgacccacccccacccaacgccaacgauccaccacccccaaaugcaaacgacccagccccaccaaacgcaaacgauccagcuccaccaaacgcaaacgaccccgccccaccaaacgccaacgacccagcuccaccaaacgcaaaugauccaccaccacccaacccaaacgacccugcacccccaaacgcaaacgacccaccaccaccaaacccaaacgacccagcacccccacaaggcaacaauaacccacaaccacaacccagaccacaaccccaaccgcaaccccaaccacaaccacaaccacaaccacaaccacaaccaagaccacaaccacaaccucaaccuggcggaaacaauaacaauaaaaacaacaacaacgacgacucauauauaccaucagccgaaaaaauucuagaauucguaaaacaaaucagagacucaauaacagaagaauggucacaaugcaacguaacauguggauccggaauaagaguaagaaaaagaaaaggaucaaacaaaaaagcagaagaucuaacacuagaagauauagacacagaaauaugcaaaauggacaaaugcucaucaauauucaacauagucuccaacucacucggauucguaauccuacucguacucguauucuucaacuaaggacuaguuauaagacugacuagcccgaugggccucccaacgggcccuccuccccuccuugcaccgagauuaauaaaaaaaaaaaaaaaaaaaaaaaaaaaaaaaaaaaaaaaaaaaaaaaaaaaaaaaaaaaaaaaaugcaucccccccccccccccccccccccccccccccaaaggcucuuuucagagccaccagaauu

SEQ ID NO: 1752 - RNA, 1225 nt, Artificial Sequence
  mRNA Design i-3 (A64-N5-C30-hSL-N5) comprising derived and/or modified sequence from Pb(ANKA)__XP_022712148.1__IgE_Pb-CSP(24-340) (opt6)
gggagaaagcuuaccauggacuggacguggauauuauuuuuagucgccgcagccaccagaguacacucucaaaacaaaucaauacaagcccaaagaaaucuaaacgaauuaugcuacaacgaaggaaacgacaacaaacuauaccacguccucaacucuaaaaauggaaaaauauacaacagaaacaccguaaacagacuacuagcagacgcaccagaaggaaaaaaaaaugaaaaaaaaaacgaaaaaauagaaagaaauaacaaacucaaacaaccaccaccaccucccaacccaaacgacccaccacccccaaacccaaaugacccaccaccaccaaacccaaacgacccaccacccccaaacccaaaugacccaccaccaccaaacgcaaacgacccaccaccaccaaacgcaaacgacccagccccaccaaacgcaaacgacccagcaccaccaaacgcaaacgacccagcaccacccaaugccaaugacccagcaccaccaaacgcaaacgaccccccaccaccaaacccuaaugaccccgcaccaccaaacgcaaacgaccccccaccaccuaaccccaacgaccccgccccaccacaaggaaacaacaacccacaaccacaaccacguccacaaccacaaccacaaccccaaccacaaccccaaccacaaccacaaccacaaccccgaccacaaccacaaccacaacccggagguaacaacaacaauaaaaacaacaauaacgacgacuccuacauacccuccgcagaaaaaauacuagaauucguaaaacaaauaagagacucaauaacugaagaauggucacaauguaacguaacaugcgguucaggaauaagagucagaaaaagaaaaggaucaaacaaaaaagcagaagauuuaacacuagaagacauagacaccgaaauaugcaaaauggacaaaugcagcuccaucuucaacauaguaucaaacucacuaggauuuguaauacuacucguacuaguauucuucaauuaaggacuaguuauaagacugacuagcccgaugggccucccaacgggcccuccuccccuccuugcaccgagauuaauaaaaaaaaaaaaaaaaaaaaaaaaaaaaaaaaaaaaaaaaaaaaaaaaaaaaaaaaaaaaaaaaugcaucccccccccccccccccccccccccccccccaaaggcucuuuucagagccaccagaauu

SEQ ID NO: 1753 - RNA, 1411 nt, Artificial Sequence
  mRNA Design i-3 (A64-N5-C30-hSL-N5) comprising derived and/or modified sequence from Pf(3D7)__XP_001351122.1__Pf-CSP (opt11)
gggagaaagcuuaccaugaugcgaaagcuugcgauccucagcgucuccucauuccuauucguagaagcacuauuccaagaauaccaaugcuacggcucauccucaaacacacgcguacucaacgaacucaacuacgacaacgcaggaacaaaccucuacaacgaacuagagaugaacuacuacggcaaacaagaaaacugguacucucucaaaaaaaacucacgaagccucggcgagaacgacgacggaaacaacgaagacaacgaaaaacuccgcaaaccaaaacacaaaaaacucaaacaacccgccgacggaaacccagacccaaacgcaaacccaaacguagacccaaacgccaaccccaacguagaccccaacgccaacccuaacgucgaccccaaugcaaaccccaacgcgaacccaaacgcaaaccccaacgcaaaccccaacgcaaacccaaacgccaaccccaacgcaaacccaaacgcaaacccuaacgccaacccaaacgccaacccaaacgccaacccaaacgcaaacccgaacgccaaccccaacgccaacccaaacgcaaacccaaacgcaaaccccaacgccaaccccaacguagaccccaacgcaaaccccaacgcaaacccaaacgccaaccccaacgccaaccccaacgccaaccccaacgccaaccccaaugccaacccaaacgcgaaccccaacgcaaacccgaacgcaaacccaaacgcgaacccaaacgcgaacccaaacgccaaccccaacgccaaccccaacgcaaacccaaacgcgaacccaaacgcaaaccccaacgccaacccaaacaaaaacaaccaaggaaacggacaaggccacaacaugccaaacgaccccaaccgcaacguagacgaaaacgccaacgccaacuccgcugucaagaacaacaacaacgaagaaccauccgacaaacacauaaaagaauaccuaaacaaaauccaaaacucccucucaaccgaauggucccccugcuccgucacaugcggaaacggcauccaaguccgaaucaaaccaggcuccgccaacaaacccaaagacgaacuggacuacgccaacgacaucgaaaaaaaaaucugcaaaauggaaaaaugcucauccgucuucaacguggucaacuccuccaucggacuaauaaugguccucuccuuccuauuccuaaacuaaggacuaguuauaagacugacuagcccgaugggccucccaacgggcccuccuccccuccuugcaccgagauuaauaaaaaaaaaaaaaaaaaaaaaaaaaaaaaaaaaaaaaaaaaaaaaaaaaaaaaaaaaaaaaaaaugcaucccccccccccccccccccccccccccccccaaaggcucuuuucagagccaccagaauu

SEQ ID NO: 1754 - RNA, 1342 nt, Artificial Sequence
  mRNA Design i-3 (A64-N5-C30-hSL-N5) comprising derived and/or modified sequence from Pf(3D7)__XP_001351122.1__Pf-CSP(1-374) (opt11)
gggagaaagcuuaccaugaugcgcaaacucgcaauccucuccgucucaucguuccuauucguagaagcacucuuccaagaauaccaaugcuacggcucaagcuccaacacaagaguacucaacgaacucaacuacgacaaugccggaacaaaccuauacaacgagcuagaaaugaacuacuacggcaaacaagaaaacugguacucgcuaaaaaaaaacagcagaagccuaggugaaaacgacgacggaaacaacgaagacaacgaaaaacugcgcaaaccaaaacacaaaaaacuaaaacaacccgcagacggcaacccagacccaaacgcaaacccaaacguagaccccaacgccaacccaaacguagacccaaacgccaacccaaacguagacccaaacgcaaacccgaacgcaaacccaaacgcaaacccaaacgcaaacccaaacgcaaacccaaacgccaaccccaacgcaaauccaaacgcaaaccccaacgcaaaccccaacgccaacccaaacgcaaaccccaacgcgaacccaaacgccaaccccaacgccaacccaaacgcaaacccaaacgcaaacccaaacgccaaccccaacgucgacccaaacgccaacccaaacgcaaaccccaacgccaaccccaacgcaaacccaaacgccaacccgaacgcaaacccgaacgcaaacccaaacgcaaaccccaacgcaaaccccaacgcaaacccaaacgcaaaccccaacgccaaccccaacgccaaccccaacgcaaacccaaacgcaaacccgaacgcaaaccccaacgcaaaccccaacgccaaucccaacaaaaacaaccaaggcaacggacaaggacacaacaugccaaacgaccccaaccgcaacgucgacgaaaacgccaacgccaacuccgcggucaaaaacaacaacaacgaagagcccucagacaaacacauaaaagaauaccuaaacaaaauccaaaacucccucucgacagaauggucccccugcagcgucaccugcggaaacggcauacaaguacgaauaaaacccggcucagccaacaaaccaaaagacgaacuagacuacgccaacgacauagaaaaaaaaauaugcaaaauggaaaaaugcugaggacuaguuauaagacugacuagcccgaugggccucccaacgggcccuccuccccuccuugcaccgagauuaauaaaaaaaaaaaaaaaaaaaaaaaaaaaaaaaaaaaaaaaaaaaaaaaaaaaaaaaaaaaaaaaaugcaucccccccccccccccccccccccccccccccaaaggcucuuuucagagccaccagaauu

SEQ ID NO: 1755 - RNA, 1195 nt, Artificial Sequence
  mRNA Design i-3 (A64-N5-C30-hSL-N5) comprising derived and/or modified sequence from Pf(3D7)__XP_001351122.1__Pf-CSP(1-325) (opt11)
gggagaaagcuuaccaugaugcgcaaacucgcaauccuaucaguaagcucauuccuguucguagaagcacuauuccaagaauaccaaugcuacggcucauccucaaacacaagaguacuaaacgaacuaaacuacgacaacgccggaaccaaccuauacaacgaacucgaaaugaacuacuacggcaaacaagaaaacugguacucacuaaagaaaaacagcagaagccucggcgaaaacgacgacggcaacaacgaagacaacgagaaacugagaaaaccaaaacacaagaaacuaaaacaacccgcggacgggaacccagacccaaaugcaaacccaaacgucgacccaaacgcaaacccaaacguagacccaaacgcaaaccccaacguagaccccaacgcaaacccaaacgcaaacccaaacgcaaacccaaacgcaaacccaaacgcaaaccccaacgcaaacccaaacgcaaacccaaacgcaaaccccaacgccaacccaaacgccaaccccaacgcaaacccaaacgcaaacccaaacgcaaaccccaacgccaacccgaacgcaaacccaaacgcaaacccaaacgcaaaccccaacguagacccaaacgcaaacccaaacgccaaccccaacgcaaacccaaacgcaaacccgaacgcaaaccccaacgcaaaccccaacgcaaacccaaacgcaaaccccaacgcaaauccaaacgcaaacccaaacgcaaacccaaacgccaacccaaacgcaaaucccaacgcaaacccaaacgcaaaccccaacgcaaacccaaacgcaaacccaaacgcaaacccaaacaaaaacaaccaaggaaacggccaaggacacaacaugccaaacgacccaaaccgaaacguagacgaaaacgccaacgccaacagcgcagucaaaaacaacaauaaugaagaacccuccgacaaacacauaaaagaauaccuaaacaaaauccaaaacugaggacuaguuauaagacugacuagcccgaugggccucccaacgggcccuccuccccuccuugcaccgagauuaauaaaaaaaaaaaaaaaaaaaaaaaaaaaaaaaaaaaaaaaaaaaaaaaaaaaaaaaaaaaaaaaaugcaucccccccccccccccccccccccccccccccaaaggcucuuuucagagccaccagaauu

SEQ ID NO: 1756 - RNA, 1411 nt, Artificial Sequence
  mRNA Design i-3 (A64-N5-C30-hSL-N5) comprising derived and/or modified sequence from Pf(3D7)__XP_001351122.1__HsALB_Pf-CSP(19-397) (opt11)
gggagaaagcuuaccaugaaaugggucaccuucauaucccuccuauuccucuucucaucagccuacucccucuuccaggaauaccaaugcuacggaucguccucaaacacuagaguacucaaugaauuaaacuacgacaacgccggcaccaaccucuacaacgaacucgaaaugaacuacuacggaaaacaagaaaacugguacucacucaaaaaaaacucucgaucccucggcgaaaacgacgacggcaacaacgaagacaacgagaaacuacgcaaaccaaaacacaaaaaauuaaaacaacccgccgacggcaaccccgaccccaacgccaaccccaacguagaccccaacgcgaaccccaacgucgacccaaacgccaaccccaacguggaccccaacgccaacccaaacgccaaccccaacgccaacccaaacgcaaaccccaacgccaacccaaacgccaaccccaacgcaaacccaaacgcgaacccaaacgcaaacccaaacgccaacccaaacgcaaacccaaacgcgaacccaaacgccaacccaaacgccaaccccaacgcaaacccaaacgccaacccaaacgccaacccaaacguagacccaaacgcgaaccccaacgcuaacccaaacgcaaacccaaacgccaacccaaacgccaacccuaacgcaaacccaaacgccaaccccaacgccaaccccaacgccaaccccaacgcaaacccaaacgccaacccaaacgccaaccccaacgccaacccaaacgcaaacccaaacgcaaacccaaacgcaaaccccaacgccaacccaaacgccaacccaaacaaaaauaaccaaggcaaugggcaaggccacaacaugccaaacgaccccaaccgcaaugucgacgaaaacgccaacgccaacucugcaguaaaaaacaauaacaacgaagaacccucagacaaacacaucaaagaauaccucaacaagauccaaaauucccucuccacagaauggucccccugcagcguaaccugcggcaacggcauccaaguccgcaucaaacccggcuccgccaacaaaccgaaagacgaacuagacuacgccaacgacauagaaaaaaaaaucugcaaaauggaaaaaugcagcuccgucuucaacgucgucaacagcuccaucggccucaucaugguccucuccuuccuguuccucaacuaaggacuaguuauaagacugacuagcccgaugggccucccaacgggcccuccuccccuccuugcaccgagauuaauaaaaaaaaaaaaaaaaaaaaaaaaaaaaaaaaaaaaaaaaaaaaaaaaaaaaaaaaaaaaaaaaugcaucccccccccccccccccccccccccccccccaaaggcucuuuucagagccaccagaauu

SEQ ID NO: 1757 - RNA, 1429 nt, Artificial Sequence
  mRNA Design i-3 (A64-N5-C30-hSL-N5) comprising derived and/or modified sequence from Pf(3D7)__XP_001351122.1__HsIns-iso1_Pf-CSP(19-397) (opt11)
gggagaaagcuuaccauggcacucuggaugagacuccucccccuccucgcacuccucgcccuauggggcccagacccagcggcagcccucuuccaagaauaccaaugcuacggcucauccuccaacacccgaguccucaaugaacuaaacuacgacaacgccggcaccaaccuauacaacgaacuagaaaugaacuacuacggcaaacaagaaaacugguacucccucaaaaaaaauucacgcucccuaggugagaacgacgacggaaacaacgaagacaacgaaaaacuccgaaaacccaaacacaaaaaacuaaaacaaccagcagacggcaaccccgaccccaacgcaaaccccaacguagacccaaacgcgaaccccaacgucgauccaaacgccaacccaaacguugaccccaacgcgaaccccaacgcaaacccaaacgcaaacccuaacgcgaaccccaacgcaaaccccaacgccaaccccaacgccaaccccaacgccaacccaaacgcaaaccccaacgccaaccccaacgcaaacccaaacgcaaacccgaacgcaaaccccaacgccaacccaaacgcaaacccaaacgccaacccaaacgcaaaccccaacguagacccaaacgccaaucccaacgcgaaccccaacgcaaacccaaacgcgaacccaaacgccaacccaaacgcaaacccgaacgccaacccaaacgccaaccccaacgcaaaccccaacgcaaacccaaacgccaacccaaacgcaaacccaaacgcaaaccccaacgccaaccccaacgcaaacccaaaugccaaccccaacgccaaccccaacgcaaacccaaacaaaaacaaccaaggaaacggccaaggccacaacaugccgaacgaccccaaccgaaacgucgacgaaaacgcaaacgccaacucagcggucaaaaacaacaacaacgaagaacccucagacaaacacaucaaagaauaccuaaacaagauccagaacucucucucaacagaauggucccccugcuccguaacaugcggcaacggcauccaaguacgaaucaaaccgggaucagccaauaaacccaaagacgaacucgacuacgccaacgacaucgaaaaaaaaauaugcaaaauggaaaaaugcagcucagucuucaacguagucaacagcuccauaggccucaucaugguacucuccuuccuguuccuaaacuaaggacuaguuauaagacugacuagcccgaugggccucccaacgggcccuccuccccuccuugcaccgagauuaauaaaaaaaaaaaaaaaaaaaaaaaaaaaaaaaaaaaaaaaaaaaaaaaaaaaaaaaaaaaaaaaaugcaucccccccccccccccccccccccccccccccaaaggcucuuuucagagccaccagaauu

SEQ ID NO: 1758 - RNA, 1408 nt, Artificial Sequence
  mRNA Design i-3 (A64-N5-C30-hSL-N5) comprising derived and/or modified sequence from Pf(3D7)__XP_001351122.1__HsSPARC_Pf-CSP(19-397) (opt11)
gggagaaagcuuaccaugcgcgccuggauauucuuccuccuaugccuagcaggacgcgcccucgcacucuuccaagaauaccaaugcuacggcucauccucaaacacccgcguacuuaacgaacuaaacuacgacaacgccggaaccaaccuauacaacgaacucgaaaugaacuacuacgguaaacaagaaaacugguacucccucaaaaaaaacagccgaagccuaggagaaaacgacgacggaaacaacgaagacaacgaaaaacugcgcaaacccaaacacaaaaaacucaaacaacccgcagacgggaacccagacccaaacgcaaacccaaacguggacccaaacgccaacccuaacguagaccccaacgcaaaccccaacgucgacccuaaugcaaacccaaacgccaaccccaacgcgaacccaaacgcaaaccccaacgcuaacccgaacgccaaccccaacgccaacccgaacgcaaacccaaacgcaaacccaaacgcgaacccaaacgcaaacccaaacgccaaccccaacgcgaacccaaacgccaauccaaacgccaacccaaacgcaaacccaaacgccaaccccaacguagacccaaacgccaacccaaacgcgaacccaaacgcaaaccccaacgcaaacccaaacgcaaacccaaacgccaacccuaacgcaaacccaaacgccaaccccaacgccaacccaaacgcaaacccaaacgccaacccaaacgccaaccccaacgcaaacccgaacgcaaaccccaacgcaaacccaaacgcaaacccaaacgcgaacccgaacgccaacccaaauaagaacaaccaaggaaacggacaaggccacaacaugccaaacgaccccaaccgcaacgucgacgaaaacgcaaaugccaacuccgcagucaaaaacaacaauaacgaagaacccucggacaaacacaucaaagaauaccucaacaagauccaaaacucacucuccaccgaauggucacccugcagcguaacuugcggcaacggcauccaaguccgcauaaaaccaggcuccgcaaacaaacccaaagacgaacucgacuaugccaacgacaucgaaaaaaaaauaugcaaaauggaaaaaugcagcucagucuucaacguagucaacagcucuaucggacuaauaaugguacucuccuuccuauucuuaaacuaaggacuaguuauaagacugacuagcccgaugggccucccaacgggcccuccuccccuccuugcaccgagauuaauaaaaaaaaaaaaaaaaaaaaaaaaaaaaaaaaaaaaaaaaaaaaaaaaaaaaaaaaaaaaaaaaugcaucccccccccccccccccccccccccccccccaaaggcucuuuucagagccaccagaauu

SEQ ID NO: 1759 - RNA, 1411 nt, Artificial Sequence
  mRNA Design i-3 (A64-N5-C30-hSL-N5) comprising derived and/or modified sequence from Pf(3D7)__XP_001351122.1__IgE_Pf-CSP(19-397) (opt11)
gggagaaagcuuaccauggacuggacauggauccucuuccucgucgccgcggccacacgcguacacucacucuuccaagaauaucaaugcuacggcucaagcucgaacacgcgcguacucaacgaacuaaacuacgacaacgccggcaccaaccuauacaacgaacucgaaaugaacuacuacggcaaacaagaaaacugguacucacuuaagaaaaauucacgaucccucggagaaaacgacgaugggaacaacgaagacaacgaaaaacuacgcaaacccaaacacaagaaacuuaaacaacccgcagacggcaacccagacccaaacgcaaaccccaacguagaccccaacgcaaacccaaacguagacccaaacgccaacccaaacguagacccaaacgcgaacccaaacgccaacccaaacgccaaccccaacgcaaacccaaacgcaaauccaaacgcaaacccaaaugcaaacccgaacgccaauccaaacgcaaaccccaacgcaaacccaaacgcaaaccccaaugccaacccaaacgcaaaccccaacgcaaaccccaacgcaaaccccaacgcaaacccaaacgcgaacccaaacguagaccccaacgccaaccccaacgccaacccaaacgcaaacccaaacgccaacccaaacgccaaccccaacgcaaaccccaacgcaaacccgaacgcaaacccaaacgcaaacccaaacgcaaacccgaacgcaaacccuaacgcgaaccccaacgccaaccccaacgcaaacccaaacgcaaacccaaacgccaacccaaacgcaaacccaaacgcaaacccaaacaaaaacaaccaaggaaacgggcaaggacauaacaugccgaacgaccccaaccgcaacguagacgaaaacgccaacgccaacagcgcagucaaaaacaacaacaacgaagaacccuccgacaaacacaucaaagaauaccuaaacaaaauccagaacucacuauccaccgaauggucccccugcagcgugaccugcggcaacggcauacaaguccgcauaaaaccaggcuccgccaacaaacccaaagacgaacuagacuacgccaacgacauagaaaagaaaauaugcaaaauggaaaaaugcagcucagucuucaauguagucaacuccuccaucggacucauaaugguccuaucauuccucuuccuaaacuaaggacuaguuauaagacugacuagcccgaugggccucccaacgggcccuccuccccuccuugcaccgagauuaauaaaaaaaaaaaaaaaaaaaaaaaaaaaaaaaaaaaaaaaaaaaaaaaaaaaaaaaaaaaaaaaaugcaucccccccccccccccccccccccccccccccaaaggcucuuuucagagccaccagaauu

SEQ ID NO: 1760 - RNA, 1576 nt, Artificial Sequence
  mRNA Design i-3 (A64-N5-C30-hSL-N5) comprising derived and/or modified sequence from Pf(3D7)__XP_001351122.1__Pf-CSP_L(G4SG4)_TM domain HA (opt11)
gggagaaagcuuaccaugaugcgcaaacucgccauccucagcgucagcucguuccucuucgucgaagcacuauuccaagaauaccaguguuacggcucauccucaaacacacgcgugcucaacgaacuaaacuacgacaacgccggcaccaaccucuacaacgaacuagaaaugaacuauuacggcaagcaagaaaacugguacucacucaaaaaaaacagccgaagccuaggcgagaacgacgacgggaacaacgaagacaacgaaaaacuacgcaaacccaagcacaaaaaacugaaacaaccagccgacggaaauccagaccccaacgcaaacccgaacguagaccccaacgcgaaccccaacguggacccgaacgcaaacccgaacguagacccaaacgcaaacccaaacgcgaacccaaacgcaaacccaaacgcuaacccaaacgcaaaccccaacgccaaccccaacgcgaacccaaacgcaaacccaaacgcaaacccaaacgcaaacccgaacgcaaacccaaacgccaacccaaacgcgaacccaaacgccaacccaaacgcaaacccaaacgcaaacccaaacgcaaacccaaacguagacccgaacgccaacccgaaugcaaacccaaacgcaaacccgaacgcaaacccaaacgcgaacccgaacgccaacccaaacgcaaacccgaacgcaaaccccaacgccaacccaaacgcaaaccccaacgcaaaccccaacgcaaacccgaacgcaaacccaaacgcaaacccaaacgccaaccccaacgccaaccccaacgcaaacccgaacgccaacccaaacaaaaacaaccaaggcaacgggcaaggacacaacaugccaaacgaccccaaccgaaacgucgacgaaaacgccaacgccaacuccgcagucaaaaacaacaacaacgaagaacccucagacaaacacauaaaagaauaccucaacaaaauccaaaacucacucucaaccgaguggucacccugcagugugaccuguggcaacggaauacaaguacgcauaaaacccggaucagccaacaaaccgaaagacgaacuagacuacgccaacgacauagaaaaaaaaauaugcaaaauggagaaaugcagcucugucuucaacgucgucaacagcucaaucggacucauaaugguccucuccuuccuauuccucaacggcggagggggcucaggcggcggaggaaaauuagaauccaccagaaucuaucagauucucgccauauacagcacagucgcaagcucgcuuguccuugucguaucacuaggcgcaaucucauucuggaugugcuccaacggaagccugcaaugccgcauuugcauauaaggacuaguuauaagacugacuagcccgaugggccucccaacgggcccuccuccccuccuugcaccgagauuaauaaaaaaaaaaaaaaaaaaaaaaaaaaaaaaaaaaaaaaaaaaaaaaaaaaaaaaaaaaaaaaaaugcaucccccccccccccccccccccccccccccccaaaggcucuuuucagagccaccagaauu

SEQ ID NO: 1761 - RNA, 1450 nt, Artificial Sequence
  mRNA Design i-3 (A64-N5-C30-hSL-N5) comprising derived and/or modified sequence from Pf(3D7)__XP_001351122.1__Pf-CSP(199-377)_L(PVTN)_HBsAg (opt11)
gggagaaagcuuaccauggaccccaacgccaaccccaacgccaaccccaacgccaaucccaacgcuaaccccaacgccaaccccaacgcaaaccccaacgccaacccaaacgccaaccccaacgcaaaccccaacgccaaucccaaugccaaccccaacgccaaccccaacgcgaaccccaacgccaaccccaacgcaaacccaaacgccaaccccaacgccaaccccaacgccaaccccaacaaaaacaaccaaggcaacggccaaggccacaacaugcccaacgaccccaaccgcaacguagacgagaacgccaacgccaacagcgcugucaaaaacaacaacaacgaggaacccuccgacaaacacaucaaagaauaccuuaacaaaauccaaaacucucucuccaccgaguggucccccugcucagucacaugcggcaacggcauacaaguucguaucaaacccggcucagcaaacaaacccaaagacgaacucgacuacgcaaacgacauagaaaagaaaaucugcaaaauggaaaaauguucauccguccccgucaccaacauggaaaacaucacuuccggauuccucgguccccuacucguacuccaagccggcuucuuccuccucacccgcauccucaccaucccccaaucacuugacuccugguggaccucccucaacuuccucggcggcucccccgucugccuaggccaaaacagccaaucccccacuagcaaccacucccccacauccugcccacccaucugccccggauaucgauggaugugccuucgccgauucauaaucuuccucuucauccuccuacucugccucaucuuccuccucguccuucuagauuaccaaggcaugcuccccgucugcccccuuauccccggcuccaccaccacaaacaccggccccugcaaaaccugcacaacccccgcccaaggcaauagcauguuccccuccugcugcugcacuaaaccaacagacggcaacuguaccugcaucccaaucccaucaucaugggccuucgccaaauaccucugggaaugggcaucuguacgauucuccuggcucucccuucucguacccuucguccagugguucgucggccucucccccaccguauggcuauccgccaucuggaugaugugguacuggggccccucccuauacuccaucgucuccccauucauaccacuccuacccaucuucuucugccucugggucuacaucugaggacuaguuauaagacugacuagcccgaugggccucccaacgggcccuccuccccuccuugcaccgagauuaauaaaaaaaaaaaaaaaaaaaaaaaaaaaaaaaaaaaaaaaaaaaaaaaaaaaaaaaaaaaaaaaaugcaucccccccccccccccccccccccccccccccaaaggcucuuuucagagccaccagaauu

SEQ ID NO: 1762 - RNA, 1492 nt, Artificial Sequence
  mRNA Design i-3 (A64-N5-C30-hSL-N5) comprising derived and/or modified sequence from Pf(3D7)__XP_001351122.1__Pf-CSP(199-387)_L(PVTN)_HBsAg (opt11)
gggagaaagcuuaccaugauggcccccgaccccaacgcaaauccaaacgcaaaccccaacgccaacccuaacgcaaaccccaacgccaacccaaacgccaaucccaacgccaacccuaacgccaaccccaacgcaaaccccaacgccaaccccaacgccaacccuaacgcaaaccccaacgccaacccaaacgcaaaccccaacgccaaccccaacgccaaccccaacgcaaacccaaacgcaaaccccaacaaaaacaaccaaggaaacggacaaggccacaacaugccuaacgaccccaaucgcaacgucgacgaaaacgcaaacgccaacuccgccgucaaaaacaacaacaacgaagaacccucugacaaacacaucaaagaauaccucaacaagauccaaaacucccuauccaccgaauggucccccugcuccgucacuugcgguaauggcauccaaguccgcauaaaaccaggauccgcaaacaaacccaaagacgaacuagacuacgccaacgacauagaaaagaaaaucugcaaaauggaaaaaugcuccucagucuucaaugucguaaacuccuccauuggccuaggccccgucaccaacauggaaaacauuaccuccggauuccucgguccucuccucguccuccaagccggauucuuucuccucacacgaauccucacuaucccucaaucccuggacucaugguggaccucccucaacuuccugggcggcucccccgucugccucggccaaaacagccaauccccaaccuccaaucacucccccacaagcugcccucccauaugccccggcuaccgcuggaugugccuccgucgcuucaucauauuccucuucauacuucuccucugccucaucuuccuccuuguccugcuagacuaccaaggcaugcuccccgucugcccacucauccccgguuccaccacaacaaacaccggccccugcaaaacaugcaccacacccgcccaagguaacuccauguuccccuccugcugcugcaccaaaccaaccgacggcaacugcacuugcauucccauccccucauccugggccuucgccaaauaccucugggaaugggcauccguccguuucucauggcuaucucuccuaguaccauucguacaaugguucguuggccucucccccaccguauggcucuccgccauauggaugaugugguacuggggcccuucacuuuacuccaucgucucacccuucaucccacuccuacccaucuucuucugccuuuggguauacaucuaaggacuaguuauaagacugacuagcccgaugggccucccaacgggcccuccuccccuccuugcaccgagauuaauaaaaaaaaaaaaaaaaaaaaaaaaaaaaaaaaaaaaaaaaaaaaaaaaaaaaaaaaaaaaaaaaugcaucccccccccccccccccccccccccccccccaaaggcucuuuucagagccaccagaauu

SEQ ID NO: 1763 - RNA, 676 nt, Artificial Sequence
  mRNA Design i-3 (A64-N5-C30-hSL-N5) comprising derived and/or modified sequence from Pf(3D7)__XP_001351122.1__HsALB_Pf-CSP(19-152) (opt11)
gggagaaagcuuaccaugaaaugggucaccuucaucucccuccucuuccucuucuccagcgcauacucccucuuccaagaauaccaaugcuacggcuccuccuccaacacccgcguccucaacgaacucaacuacgacaacgccggcaccaaccucuacaacgaacucgaaaugaacuacuacggcaaacaagaaaacugguacucccucaaaaaaaacucccgcucccuaggcgaaaacgacgacggaaacaacgaagacaacgaaaaacuccgcaaacccaaacacaaaaaacucaaacaacccgccgacggaaaccccgaccccaacgccaacccaaacgucgaccccaacgccaaccccaacgucgaccccaacgccaaccccaacgucgaccccaacgccaaccccaacgcaaacccaaacgcaaacccaaacgccaaccccaacgccaaccccaacgccaaccccuaaggacuaguuauaagacugacuagcccgaugggccucccaacgggcccuccuccccuccuugcaccgagauuaauaaaaaaaaaaaaaaaaaaaaaaaaaaaaaaaaaaaaaaaaaaaaaaaaaaaaaaaaaaaaaaaaugcaucccccccccccccccccccccccccccccccaaaggcucuuuucagagccaccagaauu

SEQ ID NO: 1764 - RNA, 796 nt, Artificial Sequence
  mRNA Design i-3 (A64-N5-C30-hSL-N5) comprising derived and/or modified sequence from Pf(3D7)__XP_001351122.1__HsALB_Pf-CSP(19-192) (opt11)
gggagaaagcuuaccaugaaauggguaaccuucauaucccuccucuuccuauucucgagcgccuacucccucuuccaagaauaccaaugcuacggcucauccuccaacacccgcguccucaacgaacucaacuacgacaacgccggcaccaaccucuacaacgaacuagagaugaacuacuacggcaaacaagaaaacugguacucacucaaaaaaaacucccgaucccuaggagaaaacgacgacggcaacaacgaagacaacgaaaaacuacgaaaacccaaacacaaaaaacucaaacaacccgccgacggcaaccccgaccccaacgccaaccccaacgucgaccccaacgccaacccaaacguagaccccaacgccaaccccaacgucgacccaaacgccaaccccaacgccaaccccaacgccaacccaaacgcaaacccaaacgcaaacccaaacgccaacccaaacgccaaccccaacgccaaccccaacgcaaaccccaacgcaaaccccaacgccaacccaaacgcaaaccccaacgccaacccaaacgccaacccaaacgccaaccccaacgcaaaccccuaaggacuaguuauaagacugacuagcccgaugggccucccaacgggcccuccuccccuccuugcaccgagauuaauaaaaaaaaaaaaaaaaaaaaaaaaaaaaaaaaaaaaaaaaaaaaaaaaaaaaaaaaaaaaaaaaugcaucccccccccccccccccccccccccccccccaaaggcucuuuucagagccaccagaauu

SEQ ID NO: 1765 - RNA, 1036 nt, Artificial Sequence
  mRNA Design i-3 (A64-N5-C30-hSL-N5) comprising derived and/or modified sequence from Pf(3D7)__XP_001351122.1__HsALB_Pf-CSP(19-272) (opt11)
gggagaaagcuuaccaugaaauggguaaccuucaucucccuccucuuccuauucucaucagcauacucacucuuccaagaauaccaaugcuacggcucgagcucaaacacacgcguacucaacgaacugaacuacgacaacgccggaaccaaccucuacaaugaacucgaaaugaacuacuacggcaaacaagagaacugguacucacucaaaaaaaacagcagaagccucggagaaaacgacgacggaaacaacgaagacaacgaaaaacuccgcaaacccaagcacaaaaaacuaaaacaacccgcagacggaaaccccgaccccaacgcaaacccgaacgucgacccaaacgccaacccaaacguagaccccaacgcgaacccaaacguagacccaaacgccaacccaaacgcaaaccccaacgccaaccccaacgcaaacccaaacgccaacccaaacgcaaaccccaaugcaaaccccaacgcaaacccaaacgccaaccccaacgcaaacccaaacgcaaacccaaacgcaaacccaaacgcaaacccaaacgcgaacccaaacgcaaacccaaacgcaaacccgaacgcaaacccaaacguagacccaaacgcaaaccccaacgccaacccaaacgcaaacccaaacgcaaacccaaacgcaaacccaaacgcgaacccaaacgccaacccaaacgcaaacccaaacgcaaacccaaacgcaaacccaaacgcaaacccaaacgcaaacccaaacgcaaacccgaacgcgaacccaaacgcaaacccaaacgcgaacccgaacgcaaaccccaacgcaaacccauaaggacuaguuauaagacugacuagcccgaugggccucccaacgggcccuccuccccuccuugcaccgagauuaauaaaaaaaaaaaaaaaaaaaaaaaaaaaaaaaaaaaaaaaaaaaaaaaaaaaaaaaaaaaaaaaaugcaucccccccccccccccccccccccccccccccaaaggcucuuuucagagccaccagaauu

SEQ ID NO: 1766 - RNA, 1198 nt, Artificial Sequence
  mRNA Design i-3 (A64-N5-C30-hSL-N5) comprising derived and/or modified sequence from Pf(3D7)__XP_001351122.1__HsALB_Pf-CSP(19-272)_L(AAY)_Pf-CSP(310-3 27)_L(AAY)_Pf-CSP(346-375) (opt11)
gggagaaagcuuaccaugaaaugggucaccuucaucucacuccuauuccuauucuccuccgcauacucacucuuccaagaauaccagugcuacggaucaagcuccaacacacgcguacuaaacgaacugaacuacgacaacgccggaaccaaccucuacaacgaacucgaaaugaauuacuacggcaaacaagagaacugguacucacucaaaaaaaacagcagaucccuaggcgaaaacgacgacggaaacaacgaagacaacgaaaaacuacgcaaacccaaacacaaaaaacuaaaacaacccgcagacggaaacccagauccaaacgcaaacccaaacguagacccaaacgccaacccaaacguagacccaaacgcaaacccaaacguagaccccaacgcaaacccaaacgcaaacccgaacgccaacccaaacgcaaaccccaacgccaacccaaacgcaaacccaaacgcaaacccaaacgcaaacccaaacgccaaccccaacgcgaacccaaacgcaaacccuaacgccaacccaaacgcaaacccaaacgcaaacccgaacgcaaacccaaacgcaaacccaaacgcaaacccgaacguagacccaaacgcaaacccaaacgcaaacccaaacgcaaacccaaacgccaacccaaacgccaacccaaacgcaaaccccaacgcaaaccccaacgcgaacccaaacgccaaccccaacgcaaacccaaacgccaacccaaacgccaacccgaacgcaaacccaaacgccaacccaaacgccaacccgaacgcaaacccaaacgccaacccaaacgccaacccagccgcguacgaacccucagauaaacacauaaaagaauaccucaacaaaauccaaaacucacuagcagccuacaucaaaccaggauccgccaacaaacccaaggacgaacucgacuacgcaaacgacaucgaaaaaaaaaucugcaaaauggaaaaaugcucaugaggacuaguuauaagacugacuagcccgaugggccucccaacgggcccuccuccccuccuugcaccgagauuaauaaaaaaaaaaaaaaaaaaaaaaaaaaaaaaaaaaaaaaaaaaaaaaaaaaaaaaaaaaaaaaaaugcaucccccccccccccccccccccccccccccccaaaggcucuuuucagagccaccagaauu

SEQ ID NO: 1767 - RNA, 1159 nt, Artificial Sequence
  mRNA Design i-3 (A64-N5-C30-hSL-N5) comprising derived and/or modified sequence from Pf(3D7)__XP_001351122.1__HsALB_Pf-CSP(19-272)_L(AAY)_Pf-CSP(346-3 65)_L(AAY)_P2 (opt11)
gggagaaagcuuaccaugaaaugggucaccuucaucucacuccuauuccuauucucgagcgcauacucacucuuccaagaauaccaaugcuauggcuccagcucaaacacacgcguccuaaacgaacucaacuacgacaacgccggaacaaaccucuacaacgaacucgaaaugaacuacuacggcaaacaagaaaacugguacucgcucaaaaaaaacucccgaagucuaggcgaaaacgacgacggaaacaacgaagacaacgaaaaacuacgcaaacccaaacacaaaaaacuaaaacaacccgcagacggaaaccccgacccaaacgcaaaccccaacguagacccaaacgcaaaccccaacguagacccaaacgcaaacccgaacguagacccaaacgccaacccaaacgccaaccccaacgcaaacccaaacgccaaccccaacgcaaacccaaacgcaaacccaaacgcaaacccaaacgcaaacccaaacgccaaccccaacgccaacccaaacgccaaccccaacgcgaaccccaacgcgaacccaaacgccaacccaaacgcaaaccccaacgcaaacccaaacgcaaacccaaacgucgacccaaacgcaaacccaaacgcaaacccgaacgcaaacccaaacgcaaaccccaacgccaacccaaacgcgaacccaaacgccaacccaaacgccaacccaaacgcaaacccaaacgccaacccaaacgcaaacccaaacgcaaaccccaacgcaaaccccaacgcaaacccaaacgccaaccccaacgcaaaccccaacgcaaacccaaacgccaacccagccgcauacauaaaacccggcuccgccaacaaaccaaaagacgaacuagacuacgccaacgacauagaagcagccuaccaauacaucaaagccaacagcaaauucauaggaauaaccgagcuauaaggacuaguuauaagacugacuagcccgaugggccucccaacgggcccuccuccccuccuugcaccgagauuaauaaaaaaaaaaaaaaaaaaaaaaaaaaaaaaaaaaaaaaaaaaaaaaaaaaaaaaaaaaaaaaaaugcaucccccccccccccccccccccccccccccccaaaggcucuuuucagagccaccagaauu

SEQ ID NO: 1768 - RNA, 1153 nt, Artificial Sequence
  mRNA Design i-3 (A64-N5-C30-hSL-N5) comprising derived and/or modified sequence from Pf(3D7)__XP_001351122.1__HsALB_Pf-CSP(19-272)_L(AAY)_Pf-CSP(346-3 65)_L(AAY)_PADRE (opt11)
gggagaaagcuuaccaugaaauggguaaccuucaucucgcuacuguuccucuucucauccgcauacucccucuuccaagaauaccaaugcuacggcucauccucaaacacacgaguacuaaacgaacucaacuacgacaacgccggaaccaaccuauacaacgaacucgaaaugaacuacuacggcaaacaagaaaacugguacucacucaaaaaaaacucccgaucccucggcgaaaacgacgacggaaacaacgaagacaacgaaaaacugagaaaacccaaacacaaaaaacuaaaacaaccagccgacggcaacccagaccccaacgcaaaccccaacguagacccaaacgccaaccccaacguagacccaaacgcaaacccaaacguagaccccaacgccaacccaaacgccaacccaaacgccaaccccaacgcaaacccaaacgcaaacccaaacgcaaacccaaacgccaacccaaacgcaaacccaaacgccaacccgaacgcaaaccccaacgcaaacccaaacgcaaaccccaacgccaacccaaacgcaaacccaaacgcaaaccccaacgcaaacccaaaugcgaacccaaacguggacccgaacgcaaaccccaacgccaacccaaacgcaaaccccaacgccaaccccaacgccaaccccaacgcaaaccccaacgccaaccccaacgccaacccaaacgccaacccaaacgcgaacccaaacgcaaaccccaacgcaaacccaaacgcaaacccaaacgcaaacccaaacgcaaaccccaacgcaaacccaaacgcaaacccaaacgcaaaccccgcagccuacauuaaaccaggcuccgccaacaaacccaaagacgaacucgacuacgccaacgacauagaagcagccuacgccaaauucguagccgcauggacacucaaagccgcagccuaaggacuaguuauaagacugacuagcccgaugggccucccaacgggcccuccuccccuccuugcaccgagauuaauaaaaaaaaaaaaaaaaaaaaaaaaaaaaaaaaaaaaaaaaaaaaaaaaaaaaaaaaaaaaaaaaugcaucccccccccccccccccccccccccccccccaaaggcucuuuucagagccaccagaauu

SEQ ID NO: 1769 - RNA, 1210 nt, Artificial Sequence
  mRNA Design i-3 (A64-N5-C30-hSL-N5) comprising derived and/or modified sequence from Pf(3D7)__XP_001351122.1__HsALB_Pf-CSP(19-272)_L(G4S)_Pf-CSP(310-3 27)_L(G4S)_Pf-CSP(346-375) (opt11)
gggagaaagcuuaccaugaaaugggucaccuucaucucccuacuauuccucuucucaucagccuacucacucuuccaagaguaccaaugcuacggcucaagcucaaacacacgcguacucaacgaacuaaacuacgacaacgcaggcaccaaccucuacaacgaacucgagaugaacuacuacggcaaacaagaaaacugguacucacucaaaaaaaacucccgcagccucggcgaaaacgacgacggcaacaacgaagauaacgagaaacuacgcaaacccaaacacaaaaaacuaaaacaacccgccgacggaaacccagacccaaacgccaacccaaacguagacccaaacgcaaacccaaacguagacccaaacgccaaccccaacguagacccaaacgccaacccaaacgccaacccaaacgcaaacccaaacgcaaacccaaacgcgaacccaaacgcaaaccccaacgccaacccaaacgcaaacccaaacgccaaccccaacgcaaacccaaacgcaaaccccaacgcaaacccaaacgccaaccccaacgcaaaccccaacgcaaacccaaacgcaaacccaaacgcaaacccaaacgucgacccaaacgcaaaccccaacgcaaacccaaacgcaaacccaaacgccaacccaaacgcaaacccaaacgccaacccaaacgcaaaccccaacgcaaaccccaacgccaacccaaacgcaaaccccaacgcgaacccaaacgcaaacccaaacgcaaacccaaacgcaaaccccaacgcaaaccccaacgcaaacccaaacgcaaacccaaacgcaaacccaggcggcggcggaagcgaacccucggacaaacacauaaaagaauaccucaacaaaauccaaaacucccucggaggcggaggcuccaucaaacccggaagcgcaaacaaacccaaagacgaacucgacuacgcaaacgacaucgagaaaaaaauaugcaaaauggaaaaaugcucauaaggacuaguuauaagacugacuagcccgaugggccucccaacgggcccuccuccccuccuugcaccgagauuaauaaaaaaaaaaaaaaaaaaaaaaaaaaaaaaaaaaaaaaaaaaaaaaaaaaaaaaaaaaaaaaaaugcaucccccccccccccccccccccccccccccccaaaggcucuuuucagagccaccagaauu

SEQ ID NO: 1770 - RNA, 1195 nt, Artificial Sequence
  mRNA Design i-3 (A64-N5-C30-hSL-N5) comprising derived and/or modified sequence from Pf(3D7)__XP_001351122.1__HsALB_Pf-CSP(19-272)_L(G4S)_Pf-CSP(310-3 27)_Pf-CSP(346-375) (opt11)
gggagaaagcuuaccaugaaauggguaaccuucaucucacuccuauuccucuucuccuccgcauacucgcucuuccaagaauaccaaugcuacggcucaagcucaaacacccgcguccucaacgaacucaacuacgacaacgccgguaccaaccuauacaacgaacucgaaaugaacuacuacggcaaacaagaaaacugguacucacucaaaaaaaacuccaggucccuaggagaaaacgacgauggcaacaacgaagacaacgaaaaacuccgaaagccaaaacacaaaaaacuaaaacagcccgcagacggcaacccagacccaaacgcaaacccaaacguagacccaaacgcgaaccccaacguagacccaaacgcaaacccaaacguagacccaaacgcaaaccccaacgcaaacccaaacgcaaaccccaacgcaaaccccaacgcaaacccaaacgcaaacccaaacgcaaacccaaacgcaaacccaaacgcaaaccccaacgccaaccccaacgcaaacccaaacgcaaacccaaacgcaaacccaaacgcaaacccaaacgcaaaccccaacgccaacccaaacgcaaacccaaacguagacccaaacgcaaacccaaacgcaaacccaaacgcaaaccccaacgccaacccaaacgcaaacccaaacgcaaacccaaacgcaaacccaaacgcaaauccaaacgcuaacccaaacgcaaacccgaacgcaaaccccaaugcaaaccccaacgcaaacccaaacgccaacccaaacgcaaacccaaacgcgaacccaaacgcaaacccaaacgcaaacccaggcggaggcggauccgaacccuccgacaaacacauaaaagaauaccuaaacaaaauccaaaacucucucauaaaacccggaucagccaacaaaccaaaagacgaacuagacuacgccaaugacauagaaaaaaaaauaugcaagauggaaaaaugcagcuaaggacuaguuauaagacugacuagcccgaugggccucccaacgggcccuccuccccuccuugcaccgagauuaauaaaaaaaaaaaaaaaaaaaaaaaaaaaaaaaaaaaaaaaaaaaaaaaaaaaaaaaaaaaaaaaaugcaucccccccccccccccccccccccccccccccaaaggcucuuuucagagccaccagaauu

SEQ ID NO: 1771 - RNA, 1195 nt, Artificial Sequence
  mRNA Design i-3 (A64-N5-C30-hSL-N5) comprising derived and/or modified sequence from Pf(3D7)__XP_001351122.1__HsALB_Pf-CSP(19-325) (opt11)
gggagaaagcuuaccaugaaauggguaaccuucaucucacuccuguuccuauucucauccgcauacucacucuuccaagaauaccaaugcuacggcucgucuucaaacacccgcguacucaacgaacucaacuacgacaacgccggaaccaaccucuacaacgaacucgaaaugaacuacuacggcaaacaagaaaacugguacucacucaaaaaaaacagccgaagccuaggcgaaaacgacgacggaaacaaugaagacaacgaaaaacuccgcaaacccaaacacaaaaaacucaaacaaccagcagacggaaaccccgacccgaacgcaaacccaaacguagacccaaacgcaaacccaaacguagacccaaacgcgaacccaaacguagaccccaacgcaaacccaaacgcaaacccaaacgcaaacccaaacgccaaccccaacgccaacccaaacgccaacccaaacgcaaacccgaacgcgaacccaaacgcaaaccccaacgcaaacccaaacgcaaacccaaacgcgaacccaaacgccaacccaaacgccaacccaaacgcaaacccaaacgccaacccaaacgcaaaccccaacguggaccccaacgcaaacccaaacgcaaacccaaacgccaaccccaacgcaaacccaaacgcaaacccuaacgcaaacccaaacgcaaaccccaacgcgaacccaaacgcaaacccaaacgcaaacccaaacgcaaaccccaacgcaaacccaaacgccaacccaaacgccaacccaaacgcgaauccaaacgcaaaccccaacgcaaacccaaacgcaaacccgaacaaaaacaaccaagggaacggacaaggacacaacaugccaaacgaccccaaccgcaacgucgacgaaaacgccaacgccaacuccgcaguaaaaaacaacaacaacgaagaacccuccgacaaacacauaaaagaauaccucaacaagauacaaaacuagggacuaguuauaagacugacuagcccgaugggccucccaacgggcccuccuccccuccuugcaccgagauuaauaaaaaaaaaaaaaaaaaaaaaaaaaaaaaaaaaaaaaaaaaaaaaaaaaaaaaaaaaaaaaaaaugcaucccccccccccccccccccccccccccccccaaaggcucuuuucagagccaccagaauu

SEQ ID NO: 1772 - RNA, 1372 nt, Artificial Sequence
  mRNA Design i-3 (A64-N5-C30-hSL-N5) comprising derived and/or modified sequence from Pf(3D7)__XP_001351122.1__HsALB_Pf-CSP(19-384) (opt11)
gggagaaagcuuaccaugaaauggguaaccuucaucucacuacucuuccuauucucaagcgcguacucacucuuccaagaauaccaaugcuacggcucgagcucaaacacccgcguucucaacgaacuaaacuacgacaacgccggaaccaaccuauacaacgaacuugaaaugaacuacuacggcaaacaagaaaacugguacucgcucaaaaaaaacuccaggagccuaggcgaaaacgacgacggaaacaacgaagacaacgagaaacuaagaaaacccaaacacaaaaaacucaaacagcccgcggacggaaaccccgacccaaacgcaaaccccaacguagacccgaacgccaacccaaacguagacccaaacgcaaacccaaacguagaccccaacgcaaacccgaacgccaacccaaacgcaaacccaaaugcgaaccccaacgcgaacccaaacgcaaacccgaacgcaaaccccaacgccaacccaaacgcaaacccaaacgcaaaccccaacgcaaacccaaacgcgaacccaaacgcaaacccaaacgcgaacccgaacgcaaacccaaacgcaaacccgaacgcaaacccaaacguagacccaaacgccaacccaaacgcaaacccaaacgcaaaccccaacgcaaacccaaacgcaaacccgaacgcaaacccaaacgcaaacccaaacgcgaacccaaacgcaaaccccaacgcaaacccaaacgcaaacccuaacgcaaacccgaacgcaaacccaaacgccaacccaaacgcgaaccccaacgcaaacccaaacgccaacccaaacgccaacccgaacaaaaacaaccaaggaaacggacaaggacacaacaugccaaacgaccccaaccgaaacgucgacgaaaacgcaaacgccaacagugccgucaaaaacaacaacaaugaagaacccucagacaaacacauaaaagaauaccuaaacaaaauccagaacucgcucucaaccgaauggucacccugcagcgucaccugcggcaacggaauacaaguacgcaucaaaccaggcucggccaacaaaccaaaagacgaauuagacuacgcaaacgacaucgaaaaaaaaauaugcaaaauggaaaaaugcagcucagucuucaacguagucaauagcucauaaggacuaguuauaagacugacuagcccgaugggccucccaacgggcccuccuccccuccuugcaccgagauuaauaaaaaaaaaaaaaaaaaaaaaaaaaaaaaaaaaaaaaaaaaaaaaaaaaaaaaaaaaaaaaaaaugcaucccccccccccccccccccccccccccccccaaaggcucuuuucagagccaccagaauu

SEQ ID NO: 1773 - RNA, 1510 nt, Artificial Sequence
  mRNA Design i-3 (A64-N5-C30-hSL-N5) comprising derived and/or modified sequence from Pf(3D7)__XP_001351122.1__HsALB_Pf-CSP(19-384)_TM domain HA (opt11)
gggagaaagcuuaccaugaagugggucaccuucaucucccuccuauuccucuucucuagcgcguacucacucuuccaagaauaccaaugcuacggauccagcucaaacacacgcguccucaaugaacugaacuacgauaacgccggaaccaaccucuacaacgaacucgaaaugaacuacuacggcaaacaagaaaacugguacucacuaaagaaaaauagcaggucccucggcgaaaacgacgacgggaacaacgaagauaacgaaaaacuacgcaaacccaagcacaagaaacuaaaacagccagcagacggaaacccagaccccaacgccaacccaaacgucgaccccaacgcaaacccaaacguagauccgaacgcaaacccaaacgucgauccaaacgcaaacccaaacgcaaacccaaacgcuaaccccaacgccaacccaaacgcaaacccgaacgcaaaccccaacgcgaacccgaacgcaaacccaaacgcaaacccaaacgccaacccaaacgcaaacccaaacgcaaacccaaacgccaacccaaacgcaaaccccaacgcgaaccccaacgcaaaccccaacgcaaacccaaacgucgacccaaacgcaaaccccaacgcaaaccccaacgcaaaccccaaugcaaacccaaacgcgaaccccaacgcaaacccaaacgcgaacccaaaugcaaaccccaacgccaaccccaacgccaacccgaacgcaaacccaaacgccaacccaaacgccaacccaaacgcaaaucccaacgccaacccaaacgcgaacccgaacgcaaacccaaacgcaaacccgaacaaaaacaaccaaggaaacggucaaggacacaacaugccaaacgaccccaaccgcaacgucgacgaaaacgccaaugccaacagcgccgucaaaaacaacaacaacgaagaacccucagacaaacacaucaaagaguaccuaaacaagauccaaaacucccucuccaccgaauggucccccugcagcguaaccugcggaaacggcauccaaguccgcauaaaaccaggcucagccaacaaaccaaaagaugaacucgacuacgcaaacgacauagaaaagaaaaucugcaaaauggaaaaaugcagcuccguauucaacgugguuaacuccucaaaacuagaauccacccgcaucuaccaaauacucgcaauauacagcacaguagccagcucacucguccuagucgucucccucggagccaucagcuucuggaugugcuccaacggaaguuuacaaugucgcauaugcauauaaggacuaguuauaagacugacuagcccgaugggccucccaacgggcccuccuccccuccuugcaccgagauuaauaaaaaaaaaaaaaaaaaaaaaaaaaaaaaaaaaaaaaaaaaaaaaaaaaaaaaaaaaaaaaaaaugcaucccccccccccccccccccccccccccccccaaaggcucuuuucagagccaccagaauu

SEQ ID NO: 1774 - RNA, 1222 nt, Artificial Sequence
  mRNA Design i-3 (A64-N5-C30-hSL-N5) comprising derived and/or modified sequence from Pf(3D7)__XP_001351122.1__HsALB_Pf-CSP(82-397) (opt11)
gggagaaagcuuaccaugaaaugggucaccuucaucucacuccuguuccucuucucauccgccuacagcgacaacgaaaaacugcgcaaacccaaacacaagaaacucaaacaaccagccgacggcaaccccgaccccaacgccaacccaaacguagaccccaacgccaaccccaacguagacccaaacgccaacccaaacguggaccccaacgcaaacccaaacgccaacccaaacgccaauccaaacgccaacccaaacgcaaacccaaacgcaaaccccaacgccaacccuaacgccaaccccaacgcaaacccaaacgccaaccccaacgccaaccccaacgcaaaccccaacgcaaacccuaacgccaaccccaacgccaaccccaacgcaaacccaaacgccaaccccaacguagacccaaacgccaaccccaacgcaaaccccaacgccaacccaaacgcaaacccaaacgccaaccccaacgccaaccccaacgcaaacccaaacgcaaacccaaaugcaaaccccaacgccaaccccaacgccaaccccaacgcaaaccccaacgcaaaccccaacgcaaacccgaacgccaacccaaacgccaacccaaacgccaaccccaacgcaaaccccaacaaaaacaaccaaggcaacggacaaggacacaacaugcccaacgaccccaaccgcaacgucgacgaaaacgccaacgccaacuccgccgucaaaaacaacaacaacgaagaacccuccgacaaacacaucaaagaauaccucaacaaaauccaaaacucccucucaaccgaauggucacccugcuccguaaccugcggcaacggcauccaaguccgcaucaaacccggcucagccaacaaacccaaagacgaacucgacuacgccaaugacaucgaaaagaaaauaugcaaaauggaaaaaugcuccuccgucuucaacgucgucaacuccuccaucggccucaucaugguccucucguuccuauuccuaaacuaaggacuaguuauaagacugacuagcccgaugggccucccaacgggcccuccuccccuccuugcaccgagauuaauaaaaaaaaaaaaaaaaaaaaaaaaaaaaaaaaaaaaaaaaaaaaaaaaaaaaaaaaaaaaaaaaugcaucccccccccccccccccccccccccccccccaaaggcucuuuucagagccaccagaauu

SEQ ID NO: 1775 - RNA, 574 nt, Artificial Sequence
  mRNA Design i-3 (A64-N5-C30-hSL-N5) comprising derived and/or modified sequence from Pf(3D7)__XP_001351122.1__HsALB_Pf-CSP(93-192) (opt11)
gggagaaagcuuaccaugaaauggguaaccuucaucucacuccuauuccuauucucaagcgcauacucaaaacuaaaacaacccgcagacggaaacccagacccaaacgcaaacccaaacguagacccaaacgcaaacccaaacguagacccaaacgcaaacccaaacguagacccaaacgcaaacccaaacgcaaacccaaacgcaaacccaaacgcaaacccaaacgcaaaccccaacgcaaacccaaacgcaaacccaaacgcaaacccaaacgcaaacccaaacgcaaacccaaacgcaaacccaaacgcaaacccaaacgcaaacccaaacgcaaacccaaacgccaacccaaacgcaaacccauaaggacuaguuauaagacugacuagcccgaugggccucccaacgggcccuccuccccuccuugcaccgagauuaauaaaaaaaaaaaaaaaaaaaaaaaaaaaaaaaaaaaaaaaaaaaaaaaaaaaaaaaaaaaaaaaaugcaucccccccccccccccccccccccccccccccaaaggcucuuuucagagccaccagaauu

SEQ ID NO: 1776 - RNA, 814 nt, Artificial Sequence
  mRNA Design i-3 (A64-N5-C30-hSL-N5) comprising derived and/or modified sequence from Pf(3D7)__XP_001351122.1__HsALB_Pf-CSP(93-272) (opt11)
gggagaaagcuuaccaugaaaugggucaccuucaucucacuccuauuccuauucucauccgcauacucaaaacuaaaacaacccgccgacggaaacccagacccaaacgcaaacccaaacguagacccaaacgcaaacccaaacguagacccaaacgcaaacccaaacguagacccaaacgcaaacccaaacgccaacccaaacgcaaauccaaacgcaaacccaaacgcaaacccaaacgcaaacccaaacgcaaacccaaacgccaacccaaacgccaacccaaacgcaaacccaaacgcaaacccaaacgcaaacccaaacgcaaacccaaacgcaaacccaaacgccaaccccaacgcaaacccaaacgcaaaccccaacguagacccaaacgcaaacccaaacgccaaccccaacgcaaaccccaacgccaaccccaacgccaacccaaacgccaacccaaacgcaaacccaaacgcaaacccaaacgcaaacccaaacgcaaacccaaacgcaaacccaaacgcaaacccaaacgcaaacccaaacgcaaacccaaacgccaacccaaacgcaaacccaaacgcaaacccgaacgcaaacccauaaggacuaguuauaagacugacuagcccgaugggccucccaacgggcccuccuccccuccuugcaccgagauuaauaaaaaaaaaaaaaaaaaaaaaaaaaaaaaaaaaaaaaaaaaaaaaaaaaaaaaaaaaaaaaaaaugcaucccccccccccccccccccccccccccccccaaaggcucuuuucagagccaccagaauu

SEQ ID NO: 1777 - RNA, 1189 nt, Artificial Sequence
  mRNA Design i-3 (A64-N5-C30-hSL-N5) comprising derived and/or modified sequence from Pf(3D7)__XP_001351122.1__HsALB_Pf-CSP(93-397) (opt11)
gggagaaagcuuaccaugaaaugggucacauucaucucacuccuauuccuauucucaagcgccuacuccaaacucaaacaacccgccgacggcaacccagacccaaacgccaaccccaacgucgacccaaacgccaacccaaacgucgacccaaacgcaaacccaaacgucgaccccaacgccaaccccaacgccaaccccaacgccaacccaaacgccaaucccaacgccaaccccaacgccaacccaaacgcaaaccccaacgccaauccaaacgccaaccccaacgcaaaccccaacgccaaccccaacgcaaacccaaacgcaaacccaaacgcaaaccccaacgccaaccccaacgcaaaccccaacgccaaccccaacgucgaccccaacgccaacccaaacgccaacccaaacgccaaccccaacgccaaccccaacgcaaacccaaacgcgaaccccaacgcaaaccccaacgccaacccgaacgccaacccgaacgcaaacccaaacgccaaccccaacgcaaaccccaacgcaaacccaaacgcgaaccccaacgccaacccaaacgccaacccaaacgcgaacccaaacgccaaccccaacaaaaacaaccaagggaacggacaaggccacaacaugcccaacgaccccaaccgcaacgucgacgaaaacgccaacgccaacuccgccgucaaaaacaacaacaacgaagaacccuccgacaaacacauaaaagaauaccuaaacaaaauccaaaacucacucucuacugaauggucccccugcucagucaccugcggcaacggcauacaaguccgcauaaaacccggcucggccaacaaaccaaaagacgaacuagacuacgcaaacgacaucgaaaaaaaaauaugcaaaauggaaaaaugcuccucagucuucaacguaguaaacuccuccaucggccucauaaugguccucuccuuccuauuccucaacuaaggacuaguuauaagacugacuagcccgaugggccucccaacgggcccuccuccccuccuugcaccgagauuaauaaaaaaaaaaaaaaaaaaaaaaaaaaaaaaaaaaaaaaaaaaaaaaaaaaaaaaaaaaaaaaaaugcaucccccccccccccccccccccccccccccccaaaggcucuuuucagagccaccagaauu

SEQ ID NO: 1778 - RNA, 559 nt, Artificial Sequence
  mRNA Design i-3 (A64-N5-C30-hSL-N5) comprising derived and/or modified sequence from Pf(3D7)__XP_001351122.1__HsALB_Pf-CSP(98-192) (opt11)
gggagaaagcuuaccaugaaaugggucacauucauaagccuacucuuccucuucagcucagccuacuccgcagacggaaacccagacccaaacgcaaacccaaacguagacccaaacgcaaacccaaacguagacccaaacgcaaacccaaacguagacccaaacgcaaacccaaacgcaaacccaaacgcaaacccaaacgcaaacccaaacgcaaacccaaacgcaaacccaaacgcaaacccaaacgcaaacccaaacgcaaacccaaacgcaaaccccaacgcaaacccaaacgcaaacccaaacgcaaacccaaacgcaaacccaaacgcaaacccaaacgcaaacccauaaggacuaguuauaagacugacuagcccgaugggccucccaacgggcccuccuccccuccuugcaccgagauuaauaaaaaaaaaaaaaaaaaaaaaaaaaaaaaaaaaaaaaaaaaaaaaaaaaaaaaaaaaaaaaaaaugcaucccccccccccccccccccccccccccccccaaaggcucuuuucagagccaccagaauu

SEQ ID NO: 1779 - RNA, 799 nt, Artificial Sequence
  mRNA Design i-3 (A64-N5-C30-hSL-N5) comprising derived and/or modified sequence from Pf(3D7)__XP_001351122.1__HsALB_Pf-CSP(98-272) (opt11)
gggagaaagcuuaccaugaaauggguaaccuucauaagccuacucuuccuauucucaucagccuacagcgcagacggaaacccagaccccaacgcaaacccaaacguagacccaaacgcaaacccaaacguagaccccaacgcaaacccaaacguagacccaaacgccaacccaaacgcaaacccaaacgcaaacccaaacgccaacccaaacgcaaacccaaacgccaacccaaacgcaaacccaaacgcaaacccaaacgcaaacccaaacgcaaacccaaacgcaaacccaaacgcaaacccaaacgccaacccaaacgcaaacccaaacgcaaacccaaacgcaaacccaaacgccaaccccaacguagacccaaacgccaaccccaacgcaaacccaaacgcaaacccaaacgcaaacccaaacgcaaacccaaacgcaaacccaaacgcaaacccaaacgcaaacccaaacgcaaacccgaacgccaacccaaacgcaaacccaaacgcaaacccaaacgcaaacccaaacgcaaacccaaacgcaaaccccaacgcaaacccaaacgcaaacccaaacgcaaacccauaaggacuaguuauaagacugacuagcccgaugggccucccaacgggcccuccuccccuccuugcaccgagauuaauaaaaaaaaaaaaaaaaaaaaaaaaaaaaaaaaaaaaaaaaaaaaaaaaaaaaaaaaaaaaaaaaugcaucccccccccccccccccccccccccccccccaaaggcucuuuucagagccaccagaauu

SEQ ID NO: 1780 - RNA, 1105 nt, Artificial Sequence
  mRNA Design i-3 (A64-N5-C30-hSL-N5) comprising derived and/or modified sequence from Pf(3D7)__XP_001351122.1__HsALB_Pf-CSP(98-374) (opt11)
gggagaaagcuuaccaugaaauggguaaccuucauaucccuacucuuccuuuucuccucggccuacuccgcagacggaaacccagacccaaacgcaaaccccaacguagacccaaacgcaaacccaaauguagacccaaacgcaaacccaaacguggacccaaacgcgaaccccaacgcaaaccccaacgcaaacccaaacgccaacccaaacgcaaacccaaacgccaacccaaacgcaaaccccaacgccaaccccaacgccaacccaaacgcaaacccaaacgcaaaccccaacgcaaacccaaacgccaacccaaacgccaacccaaacgccaaccccaacgcaaacccaaacgccaacccaaacguagacccaaacgcaaacccaaacgcaaacccaaacgcaaaccccaacgcaaaccccaacgcaaacccaaacgcaaacccaaacgcaaacccaaacgcaaacccaaacgccaacccaaacgcgaaccccaacgccaacccaaacgcaaacccaaacgccaacccaaacgccaacccaaacgcaaaccccaacgcaaacccaaacgcaaacccaaacgccaacccgaacaaaaacaaccaaggcaacggccaaggacacaacaugccaaacgaccccaaccgcaacguagacgaaaacgccaacgcaaacuccgcagucaaaaacaacaacaacgaagaacccuccgacaaacacauaaaagaauaccuaaacaaaauccaaaacucgcucucaaccgaauggucccccugcuccgucaccugcggcaacggcauccaaguacgcaucaaaccaggcucagcaaacaaaccaaaagacgaacucgacuacgccaacgacauagaaaaaaaaauaugcaaaauggagaaaugcuaaggacuaguuauaagacugacuagcccgaugggccucccaacgggcccuccuccccuccuugcaccgagauuaauaaaaaaaaaaaaaaaaaaaaaaaaaaaaaaaaaaaaaaaaaaaaaaaaaaaaaaaaaaaaaaaaugcaucccccccccccccccccccccccccccccccaaaggcucuuuucagagccaccagaauu

SEQ ID NO: 1781 - RNA, 1174 nt, Artificial Sequence
  mRNA Design i-3 (A64-N5-C30-hSL-N5) comprising derived and/or modified sequence from Pf(3D7)__XP_001351122.1__HsALB_Pf-CSP(98-397) (opt11)
gggagaaagcuuaccaugaaauggguaaccuucaucagccuacuauuccuauucagcuccgccuacagcgccgacggaaacccagacccaaacgccaaccccaacgucgacccaaacgccaaccccaacguagacccaaacgccaaccccaacgucgaccccaacgccaaccccaacgccaacccaaacgccaacccuaacgccaacccaaacgccaacccgaacgccaaccccaacgcgaacccaaacgccaacccaaacgcaaaccccaacgccaaccccaacgccaaccccaacgcaaaccccaacgcaaacccaaacgccaacccaaacgccaaccccaacgccaaccccaaugcaaacccaaacgucgaccccaacgccaacccaaacgccaaccccaacgccaaccccaacgccaaccccaacgcaaaccccaacgccaaccccaacgcgaaccccaacgccaaccccaacgccaacccaaacgccaaccccaacgccaaccccaacgccaaccccaacgcuaaccccaacgcaaacccaaacgccaacccaaacgccaacccaaacgccaaccccaacgccaacccaaacaaaaacaaccaaggcaacggacaaggacacaacaugccaaacgaccccaaccgcaacgucgacgaaaaugccaacgccaacuccgccgucaaaaacaacaacaacgaagaacccuccgacaaacacaucaaagaauaccuaaacaaaauacaaaacucucucucaaccgaauggucccccugcuccgucacaugcggcaacggcauccaaguccgcaucaaaccaggaucagccaauaaacccaaagacgaacucgacuacgccaacgacauagaaaaaaaaaucugcaaaauggaaaaaugcagcucagucuucaacgucgucaacuccucaaucggacuuauaaugguccuauccuuccucuuccuuaacuaaggacuaguuauaagacugacuagcccgaugggccucccaacgggcccuccuccccuccuugcaccgagauuaauaaaaaaaaaaaaaaaaaaaaaaaaaaaaaaaaaaaaaaaaaaaaaaaaaaaaaaaaaaaaaaaaugcaucccccccccccccccccccccccccccccccaaaggcucuuuucagagccaccagaauu

SEQ ID NO: 1782 - RNA, 1501 nt, Artificial Sequence
  mRNA Design i-3 (A64-N5-C30-hSL-N5) comprising derived and/or modified sequence from Pf(3D7)__XP_001351122.1__HsALB_Pf-CSP(199-377)_L(PVTN)_HBsAg (opt11)
gggagaaagcuuaccaugaaaugggucacauucaucucgcuccucuuccuauucuccuccgccuacuccgacccuaacgccaaucccaacgccaaccccaacgccaaccccaacgccaaccccaacgccaaccccaaugcaaacccaaacgcaaaccccaacgccaaccccaacgcaaacccaaaugcaaaccccaacgcaaaccccaacgccaaccccaaugccaaccccaacgcuaaccccaacgccaauccaaacgccaaccccaacgcaaaccccaacgccaacccuaacaaaaauaaccaaggcaacggccaaggacacaacaugcccaacgaccccaaccgaaaugucgacgaaaacgcuaacgcuaacagcgccgucaaaaacaacaacaacgaagaacccuccgacaaacacauuaaagaauaccucaacaaaauccaaaacucccucuccaccgaauggucccccugcucuguaacuugcggcaacggcauccaaguccgcauaaaacccggaucagcaaacaaacccaaagacgaacucgacuacgcaaacgacauugagaagaaaaucugcaaaauggaaaaaugcucaucaguacccgucacuaacauggaaaacaucaccuccggcuuccucggcccccuccuaguccuacaagccgguuucuuccuucuuacacgcauccuaaccaucccacaaucccuagacuccugguggacaucuuuaaacuuccuuggaggauccccugucugccucggccaaaacucccaauccccaaccucuaaccacucucccacauccugcccucccauaugccccgguuaccgcuggaugugccuccgccgcuucaucaucuuccucuucauacuccucuuaugccucaucuuccuccucguacuacucgacuaccaagguaugcuacccguaugcccucucauccccggcuccaccacaaccaacaccggccccugcaaaacaugcaccacccccgcacagggcaauuccauguuccccuccugcuguugcaccaaacccacagacggcaacuguaccugcauccccauccccuccucuugggcauuugccaaauaccucugggaaugggccuccguccgauucucuuggcuuucacuccucguucccuucguacaaugguucgucggccuaucacccaccgucuggcucuccgccaucuggaugaugugguacuggggcccuucacuuuacuccauagucagccccuucauaccacuccuccccaucuucuucugccuauggguauacaucuaaggacuaguuauaagacugacuagcccgaugggccucccaacgggcccuccuccccuccuugcaccgagauuaauaaaaaaaaaaaaaaaaaaaaaaaaaaaaaaaaaaaaaaaaaaaaaaaaaaaaaaaaaaaaaaaaugcaucccccccccccccccccccccccccccccccaaaggcucuuuucagagccaccagaauu

(The sequence listing continues in the following parts.)

1. A coding RNA for a vaccine comprising
a) at least one heterologous 5′ untranslated region (5′-UTR) and/or at least one heterologous 3′ untranslated region (3′-UTR); and
b) at least one coding sequence operably linked to said 3′-UTR and/or 5′-UTR encoding at least one antigenic protein derived from circumsporozoite protein (CSP) of a Malaria parasite, or an immunogenic fragment or immunogenic variant thereof:

2. Coding RNA of claim 1, wherein the Malaria parasite is selected from Plasmodium falciparum (Pf), Plasmodium knowlesi (Pk), Plasmodium ovale (Po), Plasmodium simiovale (Ps), or Plasmodium vivax (Pv).

3. Coding RNA of claim 1 or 2, wherein the Malaria parasite is Plasmodium falciparum (Pf), preferably Plasmodium falciparum 3D7.

4. Coding RNA of any one of claims 1 to 3, wherein the coding sequence additionally encodes at least one heterologous peptide or protein element selected from a heterologous signal peptide, a linker, a helper epitope, an antigen clustering domain, or a transmembrane domain.

5. Coding RNA of claim 4, wherein the heterologous signal peptide is derived from SPARC according to SEQ ID NO: 6208, Hslns-iso1 according to SEQ ID NO: 6207, HsALB according to SEQ ID NO: 6205, or IgE according to SEQ ID NO: 6206, or fragment or variant of any of these.

6. Coding RNA of claim 4, wherein the helper epitope is derived from P2 helper peptide according to SEQ ID NO: 6272, PADRE helper epitope according to SEQ ID NO: 6273, HBsAg carrier matrix according to SEQ ID NO: 6274, or fragment or variant of any of these.

7. Coding RNA of claim 4, wherein the antigen clustering domain is derived from from ferritin according to SEQ ID NO: 10162, lumazine-synthase (LS) according to SEQ ID NO: 10153, surface antigen of hepatitis B virus (HBsAg) according to SEQ ID NO: 6274, or fragment or variant of any of these.

8. Coding RNA of claim 4, wherein the transmembrane domain is derived from a transmembrane domain of HA according to SEQ ID NOs: 6302, or fragment or variant thereof.

9. Coding RNA of any one of the preceding claims, wherein the at least one antigenic protein comprises, preferably in N-terminal to C-terminal direction:
a) optionally, one heterologous secretory signal sequence selected from SEQ ID NOs: 6205-6208;
b) at least one protein derived from CSP of a Malaria parasite, or fragments or variants thereof;
c) optionally, at least one heterologous helper epitope selected from SEQ ID NOs: 6272, 6273, or 6274or fragments or variants thereof;
d) optionally, at least one heterologous antigen clustering domain selected from SEQ ID NOs: 6274, 10153, 10162, or fragments or variants thereof, and
e) optionally, at least one heterologous transmembrane domain selected from SEQ ID NOs: 6302 or fragments or variants thereof,
wherein a), b), c), d) and/or e) may be connected preferably via at least one peptide linker element selected from SEQ ID NOs: 6241-6244, 10141, 10147.

10. Coding RNA of any one of the preceding claims, wherein the at least one coding sequence encodes at least one of the amino acid sequences being identical or at least 70%, 80%, 85%, 86%, 87%, 88%, 89%, 90%, 91%, 92%, 93%, 94%, 95%, 96%, 97%, 98%, or 99% identical to any one of SEQ ID NOs:
1-36, 2081-2120, 2481-2886, 8742-8753, 10080, or an immunogenic fragment or immunogenic variant of any of these.

11. Coding RNA of any one of the preceding claims, wherein the at least one coding sequence comprises at least one nucleic acid sequence being identical or at least 70%, 80%, 85%, 86%, 87%, 88%, 89%, 90%, 91%, 92%, 93%, 94%, 95%, 96%, 97%, 98%, or 99% identical to any one of SEQ ID NOs: 37-328, 2121-2480, 2887-6134, 8754-8855, 10086-10139, or a fragment or variant of any of these sequences.

12. Coding RNA of any one of the preceding claims, wherein the at least one coding sequence is a codon modified coding sequence, wherein the amino acid sequence encoded by the at least one codon modified coding sequence is preferably not being modified compared to the amino acid sequence encoded by the corresponding wild type coding sequence.

13. Coding RNA according to claim 12, wherein the at least one codon modified coding sequence is selected from C maximized coding sequence, CAI maximized coding sequence, human codon usage adapted coding sequence, G/C content modified coding sequence, and G/C optimized coding sequence, or any combination thereof.

14. Coding RNA of claim 11 or 13, wherein the at least one coding sequence comprises a codon modified coding sequence comprising a nucleic acid sequence being identical or at least 70%, 80%, 85%, 86%, 87%, 88%, 89%, 90%, 91%, 92%, 93%, 94%, 95%, 96%, 97%, 98%, or 99% identical to any one SEQ ID NOs: 41-328, 2161-2480, 3293-6134, 8754-8855, 10092-10139 or a fragment or variant of any of these sequences.

15. Coding RNA of any one of claims 11 to 14, wherein the at least one coding sequence comprises a codon modified coding sequence comprising a nucleic acid sequence being identical or at least 70%, 80%, 85%, 86%, 87%, 88%, 89%, 90%, 91%, 92%, 93%, 94%, 95%, 96%, 97%, 98%, or 99% identical to any one of SEQ ID NOs: 41-328, 8754-8855 or a fragment or variant of any of these sequences.

16. Coding RNA of any one of claims 11 to 15, wherein the at least one coding sequence comprises a G/C optimized coding sequence comprising a nucleic acid sequence being identical or at least 70%, 80%, 85%, 86%, 87%, 88%, 89%, 90%, 91%, 92%, 93%, 94%, 95%, 96%, 97%, 98%, or 99% identical to any one of SEQ ID NOs: 41-112, 2161-2240, 3293-3698, 8754-8783, 10092-10103 or a fragment or variant of any of these sequences.

17. Coding RNA of any one of the preceding claims, wherein the coding RNA is an mRNA, a self-replicating RNA, a circular RNA, or a replicon RNA.

18. Coding RNA of any one of the preceding claims, wherein the coding RNA is an mRNA.

19. Coding RNA of any one of the preceding claims, wherein the coding RNA comprises a 5′-cap structure, preferably m7G, cap0, cap1, cap2, a modified cap0 or a modified cap1 structure.

20. Coding RNA of any one of the preceding claims, wherein the RNA comprises at least one poly(A) sequence, preferably comprising 30 to 150 adenosine nucleotides and/or at least one poly(C) sequence, preferably comprising 10 to 40 cytosine nucleotides.

21. Coding RNA of any one of the preceding claims, wherein the RNA comprises at least one histone stem-loop, wherein the histone stem-loop preferably comprises a nucleic acid sequence according to SEQ ID NOs: 6173 or 6174 or a fragment or variant thereof.

22. Coding RNA of any one of the preceding claims, wherein the at least one heterologous 3′-UTR comprises a nucleic acid sequence derived from a 3′-UTR of a gene selected from PSMB3, ALB7, alpha-globin, CASP1, COX6B1, GNAS, NDUFA1 and RPS9, or from a homolog, a fragment or a variant of any one of these genes.

23. Coding RNA of any one of the preceding claims, wherein the at least one heterologous 5′-UTR comprises a nucleic acid sequence derived from a 5′-UTR of a gene selected from HSD17B4, RPL32, ASAH1, ATP5A1, MP68, NDUFA4, NOSIP, RPL31, SLC7A3, TUBB4B and UBQLN2, or from a homolog, a fragment or variant of any one of these genes.

24. Coding RNA of any one of the preceding claims, comprising
a-1. at least one 5′-UTR derived from a 5′-UTR of a HSD17B4 gene, or from a corresponding RNA sequence, homolog, fragment or variant thereof and at least one 3′-UTR derived from a 3′-UTR of a PSMB3 gene, or from a corresponding RNA sequence, homolog, fragment or variant thereof; or
a-3. at least one 5′-UTR derived from a 5′-UTR of a SLC7A3 gene, or from a corresponding RNA sequence, homolog, fragment or variant thereof and at least one 3′-UTR derived from a 3′-UTR of a PSMB3 gene, or from a corresponding RNA sequence, homolog, fragment or variant thereof; or
i-2. at least one 5′-UTR derived from a 5′-UTR of a RPL32 gene, or from a corresponding RNA sequence, homolog, fragment or variant thereof and at least one 3′-UTR derived from a 3′-UTR of a ALB7 gene, or from a corresponding RNA sequence, homolog, fragment or variant thereof; or
i-3. at least one 3′-UTR derived from a 3′-UTR of a alpha-globin gene gene, or from a corresponding RNA sequence, homolog, fragment or variant thereof.

25. Coding RNA of any one of the preceding claims, wherein the coding RNA comprises or consists of an RNA sequence which is identical or at least 70%, 80%, 85%, 86%, 87%, 88%, 89%, 90%, 91%, 92%, 93%, 94%, 95%, 96%, 97%, 98%, or 99% identical to a nucleic acid sequence selected from the group consisting of SEQ ID NOs: 329-2080, 6312-8741, 8856-10079 or a fragment or variant of any of these sequences.

26. A composition comprising at least one coding RNA as defined in any one of claims 1 to 24, wherein the composition optionally comprises at least one pharmaceutically acceptable carrier.

27. Composition of claim 26, wherein the at least one coding RNA is complexed or associated with or at least partially complexed or partially associated with one or more cationic or polycationic compound, preferably cationic or polycationic polymer, cationic or polycationic polysaccharide, cationic or polycationic lipid, cationic or polycationic protein, cationic or polycationic peptide, or any combinations thereof.

28. Composition of claim 27, wherein the at least one coding RNA is complexed or associated with one or more lipids, thereby forming liposomes, lipid nanoparticles, lipoplexes, and/or nanoliposomes.

29. Composition of claim 28, wherein the at least one coding RNA is complexed with one or more lipids thereby forming lipid nanoparticles (LNP).

30. Composition of claim 29, wherein the LNP essentially consists of
(i) at least one cationic lipid;
(ii) at least one neutral lipid;
(iii) at least one steroid or steroid analogue; and
(iv) at least one a PEG-lipid,
wherein (i) to (iv) are in a molar ratio of about 20-60% cationic lipid, 5-25% neutral lipid, 25-55% sterol, and 0.5-15% PEG-lipid.

31. A vaccine comprising the coding RNA as defined in any one of claims 1 to 25, or the composition as defined in any one of claims 26 to 30.

32. Vaccine of claim 31, wherein the vaccine elicits an adaptive immune response.

33. A Kit or kit of parts, comprising the coding RNA as defined in any one of claims 1 to 25, the composition as defined in any one of claims 26 to 30, and/or the vaccine as defined in any one of claims 31 to 32, optionally comprising a liquid vehicle for solubilising, and, optionally, technical instructions providing information on administration and dosage of the components.

34. Coding RNA as defined in any one of claims 1 to 25, the composition as defined in any one of claims 26 to 30, the vaccine as defined in any one of claims 31 to 32, or the kit or kit of parts as defined in claim 33, for use as a medicament.

35. Coding RNA as defined in any one of claims 1 to 25, the composition as defined in any one of claims 26 to 30, the vaccine as defined in any one of claims 31 to 32, or the kit or kit of parts as defined in claim 33, for use in the treatment or prophylaxis of Malaria, or of a disorder related to such an infection.

36. A method of treating or preventing a disorder, wherein the method comprises applying or administering to a subject in need thereof the coding RNA as defined in any one of claims 1 to 25, the composition as defined in any one of claims 26 to 30, the vaccine as defined in any one of claims 31 to 32, or the kit or kit of parts as defined in claim 33.

37. Method of claim 36, wherein the disorder is an infection with Malaria, or a disorder related to such an infection.

38. Method of claims 36 to 37, wherein the subject in need is a mammalian subject, preferably a human subject.
